United States Patent Application Publication US 2007/0072175 A1 - sequence listing, part 9

SEQ ID NO: 23679 - DNA, 4587 bp, Macaca Mulatta
  misc_feature (1)...(4587): n = A,T,C or G
atgggcttcttgcccgagcttctcctactggcctcattcttcccaccagnnnccaggccaggcctcatggggcgtctccagtccccaggatgtgcagggtgaagggggtcttgcctgcttatcccctgcatcttcagctttacgggcgacgtggaggtgcctgatggcatcacgaccatctggtattacgnnnnnnnnnnnnnnnnnnnnnnnnnnnnnnnnnnnnnnnnnnnnnnnnnnnnnnnnnnnnnnnnnnnnnnnnnnnnnnnnnnnnnnnnnnnnnnnnnnnnnnnnnnnnnnnnnnnnnnnnnnnnnnnnnnnnnnnnnnnnnnnnnnnnnnnnnnnnnnnnnnnnnnnnnnnnnnnnnnnnnnnnnnnnnnnnnnnnnnnnnnnnnnnnnnnnnnnnnnnnnagaggagcccagggttcccaccatcgcctccccggtggagcttctcgagggcacagaggtggacttcaactgctccaccccctacgcatgcctgcaggagcaggtcagactgcaatggcaaggccaggaccctgctcgctctgtcaccttcagcagccagaagtttgagcccactggcgtcagccagctggagaccctccacatggccatgtcctggcaggaccacggccggatcctgcgctgccagctctccgtggccagtcacagggcccacagcgagattcacctccnnnnnnnnnnnnnnnnnnnnnnnnnnnnnnnnnnnnnnnnnnnnnnnnnnnnnnnnnnnnnnnnnnnnnnnnnnnnnnnnnnnnnnnnnnnnnnnnnnnnnnnnnnnnnnnnnnnnnnnnnnnnnnnnnnnnnnnnnnnnnnnnnnnnnnnnnnnnnnnnnnnnnnnnnnnnnnnnnnnnnnnnnnnnnnnnnnnnnnnnnnnnnnnnnnnnnnnnnnnnnnnnnnnnnnnnnnnnnnnnnnnnnnnnnnnnnnnnnnnnnnnnnnnnnnnnnnnnnnnnnnnnnnnnnnnnnnnnnnnnnnnnnnnnnnnnnnnnnnnnnnnnnnnnnnnnnnnnnnnnnnnnnnnnnnnnnnnnnnnnnnnnnnnnnnnnnnnnnnnnnnnnnnnnnnnnnnnnnnnnnnnnnnnnnnnnnnnnnnnnnnnnnnnnnnnnnnnnnnnnnnnnnnnnnnnnnnnnnnnnnnnnnnnnnnnnnnnnnnnnnnnnnnnnnnnnnnnnnnnnnnnnnnnnnnnnnnnnnnnnnnnnnnnnnnnacccgcctctcaccccagtcctgacagccttcctggagacccaggcgggacttgtgggcatccttcactgctctgtggtcagtgagcccctggccacactggtgctgtcacacaggggtcatatcctggcctccacctccggggacagtgatcacagcccacgcttcagtggtacctctggtcccaactccctgcgcctggagatccgagacctggaggaagctgacagtggggagtacaagtgctcagccaccaactcccttggaaatgcaacctccaccctggacttccatgccaatnnnnnnnnnnnnnnnnnnnnnnnnnnnnnnnnnnnnnnnnnnnnnnnnnnnnnnnnnnnnnnnnnnnnnnnnnnnnnnnnnnnnnnctgatgcgcgcttctcctggtacctgaatggagccctgcttcacgaggggcccagcagcagcctcctgctccccgcggcctccagcactgacgctggctcataccattgctgggcccgggacggccacagtgccagtggcccctcttcgccagccatcctcactgtgctctnacccccctcgccaaccaacgttcaccaccaggctggacctcgatgccgctggggccggggctggacggcaaggcctccttttgtgccgtgtggacagcgacccccccgccaggctgcagctgctccacaaggaccatgttgtggccacttccctgccgtcagggggtggctgcagcacctgtgggggctgttccccacgcatgaaggtcaccaaagcccccaacttgctgcgcgtggagattcacaaccctttgctggaggaggagggcttgtacctctgtgaggccagcaatgccctgggcaacgcctccgcctcagccaccttcaatggccaggnnnnnnnnnnnnnnnnnnnnnnnnnnnnnnnnnnnnnnnnnnnnnnnnnnnnnnnnnnnnnnnnnnnnnnnnnnnnnnnnnnnnnnnnnnnnnnnnnnnnnnnnnnnnnnnnnnnnnnnnnnnnnnnnnnnnnnnnnnnnnnnnnnnnnnnnnnnnnnnnnnnnnnnnnnnnnnnnnnnnnnnnnnnnnnnnnnnnnnnnnnnnnnnnnnnnnnnnnnnnnnnnnnnnnnnnnnnnnnnnnnnnnnnnnnnnnnnnnntcccccggaccctccaaagctgtcagccctcctagacattggccagggccacatggctgtgtttgtctgcactgtcgacagccgccccctggcccggctggccctgttccatggggagcacctcctggctactagcctgggtccccaggtcccattccgtggtcggctccaggctaaggctgaggccaactccctgaagttagaggtccgagaattgggccttggggactctggcagctaccgctgtgaggccacaaatgttcttggatcagccaacacctcactcttcttccaggtccgaggnnnnnnnnnnnnnnnnnnnnnnnnnnnnnnnnnnnnnnnnnnnnnnnnnnnnnnnnnnnnnnnnnnnnnnnnnnnnnnnnnnnnnnnnnnnnnnnnnnnnnnnnnnnnnnnnnnnnnnnnnnnnnnnnnnnnnnnnnnnnnnnnnnnnnnnnnnnnnnnnnnnnnnnnnnnnnnnnnnnnnnnnnnnnnnnnnnnnnnnnnnnnnnnnnnnnnnnnnnnnnnnnnnnnnnnnnnnnnnnnnnnnnnnnnnnnnnnnnnnnnnnnnnnnnnnnnnnnnnnnnnnnnnnnnnnnnnnnnnnnnnnnnnnnnnnnnnnnnnnnnnnnnnnnnnnnnnnnnnnnnnnnnnnnnnnnnnnnnnnnnnnnnnnnnnnnnnnnnnnnnnnnnnnnnnnnnnnnnnnnnnnnnnnnnnnnnnnnnnnnnnnnnnnnnnnnnnnnnnnnnnnnnnnnnnnnnnnnnnnnnnnnnnnnnnnnnnnnnnnnnnnnnnnnnnnnnnnnnnnnnnnnnnnnnnnnnnnnnnnnnnnnnnnnnnnnnnnnnnnnnnnnnnnnnnnnnnnnnnnnnnnnnnnnnngctgtgaatgtgcaggtgttgactgaaaccactgtgcgggaggggcagctggtgaacctgacctgccttgtgtgtaccactcacccggcccagctcacctacacatggtaccaggatgggcagcagcgcctggatggccgctccatccccctgcccaacgtcacagtcagggatgccacctcctaccgctgtggtgtgggcccccctggtcaggcaccccgcctctccagacctatcaccttggacgtcctctcgcaccccgcaacctgcgcctgacttacctcctggagagccgtggtgggcagatggccctggtactgtgcactgtagacagccgcccgcctgcccaactggccctcagccacgccggtcgcctcttggcctcctcgacagcagcctctatccccaacactctgcgcctggagctgcgggagccacagcccagtgacgagggtttctatagctgctctgccacagccctctgggccagccaacacgtcccnnnnnnnnnnnnnnnnngtgtgcgggtgatcctggctccagaggctactgtgcctgaaggtgcccccatcacagtgacctgtgaggaccctgctgcccncccacccaccctctatnnnnnnnnnnnnnnnnnnnnnnnnnnnnnnnnnnnnnnnnnnnnnnnnnnnnnnnnnnnnnnnnnnnnnnnnnnnnnnnnnnnnnnnnnnnnnnnnnnnnnnnnnnnnnnnnnnnnnnnnnnnnnnnnnnnnnnnnnnnnnnnnnnnnnnnnnnnnnnnnnnnnnnnnnnnnnnnnnnnnnnnnnnnnnnnnnnnnnnnnnnnnnnnnnnnnnnnnnnnnnnnnnnnnnnnnnnnnnnnnnnnnnnnnnnnnnnnnnnnnnnnnnnnnnnnnnnnnnnnnnnnnnnnnnnnnnnnnnnnnnnnnnnnnnnnnnnnnnnnnnnnnnnnnnnnnnnnnnnnnnnnnnnnnnnnnnnnnnnnnnnnnnnnnnnnnnnnnnnnnnnnnnnnnnnnnnnnnnnnnnnnnnnnnnnnnnnnnnnnnnnnnnnnnnnnnnnnnnnnnnnnnnnnnnnnnaggtgcacgcgtggtggcggagcctggcctgtatgtgcctgagggtgctgccctgaacctcagctgccgcctcctgggtggccctgggcctatgggcaactccacctttgcatggttctggaatgaccagcggctgcacgtggaccctgtgcccactctcgccttcacccacgtggctcgtgctcaagctgggatgtaccactgcctggctgagctccctactggggctgctgcctccactccggtcatgctccatgtgctc

SEQ ID NO: 23680 - DNA, 139 bp, Macaca Mulatta
ggatccagaatccgcctggtttaaaaccttcatcctgatggcagccattaatgtgactggcctaattttctaccttatagttgctaaagcagaaattcaggactgggctaaagaaagacaacacacacgtctctgaagg

SEQ ID NO: 23681 - DNA, 940 bp, Macaca Mulatta
ccccagagacctctgagctcctgctctttctcccctttgtgaggcccatggatggaggagtccagcaggcaaaaagtggaggatacacctacatggcgtgccttgtcagacagtgaatccttgctcacacgtgcactggatgaaaaggtggctgagttggtgcagttgcttctcctcaagtaccaaccaaaggagcctgtcacaaaggctgagatgctgaagactgtcatcaagaagtataaggactgctttcctatgatcttcgggaaagctcatgagttcacagaactaatgattggcattgccctgactgagatggaccccaacaaccactcctatgtctttgaaaacagtagaactcagcgaccaggggaggctgagtgatggccagggaatgtccaagaaccacttcctaattcgtattctgagtgtggtctacatcaagggcagctgtgcctctgaggacgtcatttgggaagcactgaattcgatagggtgtatgctgggagggaggccttcatttatgggaagcccagggaactcctcactgtagattgggtgcagagaaagtacctggagcaccgggaggtgcctaagaactctcctccacattatgaattattgtgaagcctaagatcccattcagaaatcaaaaagaggaaagtcctagagttttttggcaagctcgacagtaccattgctaattcctttccatcctggtgtgtggatgctttgaaagatgtggaaggcagagaccaggctgtaattgacaccacagatgatgctacttctacggccagtgcaagccccagtatcatgtccaccaacttctgtcctgagtcaagtctgaggctgagtccccttctgcgtttgaagagggcagtcgaggttctaggcaggggagggcgagagtggagctggagggaccacagtgttcttt

SEQ ID NO: 23682 - DNA, 624 bp, Macaca Mulatta
gagccgaggttcccgggactgggaaccctagcccgcgagaccctgcaaattttcttcctcacaactgggagaagattcactggccgaatggcagcagtagatgacttgcaatttgaagaatttggcaatgcagccacttctctggcagcaaacccagatgccaccacagtaaacattgaggatcctggtgaaaccccaaaacatcagccaggacccccaagaggctcaggaagagaagaagatgatgagttactgggaaatgatgactctgacaaaactgagttacttgctggacagaagaaaagctcgcccttctggacatttgaatactaccaaacattctttgatgtggacacctaccaggtctttgacagaattaaagggtctcttttgccaatacccgggaaaaactttgtgaggttatatatccgcagcaatccagatctctatggccccttttggatatgtgccacgttggtctttgccatagcaattagtgggaatctttccaacttcttgatccatctgggagagaagacataccattatgtgcccgaattccgaaaagtgtccatagcagctaccatcatctatgcctacgcctggctggttcctcttgcactc

SEQ ID NO: 23683 - DNA, 2153 bp, Macaca Mulatta
  misc_feature (1)...(2153): n = A,T,C or G
agaaaaggtcatccttggagtagagggtcaacaactggttcatcctaaaaagcttcctctgatgcagaagcgagatattggacacacccatgatgatgacatnnnnaaacgtatgaagaagaattgatgtatgaaataaaactaaatagaaaaaccttagtccttcatcttctaagatccagnnnnnnnnnnnnnnnnnnnnnnnnnnnnnnnnnnnnnnnnnnnnnnnnnnnnnnnnnnnnnnnnnnnnnnnnnnnnnnnnnnnnnnnnnnnnnnnnnnnnnnnnnnnnnnnnnnnnnnnnnnnnnnnnnnnnnnnnnnnnnnnnnnnnnnnnnnnnnnnnnnnnnnnnnnnnnnnnnnnnnnnnnnnnnnnnnnnnnnnnnnnnnnnnnnnnnnnnnnnnnnnnnnnnnnnnnnnnnnnnnnnnnnnnnnnnnnnnnnnnnnnnnnnnnnnnnnnnnnnnnnnnnnnnnnnnnnnnnnnnnnnnnnnnnnnnnnnnnnnnnnnnnnnnnnnnnnnnnnnnnnnnnnnnnnnnnnnnnnnnnnnnnnnnnnnnnnnnnnnnnnnnnnnnnnnnnnnnnnnnnnnnnnnnnnnnnnnnnnnnnnnnnnnnnnnnnnnnnnnnnnnnnnnnnnnnnnnnnnnnnnnnnnnnnnatttataaaaccttaaacatccatgtgacgttggttggcattgaaatatggacannnnnnnnnnnnnnnnnnnnnnnnnnnnnnnnnnnnnnnnnnnnnnnnnnnnnnnnnnnnnnnnnnnnnnnnnnnnnnnnnnnnnnnnnnnnnnnnnnnnnnnnnnnnnnnnnnnnnnnnnnnnnnnnnnnnnnnnnnnnnnnnnnnnnnnnnnnnnnnnnnnnnnnnnnnnnnnnnnnnnnnnnnnnnnnnnnnnnnnnnnnnnnnnnnnnnnnnnnnnnnnnnnnnnnnnnnnnnnnnnnnnnnnnnnnnnnnnnnnnnnnnnnnnnnnnnnnnnnnnnnnnnnnnnnnnnnnnnnnnnnnnnnnnnnnnnnnnnnnnnnnnnnnnnnnnnnnnnnnnnnnnnnnnnnnnnnnnnnnnnnnnnnnnnnnnnnnnnnnnnnnnnnnnnnnnnnnnnnnnnnnnnnnnnnnnnnnnnnnnnnnnnnnnnnnnnnnnnnnnnnnnnnnnnnnnnnnnnnnnnnnnnnnnnnnnnnnnnnnnnnnnnnnnnnnnnnnnnnnnnnnnnnnnnnnnnnnnnnnnnnnnnnnnnnnnnnnnnnnnnnnnnnnnnnnnnnnnnnnnnnnnnnnnnnnnnnnnnnnnnnnnnnnnnnnnnnnnnnnnnnnnnnnnnnnnnnnnnnnnnnnnnnnnnnnnnnnnnnnnnnnnnnnnnnnnnnnnnnnnnnnnnnnnnnnnnnnnnnnnnnnnnnnnnnnnnnnnnnnnnnnnnnnnnnnnnnnnnnnnnnnnnnnnnnnnnnnnnnnnnnnnnnnnnnnnnnnnnnnnnnnnnnnnnnnnnnnnnnnnnnnnnnnnnnnnnnnnnnnnnnnnnnnnnnnnnnnnnnnnnnnnnnnnnnnnnnnnnnnnnnnnnnnnnnnnnnnnnnnnnnnnnnnnnnnnnnnnnnnnnnnnnnnnnnnnnnnnnnnnnnnnnnnnnnnnnnnnnnnnnnnnnnnnnnnnnnnnnnnnnnnnnnnnnnnnnnnnnnnnnnnnnnnnnnnnnnnnnnnnnnnnnnnnnnnnnnnnnnnnnnnnnnnnnnnnnnnnnnnnnnnnnnnnnnnnnnnnnnnnnnnnnnnnnnnnnnnnnnnnnnnnnnnnnnnnnnnnnnnnnnnnnnnnnnnnnnnnnnnnnnnnnnnnnnnnnnnnnnnnnnnnnnnnnnnnnnnnnnnnnnnnnnnnnnnnnnnnnnnnnnnnnggatgaccatggactccagtgccactgtgaggaaggacaggcacctgtagcctgggaagaaaccttaaatgttaccannnnnnnnnnnnnnnnnnnnnnnnnnnnnnnnnnnnnnnnnnnnnnnnnnnnnnnnnnnnnnnnnnnnnnnnnnnnnnnnnnnnnnnnnnnnnnnnnnnnnnnnagcccacctatggaaaccctgggagtggagaataaaggatactttggtgatgagcagcagatgaggactgagccaatcctgccagaaattcatttcctaaa

SEQ ID NO: 23684 - DNA, 793 bp, Macaca Mulatta
gggacagtattctatcattcagtaattttggttaacgattttaacacttctccgtgtatttaatttcaaattgttttttaattgcttttatgctgctttgttaggacagatgtgttttgaatgtactattataagaagaattctgtgtatcttaaactacgaccttctaaaattttatttccataagtacttctgtggccttgagtattttttaaaaggctcaactgtaagcctcttagccaactggataaatatttggggtcaccttgccattgaaagcagaaagcagttgtgacacagctttcccttcagagagccattgagaaacagttctcaaataggaaatccttcttttactaatgcggacatatagattattcgtattatagtttgtagaactacctagttcagaatcttgactgccagttttcttggtttcttaggcttaaattttcattgaccattgaaacagtttagatgccttttgaaaggaatgtaacgaagatttagcctctgactatatgtgtgtctcttctgaaataataatggagagtatactgtagattacatgtttacccatcaaatctgacttaaaaggttaaatggaaggttttataagtaaggtaattgattggaatggagtagggggaggagttgtggggggatagtgtgcatttcagtctccttatgcatagataaatttaggggaatttggatgtattatgccactttttatttggggttggtaaaaatgtgtttaaatccctgttccattgaaacctccccaatcaac

SEQ ID NO: 23685 - DNA, 336 bp, Macaca Mulatta
ttacaacctgggtggcacccgagagccatacaatattgacgtagaccacaggaacatggccaatggacagccgcacagtgtcaacatcacccgccacgagaagaccatcattctcaagctcgatcattatccgtctgtgagttaccatctgccaagttcatccgacaccctcttcaattctcccaagttgctctttctgggaaaagttatagaaacagggaaaattgaccaagagattcacaaatacaataccccaggattcactggttgcctctccagagtccagttcaaccagatcgcccctctcaaggctgccttgaggcagacaaacgccta

SEQ ID NO: 23686 - DNA, 293 bp, Macaca Mulatta
gtgtgacagtctcgcattctgtttgtctcgtggggggaggtggacagtcctgcggaaatgtgtcttgtctccatttgggtaaaaggaaccaaccaacaaacaatgccatcactggaatttcccaccgctttgtgagccatgtcatatgacctagtaaactttgtaccgattcaaagacctgagtgatgcttaatggctgtttacggggggacaggtggaggagggcgcggtttcttgttatgtggcaaagaccaaacattgggggagttttgtggccttctggatggaggagg

SEQ ID NO: 23687 - DNA, 4812 bp, Macaca Mulatta
  misc_feature (1)...(4812): n = A,T,C or G
agggctgcggacggcctggacacctgcccaattccacccaagcaggccaggccagagaatggggagtacggcccctccaccatgggccagagctcggccttccagctgagtgcagatgccagcagtggctccttgtcgccaggcagcaggccgtcggggggcgtggaggcactgagggctgcaggccctgcgtccccgcctgaggaggaccccgagcgcacgaagcacannnnnnnnnnnnnnnnnnnnnnnnnnnnnnnnnnnnnnnnnnnnnnnnnnnnnnnnnnnnnnnnnnnnnnnnnnnnnnnnnnnnnnnnnnnnnnnnnnnnnnnnnnnnnnnnnnnnnnnnnnnnnnnnnnnnnnnnnnnnnnnnnnnnnnnnnnnnnnnnnnnnnnnnnnnnnnnnnnnnnnnnnnnnnnnnnnnnnnnnnnnnnnnnnnnnnnnnnnnnnnnnnnnnnnnnnnnnnnnnnnnnnnnnnnnnnnnnnnnnnnnnnnnnnnnnnnnnnnnnnnnnnnnnnnnnnnnnnnnnnnnnnnnnnnnnnnnnnnnnnnnnnnnnnnnnnnnnnnnnnnnnnnnnnnnnnnnnnnnnnnnnnnnnnnnnnnnnnnnnnnnnnnnnnnnnnnnnnnnnnnnnnnnnnnnnnnnnnnnnnnnnnnnnnnnnnnnnnnnnnnnnnnnnnnnnnnnnnnnnnnnnnnnnnnnnnnnnnnnnnnnnnnnnnnnnnnnnnnnnnnnnnnnnnnnnnnnnnnnnnnnnnnnnnnnnnnnnnnnnnnnnnnnnnnnnnnnnnnnnnnnnnnnnnnnnnnnnnnnnnnnnnnnnnnnnnnnnnnnnnnnnnnnnnnnnnnnnnnnnnnnnnnnnnnnnnnnnnnnnnnnnnnnnnnnnnnnnnnnnnnnnnnnnnnnnnnnnnnnnnnnnnnnnnnnnnnnnnnnnnnnnnnnnnnnnnnnnnnnnnnnnnnnnnnnnnnnnnnnnnnnnnnnnnnnnnnnnnnnnnnnnnnnnnnnnnnnnnnnnnnnnnnnnnnnnnnnnnnnnnnnnnnnnnnnnnnnnnnnnnnnnnnnnnnnnnnnnnnnnnnnnnnnnnnnnnnnnnnnnnnnnnnnnnnnnnnnnnnnnnnnnnnnnnnnnnnnnnnnnnnnnnnnnnnnnnnnnccagggctccccacgctgaacccccagctgctagaggcatggaagaatgaagtgaaggagaaaggccacgtcaactgtcccannnntgctgtgaagccatctactccagtgtgtccggactcaaggctcatcttgccagctgcagcaagnnnnnnnnnnnnnnnnnnnnnnnnnnnnnnnnnnnnnnnnnnnnnnnnnnnnnnnnnnnnnnnnnnnnnnnnnnnnnnnnnnnnnnnnnnnnnnnnnnnnnnnnnnnnnnnnnnnnnnnnnnnnnnnnnnnnnnnnnnnnnnnnnnnnnnnnnnnnnnnnnnnnnnnnnnnnnnnnnnnnnnnnnnnnnnnnnnnnnnnnnnnnnnnnnnnnnnnnnnnnnnnnnnnnnnnnnnnnnnnnnnnnnnnnnnnnnnnnnnnnnnnnnnnnnnnnnnnnnnnnnnnnnnnnnnnnnnnnnnnnnnnnnnnnnnnnnnnnnnnnnnnnnnnnnnnnnnnnnnnnnnnnnnnnnnnnnnnnnnnnnnnnnnnnnnnnnnnnnnnnnnnnnnnnnnnnnnnnnnnnnnnnnnnnnnnnnnnnnnnnnnnnnnnnnnnnnnnnnnnnnnnnnnnnnnnnnnnnnnnnnnnnnnnnnnnnnnnnnnnnnnnnnnnnnnnnnnnnnnnnnnnnnnnnnnnnnnnnnnnnnnnnnnnnnnnnnnnnnnnnnnnnnnnnnnnnnnnnnnnnnnnnnnnnnnnnnnnnnnnnnnnnnnnnnnnnnnnnnnnnnnnnnnnnnnnnnnnnnnnnnnnnnnnnnnnnnnnacaggggctgcagtgcagagcaggcagatggcctttggcctccgggctcggcttcctcaggccctgccgggtccccaccctggctccctcaaggctcaggcatccctggtgacctgtggttctgggctggtgagggcacctgagcgactggcagccggcagccaccatcctggcctcacctccacccaacactggaactccagcacccccagctacctcccaggacagacccccgtctgaccactgccatgctgacccgacaggctcctgcctggccttggccannnnnnnnnnnnnnnnnnnnnnnnnnnnnnnnnnnnnnnnnnnnnnnnnnnnnnnnnnnnnnnnnnnnnnnnnnnnnnnnnnnnnnnnnnnnnnnnnnnnnnnnnnnnnnnnnnnnnnnnnnnnnnnnnnnnnnnnnnnnnnnnnnnnnnnnnnnnnnnnnnnnnnnnnnnnnnnnnnnnnnnnnnnnnnnnnnnnnnnnnnnnnnnnnnnnnnnnnnnnnnnnnnnnnnnnnnnnnnnnnnnnnnnnnnnnnnnnnnnnnnnnnnnnnnnnnnnnnnnnnnnnnnnnnnnnnnnnnnnnnnnnnnnnnnnnnnnnnnnnnnnnnnnnnnnnnnnnnnnnnnnnnnnnnnnnnnnnnnnnnnnnnnnnnnnnnnnnnnnnnnnnnnnnnnnnnnnnnnnnnnnnnnnnnnnnnnnnnnnnnnnnnnnnnnnnnnnnnnnnnnnnnnnnnnnnnnnnnnnnnnnnnnnnnnnnnnnnnnnnnnnnnnnnnnnnnnnnnnnnnnnnnnnnnnnnnnnnnnnnnnnnnnnnnnnnnnnnnnnnnnnnnnnnnnnnnnnnnnnnnnnnnnnnnnnnnnnnnnnnnnnnnnnnnnnnnnnnnnnnnnnnnnnnnnnnnnnnnnnnnnnnnnnnnnnnnnnnnnnnnnnnnnnnnnnnnnnnnnnnnnnnnnnnnnnnnnnnnnnnnnnnnnnnnnnnnnnnnnnnnnnnnnnnnnnnnnnnnnnnnnnnnnnnnnnnnnnnnnnnnnnnnnnnnnnnnnnnnnnnnnnnnnnnnnnnnnnnnnnnnnnnnnnnnnnnnnnnnnnnnnnnnnnnnnnnnnnnnnnnnnnnnnnnnnnnnnnnnnnnnnnnnnnnnnnnnnnnnnnnnnnnnnnnnnnnnnnnnnnnnnnnnnnnnnnnnnnnnnnnnnnnnnnnnnnnnnnnnnnnnnnnnnnnnnnnnnnnnnnnnnnnnnnnnnnnnnnnnnnnnnnnnnnnnnnnnnnnnnnnnnnnnnnnnnnnnnnnnnnnnnnnnnnnnnnnnnnnnnnnnnnnnnnnnnnnnnnnnnnnnnnnnnnnnnnnnnnnnnnnnnnnnnnnnnnnnnnnnnnnnnnnnnnnnnnnnnnnnnnnnnnnnnnnnnnnnnnnnnnnnnnnnnnnnnnnnnnnnnnnnnnnnnnnnnnnnnnnnnnnnnnnnnnnnnnnnnnnnnnnnnnnnnnnnnnnnnnnnnnnnnnnnnnnnnnnnnnnnnnnnnnnnnnnnnnnnnnnnnnnnnnnnnnnnnnnnnnnnnnnnnnnnnnnnnnnnnnnnnnnnnnnnnnnnnnnnnnnnnnnnnnnnnnnnnnnnnnnnnnnnnnnnnnnnnnnnnnnnnnnnnnnnnnnnnnnnnnnnnnnnnnnnnnnnnnnnnnnnnnnnnnnnnnnnnnnnnnnnnnnnnnnnnnnnnnnnnnnnnnnnnnnnnnnnnnnnnnnnnnnnnnnnnnnnnnnnnnnnnnnnnnnnnnnnnnnnnnnnnnnnnnnnnnnnnnnnnnnnnnnnnnnnnnnnnnnnnnnnnnnnnnnnnttgtccttgccaccatggcgggaggtgggtggacctgaacacctctgcagggtgtcgtgcgccttttcagcctctcaggtacttggcccttggggaggagagaagagggtctggtttttgctaggggtgagtttctgggacactcccaaagcccacagataatccctggtgtgggaagaggagtcctggataccttgatgcttagcactttaaccccctttgtctttaaggtaggcgtgggggctactgtcagaagtggctgttgggtctgacccctcctttcttccctccctctcccacatgctggtctgcagagcactcctcccaaggggtagggccctgggtggagctcagcatgttctgcccactccctacgctggcccacataggcctccaggagccctcagtgagagggaccagcatagcagacccccagagtgtggtgggcgccggccctgcccgggacccagtcggggccctttctgcagctctacctctggctcagcgcacgccccctgccctaagaacaggaaagggcccggaaaggctgactcaccgggccgacactcacgaaaatgggatgcactnnnnnnnnnnnnnnnnnnnnnnnnnnnnnnnnnnnnnnnnnnnnnnnnnnnnnnnnnnnnnnnnnnnnnnnnnnnnnnnnnnnnnnngagcctgaccccgggaggggccgcccccacgtgccctgtttggcgggccccaggcggctcccccaggccggggtctggggccccaggctctcccctgcctcgcggccgcgtgtcctgtgctttgggtttcttggtttgggttttttaatgccagttctcagtacataagtgcattttgaaagaggttccagctatcacttgtaacnnnnnnnnnnnnnnnnnnnntctatctacaaagtgtttatttgcgagatgtttcgacggtgagttcgggccccgcccgccttgtgaccatctgtccccggtcctcgtccccgccccgcgccctggtcccgaatggcgtgcggacgggccatcactgtatgtattaaaatgactgtatcaaataaatgtttattg

SEQ ID NO: 23688 - DNA, 242 bp, Macaca Mulatta
  misc_feature (1)...(242): n = A,T,C or G
ccacatctcagcaggtgctcaacgtgtggtcatctccgcaccctcgccagacgcaccaacgttcgtcatgggtgtgaatgaaaacaactataaccctggctccatgaacattgtgagnagcaacgcgtcctgcaccaccaactgcttggccccccttgccaaggtcatccacgagcgatttgggatcgtggaagggttgatgngaccacagtccattcctacacggccacccagaagacagt

SEQ ID NO: 23689 - DNA, 230 bp, Macaca Mulatta
ctgaccaaatgcttattgtgtaagataaaccacttgaatcatggaggatccaagttgagatttgaaatctgtgacgtttttacaagggtaaaatgttaccagtattttaattactgttatacacagctttatgatatcaaagactcattgcttaattctaagacttttgaattttcattttttaaaaagatgtacaaaacagtttaaaataaactttaattcatatataa

SEQ ID NO: 23690 - DNA, 190 bp, Macaca Mulatta
gatcagtatccaggttctaggacaggacatcttatcagagaagatggaatctccaagctgccaagtgggggaagtggagccccatcttgaagtggtgcctcaggaattgggacttgagaattcttcggtagggcctggggagcttctgagccacatcgtgaaagaggaatctgacacggaagcagaacta

SEQ ID NO: 23691 - DNA, 545 bp, Macaca Mulatta
aaggggacgggcccctgacactgtccctttccttccccagatggactcgtgggcatggccattgtgggaggcatggccctcggtgtggcgggactggccggactcatcggacttgctgtgtccaagtccaaatcctgaaggaggcgtaggagcccgtggagaatgctccaggagggcccatccatcctcgctgtcccttccctgttctccccctgcacccctgtctctgtcctctgtggccttcaactaacttctgctcccctgagacccgttcttcagccccaaatcatgtgctttgggatgagtgtaaataaaacggggctgtggcttgggaacccccgtgtctgcactgaggggaggggtgggttccgaacgctgggcacagggggcggaggtgtcactcctggtcctctcctgcccctgccctccaggttggcacagggttctttgtccactgcgcagcccagagcccacacccctccttcctccctttcctgaagccacgtccttgagagtgccgggcagctcggagacacggggctttt

SEQ ID NO: 23692 - DNA, 107 bp, Macaca Mulatta
aggaacagtttctggtcccagatcacacgatcaaagacatcagtggtgcttcttttgccggtttctgggtaatctgctttcagaagtcaccatcttccgtagagggc

SEQ ID NO: 23693 - DNA, 419 bp, Macaca Mulatta
cccggacagcacagcaataaatggtgtgattgcgtggacatggtggctctgttcttggccaagtttcccctccttctgcccaggactccactgctaattcgggcccatcttcctccccaaggaagacaaattctttttctagcactggagcagggaggtggggtgggcggtaaacagacaggctctggcagtgcagatctgctgatcctcagagcctgccaggagccagactcttggcagagcagtgccacttctgctgggctgacctgcagccgagagcctgcccgccccggagacaccgtgagggaatggatcacgtgggagcatctatgtgcaagtctcacttgggtgtgtgtatgctgtgtgttgtatgcctgttttagttgtaaagtaggcctggtatttaaaaccttgtcttt

SEQ ID NO: 23694 - DNA, 1144 bp, Macaca Mulatta
ggtgttaaagacacttaagaagatgaaataatattcaaatttcattttttcctttttccatttatctgtggaaaccaacagatattgctctatattttttgtattagtatggtttgagacaacatagggaaaatattcacatttgtagattaagctggaattataatgagagcaataagaacaaatttattttgcttaccacagtgttataactggttctagaaatttgaggtctttataacttaattatgtttaataaaaatagagtctgccttgtactacagatgtaatttatttgtataatgcagacagacccaaagtggcactgaatttccttgctcaccttttaaaaacttgttccttaattttagccagaaagctaaaaaacattagtaatgataaatgtgaacatttttgcttattcattgaatatttttctgtaattttcagcacttatgtatacactttttctgtacttactagggtaaggcagatttatttttatgatttgtttaggaattatttgattttataatggtaattttcatgatgataatgtttttggttatttggaaagatagtttagagatgaaagttttttttgggtaactatcccgcagctgacaataaatgtgaaaatttccacaaaaatatccaaccctatgtggactaaaacacaacagttttttttaaaaagggagatagaaaataaattgttttgttggagtgcattttagtaagcctttgcagtaaaacgactgttgtaactactaaaccaaatttagttttcacagcatggttttgttgtttttcccttgtttttctgaggtaaattttatgttatatccttcagtattttaacactactttggcagtttacacattactttttgtttttccttcctttttgtgaaatttattaagttgtggttcttattgataacagtattatataatgtttgcttaattatatcatgtgatgctcagttctattttgatttattcattggtattcacttttacctttaaagtttacttgtagcaaatatgtttacattgataaagccagatatgttttgacaatgaaatttacatatcaagtactgcaaataaaaggtggttgctatgatatatgcttagggag

SEQ ID NO: 23695 - DNA, 501 bp, Macaca Mulatta
tcccatggcaggtcccatcgtggcagtcgtgttgtgggaggatggtgcgctgctgcccgtgtaccctgtgagatgaatcctgcctctgggaggcacagccgggatggggtgagggaccccctcagctgtccgggaagcgtcccctgccctgtgcttcctccaggcatcctggtgcactcccaagcacggtgcccagtggcgggtgcccaggaccttcaccctgacccatgggtgacttcccttggggactccacgcctttcactgggactgggatggagagcgacctgtccatggcagaagggctgcacctgaggtgcttgaagcaacaccaagggccacagtcccagcagctccagcctccgcgtgctggatgccaagtcctgtgcccaggacacgcaggtggaggcacgggtgaccttgatgctaccacctatgtgccccgaggttgggcagtggctgcctctgctgtggaggcctatgaaggacacggagtatgcctc

SEQ ID NO: 23696 - DNA, 676 bp, Macaca Mulatta
  misc_feature (1)...(676): n = A,T,C or G
gcttttcctcggtcacagtgcccagattgctgcagaacatgcagaaccacgacccatccatcccctatgcggactgcctggcccaaatgtacttcttcttgtatttttcagatctggaaagcttcctccttgtggccatggcttatcactgctctgtggctatttgctttcctctgcacgacaccactgtcgtgagccccaagtgttgccttgctctgctggcaccctcctggctgctgaccactgcccatgccacacattgcaccttgctcatgaccaggctgtccttctgtgctgacaaggtgattcctcactttttctgtgatacatctcccttgttgaagctggccagctccaacatgcaagtcaatgggttggtgannnnnnnnnnnnnnnnntcatccttgtcatcccattcctactcctcatcatgtcctgtgcaagaatcgtctccaccatcctcagggccccttctgctgggggcatccagaaggctttctccagctgtggctccctcctgtctgtggtgtctctcttctatgggacaatgattggtctctacttgtgcccatcgacgaatcatagcgctgtgaagggcgctgtcatggctgtgatgttcactgtggtgaccccatgcggaaccccttcatctgcagcctgaggacacagacatgag

SEQ ID NO: 23697 - DNA, 104 bp, Macaca Mulatta
ggatgcctcagcgggatctttcccttcctgtgatggcgaaaacaagctttgaaatggaaagagatgatgacagggactccagggcttacgagtcccgatctcag

SEQ ID NO: 23698 - DNA, 720 bp, Macaca Mulatta
ccagatctcccaacaccatggtccgataccgaatgaggagcctgagcgaacgctcgcacgaggtgcacgggcagcaggtgcatgggcaagaccaaggacacaacggccaagaggagcaggggctgaacccggagcacgtcgaggtctacgagaggacccacggccactctcactataggcgcagacactgctctcgaaggaggctgcaccggatccacagacggcggcatcgctcctgcagaaggcgcagaagacgctcctgcaggcaccggaggaggcatcgcagaggtctgcctgcacccccgccttgccctgcatgcccctgaccatcccaggcacaggagggaggttgggacccaccccacctggcaaaggctccagccccctaacccccatccccacccagagtccctaggtgccctccctcaaccagaactttttcccaaaaggctgcagaaccaggaggagaagatgcagaaggcactaagcttcttgggcccctcacccccggctggaaattaagaaaaagtcacctgcccaagaaacaccaagagaggccatagcaattcccctccatcaaatgctcaagcccccagctggaagagaaagtcacctgcccaggaacaccaagtgaggccatagcaactcccctacatcaaatgctcaagccctgagttgccgctgagaagtccacaagatctgagtgaaatgagcaaaagt

SEQ ID NO: 23699 - DNA, 634 bp, Macaca Mulatta
ttccgcttccagggcacatcctatgacagctgcactacggagggccgcacggatggctaccgctggtgcggcaccactgaggactatgaccgcgacaagaagtatggcttctgccctgagaccgccatgtccactgttggtgggaactcagaaggtgccccctgtgtcttccccttcaccttcctgggcaacaagtatgagagctgcaccagcgctggccgcagtgatggaaagatgtggtgtgcgaccacagccaactacgatgacgaccgcaagtggggcttctgccccgaccaagggtacagcctgttcctcgtggcagcccacgagtttggccacgccatggggctggagcactcccaggaccctggggccctgatggcgcccatttacacctacaccaagaacttccgtctgtcccaggacgacatcaagggcattcaggagctctacggggcctctcctgacattgaccttggcaccggccccacccccacgctgggccctgtcactcctgaaatctgcaaacaggacattgtctttgatggcatcgctcagatccgtggtgagatcttcttcttcaaggaccggttcatttggcggactgtgacgccacgtgacaagcccatggggc

SEQ ID NO: 23700 - DNA, 341 bp, Macaca Mulatta
gaatccaaaggcctggaacacgatggtactcaaaaatatagctgcctctgggaaattctccagtgatcgaacaattaaagaatatgcccagaacatctggaacgtggaaccttcagatctaaagatttcactatccaatgaatctaacaaagtcaatggaaattgaattctaaaatgtctctagaaaacatagcttcttactgaacttgaacatttttacaacattcactggtttttgttttgttagctaataatctataatagttgagtatctctgggaatggggagggaaattatatgtaatagagtttaaaaataaagtatcaatttccaagggatac

SEQ ID NO: 23701 - DNA, 788 bp, Macaca Mulatta
  misc_feature (1)...(788): n = A,T,C or G
ggctatcatttccaaagacttgtcattcagtgatattagcagatagctgcttcgaataaaggaatttggagtttaaaaatcaactcgtgaaaacaaggttgtttttgtctttatcttttgttagaattatagatttatgatttcataggcttgattctatatgaaatatctttttacttttatgcattttaataagatttaaaaatatttagatacaaacccccctttaatgagtgcaagaaaaactcttgacttgttagaagaaagtatattctttctagaattcggtgcaggaatatgtcttcatatccaggcaaacgggtatatttttatattcagacaatccttctcctctggggctttgttgccaggaagattagaactaaatttatttttttttcatttctgtaatgaaatcatcccagatgcctgttgtcttctttccaaatgtttttcacatatgtttaaaatatttctactttgaattgtcggattttccatgtcctcctttctcctttgtgcccagcctgagtcagcaccatcccacattcagaatctcccagtgaaagggcaggaaggggcctcacctgtcagccttcattttgagaaggtggaaggtgttggggtttgggagacagctcatccgatctcccaagtctcacgtgacatggtggatttgtgaccgtgagagtttccggtttaaatatgaaaaccagtttccttttcccagcgccatgncctgtggaggtgacagtcagacccagaagtccattanatgtggatgagca

SEQ ID NO: 23702 - DNA, 497 bp, Macaca Mulatta
  misc_feature (1)...(497): n = A,T,C or G
tgtctgtcacctgcaaatccggggacttcagctgcgggggccgtgtcaaccgctgcattcctcagttctggaggtgtgatggcgaagtggactgtgagaacggatcagatgagcaagactgtcncccccaagacgtgctcccaggacgagtttcgctgccacgatgggaaatgcatctaccggcagttcgtctgtgactcagaccgggactgcttggacggctcggacgaggcctcctgcccggtgcttacctgcggccccgccagcttccagtgtaacagctccacctgcatcccccagctgtgggcctgcgacaacgaccccgactgcgaagatggctcggatgagtggcctcagcactgtcagggtcttgaagtgcccaaaagggacagtagcccctgctcggccttcgagttccactgtcgaagtggcgagtgcatccactctggctggcgctgtgatggaggccccgactgcaaggacaagtctgacgagga

SEQ ID NO: 23703 - DNA, 636 bp, Macaca Mulatta
ttcattgggttcacaagttcccccagccccatgccttttatattctgtctccctaggatttctgaagtggaaagataataattgtgatgcaaagttaccctatgtctgcaagttcaaggactagggcagatgggaagtcagcagcctgagcttggtgtgcagctcatcatgcacatgagaccagtgtgaagactcaccctggaagagaatattctccccaaactgccctacctgaccacctggtcatgattctccttctttttcctttttactcaccttcatttcaggctcctctctgtcttccatgtcctgagatctcagagaataataataaaaatgttactttatacttgtatgcttttgtttcattcttatagtaagagcctttggaagaggagggcgaagctggcggacaaaacactgagtcttggcttctcccaatttcacccaggcctaaggggaaattactatgtgaatgttcccatcagtgtatttgtgatgaaggtgtgggccctgctcaggcagggtttgtgtcatgaagaaatgaagacagtgcttctccacacactcactgcccacacattgtccctgatgttgtgacacaatcagtcctaggggagtctgacattgcttaaa

SEQ ID NO: 23704 - DNA, 205 bp, Macaca Mulatta
agacctctacgagcataagttcatcaactgtcggtttatcaactccacctttctggagcagaaggagggctgccacatggacttggagcaagataatgacttcctgatttacctcgtcagcttcctgggcagcctgtctgtcttacccggaaacatcatttctgccctgctcatggatagaatcggaaggctcaagatgattggt

SEQ ID NO: 23705 - DNA, 136 bp, Macaca Mulatta
agctggtaggcgagtcctgtcctcggctcactttcctaaagctctccggctgccacggtgtgactgctgatgctctggtcatgctagccaaagcctgctgccagctccatagcctggacctacagcactccatggt

SEQ ID NO: 23706 - DNA, 103 bp, Macaca Mulatta
ggccaccctccagggcccactaaaaaagcgctgaagcagcgattcctcaagctgctgccttgctgcgggccccaagccctgccctcagtcagtgaaagcaagt

SEQ ID NO: 23707 - DNA, 318 bp, Macaca Mulatta
  misc_feature (1)...(318): n = A,T,C or G
ggtggattttctccgcccgtacacggtgcccaacaagaaggggaccaggcttggccggtacaggtgtgagaaagggaccactgcagtcctcactgagaaaatcactcctctggaaattgaggtgctggaagaaacagtccaaacaatggacacttcctgaatggcgtcagtgggtggctggctgtggttctggaacatggtgggcattggaggcccagtaagacattcatgtggctagtgtttgctgaaactcaataaaaaacaaaaaccaaattgggcagnnnnnnnnnnnnnnnnnnnnnnnnnnnnnnnnnnnnc

SEQ ID NO: 23708 - DNA, 781 bp, Macaca Mulatta
ggtggtgatgaagagctacctgagtggcatgcctgaatgcaagtttgggatgaatgacaagattgttattgaaaagcagggcaaaggcacagctgatgaaacaagcaagagtgggaagcaatcaattgccattgatgactgcaccttccaccagtgtgtacgactcagcaagtttgactctgaacgcagcatcagctttatcccaccagatggagagtttgagcttatgaggtatcgcacaaccaaggacatcatccttcccttccgggtgatcccgctagtgcgagaagtgggacgcaccaaactggaggtcaaggtggtcatcaagtccaactttaaaccctcactcctggctcagaagattgaggtgaggatcccaaccccactgaacacaagtggggtgcaggtgatctgcatgaaggggaaggccaagtacaaggccagcgagaatgccatcgtgtggaagatcaagcgcatggcaggcatgaaggaatcgcagatcagcgcagagattgagcttctgcctaccaacgacaagaagaaatgggctcgaccccccatttccatgaaactttgaggtgccatttgcgcccctctggcctcaagggtgcgctaccttgaaagggatttggagactgaaatcctgtagctacaggctgttcattgattgtcattccaaatggggtgggggccctaccttggggcccgccaaccggggcattttatatggaaaaccttccgctggcctaagcctggcccacatatagggccgagccataat

SEQ ID NO: 23709 - DNA, 568 bp, Macaca Mulatta
agctctcggggccgcctggcagcagacaggggaggctgatgacatgcagccgcttcctgaagaccccctcatgcggaggtggccagcacatcactattccaaggaaaaagatgttcactccacgcaagctcaaactgacactctttaatagcgacgtttgctaaaatcaggagtacttggtacctttatgaggaatttttcattttcttcctggttcggttgatgtggaaaccagaactgtctgtggagctgttttccagatcccaggcccattcctgggatctctccaacgggacctgtcctgtgctctgggctcatctcaggtctgaccaggagatggaggatgtgtccttggcagagccagtccttgtggggaaacagaggtttctgggtgccatggcaggctgtcggggtccaggtggcacccatgggccccctgccccatgtgaatgctgctggcacctggcggggggtacccagggatggaccctgggcatggcttctggactgcttagtccagggggaacaacttgtggtcaaaaagatgagttcagaggaaaaggggaag

SEQ ID NO: 23710 - DNA, 562 bp, Macaca Mulatta
  misc_feature (1)...(562): n = A,T,C or G
agattcacaggacaatggaaaatctgtaaatgagtccctgaccttgaatatcccctgcagcagaatgcctccttggagaacagcagtgcagacaggcccaggagcccagnnnnnnnnnnnnnnnnnnnnnnnnnnnnnnnnnnnnnnnnnnnnnnnnnnnnnnnnnnnnnnnnnnnnnnnnnnnnnnnnnnnnnnnnnnnnnnnnnnnnnnnnnnnnnnnnnnnnnnnnnnnnnnnnnnnnnnnnnnnnnnnnnnnnnnnnnnnnnnnnnnnnnnnnnnnnnnnnnnnnnnnnnnnnnnnnnnnnnnnnnnnnnnnnnnnnnnnnnnnnnnnnnnnnnnnnnnnnnnnnnnnnnnnnnnnnnnnnnnnnnnnnnnnnnnnnnnnnnnnnnnnnnnnnnnnnnnnnnnnnnnnccggccagcccaccagagaggaaggctctgccccagatctgcctgctcagtaaccctcactcaaggttcaacctctggcaggatctccccgagatccggagcagtggggtgcttgagatcctacagcctgaggagattaagctgcaagag

SEQ ID NO: 23711 - DNA, 426 bp, Macaca Mulatta
aacagagaactacaactttgaggaagaagagtactaagagaaactggaaatgaactctatttaagaataatgcatacaattcaatggtatcagtttaattttaacaatatatttaattcaagtccaattcatgtaatcagtattaagagtgtgttttaccattcatctttaaaatcttcaaatgaataattctcagtaaattattcttaaaagatctgtccaagcatgatcttgactcttaatagtaaaaccatattttaagatggaaaaataatcattatgaagcatagagagctttcaatcatttctttgaaaatatatcttgatataatagcaaccattcatcataatacaaaacagaaagaagattaatttactgtggcatagaaagtcctgccaattcctaagtgtcctaaatagtttctc

SEQ ID NO: 23712 - DNA, 1334 bp, Macaca Mulatta
  misc_feature (1)...(1334): n = A,T,C or G
ggggtctgcgttctggggtggtgctgcttgggccggtggtggattgcaggctgctggtgttgcggctggggagagcggctagagggttcggcatttttcgtcgggatccctgcaaggatgagtgctgccagagagtctcacccgcatggggtgaagcgttcggcctccccagatgacgatctgggatctagcaattgggaggcagcagacttgggtaatgaagagagaaaacaaaagttcttgagacttatgggtgcaggaaagaaagaacatactggtcgtcttgttataggagatcacaaatcaacatctcacttccgaacaggggaagaagacaagaaaattaatgaagaactggagtctcaatatcagcaaagtatggacagtaaattgtcaggaagataccggcgacattgtggacttggcttcagtgaggtagaagatcatgatggagaaggtgatgtagctggagatgatgatgatgacgatgatgattcacctgatcctgaaagtccagatgattctgaaagtgattcagagtcagagaaagaagaatctgctgaagaactccaagctcctgagcaccctgatgaagtggaggattccaaaaacaaaaaagatgcaaaaagcaattataaaatgatgtttgttaaatccagtggttcataactcccaaacgcttagtctttgtattaaaagtaagccttattgttataatgcacagtggaggactgcttatagagcacagacctttgtattataatttttaaaaaggcccttttaaataattacaaggagtgtttgctttcaaatgccatgggttacacttttatgggcatgactataaccaattttgtaaagagtaagagttgtataaaataagaaataaatacagtactcaacttactttcatattagcatcatcagccctctaattcaccgtatgggggaaacgctttttgtttgtgatagctattttatcatttccttcatatttttctcttataaaaatgtatttgatactgtgatacgttcatgaaaagtattctttaattattctttgttatagtagagctgttcatcatggaaatttctgctgccagtcacaatctaaattaattttggcaaaagattgngtacttagtttcctgttactgagttagctctactcttttggaccaaagcaacatgagagtaagtactttttacacttgttaagatgggagttataactgtcatacatttggaaatatatgatcccaagtagtctttttataattgggattatatcgtatgttagattttttgataaagattggccaaatttttacaga

SEQ ID NO: 23713 - DNA, 914 bp, Macaca Mulatta
  misc_feature (1)...(914): n = A,T,C or G
tgagctggaacgtctgagcaatctggtaggcaagccatctgagaaccatcctcttcatgacagtgggctgttaagcctggatcctgtgnnnnnnnnnnnnnnnnnnnnnnnnnnnnnnnnnnnnnnnnnnnnnnnnnnnnnnagttgcagtaccatgcaggactagcatctggccttttgaatcagcagtcgttgaagcgctccgctaatcagatgggagtatctgccaaacgtagaccaaaggctcagcccacaactcttgttctaccacnnntatgttgatgatgtgatcaaccgcattgacaggatgtttcctgaaatgtccatccacttatccagacccaatggaacatcagcaatgcttctgnnnnnnnnnnnnnnnnnnnnnnnnnnnnnnnnnnnnnnnnnnnnnnnnnnnnnnnnnnnnnnnnnnnnnnnnnnnnnnnnnnnnnnnnnnnnnnnnnnnnnnnnnnnnnnnnnnnnnnnngacctggttaagaagttacataaagctgttccaggccccgtgccagcgctgcgggaagtttctgcaggacggccttcccccgacgtggagggatttccgaaccctcgaagccttccatgacacctgccggcagtagcccccatgctagccccagcctcagaccccacccggcaccttcccagacacacaggaagcccacagaaggctcagctggttcctcactgcccagatgtgtacagccactcctccctttcataaaacagcgccatgtgtgctgaggccactctcgaagagcaggccccctctgtggccgatgcgactgatcattgccactagccagtagactgaaggcaaagaagacttttctagaagctggtagaaggaagctgtgcagcatgctcctcgtccgagtgtcggcagtgctggt

SEQ ID NO: 23714 - DNA, 145 bp, Macaca Mulatta
acttggatgaaaccacacaccataaggtgtggtaccagcttcctgaggggccagatggtggagccagatgatgcaacctggaagtgtgggcaggttaactcactgggtgaaccttgaatgaagggaaatggaaaatgagaaggag

SEQ ID NO: 23715 - DNA, 3867 bp, Macaca Mulatta
  misc_feature (1)...(3867): n = A,T,C or G
agatcaaagaccaagctcaccaattcgacatcagggaaggaatgacgagcttgagcgtgatgnnnnnnnnnnnnnnnnnnnnnnnnnnnnnnnnnnnnnnnnnnnnnnnnnnnnnnnnnnnnnnnnnnnnnnnnnnnnnnnnnnnnnnnnnnnnnnnnnnnnnnnnnnnnnnnnnnnnnnnnnnnnnnnnnnnnnnnnnnnnnnnnnnnnnnnnnnnnnnnnnnnnnnnnnnnnnnnnnnnnnnnnnnnnnnnnnnnnnnnnnnnnnnnnnnnnnnnnnnnnnnnnnnnnnnnnnnnnnnnnnnnnnnnnnnnnnnnnnnnnnnnnnnnnnnnnnnnnnnnnnnnnnnnnnnnnnnnnnnnnnnnnnnnnnnnnnnnnnnnnnnnnnnnnnnnnnnnnnnnnnnnnnnnnnnnnnnnnnnnnnnnnnnnnnnnnnnnnnnnnnnnnnnnnnnnnnnnnnnnnnnnnnnnnnnnnnnnnnnnnnnnnnnnnnnnnnnnnnnnnnnnnnnnnnnnnnnnnnnnnnnnnnnnnnnnnnnnnnnnnnnnnnnnnnnnnnnnnnnnnnnnnnnnnnnnnnnnnnnnnnnnnnnnnnnnnnnnnnnnnnnnnnnnnnnnnnnnnnnnnnnnnnnnnnnnnnnnnnnnnnnnnnnnnnnnnnnnnnnnnnnnnnnnnnnnnnnnnnnnnnnnnnnnnnnnnnnnnnnnnnnnnnnnnnnnnnnnnnnnnnnnnnnnnnnnnnnnnnnnnnnnnnnnnnnnnnnnnnnnnnnnnnnnnnnnnnnnnnnnnnnnnnnnnnnnnnnnnnnnnnnnnnnnnnnnnnnnnnnnnnnnnnnnnnnnnnnnnnnnnnnnnnnnnnnnnnnnnnnnnnnnnnnnnnnnnnnnnnnnnnnnnnnnnnnnnnnnnnnnnnnnnnnnnnnnnnnnnnnnnnnnnnnnnnnnnnnnnnnnnnnnnnnnnnnnnnnnnnnnnnnnnnnnnnnnnnnnnnnnnnnnnnnnnnnnnnnnnnnnnnnnnnnnnnnnnnnnnnnnnnnnnnnnnnnnnnnnnnnnnnnnnnnnnnnnnnnnnnnnnnnnnnnnnnnnnnnnnnnnnnnnnnnnnnnnnnnnnnnnnnnnnnnnnnnnnnnnnnnnnnnnnnnnnnnnnnnnnnnnnnnnnnnnnnnnnnnnnnnnnnnnnnnnnnnnnnnnnnnnnnnnnnnnnnnnnnnnnnnnnnnnnnnnnnnnnnnnnnnnnnnnnnnnnnnnnnnnnnnnnnnnnnnnnnnnnnnnnnnnnnnnnnnnnnnnnnnnnnnnnnnnnnnnnnnnnnnnnnnnnnnnnnnnnnnnnnnnnnnnnnnnnnnnnnnnnnnnnnnnnnnnnnnnnnnnnnnnnnnnnnnnnnnnnnnnnnnnnnnnnnnnnnnnnnnnnnnnnnnnnnnnnnnnnnnnnnnnnnnnnnnnnnnnnnnnnnnnnnnnnnnnnnnnnnnnnnnnnnnnnnnnnnnnnnnnnnnnnnnnnnnnnnnnnnnnnnnnnnnnnnnnnnnnnnnnnnnnnnnnnnnnnnnnnnnnnnnnnnnnnnnnnnnnnnnnnnnnnnnnnnnnnnnnnnnnnnnnnnnnnnnnnnnnnnnnnnnnnnnnnnnnnnnnnnnnnnnnnnnnnnnnnnnnnnnnnnnnnnnnnnnnnnnnnnnnnnnnnnnnnnnnnnnnnnnnnnnnnnnnnnnnnnnnnnnnnnnnnnnnnnnnnnnnnnnnnnnnnnnnnnnnnnnnnnnnnnnnnnnnnnnnnnnnnnnnnnnnnnnnnnnnnnnnnnnnnnnnnnnnnnnnnnnnnnnnnnnnnnnnnnnnnnnnnnnnnnnnnnnnnnnnnnnnnnnnnnnnnnnnnnnnnnnnnnnnnnnnnnnnnnnnnnnnnnnnnnnnnnnnnnagatcgccaggattcaagaagccatagttcaagaagaagttctccagagtcagatcgacaggtccattcaagatctgggtcatttgatagcagagacaggcttcaagagcgagatcgatatgaacacgannnnnnnnnnnnnnnnnnnnnnnnnnnnnnnnggcagagagaatgggaccgagatgctgataaagattggccacgcaacagggatcgagatagattgnnnnnnnnnnnnnnnnnnnnnnnnnnnnnnnnnnnnnnnnnnttggatagggaaagagagagactaatttctgattctgttgaaagggacagggacagagacagagacagaacttttgagagttctcaaatagagtctgtgaaacgctgtgaagcaaaactggaaggtgaacatgaaagggatctagaaagcacttcgcgagactctgtagccgtggataaagagagaatggataaagatctgggatctgtgcagggatttgaagacataaataaatccgagagaactgagagtctggaagnnnnnnnnnnnnnnnnnnnnnnnnnnnnnnnnnnnnnnnnnnnnnnnnnnnnnnnnnnnnnnnnnnnnnnnnnnnnnnnnnnnnnnnnnnnnnnnnnnnnnnnnnnnnnnnnnnnnnnnnnnnnnnnnnnnnnnnnnnnnnnnnnnnnnnnnnnnnnnnnnnnnnnnnnnnnnnnnnnnnnnnnnnnnnnnnnnnnnnnnnnnnnnnnnnnnnnnnnnnnnnnnnnnnnnnnnnnnnnnnnnnnnnnnnnnnnnnnnnnnnnnnnnnnnnnnnnnnnnnnnnnnnnnnnnnnnnnnnnnnnnnnnnnnnnnnnnnnnnnnnnnnnnnnnnnnnnnnnnnnnnnnnnnnnnnnnnnnnnnnnnnnnnnnnnnnnnnnnnnnnnnnnnnnnnnnnnnnnnnnnnnnnnnnnnnnnnnnnnnnnnnnnnnnnnnnnnnnnnnnnnnnnnnnnnnnnnnnnnnnnnnnnnnnnnnnnnnnnnnnnnnnnnnnnnnnnnnnnnnnnnnnnnnnnnnnnnnnnnnnnnnnnnnnnnnnnnnnnnnnnnnnnnnnnnnnnnnnnnnnnnnnnnnnnnnnnnnnnnnnnnnnnnnnnnnnnnnnnnnnnnnnnnnnnnnnnnnnnnnnnnnnnnnnnnnnnnnnnnnnnnnnnnnnnnnnnnnnnnnnnnnnnnnnnnnnnnnnnnnnnnnnnnnnnnnnnnnnnnnnnnnnnnnnnnnnnnnnnnnnnnnnnnnnnnnnnnnnnnnnnnnnnnnnnnnnnnnnnnnnnnnnnnnnnnnnnnnnnnnnnnnnnnnnnnnnnnnnnnnnnnnnnnnnnnnnnnnnnnnnnnnnnnnnnnnnnnnnnnnnnnnnnnnnnnnnnnnnnnnnnnnnnnnnnnnnnnnnnnnnnnnnnnnnnnnnnnnnnnnnnnnnnnnnnnnnnnnnnnnnnnnnnnnnnnnnnnnnnnnnnnnnnnnnnnnnnnnnnnnnnnnnnnnnnnnnnnnnnnnnnnnnnnnnnnnnnnnnnnnnnnnnnnnnnnnnnnnnnnnnnnnnnnnnnnnnnnnnnnnnnnnnnnnnnnnnnnnnnnnnnnnnnnnnnnnacttcctatggtcattaggagcaaatcggttattacaggcaaaacacttagaacagttcctggcatatagtaatacccaataaatattaactgctactttgaaaatatcatactgatttttgaccttactgcaacaattttcagttattccagattatctagcttatggattctggtggtgggggttgtttcgttttggtttttgcagtctctgtctcatctagtacctaccttagtttattttgcaacttactaataggttattaatggggagggacgagcagatggnnnnnnnnnnnnnnnnnnnnnnnnnnnnnnnnnnnnnnnnnnnattaagaattttatatcatgtccctgggcgtaaaagtttagttagtattaaattt

SEQ ID NO: 23716 - DNA, 631 bp, Macaca Mulatta
aaatagtattgtaatggcagaaggtatcacagtcatcatctaattctcagtgattttttaaagagaattctagaattctattttgcctagggtgatgtgctgtagagcaacattttagtagtatcttccattgtgtagatttatatgtaatataaatacattctaattatttgtactaaaatgctcatttacacgtgccattttttaaattcaagagtaagccatattcgtttaatcttatttacattataaatcaaaaaatatttattgttaaaagtaagtcatttatatatcttagaaaagattacatacttttgtttctataattctgaaatatatgaaaaacttagaatatgtcatatatgttattctaacagatctcttcctacatcttatttttcttctttatatacaatagtgatagtttacactcaatcatcctacggctcacctctttgcgtaacaactttacttgcctgcaatgattcacaaattggaacaggccatattcaaagccagtgcctatttcatcagaacggttactagatatagtgagttgagggagctaatctgatacactttgaataatatgatgcctttcaaactagttactaaatcatgaacatagtgg

SEQ ID NO: 23717 - DNA, 2260 bp, Macaca Mulatta
  misc_feature (1)...(2260): n = A,T,C or G
agtctgaactcgcgatgccaggcaggctccatggttctcgcctcacttcatcgtcgtcaccgctcagcgtccgggaagccgcgcaggagcgtgtgtgaattggaagcggtttcggacgtggatgcggcgttttgtcgctgctagtggtgtctggagaggtacgggctcgnnnnnnnnnnnnnnnnnnnnnnnnnnnnnnnnnnnnnnnnnnnnnnnnnnnnnnnnnnnnnnnnnnnnnnnnnnnnnnnnnnnnnnnnnnnnnnnnnnnnnnnnnnnnnnnnnnnnnnnnnnnnnnnnnnnnnnnnnnnnnnnnnnnnnnnnnnnnnnnnnnnnnnnnnnnnnnnnnnnnnnnnnnnnnnnnnnnnnnnnnnnnnnnnnnnnnnnnnnnnnnnnnnnnnnnnnnnnnnnnnnnnnnnnnnnnnnnnnnnnnnnnnnnnnnnnnnnnnnnnnnnnnnnnnnnnnnnnnnnnnnnnnnnnnnnnnnnnnnnnnnnnnnnnnnnnnnnnnnnnnnnnnnnnnnnnnnnnngggtatcaaactagcaaaccagatgtactctccaagttggcgcatggacaagaaccatggataacagttgctaaaatccagaataaaaattgtccagnnnnnnnnnnnnnnnnnnnnnnnnnnnnnnnnnnnnnnnnnnnnnnnnnnnnnnnnnnnnnnnnnnnnnnnnnnnnnnnnnnnnnnnnnnnnnnnnnnnnnnnnnnnnnnnnnnnnnnnnnnnnnnnnnnnnnnnnnnnnnnnnnnnnnnnnnnnnnnnnnnnnnnnnnnnnnnnnnnnnnnnnnnnnnnnnnnnnnnnnnnnnnnnnnnnnnnnnnnnnnnnnnnnnnnnnnnnnnnnnnnnnnnnnnnnnnnnnnnnnnnnnnnnnnnnnnnnnnnnnnnnnnnnnnnnnnnnnnnnnnnnnnnnnnnnnnnnnnnnnnnnnnnnnnnnnnnnnnnnnnnnnnnnnnnnnnnnnnnnnnnnnnnnnnnnnnnnnnnnnnnnnnnnnnnnnnnnnnnnnnnnnnnnnnnnnnnnnnnnnnnnnnnnnnnnnnnnnnnnnnnnnnnnnnnnnnnnnnnnnnnnnnnnnnnnnnnnnnnnnnnnnnnnnnnnnnnnnnnnnnnnnnnnnnnnnnnnnnnnnnnnnnnnnnnnnnnnnnnnnnnnnnnnnnnnnnnnnnnnnnnnnnnnnnnnnnnnnnnnnnnnnnnnnnnnnnnnnnnnnnnnnnnnnnnnnnnnnnnnnnnnnnnnnnnnnnnnnnnnnnnnnnnnnnnnnnnnnnnnnnnnnnnnnnnnnnnnnnnnnnnnnnnnnnnnnnnnnnnnnnnnnnnnnnnnnnnnnnnnnnnnnnnnnnnnnnnnnnnnnnnnnnnnnnnnnnnnnnnnnnnnnnnnnnnnnnnnnnnnnnnnnnnnnnnnnnnnnnnnnnnnnnnnnnnnnnnnnnnnnnnnnnnnnnnnnnnnnnnnnnnnnnnnnnnnnnnnnnnnnnnnnnnnnnnnnnnnnnnnnnnnnnnnnnnnnnnnnnnnnnnnnnnnnnnnnnnnnnnnnnnnnnnnnnnnnnnnnnnnnnnnnnnnnnnnnnnnnnnnnnnnnnnnnnnnnnnnnnnnnnnnnnnnnnnnnnnnnnnnnnnnnnnnnnnnnnnnnnnnnnnnnnnnnnnnnnnnnnnnnnnnnnnnnnnnnnnnnnnnnnnnnnnnnnnnnnnnnnnnnnnnnnnnnnnnnnnnnnnnnnnnnnnnnnnggagaaaaaccctatgaatgcaatgaatgtggtaaagccttcagccagaaaatatgcctcccctacatgagagatgtcatacaggaaagactccctttgtatgtactgagtgtggaaaatcctattcacacaaatatcggtctcattacccatcagagaattcacacaggagagaaaccttatgagtgcaatgaatgtggaaaagctttcaccacaaagtcagtactcaatgtacatcaaagaacgcatacaggagagaggccgtatggatgcagtgattgtgagaaagccttctcccacttatcaaaccttgtcaaacataagaaaatgcacacaagagaaatgggtagaatcagtcaagttgaaaactcctgtaatgaagagtcacagctccttccttacaagtgaactcatacagaatgaaaaccctactagtgcagtgactatggaaatgccttttgtggcaactcagacatcattaaacatcagtgtgtttctagcaaatcagaacacaaacagggtgctgc

SEQ ID NO: 23718 - DNA, 106 bp, Macaca Mulatta
agatttgttccttaatctggctacctaagacaaaggagattgcaactggcctcggtactcccaagaatgatgtgactgtgtggacttgtcccactgtgtccaggtc

SEQ ID NO: 23719 - DNA, 539 bp, Macaca Mulatta
agtcagtaaagcaaaacagagtcggagtgaaaagaaggcacggaagctatgtccaaactgggtcttctacaggttacaggagtgactagaatcactatccggaaatctaagaatatcctctttgtcatcacaaaaccagatgcctacaagagccctgcttctgatacctacatagttttttggggaagccaagatccaagatttatctcagcaagcacaactagcagctgctgagaaattcagagttcaaggtgaagctgtctcaaacattcaagaaaacacacagactccaactgtacaagaggagagtgaagaggaagaggtcgatgaaacaggtgtagaagttaaggacatagaattggtcatgtcacaagcaaatgtgtcgagagcaaaggcagtccaagctctgaagaacaacagtaatgatattgtaaatgcaattatggaattaacaatgtaaccatctgaaagcaactttttttgttgtctcaaaggagtaactgcagcttggtttgaaatttgtgctgtttctgtcataa

SEQ ID NO: 23720 - DNA, 810 bp, Macaca Mulatta
  misc_feature (1)...(810): n = A,T,C or G
gcacgaggatgtctacttagtgcctctccaaagacatccctctttgcctcataggttgaatcatcattcagtgtggatatttcaatgaaaatatcattggttgacttttgtgacggtaataatgctatggcatctttgccgtgaagttatggtctccttggattcttctgactttggctcccctgatgtcaggatgcctttgttaggatctgtatttgcccttaattttgttgaaatcttttttccttcttcctcttgaaaagttccaaaatatagtttattgtatctttcatcactaaaaatttgttcctttttcactatgggcagttcacacaaggcaaaaactattgaacagttggttttagtgtgttgtataactttgctgtatatcaaactaattttgacaagttttcatcctaagccgcaaatcatgtaattaataatttgcctgtttatttatgacctaattgtgattcttttattaataaaagctaatgggaaaaggatccctgattaagctgatgactagacctacaattaattttcctgcagtatatgaagtattgtaccagagtattacaagatatgtcatattttattgataaatctatcctttaaaacgaatacgtctcacgatgtccaccatttgaggtgcatccctgtaacgctcgatacaattggccgggtattttacatttgtgcttccagagaattcnctaatggcgctttggccccgatattatgtggcccatgccccgcgttttacaaggacttacaaaatctgttcaaacccctggggttatgctcccc

SEQ ID NO: 23721 - DNA, 1951 bp, Macaca Mulatta
  misc_feature (1)...(1951): n = A,T,C or G
agtccatcagaactacattggaaatgatgcagagaagagccctttcttcttgtctgtgaccctttctgaccaaaataatcaacgtgttcctcaataccgtgcaattctttggagaaaaacannnnnnnnnnnnnnnnnnnnnnnnnnnnnnnnnnnnnnnnnnnnnnnnnnnnnnnnnnnnnngtgccatgaatctggacaaatttgagaaaggccccagggaaatttttcatcctgaaatacaaaaggnnnnnnnnnnnnnnnnnnnnnnnnnnnnnnnnnnnnnnnnnnnnnnnnnnnnnnnnnnnnnnnnnnnnnnnnnnnnnnnnnnnnnnnnnnnnnnnnnnnnnnnnnnnnnnnnnnnnnnnnnnnnnnnnnnnnnnnnnnnnnnnnnnnnnnnnnnnnnnnnnnnnnnnnnnnnnnnnnnnnnnnnnnnnnnnnnnnnnnnnntgataccacagggatacattcagtttatactgtgtaccaagggcatgagatcatgtttcatgtttccaccatgttgccatattccaaagagaacaagcagcaggtnnnnnnnnnnnnnnnnnnnnnnnnnnnnnnnnnnnnnnnnnnnnnnnnnnnnnnnnnnnnnnnnnnnnnnnnnnnnnnnnnnnnnnnnnnnnnnnnnnnnnnnnnnnnnnnnnnnnnnnnnnnnnnnnnnnnnnnnnnnnnnnnnnnnnnnnnnnnnnnnnnnnnnnnnnnnnnnnnnnnnnnnnnnnnnnnnnnnnnnnnnnnnnnnnnnnnnnnnnnnnnnnnnnnnnnnnnnnnnnnnnnnnnnnnnnnnnnnnnnnnnnnnnnnnnnnnnnnnnnnnnnnnnnnnnnnnnnnnnnnnnnnnnnnnnnnnnnnnnnnnnnnnnnnnnnnnnnnnnnnnnnnnnnnnnnnnnnnnnnnnnnnnnnnnnnnnnnnnnnnnnnnnnnnnnnnnnnnnnnnnnnnnnnnnnnnnnnnnnnnnnnnnnnnnnnnnnnnnnnnnnnnnnnnnnnnnnnnnnnnnnnnnnnnnnnnnnnnnnnnnnnnnnnnnnnnnnnnnnnnnnnnnnnnnnnnnnnnnnnnnnnnnnnnnnnnnnnnnnnnnnnnnnnnnnnnnnnnnnnnnnnnnnnnnnnnnnnnnnnnnnnnnnnnnnnnnnnnnnnnnnnnnnnnnnnnnnnnnnnnnnnnnnnnnnnnnnnnnnnnnnnnnnnnnnnnnnnnnnnnnnnnnnnnnnnnnnnnnnnnnnnnnnnnnnnnnnnnnnnnnnnnnnnnnnnnnnnnnnnnnnnnnnnnnnnnnnnnnnnnnnnnnnnnnnnnnnnnnnnnnnnnnnnnnnnnnnnnnnnnnnnnnnnnnnnnnnnnnnnnnnnnnnnnnnnnnnnnnnnnnnnnnnnnnnnnnnnnnnnnnnnnnnnnnnnnnnnnnnnnnnnnnnnnnnnnnnnnnnnnnnnnnnnnnnnnnnnnnnnnnnnnnnnnnnnnnnnnnnnnnnnnnnnnnnnnnnnnnnnnnnnnnnnnnnnnnnnnnnnnnnnnnnnnnnnnnnnnnnnnnnnnnnnnnnnnnnnnnnnnnnnnnnnnnnnnnnnnnnnnnnnnnnnnnnnnnnnnnnnnnnnnnnnnnnnnnnnnnnnnnnnnnnnnnnnnnnnnnnnnnnnnnnnnnnnnnnnnnnnnnnnnnnnnnnnnnnnnnnnnnnnnnnnnnnnnnnnnnnnnnnnnnnnnnnnnnnnnnnnnnnnnnnnnnnnnnnnnnnnnnnnnnnnnnnnnnnnnnnnnnnnnnnnnnnnnnnnnnnnnnnnnnnnnnnnnnnnnnnnnnnnnnnnnnnnnnnnnnnnnnnnnnnnnnnnnnnnnnnnnnnnnnnnnnacagttgcatctataaaaaggtttgcccctttaatggtggctcttttttggttcaaccctctgcgtcagatttccagttctgttggaaccaggctccctgtgcaatt

SEQ ID NO: 23722 - DNA, 869 bp, Macaca Mulatta
  misc_feature (1)...(869): n = A,T,C or G
gggccttttccgccatctttccgcgccgccacaatggtgcgcatgaatgtcctggctgatgctctcaagagcatcaacaatgccgaaaagagaggcaaacgccaggtgcttattaggccgtgctccaaagtcatcgtccggtttctcactgtgatgatgaagcatggttacattggcgaatttgaaatcattgatgatcacagagctgggaaaatcgttgtgaaccttacaggcaggctaaacaagtgtggagtgatcagccccagatttgatgtgcaactcaaagatctagaaaaatggcagaataacctgcttccatcccgccagtttggtttcattgtactgacaacctcagctggcatcatggaccatgaagaagcaagacgaaaacacacaggagggaaaatcctgggattctttttctagggatgtaatacatacatttacaaataaaatgcctcacggactctagaaattnnnnnnnnnnnnnnnnnnnnnnnnnnnnnnnnnnaaaannnnccttgtctgtcnnnnnnnnnnnnnnnnnnnntcnnnnnnaacccgcctcgccccttcaaaaaactttctaaaaacaattctttttgggcgcgcggggcccacatggaggaaagtgacacctggggccaaaagagtgttttcctaagaaaaaaaccctggttctctggattggggcctgggaaatttcctccaaaattaaaaaataaccccccggcggtttaagcggggcggttgttcaaaaatatcccagagaaggagatctcttgaagacctctttttcggtgagaaaaaaaacaacccgggggattcccaaggggagggtgtggttttttccaaattaaaaaacccac

SEQ ID NO: 23723 - DNA, 5633 bp, Macaca Mulatta
  misc_feature (1)...(5633): n = A,T,C or G
tttagcacaaagacttgcatgagggatccctggcagaacacccagaatgcccctgctcttccacgccggtctggctggtgtgctggatgcacgcccgagggtgctgggcatcactggtccttgtgaggatgcttttaaagttctatatttatatccccaaacttggaaacaagaactctactttagcctaaccctcatgtccttttttgaattgagaaaattacaggaaagggtgcctttgaaaattagaaaacttgcttacagagctgtactaattgttatatcctccatttccccaagaccggttgccctgagagtagctggtaaagaggggcaagctaaagatctgtccacctgtagctccactcacgtcttagaaaccacctgcttcccagagtgccaagccaccaggcttcatgggcacagacgcctcctgggctggactgggtgacagagctagaagatcccagagagggggcaagnnnnnngggcaagaagcactggtggtggttcagggaccgtccttctccctcacccagggaactggacctggcagggcaccgtgctcttgtggctccaaggacaagcgtggcggtggcccctctgccttccaggagagggctggctgtggaaacgaaaatcgtgttcttctaaagtgtcatcttttgccctccctgtcccaatagggaccacaccttatttgtctcaaacagggacttgtgaatacttggcaagtttcgcagcctacttttgtattcttaatttggggagtgaagatgtttggtctcaaaaacctttgaggaattgccaagaatggcgagtgattgctttccttcagagaacagacccttggaatttctcctttcagtgtttatatacatgcagattaatttatatatannnnnnnnnnnnnnnnnnnnnnngtataaatacgcatttgattcttgtaaaacgtgcatctggcgtgtgcagttnnnnnnnnnnnnnnnnnnnnnnnnnnnnnnnnnnnnnnnnnnnnnnnnnnnnnnnnnnnnnnnnnnnnnnnnnnnnnnnnnnnnnnnnnnnnnnnnnnnnnnnnnnnnnnnnnnnnnnnnnnnnnnnnnnnnnnnnnnnnnnnnnnnnnnnnnnnnnnnnnnnnnnnnnnnnnnnnnnnnnnnnnnnnnnnnnnnnnnnnnnnnnnnnnnnnnnnnnnnnnnnnnnnnnnnnnnnnnnnnnnnnnnnnnnnnnnnnnnnnnnnnnnnnnnnnnnnnnnnnnnnnnnnnnnnnnnnnnnnnnnnnnnnnnnnnnnnnnnnnnnnnnnnnnnnnnnnnnnnnnnnnnnnnnnnnnnnnnnnnnnnnnnnnnnnnnnnnnnnnnnnnnnnnnnnnnnnnnnnnnnnnnnnnnnnnnnnnnnnnnnnnnnnnnnnnnnnnnnnnnnnnnnnnnnnnnnnnnnnnnnnnnnnnnnnnnnnnnnnnnnnnnnnnnnnnnnnnnnnnnnnnnnnnnnnnnnnnnnnnnnnnnnnnnnnnnnnnnnnnnnnnnnnnnnnnnnnnnntgtaggaggtactcaaaggtttgggggcaaaaccctgaatgcagccaatcgtgcacagagacacacccacgctagcccagtggcagtgggggatgtgggatggcagcagccaggtatgtagccctgtcacaggacagctcattgtggttttgcacactgccaaagggttaacttttgttgttgccttcagtagaaggcatttgtgggctgcagagttgagaggtgggtgaggttagtctctcctgaagaaaaagcctataaaaagtggctaatcttatccgttttctctgtatgcagttggagtcgtcagagatagtaaaatcatcnnnnnnnnnnnnnnnnnnnnnnnnnnnnnnnnnnnnnntgttttttacatggggttgtagatccagttctcataggtgaaccagatcatcattctgataaaggaaatttaaatttgatacatgtgctttgtatattttgattacttgttttcgtttttgactataaaggagctttttttattttgggaggggaggagtatcatttctgagaatcttgggttcctgaaaatgccctagttggatggcttgccagggccttgaggtctggcagtgattgtacaacttaaagctcctttctcttggctgagtggcaggcggctgttcaggtggaccaaagcaccttgacacaaggattccacactctgctctctagtagcacaaggaggaagttggacagaacactgggtagtgccttgtgggctcccacatgtactagtggtctcatctccagctggccttgggaggctgtcccaccaggaaatttgtgtattctccagcctgagatgtggcccttgtgggttttatcctgctcagtcagtggcctagtggcaggtgctgtgtnnnnnnnnnnnnntcctggctctgggacatctgtccctggctgcctttatagaggaaggacactggcctttctggttggacgctgtgtggatgctctctgcttgcgcctcatagtctctggtcttgtctcttcttggaccagtatcctcagattggtgcagctttttcagttcagatatcacaccccaagtggataaaggcaacttgcaggagaggagagccagccaagaagaacattttaaaaccaaacctagtttgggattttcctaaagtcannnnnnnnnnnnnnnnnnnnnnnnnnnnnnnnnnnnnnnnnnnnnnnnnnnnnnnnnnnnnnnnnnnnnnnnnnnnnnnnnnnnnnnnnnnnnnnnnnnnnnnnnnnnnnnnnnnnnnnnnnnnntgctggagaagaaaaatcctctagacacatgaaggcccacataatcaactcttccagggcaaagccagcagcccacccaggtcaagtagccagcagggctcagttccccgcactccagacatggaccctccccttcagggtctcttgacccagcttccttctctccttttccctgagagcacagacctctctcactcagccagcctgcccagaccacagagggccgttcccacgtagcctggggagtacttcatctcagaaaagctccaatgtctgagcaagcagggagttgtggagctcaagcctttctcctgtgctcaagtcccttccccaagcaaggcttcaacctaatctactcggccatgtagttttctctggccatttaaatggggcagggacatggttgggccatgccacatcagggctggtgaggcaaccagttttgattttgacagagtggctggatgaaacgtggcaatcaaggtgctgcttggtttgctctgagtgcaaatggaaccaacaggtttctgctgcaatctgtgtgttaccagtgccaggtgacaccaggaagggtggggcagggctaagttgtctctgaattcactgagcatctgcacttagttgtgaagttaatgggagtacatagagtatctggccttggagaggggttgagagccttctttttggttcttcattcctgagctcttgcctacccacaaatctgacctctttgaatgggggctcagtccttcatcagactgaagatatgacagagaagtttctatttagccctagatccagcaggagtcatgcattctaactgccctgaattctagagcaggggagggaacccagaggctggggatgagactaggcagcccctggttatcacagggacaaggacagggaaaagcacccccttcctcagttttgcaagtcctgtctttgggttcacaggactttgaggatggtgaagaacatagttactagcctgtcgttcctggtcccaagcttccacagccctcagaacctggcttctgtggctgctctggcaggtgccgagcaaagggagaagggaggaaggcagctgctctggtggggactctaggcaccttccctgctgtccacttggataggtggtgagccccagggtactgagaggagcctgagcattcacctgccattagtgcctcttccttcaggagactggcttgaaannnnnnnnnnnnnnnnnnnnnnnnnnnnnnnnnnnnnnnnnnnnnnnnnnnnnnnnnnnnnnnnnnnnnnnnnnnnnnnnnnnnnnnnnnnnnnnnnnnnnnnnnnnnnnnnnnnnnnnnnnnnnnnnnnnnnnnnnnnnnnnnnnnnnnnnnnnnnnnnnnnnnnnnnnnnnnnnnnnnnnnnnnnnnnnnnnnnnnnnnnnnnnnnnnnnnnnnnnnnnnnnnnnnnnnnnnnnnnnnnnnctactaaaaatccaataattagctgggcatggtggcacatgcctttagtcccacctactaaggaggctgaggcaggagactcacttgagcctggcaggcggaggttgcagtgagctgagatcatgccactgtactccagcctggnnnnnnnnnnnnnnnnnnnnnnnnnnnnnnnnnnnnnnnnnnnnnnnnnnnnnnnnnnnnnnnnnnnnnnnnnnnnnnnnnnnnnnnnnnnnnnnnnnnnnnnnnnnnnnnnnnnnnnnnnnnnnnnnnnnnnnnnnnnnnnnnnnnnnnnnnnnnnnnnnnnnnnnnnnnnnnnnnnnnnnnnnnnnnnnnnnnnnnnnnnnnnnnnnnnnnnnnnnnnnnnnnnnnnnnnnnnnnnnnnnnnnnnnnnnnnnnnnnnnnnnnnnnnnnnnnnnnnnnnnnnnnnnnnnnnnnnnnnnnnnnnnnnnnnnnnnnnnnnnnnnnnnnnnnnnnnnnnnnnnnnnnnnnnnnnnnnnnnnnnnnnnnnnnnnnnnnnnnnnnnnnnnnnnnnnnnnnnnnnnnnnnnnnnnnnnnnnnnnnnnnnnnnnnnnnnnnnnnnnnnnnnnnnnnnnnnnnnnnnnnnnnnnnnnnnnnnnnnnnnnnnnnnnnnnnnnnnnnnnnnnnnnnnnnnnnnnnnnnnnnnnnnnnnnnnnnnnnnnnnnnnnnnnnnnnnnnnnnnnnnnnnnnnnnnnnnnnnnnnnnnnnnnnnnnnnnnnnnnnnnnnnnnnnnnnnnnnnnnnnnnnnnnnnnnnnnnnnnnnnnnnnnnnnnnnnnnnnnnnnnnnnnnnnnnnnnnnnnnnnnnnnnnnnnnnnnnnnnnnngtgactgttgagcagtctgctgtcaggagagatggctgaaaaggtgatcatcttggtgctaacaaagaggcaactgccctgtttttgtttgttctgaggcacaatgaaactttagccaaactctgcaagagggtcccctctcctgtcatggccaggtgagcgaccaaaccaagaaaacggcacactcttatcactgaagcctcagtagaatgggaattctttaccctgggtaaatgttttaacaaaaaaatgaacccacctttggtttggactgtggtcgtgccaaggcaggagtggggtttccctcttggggctgaatctccaggcctcatgaggtcccctgtggggatgctgctatttctaagatgcaaattgcacatttcctagattttgtatctggatttggataagggaggggaacagggacaaattgcttgtacaatttgaaatgggcctcaatggtacttcaaaccttttgattattcctaaataaaaacataaatatattt

SEQ ID NO: 23724 - DNA, 850 bp, Macaca Mulatta
gggtgttggagtgagctctctgctgcatcaggaacccctgcagtgactgttgtccacccactgggatgcccttccatcctctggacaaaggcaatagtgaggctctgtgcacttggaggccaccctaatactctgtttcctctgcttctcccactgctgcaggttatgtgttctgtatgttacatcgccttcccgagcagcacgactgcacatttgaccacatgggccgcggccgggaggaagccatcatgaaaatggtgaagctggaccggaaagtggggcgctcctgccagcgcatcggggaggggtgctcctgaaggccaggcatggccaccacatgacgctgttcttagttcactaatgttagccttatttaggacaaagtcagccagacaccttgtactgggcacgcgtcagactgcagccagtccgtttcctttctttagccagccatcctggtactgtagtttaggggttgatggtggttgaaattgatttctggctggttactaaggtgcctgctagccattgtataaaattaaaacatgaagaatatttttttttgagcatggctagtggatttaaaacaacacatacctgtcactgctggagtcaaacttataaaaagccttaagtggaaagtgttccagacggagactctgagttaatagaggagtagaagctggtgttaaagttcccacgacgcacatggctttgccagaaactctgtttaatgttcggcctttcacctcttcacttatccttagtcccagtagccaggatacgtgatggccatgtgtgccttggccacaggaggctgctgagagtggccacatggctgggctgggtg

SEQ ID NO: 23725 - DNA, 353 bp, Macaca Mulatta
  misc_feature (1)...(353): n = A,T,C or G
caggaccctacccaagattgggaacgcaaatgtgggtgagtcctggaccttgggtaactcacaatttggtgtttctatggaggtgatgtttgagatgagatgtgctagacacagtgggggctggggagacactnnagttttaatcagctggatctgcctgcctatgagagctttgagaagctccgccacatgctactattggctatccaggagtgctctgaaggctttgggctggcctaataaggccctgcccacctctgtgggttttttttaccattgttggacctggggaggggggagttaaaaaaagaaccagaaagaaattgtcaaaaaccaataaatgaaatccacca

SEQ ID NO: 23726 - DNA, 1079 bp, Macaca Mulatta
  misc_feature (1)...(1079): n = A,T,C or G
agcgggcaggggtggacacgatgtgcagacacaactacgagctggacgaggccgtgaccctgcagcgccgagtccagccaagggtgaacatcgccccctccaagaagggtcccttacagcaccacaacctgctcgtctgccatgtgacagatttctacccaggcagcgttcaagtccgatggttcctgaatggacaggaggaaacagctggggtcgtgtccaccaacctgatccgtaatggagactggaccttccagatcctggtgatgctggaaatgaccccccagcagggagacgtctacacctgccaagtggagcaccccagcctggacagtcctgtcaccgtggagtggaaggcacagtctgattctgcccggagtaagacgctgacgggagctgggggcttcgtgctggggctcatcatctgtggagtgggcatcttcatgcacaggaggagcaagaaagttcaacgaggatctgtataaacaggggtcctgacctcaccgaaaagactaatgtgccttagaacaagcatttgctgtttcgttagcacctggttccaggacagaactccagcttcccaagaggatactgctgccacgcagttgctctgaagttagtttctatcgttttgctctttgatccaagtactgtttctctcattgggcctccaaccatgttcccttcttcttagcaccacaaataatcaaaatccaacatgagtgtttgttttcctttaaaaatatgcaccaaatcatctctcgtcacttttctctgagggttttagtaaacagtagaagttaataaagaagttcattttggtttacatgtaggaaagaagagaaccatgaaaatggggatgtgttaactattgtataatgaggcctgttagacatggcactcttctgaattgactgtatttcagtgagctgcccccaaatcaagtttagtgccttcatccatttaggtctctgaccactattcttagctattccagggtgagcagactgcaaatctgcctgtattcacacagaactaattcaacatataccttactaagaggatgtcncatcattact

SEQ ID NO: 23727 - DNA, 131 bp, Macaca Mulatta
ctgcggaggcgcaagggccccactaagaccccagaaccgcagtcctctgaggcccctcgggaccccctgaactggtttggaatcctggttcctcacagtctacgtcaggctcaagccagcttccgggatgg

SEQ ID NO: 23728 - DNA, 163 bp, Macaca Mulatta
gtccgggccatgcggctgtccttcgtgggggagctgggctgggagctgcacattccaaaggcgtcctgcgtacctgtgtaccgggctgtgatggccgcgggtgccaagcacggcctcatcaatgcagggtaccgcgccattgactccctgagcattgagaaag

SEQ ID NO: 23729 - DNA, 749 bp, Macaca Mulatta
acactaaccccttcctcctataatccagggcggaagggggcctggctccatccagctgccccattctggctctctgggagatcagtgttgtgagtgcatgtgaaatgggggatccctgcccccagtgcccttccccctcctggggcccactcacactacatcctcttcctttcccaccccacctccccggagagaaactggacatggggcctggggaggggagctggccagaggaggacccctttcccgtggcattagaagggggaggggcggctggggcccccacccattccccctccctctaaactctcaaccctcagtcagtgtttgagcctccttgttcccctcacgcaccccctcatgcaccctcggtgaatccttggtgatgattttggcaactttgggaataaatggcaattcccacgggcttggctcccccagcttcccatctgtgatttcgcgtgtcccccagagcccttcatgcagggacctggggcttgggtcccagctctctctcgagggtggctgggaaccagccgttctgtctcagaagtcctgatttccctgaccctcccgggtcaaggggtggctgggttgagggtggacggcccgaggcctggcaaagctgtacccccgcaggtccaggtggtcaggaggcactcgtggccagacgcttccagtgcaggaggcctcgctcttgttttgaggaacactaggatgaggtcagagtggactggggttcagggaga

SEQ ID NO: 23730 - DNA, 1234 bp, Macaca Mulatta
  misc_feature (1)...(1234): n = A,T,C or G
ggggttggtggaggtggccgcagccattgctggctatgtgtttagagataaggtgatgtcagagtttaataacaacttccggcagcagatggagaattacccgaaaaacaaccacactgcttcgatcctggacaggatgcaggcagattttaagtgctgtggggctgctaactacacagattgggagaaaatcccttccatgtcgaagaaccgagtccctgactcctgctgcattaatgtcactgtgggctgtggaattaatttcaacgagaaggccatccataaggagggctgtgtggagaagattgggggctggctgaggaaaaatgtgctggtggtggctgcagcagctcttggaattgcttttgttgaggttttgggaattgtctttgcctgctgcctcgtgaagagtatcagaagtggctacgaggtgatgtaggggtctggtctcctcagcctcctcatctgggggagtggatagtatcctccaggttttttaattaaacggattattttttcagaccgagtgacaattatccccaatacagaaaatgaccttagatttattggatatactgtgatatatgggaatgcttttctgggcttctttgtactgcaattttctttgtggttccctttttcgctccttggtgacctataagcctaaatttttacgaagattggagcctaaattgatatacccgagccctcctctttgctctctgcttaattcctacccctactttctcggagaaacaggatatggaattaaaaaatagtcgccgggaaaataaattagagattgaaaaaatgaatacactgcaacggtagtctagagtatttgtatttaacgtccggtaaaactccccgtaccagattaaacaccgcaggatattttccccccccctcccttttttgtaatatcgccccatatttaattccattcactattgtattacaaaataagacctaaaccatcattattttattcacaccaccggtagaatactcacaaaccatataaatcaatcgtatatcctactagaatattttttcacaacttcattaagccgtcgtatttgtaaccctccagggtgatactcgtatccataataattataaaagcaatatgatagccatacagacatataaagtatggcggcagcggatagctatgtagaancatgatgtcactagtagtactcattttagttataaagctacgcaaatctag

SEQ ID NO: 23731 - DNA, 597 bp, Macaca Mulatta
  misc_feature (1)...(597): n = A,T,C or G
agagggcagttttattgtctcagagtgggcagggctgagggagggagctgacaagcaacatccccccaggccccaaggacacacacactctatccttcccatgggccacggctctgggagtgactcacagaagggagaggaggctcgaactgcccccagcccccagggttctcaggttagggagttagggaggaacatgaaagtgaccacatgcttcttagacacatcagcggctgtaaacacagggctgagggggcctccttgctctggagggggtcttggtccatccttggtgaggggtgcccagccccttttcaggcctaagaacagtctctaagagggtcaggagaactgggcagccgctatgacagtgtactacaccccgggcaggcaggtgagccacaggcttgtcacagaccacacacacacacacacgcgnnnnnnnnnnnnnnnnnnnnnnnnnnnngtgcaattgagagcctcgggccaggacgctagaagatagggatgtagttgtcgagataggcgcggtggcgctgggcgatacattcagcgatccacacgatgttgcgacactcctgctccttgagcttcaca

SEQ ID NO: 23732 - DNA, 203 bp, Macaca Mulatta
tgatttaagaaggattgatctgacatcaaatgtaatatctgagattgatgaagatgcattccgaaaactgcctcaacttcgagagcttgtcctgcgtgacaacaaaataaggcaactcccagaattgccaaccactttgacatttattgatattagcaacaatagacttggaaggaaagggataaagcaagaagcatttaaag

SEQ ID NO: 23733 - DNA, 1350 bp, Macaca Mulatta
  misc_feature (1)...(1350): n = A,T,C or G
ggggctcttttcccggctggaaccatggagggtgcggaagagaagaagaaggttcctgctgtgccagaaacccttaagaaaaagcgaaggaatttcgcagagctgaagataaagcgcctgagaaagaagtttgcccaaaagatgcttcgaaaggcaaggaggaagcttatctatgaaaaagcgaagcactatcacaaggaatataggcagatgtacagaactgaaattcgaatggcgaggatggcaagaaaagctggcaacttctatgtacctgctgaacccaaattggcgtttgtcatcaggatcagaggtatcaatggcgtgagcccaaaggtccgaaaggtattgcagcttttgcgccttcgtcaaatcttcaatggaacctttgtgaagctcaacaaggcttcgattaacatgctgaggattgtagagccatatattgcatgggggtaccccaatctgaagtcagtaaatgagctaatctacaagcgtggttatggcaaaatcaataagaagcgaattgctttgacagataacgctttgattgctcgatctcttggtaaatatggcatcatctgcatggaggatctgattcatgagatctatactgttggaaaacgcttcaaagaggcaaataacttcctgtggcctttcaagttatcttctccacgaggtggaatgaagaaaaagaccacccatttttgtagaaaggtggagatgctgggcaacaggggaggaaccagatcaacagggcttatttagaagaatgaactaagggtgtctaccatgattatttttcgagtctcgtcagtttaataaacagtgcctgctctcaaaatgaatnanaannnancnaancggaaaaaccacctgggaggcatagggaaatgaagaaacaggaacaaaccaattcactgggcggcggtttaccaatcgtgatgtgggcccaccctggccccccaaagaaactttttagaaacctttcttttgggccgccggggcccccatatggaaaagtagaaaaatggggtaaaaaactttgtttctccgaagaaaaaaccccggggcataaaaaaattgtggcttgggaattctcccccccaataaaaaaaaaagccccgcgggggggancccccaagagagttttttcttgagaaaaaaacaccccaaaaaagggaactttctggagggggctttataggggggattttttttaaanacggaggggtctcacaagagggagggcctaacaaaacaaaaatataaaggacgccgcgcgcgcgtggggcaaaatataagagcaanagaacagcggcggggggaaacaattccataacacagacgctctcg

SEQ ID NO: 23734 - DNA, 1596 bp, Macaca Mulatta
  misc_feature (1)...(1596): n = A,T,C or G
atgtcaggcttctgagcccaagccaagccatcgcatcccctgtgacttgcacgtatatgcccagatggcctgaagtaactgaagaatcacaaaagaagtgcaaatgccctgtcccgccttaactgatgacattccaccacaaaagaagtgaaaatggctggttcttgccttaagtgatgatattatcttgtgaaattccttttcgtggctcatcaagaaacaaaaagctcccacactgagcaccttgtgacccccactcctgcccaccagagaacaacccccctttgactgtaattttcctttacctacccaaatcctataaaacggccccacccttatctccctccactgactctcttttaggactcagcccgcctgcacccaggtgattaaaaagctttattgctcacacaaagcctgtttggtggtctcttcacacggacgtacatgnnnnnnnnnnnnnnnnnnnnnnnnnnnnnnnnnnnnnnnnnnnnnnnnnnnnnnnnnnnnnnnnnnnnnnnnnnnnnnnnnnnnnnnnnnnnnnnnnnnnnnnnnnnnnnnnnnnnnnnnnnnnnnnnnnnnnnnnnnnnnnnnnnnnnnnnnnnnnnnnnnnnnnnnnnnnnnnnnnnnnnnnnnnnnnnnnnnnnnnnnnnnnnnnnnnnnnnnnnnnnnnnnnnnnnnnnnnnnnnnnnnnnnnnnnnnnnnnnnnnnnnnnnnnnnnnnnnnnnnnnnnnnnnnnnnnnnnnnnnnnnnnnnnnnnnnnnnnnnnnnnnnnnnnnnnnnnnnnnnnnnnnnnnnnnnnnnnnnnnnnnnnnnnnnnnnnnnnnnnnnnnnnnnnnnnnnnnnnnnnnnnnnnnnnnnnnnnnnnnnnnnnnnnnnnnnnnnnnnnnnnnnnnnnnnnnnnnnnnnnnnnnnnnnnnnnnnnnnnnnnnnnnnnnnnnnnnnnnnnnnnnnnnnnnnnnnnnnnnnnnnnnnnnnnnnnnnnnnnnnnnnnnnnnnnnnnnnnnnnnnnnnnnnnnnnnnnnnnnnnnnnnnnnnnnnnnnnnnnnnnnnnnnnnnnnnnnnnnnnnnnnnnnnnnnnnnnnnnnnnnnnnnnnnnnnnnnnnnnnnnnnnnnnnnnnnnnnnnnnnnnnnnnnnnnnnnnnnnnnnnnnnnnnnnnnnnnnnnnnnnnnnnnnnnnnnnnnnnnnnnnnnnnnnnnnnnnnnnnnnnnnnnnnnnnnnnnnnnnnnnnnnnnnnnnnnnnnnnnnnnnnnnnnnnnnnnnnnnnnnnnnnnnnnnnnnnnnnnnnnnnnnnnnnnnnnnnnnnnnnnnnnnnnnnnnnnnnnnnnnnnnnnnnnnnnnnnnnnnnnnnnnnnnnnnnnnnnnnnnnnnnnnnnnnnnnnnnnnnnnnnnnnnnnnnnnnnnnnnnnnnnnnnnnnnnnnnnnnnnnnnnnnnnnnnnnnnnnnnnnnnnnnnnnnnnnnnnnnnnnnnnnnnnnnnnnnnnnnnnnnnnnnnnnnnnnnnnnnnnnnnagatactgtcttgaaaactattcctggtttctgaagaatgcaacatatatctgtcagagggtgaaaagggtgtcccactcgcac

SEQ ID NO: 23735 - DNA, 864 bp, Macaca Mulatta
acgcatggctaacctcacgggccaggcctcataacaatgggggggaggaaccacgcaccccgctacgtgcgaggcccgcggctcttctgcttggggaggcccaccaatggccccagggtcatattgccagggtgaggaccgaccggggccccaagtagaaaaggttgtagaaaaaggttttttaaaggggccccggggcggcccgaacagagctcctttttggggccgcggcgtcctgcgcgcgggcgaaatcaaaaagagagggggccattcccgataatataaaacccatttggggcaaaaaaaaaaaggcccttgtgattaaaaccgccattacagcctgccaggccacctgggcccaagttgggttttactctagaatttcacggtcgtccccacccccacttcttccacccccacttcttccttcaccaacatgcaagttctttccttccctgccagccagatagacagatgggaaaggcaggcgcggccttcgttgtcagtagttctttgatgtgaaaggggcagcacagtcatttaaacttgatccaacctctttgcatcttacaaagttaaacagctaaaagaagtaaaataagaaggcaatgcttgtggaatgtacagtgcatattggcggcgcacgcctcattacgattcgcctgcttgcttctcctgttcaatcgtttctttggaaggcagtggatttttctcttgcgtctctgtcttcttcagtttcgacttatcgaatttctcgatctcagccatatcgggtttgtcagacatggttgcggaggaaaagcggagcgaggcgcacgaaaacgagcgaagtctggtctgagcagtggccaccaccgagttccc

SEQ ID NO: 23736 - DNA, 2286 bp, Macaca Mulatta
  misc_feature (1)...(2286): n = A,T,C or G
agggctttgtatcccccatccgaaggctggtgttccccaaggccgggcgccgtgcagcctgtaggagcagcgtgagccgccggcccctgcactcgatgcccctttatccccctgactacctcatcgacccccagattctgctgtgtgactacctggagaaagaggtcaannnnnnnnnnnnnnnnnnnnnnnnnnnnnnnnnnnnnnnnnnnnnnnnnnnnnnnnnnnnnnnnnnnnnnnnnnnnnnnnnnnnnnnnnnnnnnnnnnnnnnnnnnnnnnnnnnnnnnnnnnnnnnnnnnnnnnnnnnnnnnnnnnnnnnnnnnnnnnnnnnnnnnnnnnnnnnnnnnnnnnnnnnnnnnnnnnnnnnnnnnnnnnnnnnnnnnnnnnnnnnnnnnnnnnnnnnnnnnnnnnnnnnnnnnnnnnnnnnnnnnnnnnnnnnnnnnnnnnnnnnnnnnnnnnnnnnnnnnnnnnnnnnnnnnnnnnnnnnnnnnnnnnnnnnnnnnnnnnnnnnnnnnnnnnnnnnnnnnnnnnnnnnnnnnnnnnnnnnnnnnnnnnnnnnnnnnnnnnnnnnnnnnnnnnnnnnnnnnnnnnnnnnnnnnnnnnnnnnnnnnnnnnnnnnnnnnnnnnnnnnnnnnnnnnnnnnnnnnnnnnnnnnnnnnnnnnnnnnnnnnnnnnnnnnnnnnnnnnnnnnnnnnnnnnnnnnnnnnnnnnnnnnnnnnnnnnnnnnnnnnnnnnnnnnnnnnnnnnnnnnnnnnnnnnnnnnnnnnnnnnnnnnnnnnnnnnnnnnnnnnnnnnnnnnnnnnnnnnnnnnnnnnnnnnnnnnnnnnnnnnnnnnnnnnnnnnnnnnnnnnnnnnnnnnnnnnnnnnnnnnnnnnnnnnnnnnnnnnnnnnnnnnnnnnnnnnnnnnnnnnnnnnnnnnnnnnnnnnnnnnnnnnnnnnnnnnnnnnnnnnnnnnnnnnnnnnnnnnnnnnnnnnnnnnnnnnnnnnnnnnnnnnnnnnnnnnnnnnnnnnnnnnnnnnnnnnnnnnnnnnnnnnnnnnnnnnnnnnnnnnnnnnnnnnnnnnnnnnnnnnnnnnnnnnnnnnnnnnnnnnnnnnnnnnnnnnnnnnnnnnnnnnnnnnnnnnnnnnnnnnnnnnnnnnnnnnnnnnnnnnnnnnnnnnnnnnnnnnnnnnnnnnnnnnnnnnnnnnnnnnnnnnnnnnnnnnnnnnnnnnnnnnnnnnnnnnnnnnnnnnnnnnnnnnnnnnnnnnnnnnnnnnnnnnnnnnnnnnnnnnnnnnnnnnnnnnnnnnnnnnnnnnnnnnnnnnnnnnnnnnnnnnnnnnnnnnnnnnnnnnnnnnnnnnnnnnnnnnnnnnnnnnnnnnnnnnnnnnnnnnnnnnnnnnnnnnnnnnnnnnnnnnnnnnnnnnnnnnnnnnnnnnnnnnnnnnnnnnnnnnnnnnnnnnnnnnnnnnnnnnnnnnnnnnnnnnnnnnnnnnnnnnnnnnnnnnnnnnnnnnnnnnnnnnnnnnnnnnnnnnnnnnnnnnnnnnnnnnnnnnnnnnnnnnnnnnnnnnnnnnnnnnnnnnnnnnnnnnnnnnnnnnnnnnnnnnnnnnnnnnnnnnnnnnnnnnnnnnnnnnnnnnnnnnnnnnnnnnnnnnnnnnnnnnnnnnnnnnnnnnnnnnnnnnnnnnnnnnnnnnnnnnnnnnnnnnnnnnnnnnnnnnnnnnnnnnnnnnnnnnnnnnnnnnnnnnnnnnnnnnnnnnnnnnnnnnnnnnnnnnnnnnnnnnnnnnnnnnnnnnnnnnnnnnnnnnnnnnnnnnnnnnnnnnnnnnnnnnnnnnnnnnnnnnnnnnnnnnnnnnnnnnnnnnnnnnnnnnnnnnnnnnnnnnnnnnnnnnnnnnnnnnnnnnnnnnnnnnnnnnnnnnnnnnnnnnnnnnnnnnnnnnnnnnnnnnnnnnnnnnnnnnnnnnnnnnnnnnnnnnnnnnnnnnnnnnnnnnnnnnnnnnnnnnnnnnnnnnnnnnnnnnnnnnnnnnnnnnnnnnnnnnnnnnnnnnnnnnnnnnnnnnnnnnnnnnnnnnnnnnnnnnnnnnnnnnnnnnnnnnnnnnnnnnnnnnnnnnnnntcctgattctccttatatgacctcaaactgaccatagtaaatagtgtagaaggtcttcttaaggctctaaatgtcagggtctcccgtccccctgatgcctgacttgtacagtcagtgtggagtagagggtttcctccacccagggttgactcgggggccatctgggtcccattctggcctcaagaccccaaacaag

SEQ ID NO: 23737 - DNA, 1913 bp, Macaca Mulatta
  misc_feature (1)...(1913): n = A,T,C or G
ncaggtatcgcaggacttccctttcctccaccccagtgagaccagtgtcctgaatcgactctgccggctcggcacagactatattcgcttcactgagttcattgaacagtacacgggccatgtgcaacaacagnnnnnnnnnnnnnnnnnnnnnnnnnnnnnnnnnnnnnnnnnnnnnnnnnnnnnnnnnnnnnnnnnnnnnnnnnnnnnnnnnnnnnnnnnnnnnnnnnnnnnnnnnnnnnnnnnnnnnnnnnnnnnnnnnnnnnnnnnnnnnnnnnnnnnnnnnnnnnnnnnnnnnnnnnnnnnnnnnnnnnnnnnnnnnnnnnnnnnnnnnnnnnnnnnnnnnnnnnnnnnnnnnnnnnnnagattcatggttgtcaaatcctggaaacagtctacaaacacagctgtggggggttgcctcctgttcgaagtgcactggaaannnnnnnnnnnnnnnnnnnnnnnnnnnnnnnnnnnnnnnnnnnnnnnnnnnnnnnnnnnnnnnnnnnnnnnnnnnnnnnnnnnnnnnnnnnnnnnnnnnnnnnnnnnnnnnnnnnnnnnnnnnnnnnnnnnnnnnnnnnnnnnnnnnnnnnnnnnnnnnnnnnnnnnnnnnnnnnnnnnnnnnnnnnnnnnnnnnnngactagcgcctgattgaggaagagaacatgctggcaccatctctgaagcagttttccctacgagtggagattttgccatcctacattccagtgagggttgctgaaaaaatcctatttgttggagaatctgtccagatgtttgagaatcaaaatgtgaacctgactagaaaagnnnnnnnnnnnnnnnnnnnnnnnnnnnnnnnnnnnnnnnnnnnnnnnnnnnnnnnnnnnnnnnnnnnnnnnnnnnnnnnnnnnnnnnnnnnnnnnnnnnnnnnnnnnnnnnnnnnnnnnnnnnnnnnnnnnnnnnnnnnnnnnnnnnnnnnnnnnnnnnnnnnnnnnnnnnnnnnnnnnnnnnnnnnnnnnnnnnnnnnnnnnnnnnnnnnnnnnnnnnnnnnnnnnnnnnnnnnnnnnnnnnnnnnnnnnnnnnnnnnnnnnnnnnnnnnnnnnnnnnnnnnnnnnnnnnnnnnnnnnnnnnnnnnnnnnnnnnnnnnnnnnnnnnnnnnnnnnnnnnnnnnnnnnnnnnnnnnnnnnnnnnnnnnnnnnnnnnnnnnnnnnnnnngcagatgctactcaggcaagagaagggccttctcgggaaacttctccccgggaagcccctgcatctggctgggcagccctaggtctttcctacaaagtacagtggccactacatattctcttcaccccagctgtcctggaaaagtnnnnnnnnnnnnnnnnnnnnnnnnnnnnnnnnnnnnnnnnnnnnnnnnnnnnnnnnnnnnnnnnnnnnnnnnnnnnnnnnnnnnnnnnnnnnnnnnnnnnnnnnnnnnnnnnnnnnnnnnnnnnnnnnnnnnnnnnnnnnnnnnnnnnnnnnnnnnnnnnnnnnnnnnnnnnnnnnnnnnnnnnnnnnnnnnnnnnnnnnnnnnnnnnnnnnnnnnnnnnnnnnnnnnnnnnnnnnnnnnnnnnnnnnnnnnnnnnnnnnnnnnnnnnnnnnnnnnnnnnnnnnnnnnnnnnnnnnnnnnnnnnnnnnnnnnnnnnnnnnnnnnnnnnnnnnnnnnnnnnnnnnnnnnnnnnnnnnnnnnnnnnnnnnnnnnnnnnnnnnnnnnnnnnnnnnnnnnnnnnnnnnnnnnnnnnnnnnnnnnnnnnnnnngctttagccgccagtcttcactcctattcaagattctctccagtgttcggaatcatcagatcaactcagatttggctcaactactgttacgactagattataacaaatactatacccaggctggtggaactctgggcag

SEQ ID NO: 23738 - DNA, 381 bp, Macaca Mulatta
  misc_feature (1)...(381): n = A,T,C or G
gaatggttcatcattactaacaggatattcctcatgacattgctgtctggatctttgaccatcagtctgtgacttgccccttctctttannnnnnnnnnnnnnnnnnnnnnnnnnnnnnnnnnnnnnnnnnnnnnnnnnnnnnnnnnnnnnnnnnnnnnnnnnnnnnnnnnnnnnnnnnnnnnnnnnnnnnnnnnnnnnnnnnnnnnnnnnnnnnnnnnnnnnnnnnnnnnnnnnnnnnnnnnnnnnnnnnnnnnnnnnnnnnncaagccgggccttctctgcctgaactttgaagctgttttgtctccagacccagccctcatccactcaacacattcactgacaaactctcacgctcacaccgggtcatctgattgtga

SEQ ID NO: 23739 - DNA, 558 bp, Macaca Mulatta
  misc_feature (1)...(558): n = A,T,C or G
atccatgtagcagacaggagagaactgggggagttcacggttattcatgcgctcacagggtggttaccagaagtcatttctcttcannnnnnnnnnnnnnnnnnnnnnnnnnnnnnnnnnnnnnnnnnnnnnnnnnnnnnnnnnnnnnnnnnnnnnnnnnnnnnnnnnnnnnnnnnnnnnnnnnnnnnnnnnnnnnnnnnnnnnnnnnnnnnnnnnnnnnnnnnnnnnnnnnnnnnnnnnnnnnnnnnnnnnnnnnnnnnnnnnnnnnnnnnnnnnnnnnnnnnnnnnnnnnnnnnnnnnnnnnnnnnnnnnnnnnnnnnnnnnnnnnnnnnnnnnnnnnnnnnnnnnnnnnnnnnnnnnnnnnnnnnnnnnnnnnnnnnnnnnnnnnnnnnnnnnnnnnnnnnnnnnnnnnnnnnnnnnnnnnnnnnnnnnnnnnnnnnnnnnnnnnnnnnnnnnnnnnnnngttcttctgcaatacagacctctcatatggtcgtatatgcgacattcacacctctctatttgtttgaaaacaagatcttttcattagagaagatg

SEQ ID NO: 23740 - DNA, 668 bp, Macaca Mulatta
  misc_feature (1)...(668): n = A,T,C or G
ggctccgagaacggggtctccaaggacgtctgggtgtatgacaccgtacatgaggaatggtccaaggcggcgcccatgctgattgcccgctttggccatgnnnnnnnnnnnnnnnnnnnnnnnnnnnnnnnnnnnnnnnnnnnnnnnnnnnnnnnnnnnnnnnnnnnnnnnnnnnnnnnnnnnnnnctgaaacaagtggagaaatacgaccctggggccaacaagtggatgatggtggcccccttgagggatggcgtcagcaatgccgcagtagtgagtgccaagctgaagctctttgtgtttggaggaaccagcatccaccgggacatggtgtccaaggtccagtgctatgaccccgcggagaacaggtggacgatcaaggctgagtgcccccagccgtggcggtacacagccgctgccgtcctgggcagccagatcttcatcatgggaggtgacacggaattcacggccgcctcggcctaccgctttgactgtgagaccaaccagtggacacggattggggacatgaccgccaagcgcatgtcctgccatgccctggcgtccggcaacaagctctatgtggttgggggctactttgggacccagaggtgtaagactctggactgctatgaccccacttcagatacatggaactgcatcaccacagt

SEQ ID NO: 23741 - DNA, 91 bp, Macaca Mulatta
ttcctgctgcagatatttactgtgttccgaatattgatacgcccagagatgtttccaaaggactggactgttatgcgcttggttgccaaca

SEQ ID NO: 23742 - DNA, 812 bp, Macaca Mulatta
  misc_feature (1)...(812): n = A,T,C or G
gggacatcaccaatttcagcagcagctggagcgatggcctggccttctgtgccctgctccacacctacctgcctgcccacatcccctaccaggagctgaacagtcaggagaaaaaagaggaatcttttgttggcatttgaagcagctgaaagtgtaggcatcaaacccagcctggaactcagtgagatgctatacacggaccggcctgactggcagagcgtgatgcagtacgtggcccaaatctacaagtactttgagacgtaaccatggagggcctggagcagccaccactgccacctgctgcagcttgtcctggaagcgccagatcactgtccactgaccctgctctgcccaccacccagctgcctagacttcagaggcaggctcaatccaagtggaccaacacccaaataggaaagagtgggtcccactgtgtacctgtctcaaatgcaaacgcagctggactgtaaattggggactctttgatctcccatgggatgcttctaaagagcccagcctccctccttccagaccaagaccccacaccccaggcttgtttttggctgattccattggggtgactgaaacacatcattctgcagaaatgtcagacaaaagagcatctcctaaatcaaggccttttgggttgctggttgtttaaaaaaaatcctggccttttgcctttaatgaaaacctttggcccttgggcctccgngggtggtaagctccgtggcctggtaatccccgagcactttttaggaagcccaaggcaaccaggaatcttttttaacccccaggaattcccaaggctg

SEQ ID NO: 23743 - DNA, 598 bp, Macaca Mulatta
  misc_feature (1)...(598): n = A,T,C or G
ccctgcaaggagggaaagaggatgcttccagggaagattgggagaagagcagccaaggcgacccttgggccgagggtggccaggagagagactatgcaagcagagatgagtgtctcagcttcagggcttttcagagtacccggcggggtccctctttttctgattacctatatttcaagcacagagatgagagtttgaaagaattactggagaggaaaatggaaaaacaagcagtgcttttaggtatctannnnnnnnnnnnnnnnnnnnnnnnnnnnnnnnnnnnnnnnnnnnnnnnnnnnnnnnnnnnnnnnnnnnnnnnnnnnnnnnnnnnnnnnnnnnnnnnnnnnnnnnnnnnnnaatggcttagactaaataagcagggatgtaggtaatggaaagccttctcaggtcattcacggggcccttgatacccttcacacatgtgcagggtcttcttcagtggcgtttgatgcatcgccagtataataaactgtgagtattcttctagatatctaatcgtaagctgatgctgaggtgcttttagaaattctactttcctctgatttatatgcaatacatggtaaatttctaattg

SEQ ID NO: 23744 - DNA, 552 bp, Macaca Mulatta
  misc_feature (1)...(552): n = A,T,C or G
catactggagagaaaccctttaaatgtacagaatgtggcnnnnnnnnnnnnnnnnnnnnnnnnnnnnncaaacataagaaaattcatactggagagaaaccctacaaatgtgaagaatgtggcaaaacctttagatggtccacaagcctgaacgaacataagaatattcatactggagagaaaccctacaaatgtgaaaaatgcagcaaagcctttaataggtcgacatcacttactaaacataagagaattcatactggagagaaaccctacacatgtgaagaatgtgggaaagcctttacaaggtccacaacgctgaatgaacacaagaaaattcatactggagagaaaccctacaaatgtgaagaatgtggcaaagcctttacaaggtccacaacgctgaatgaacacaagaaaattcatactggagagaagccctacaaatgtaaagaatgtggcaaaacctttagatggtccacaagcctgaacgaacataagaatattcatactggagagaaaccctacaaatgtgaagaatgtggcaaagccttt

SEQ ID NO: 23745 - DNA, 978 bp, Macaca Mulatta
  misc_feature (1)...(978): n = A,T,C or G
acccgcagaggtgggctccccgcactctaccgaggtggacgagtccctgtccgtgtcctttgagcaggtactgccgccatccgcccccaccagtgaggctgggctgagcctccctctgcgtggcccccgggcccggcgctcggcctccccacacgatgtggacctgtgcctggtgtnnnnnnnnnnnnnnnnnnnnnnnnnnnnnnnnnnnnnnnnnnnnnnnnnnnnnnnnnnnnnnnnnnnnnnnnnnnnnnnnnnnnnnnnnnnnnnnnnnnnnnnnnnnnnnnnnnnnnnnnnnnnnnnnnnnnnnnnnnnnnnnnnnnnnnnnnnnnnnnnnnnnnnnnnnnnnnnnnnnnnnnnnnnnnnnnnnnnnnnnnnnnnnnnnnnnnnnnnnnnnnnnnnnnnnnnnnnnnnnnnnnnnnnnnnnnnnnnnnnnnnnnnnnnnnnnnnnnnnnnnnnnnnnnnnnnnnnnnnnnnnnnnnnnnnnnnnnnnnnnnnnnnnnnnnnnnnnnnnnnnnnnnnnnnnnnnnnnnnnnnnnnnnnnnnnnnnnnnnnnnnnnnnnnnnnnnnnnnnnnnnnnnnnnnnnnnnnnnnnnnnnnnnnnnnnnnnnnnnnnnnnnnnnnnnnnnnnnnnnnnnnnnnnnnnnnnnnnnnnnnnnnnnnnnnnnnnnnnnnnnnnnnnnnnnnnnnnnnnnnnnnnnnnnnnnnnnnnnnnnnnnnnnnnnnnnnnnnnnnnnnngggtcagccagcagccggcccggggcatcggccaccccacccaagtccccggtctacctggacctggcctacctgcccagtgggagcagcgcccacctggtggatgaggagttcttccagcgcgtgcgtgcgctctgctacgtcatcagtggccaggaccagcgcaaggaggagggcatgcgagccgtcctggacgcactgctggccagcaagcagcattgggaccgagacctgcaggt

SEQ ID NO: 23746 - DNA, 1680 bp, Macaca Mulatta
  misc_feature (1)...(1680): n = A,T,C or G
ccgcctggtcaagatcgcggtggtgggcgccagcggcgtgggcaagaccnnnnnnnnnnnnnnnnnnnnnnnnnnnnnnnnnnnnnnnnnnnnnnnnnnnnnnnnnnnnnnnnnnnnnnnnnnnnnnnnnnnnnnnnnnnnnnnnnnnnnnnnnnnnnnnnnnnnnnnnnnnnnnnnnnnnnnnnnnnnnnnnnnnnnnnnnnnnnnnnnnnnnnnnnnnnnnnnnnnnnnnnnnnnnnnnnnnnnnnnnnnnnnnnnnnnnnnnnnnnnnnnnnnnnnnnnnnnnnnnnnnnnnnnnnnnnnnnnnnnnnnnnnnnnnnnnnnnnnnnnnnnnnnnnnnnnnnnnnnnnnnnnnnnnnnnnnnnnnnnnnnnnnnnnnnnnnnnnnnnnnnnnnnnnnnnnnnnnnnnnnnnnnnnnnnnnnnnnnnnnnnnnnnnnnnnnnnnnnnnnnnnnnnnnnnnnnnnnnnnnnnnnnnnnnnnnnnnnnnnnnnnnnnnnnnnnnnnnnnnnnnnnnnnnnnnnnnnnnnnnnnnnnnnnnnnnnnnnnnnnnnnnnnnnnnnnnnnnnnnnnnnnnnnnnnnnnnnnnnnnnnnnnnnnnnnnnnnnnnnnnnnnnnnnnnnnnnnnnnnnnnnnnnnnnnnnnnnnnnnnnnnnnnnnnnnnnnnnnnnnnnnnnnnnnnnnnnnnnnnnnnnnnnnnnnnnnnnnnnnnnnnnnnnnnnnnnnnnnnnnnnnnnnnnnnnnnnnnnnnnnnnnnnnnnnnnnnnnnnnnnnnnnnnnnnnnnnnnnnnnnnnnnnnnnnnnnnnnnnnnnnnnnnnnnnnnnnnnnnnnnnnnnnnnnnnnnnnnnnnnnnnnnnnnnnnnnnnnnnnnnnnnnnnnnnnnnnnnnnnnnnnnnnnnnnnnnnnnnnnnnnnnnnnnnnnnnnnnnnnnnnnnnnnnnnnnnnnnnnnnnnnnnnnnnnnnnnnnnnnnnnnnnnnnnnnnnnnnnnnnnnnnnnnnnnnnnnnnnnnnnnnnnnnnnnnnnnnnnnnnnnnnnnnnnnnnnnnnnnnnnnnnnnnnnnnnnnnnnnnnnnnnnnnnnnnnnnnnnnnnnnnnnnnnnnnnnnnnnnnnnnnnnnnnnnnnnnnnnnnnnnnnnnnnnnnnnnnnnnnnnnnnnnnnnnnnnnnnnnnnnnnnnnnnnnnnnnnnnnnnnnnnnnnnnnnnnnnnnnnnnnnnnnnnnnnnnnnnnnnnnnnnnnnnnnnnnnnnnnnnnnnnnnnnnnnnnnnnnnnnnnnnnnnnnnnnnnnnnnnnnnnnnnnnnnnnnnnnnnnnnnnnnntccccctcacaggatgtgcatgctcagtgggctgtgtcttgaggagtcgtgaacttcacactcttcggccccagactttgcctgtatannnnnnnnnnnnnnnnnnnnnnnnnnnnnnnnnnnnngtgtcagttgattttggtgtgatttgtgtaaatggttcatggcaatggcattggagtgcttccgaggcctggctgagtcgtgcctaagggtggctgaaatacgaaaacactattttacagcaagtgaacaggggctacctgccaaatcccctctacagatgcactttaaaaagccactcatgctttggcttaaactgtaattaatttattttatgtacaataaatctcacttgaaaaag

SEQ ID NO: 23747 - DNA, 318 bp, Macaca Mulatta
agaggccattgcaaattcccttttcagaagaacatcagcaacccacctgatatgtcaggtttgaatccttttggagaggataatttttctaagttaactgaagaggaactattggacagagaatttgaccttctaagatcaagtaagggacacttgaaggcttattttggtgcggaggaaaataacagctctattattattcagcaaggccaaagacttttgagaatgtatatgggaaattctttttgtgcatttgagggcaaaattcaggccatcttcttatactatcaaattatgttgtgtgcattagaaatcagt

SEQ ID NO: 23748 - DNA, 1280 bp, Macaca Mulatta
  misc_feature (1)...(1280): n = A,T,C or G
attttgacctacagctcctcgtcttcatgtttccagnnnnnnnnnnnnnnnnnnnnnnnnnnnnnnnnnnnnnnnnnnnnnnnnnnnnnnnnnnnnnnnnnnnnnnnnnnnnnnnnnnnnnnnnnnnnnnnnnnnnnnnnnnnnnnnnnnnnnnnnnnnnnnnnnnnnnnnnnnnnnnnnnnnnnnnnnnnnnnnnnnnnnnnnnnnnnnnnnnnnnnnnnnnnnnnnnnnnnnnnnnnnnnnnnnnnnnnnnnnnnnnnnnnnnnnnnnnnnnnnnnnnnnnnnnnnnnnnnnnnnnnnnnnnnnnnnnnnnnnnnnnnnnnnnnnnnnnnnnnnnnnnnnnnnnnnnnnnnnnnnnnnnnnnnnnnnnnnnnnnnnnnnnnnnnnnnnnnnnnnnnnnnnnnnnnnnnnnnnnnnnnnnnnnnnnnnnnnnnnnnnnnnnnnnnnnnnnnnnnnnnnnnnnnnnnnnnnggatgcgaaggtcatgtcctggtgggattatggctatcagattacagctatggcaaaccgaaccattttagtggataataacacatggaataatactcatatttctcgagtagggcaggncaggcaatggcgtccacagaggaaaaagcctatgagatcatgagggagcttgatgtcagttatgtgctggtcatttttggaggcctcactgggtattcttctgatgnnnnnnnnnnnnnnnnnnnnnnnnnnnnnnnnnnnnnnnnnnnnnnnnnnnnnnnnnnnnnnnnnnnnnnnnnnnnnnnnnnnnnnnnnnnnnnnnnnnnnnnnnnnnnnnnnnnnnnnnnnnnnnnnnnnnnnnnnnnnnnnnnnnnnnnnnnnnnnnnnnnnnnnnnnnnnnnnnnnnnnnnnnnnnnnnnnnnnnnnnnnnnnnnnnnnnnnnnnnnnnnnnnnnnnnnnnnnnnnnnnnnnnnnnnnnnnnnnnnnnnnnnnnnnnnnnnnnnnnnnnnnnnnnnnnnnnnnnnnnnnnnnnnnnnnnnnnnnnnnnnnnnnnnnnnnnnnnnnnnnnnnnnnnnnnnnnnnnnnnnnnnnnnnnnnnnnnnnnnnnnnnnnnnnnnnnnnnnnnnnnnnnnnnnnnnnnnnnnnnnnnnnnnnnnnnnnnnnnnnnnnnnnnnnnnnnnnnnnnnnnnnnntgtctgaaagttttgtcctgggcagtatgggctgggccaaatgaaatgatttttataattctaaacaggttaccaaatgaaatgtcatggctttactttggtcaattaaagggggga

SEQ ID NO: 23749 - DNA, 542 bp, Macaca Mulatta
  misc_feature (1)...(542): n = A,T,C or G
gtgaccagaagtcagcagcttcccagaannnnnnnnnnnnnnnnnnnnnnnnnnnnnnnnnnnnnnnnnnnnnnnnnnnnnnnnnnnnnnnnnnnnnnnnnnnnnnnnnnnnnnnnnnnnnnnnnnnnnnnnnnnnnnnnnnnnnnnnnnnnnnnnnnnnnnnnnnnnnnnnnnnnnnnnnnnnnnnnnnnnnnnnnnnnnnnnnnnnnnnnnnnnnnnnnnnnnnnnnnnnnnnnnnnnnnnnnnnnnnnnnnnnnnnnnnnnnnnnnnnnnnnnnnnnnnnnnnnnnnnnnnnnnnnnnnnnnnnnnnnnnnnnnnnnnnnnnnnnnnnnnnnnnnnnnnnnnnnnnnnnnnnnnnnnnnnnnnnnnnnnnnnnnnnnnnnnnnnnnnnnnnnnnnnnnagtatgcagacccagtagctgacctgctggacaaatggggggccttccgggcccggctgtttcgagagtcctgtgtcttccaccgggggaattatgtgaaggacctgagccggttgggccgagacctgcggcgggtgctca

SEQ ID NO: 23750 - DNA, 636 bp, Macaca Mulatta
agcgactgagatggcagcgcaactgcactgcagcgcagccccaccctggctccactttgcagcagctccggcacttggcggaggagctgcggttgctcctgcctcgagtgcgggtcggcgaagcccaggagaccaccgaggagtttaatcgagagatgttctggagaagactcaatgaggcagctgtgacagtgtcaatggaagccacgactctgaccacagtcttctctcagcttccactgccgtctccacaggaaacccagaagttctgtgaacaagtccatgctgccatcaaggcatttattgcagtgtactatttgcttccaaaggatcaggggatcaccctgagaaagctggtacggggcgccaccctggacatcgtggatggcatggctcagctcatggaagtactttccatcactccaactcagagccctgagaacaatgaccttatttcctacaacagtgtctgggttgcgtgccagcagatgcctcagataccaagagataacaaagctgcggctcttttgatgctgaccaagaatgtggattttgtgaaggatgcacatgaagaaatggagcgggctgtggaagaatgcgacccttactctggcctcttgaatgatactgacgaga

SEQ ID NO: 23751 - DNA, 434 bp, Macaca Mulatta
aataacatggaacaatttgtcttttctcatttgtgataatttgtccgcaaacagtttatctttggaatctgaccagtgatcctgtttgagcctctcaggaagcattgatgaatcattccaccaagaaaacaagcacctgccatagacctggcagaataaataaggaaatccttaaagatctacaagttcaaatatgtcatgaccatcatagcagaggagtgactttctgactaatgctgccacccactccacaaacagaataagaagtgaggcctgctgggtgtttagctcatggcattatctcatttgtcccctcctcctttcatgctccagtttataaagaaacagagatgatgtgtgtgtatgcttcaaatgcagaaacaattgggcttttctttaacaggttaacagtttgtgctggttataagaaatta

SEQ ID NO: 23752 - DNA, 1089 bp, Macaca Mulatta
  misc_feature (1)...(1089): n = A,T,C or G
ttggaacctgcttctcagagggcctggactaacatactctggtagtgcatgaagcatctgtgatcacagtgtgacaagaaaatagcacaagcaaacctatgaggacttgagagaattcaaaanngtcatgtagggatcccaccccttctctgtgttttcactctgaagctctacacaactttacacctgaatgaacgccaaacctctgtggatatataaagggaagcttgaggaggaatttcacagatacagtgcagaagcagaggcaaaagaattaaccagctcttcagccaagcaaatcctctactcaccatgcttcctcctgccattcatttctatctccttccccttgcatgcatcctaatgaaaagctgtttggcttttaaaaatgatgccacagaaatcctttattcacatgtggttaaacctgttccagcacaccccagcagcaacagcacgatgaatcaagccagaaatggaggcaggcatttcagtaacactggactggatcggaacatcgggttcaagtgggttgccgggaactgcgttccaccaaatacatctctgatggccagtgcaccagcatcagccctctgaaggagctggtgtgtgctggtgagtgcttgcccctgccagtgctccctaactggattggaggaggctatggaacaaagtactggagcaggaggagctcccaggagtggcggtgtgtcaatgacaaaacccgtacccagagaatccagctgcagtgccaagatggcagcacacgcacctacaaaatcacagtagtcactgcctgcaagtgcaagaggtacacccggcagcacaacgagtccagtcacaactttgagagcatgtcacctgccaagcccgtccagcatcacagagagcggaaaagagccagcaaatccagcaagcacagcatgagttagaactcagactcccataactagacttactagtaaccatctgctttacagatttgattgcttggaaaactcaagcctgccattgctattttctcacttgaaagtatatgctttctgctttgatcaacccagcaagctgtcttaagtatcaggaccttct

SEQ ID NO: 23753 - DNA, 694 bp, Macaca Mulatta
  misc_feature (1)...(694): n = A,T,C or G
agttatctgtggggaaagtggtagtaataattgaaattcatcaataatcatataatttcactatagactttacttgtattatctcctgtcagtccttctaacaaaactgaaattaccgaatgaactgaatttacttttcatcttattttttatccacacactggtgatgctgagaaacaataattggtccaaatgcagacatcaagaagcaggcaggaaaatggaaaaacttagataatacacagatgataaagtttcaagaaaataaaaattggctggaatctcaagttatgtgtttctatattggtgtaagcatataagtgaaaagtctttgtactacagtgtaatagagaaaagatttgtcagtgtgtgttttttttaatgaaataactagtctgtgctactttatgtcaatgtaaaaattggtaaactagaagtaaattgtccacaaccctcagttatgatactnnnnnnnnnnnnnnnnnnccaaagtttttcccaaggataagatacaaatacatggtagctattgtttaaaaatgattgatttacttgcagatttttcagaggatgttatatgtttgtcattcactaaatgttcagaattgtagttttaccaaatctgaagtgccatcaattataagaatcaccattattttatgttccattaagaaaaacacaataaaacatgaca

SEQ ID NO: 23754 - DNA, 795 bp, Macaca Mulatta
gggtgggaaagcctacgtgacccgttcaggcctctatcagcactggaaagtccacactggggaacggccctatgaatgtagcctgtgtgggaaaaccttcactaccagatcctaccgcaatcggcaccagctgttccacactgaagagaggtcttacgaatgtacagagtgtgggaaagccttcaaacatagttccaccctccttcagcacaagaaagtccatacttcagaaaggccccagggggacagctcacatgggaaagtcattagctgctagcaccgtgttcgtcaggaagggtctttttccagaaaggagattgaggagagtggccatgagagtgccatgtgaaagaagctaaaccttgtacatcccaacatccaccccggggagagttcccatgtgtgcctggcgtgtgggaagctttcaggagccacactgcactctgaattgcctgtggctgttgggagtgtcacatcactgtcagtttatccaccgccatcctcctctgtccaccccgtaaagtccctacagcaagtgggacaggagaccctgtgctccttgctccaaacagttagagaaatccttaatgggtaaagccccaaaacagaatttcatttcccctaccccctgaactgggttttaacctggggaaaaatggaacccaaccctcttggggccagaaaagaaacctgaaaccattgggaattctgggcctgtgggggcctcttcccttggggaaaaaggtttttaaccaaccttttacctatggggaaaaaatgtgggtttggaaacat

SEQ ID NO: 23755 - DNA, 1033 bp, Macaca Mulatta
ctgaggaagccacaagggaggacattttctgcagttgctgaaccggtagcagccaggtcctgagaaagccctctcttgtggaagaataacggtcaggcgcgaaagcttttcatcctgcaaagctggggcagaaggtttttccttgaatgtggtcacctgcacttcagctcaggagtcctgttggctgaagtccagagtgtcctttctgattcctgaagtagatgaacagcccggccccaaggaagagcaggcccagcacaaagcccccaactccactcagcatcttgctctgtgcagattcagaccgtgctctccattccactgtgagagggctggtcacgcttgggtgctccacttggcaggtgtaaacctctccactctgaggaactgtttccagcatcaccagggtctggaaggtccagtctccattctggatcaggcctgtggacaccaccccagccttctcttcctggccgttccggaaccacctgacttcaatgctgcctggatagaaaccactcacagagcagaccaggagggtgtggtgctgcaggggctgggtctttgcaggatacacagtcaccttaggttggactcgccgctgcactgtgaagctctcaccaaccccgtagttgtgtctgcagtaggtgtccacctgggcccgcttctgctccaggaagtccttctggctgttccagtactcggcgacaggccgctccagttccgacaccgcccggaactcccccaggtcgctgtggaagcgcacgaactcctcctggttatagaagtatctctgcaggtaccgcacccgctccgtcccgttgaagaaatgacactcagacttagcctgctccaagaaacgtggtcgggtgtccccagccaaagccagtggggagctcagcaccatcagtgtcactgtgagagctgccatgcaggagcctccagggagcttcagacacaccatgctggagaacaggacaggaccagggtccagaggagcagacaagtctcactcagggagaactatgacccc

SEQ ID NO: 23756 - DNA, 494 bp, Macaca Mulatta
ggagcaagtaacatcactagaattcatcaggaccatgaaacaacaagatccagtggctcttcttagtcccagcactccatcatcttcccttcagctgtggtgagaggctgcatcttccctaacctctgcctggcttgagagctgacagagaaaaggcttagttctgaaagctgatatcatgttgttggaagatgagcagccagatcattgcctaatctcgccttgctgtctgtgatgtagatggtggttcctatcccgagaacaagtgtgtttattcttttgcttctccccaataaagcacatgtttcatggttaggcccacattgcttttgtttgcatttcgtgtctttaacctcttctgttaactacatcaaagtgagtgtttcttttcattcctattgaattattagaattattaggcttttccatcactgaattcagttttgcttgaaatgtgtgttttggattgggtacaacaattgattctcttttat

SEQ ID NO: 23757 - DNA, 137 bp, Macaca Mulatta
ctgtgccgtcgtctacgccttcaccgccagtgcgcctgcgcaagacgctggacttggcgcttagcatcctagccgattgctgtacggaaggggcgtgccgggccgaagtgcgcagactcggaggcatactccctttg

SEQ ID NO: 23758 - DNA, 90 bp, Macaca Mulatta
ggaaacagaatgtgcctacatactcttcgtggtcgccatattttggcttacagaagcattgcctctgtcggtaacagctttgctacctag

SEQ ID NO: 23759 - DNA, 155 bp, Macaca Mulatta
agagaagaggctgctcggctggctggaggccgcatagtgaggccagggcagagccgactgcatggaggcaaccccagccctgtgtgttctcccctgtgctagaggtgaaagggtgtcctgtgtggggatggcctaggcaaggtgggtgacaggaa

SEQ ID NO: 23760 - DNA, 633 bp, Macaca Mulatta
ggggagaagaggcctcagtttctctcaggtctgtgacctgccccatctggtaaataggtggagagaacacaataggcaggggcctccagcagatgctccagcccacagtctttgtccctgggtggctcactagggccagaagagaaggctcactgggacttgaatccttgcctggtcaccttccatctttgagaccttgggcaggagacttcatctctcatagtttccgaaagctgaattcatgagacggttgtgaggattcggggtccccagtctatgtgaggatctcctgtcttctgttgaccagccactgaaaattgccagagacaaggtggtgggaaaggattaccttttgtgtgactacaacagagatggggactcctataggtcaccatggagtaacaagtatgaccctcccttggaggatggggccatgccgtcggctcggctgagaaagctggaggtggaagccaacaatgcctttgaccagtatcgagacctgtattttgaaggcggcgtctcatctgtctacctctgggatctggatcatggctttgctggagtgatcctcataaagaagctggagatggataaagagatcaaggctgctggattcatcacgtgtagagtgca

SEQ ID NO: 23761 - DNA, 185 bp, Macaca Mulatta
caggccagccttgcacaatcaggttccgttcactctgcacccccatttcttagatggggtactgagcactgcttttcctttagctcacttaatatggcagcttctcagggatggaacctaccatggctgtgggagatgcttcgctactactttactacctttcctagggagggcagctcattttt

SEQ ID NO: 23762 - DNA, 640 bp, Macaca Mulatta
  misc_feature (1)...(640): n = A,T,C or G
ggatgggcgattgctccaggaatttaacaagattgagcccccgctgattttcgagtgtaaccaggcgtgctcctgctggagaaactgcaagaaccgggtcgtacagagtggtatcaagnggtgcgactacagctctaccgaacagccaaaatgggctnnnnnnnnnnnnnnnnnnnnnnnnnnnnnnnnnnnnnnnnnnnnnnnnngtatgtcggggagctgatctctgatgctgaggctgatgtgagagaggatgattcttacctcttcgacttggacaacaagnnnnnnnnnnnnnnnnnnnnnnnnnnnnnnnnnnnnnnnnnnnnnnnnnnnnnnnnnnnnnnnnnnnnnnnnnnnnnnnnnnnnnnnnnnnnnnnnnnnnnnnnnnnnnnnnnnnnnnnnnnnnnnnnnnnnnnnnnnnnnnnnnnnnnnnnnnnnnnnnnnnnnnnnnnnnnngtttgactatggcgaccgcttctgggacatcaaaagcaagtatttcacctgccagtgtggctctgagaagtgcaagcactcagccgaagccattgccctggagcagagccgtctggcccgcctggacccacaccctgagctgctgcccgagctcggctccttgccccctgtcaacacatga

SEQ ID NO: 23763 - DNA, 274 bp, Macaca Mulatta
ggggtgggggatgtggatgtacagcggataacaatctttaaagtcgtagcactttgtatcagagttggaatggagatggagcactcatgtcgtcccaagtaaagcggccttttgtgtgttgatttcagctttcatattacataagggaagccttgagtggtggtgctagaagaggcaccccacagactcagcaccgccagagaggattttggagggctcctctgggaaatggcccgacagcattctcaggttgtgcatgaccagcagatactat

SEQ ID NO: 23764 - DNA, 635 bp, Macaca Mulatta
  misc_feature (1)...(635): n = A,T,C or G
gggggagagctgctgtgtaaccttaggcaagttacataaccttcctaagactcagcttgaaataatgctggagcccaaggtctggagagaagctgctactcaagtattctttgccttaggtctgggatttggtggtgtcattgccttttcaagctacaacaagagagacaacaactgccactttgatgctgtcctggtgtccttcatcaattttttcacttctgtcctggcaacattggtggtgtttgcagttctgggcttcaaagcaaatgtcataaatgagaaatgcattatacaaaattcagagatgatcatgaaatttttgaaaatgggaaacattagtcaggatattattccccatcatatcaacctttcagcagttactgcagaagattatcatttagtttatgacatcattcaaaaagttaaagaagaagagtttcctgctcttcatctcaattcctgccaaattgaagaagagctaaataaagctgttcaggggactggcttagcttttattgcctttacagaagcgatgacacatttccctgcatctcccttctggtcagtgatgtttttcctcatgctggtcaatctangccttggcagtatgtttggaaccattgnangggatg

SEQ ID NO: 23765 - DNA, 365 bp, Macaca Mulatta
tggggaggtggagggaagacttgactttcattctacagtaaaggatctcatggttcagaggaaggtcaaagacccttgatccttgaccctgagagctaaaacatctagtcctttaacttcttagcctgggccctggacaagagactttagctatcggaggtctcagacagatggctctgcagagaggaaggaaagcgcagtgcctgcactgtgcacactcttccaagcttgtgggcctgcggtctccatcactgtgcgttttcttctcttctgaaggttgtcactgagccgcccaatgggctgaaactcaacatgagggcaacttacttcaagatctctcacgaaatgctggaccagagcccgca

SEQ ID NO: 23766 - DNA, 1667 bp, Macaca Mulatta
  misc_feature (1)...(1667): n = A,T,C or G
agtagccatccctgccattggggcccagtattccatgtttccagcagctccagcccctaaaatgattgaagatggcaaaatccacacagtggaacacatgatcagccccaaagctgtgcagccagacccagccagtgctgctgcnnnnnnnnnnnnnnnnnnnnnnnnnnnnnnnnnnnnnnnnnnnnnnnnnnnnnnnnnnnnnnnnnnnnnnnnnnnnnnnnnnnnnnnnnnnnnnnnnnnnnnnnnnnnnnnnnnnnnnnnnnnnnnnnnnnnnnnnnnnnnnnnnnnnnnnnnnnnnnnnnnnnnnnnnnnnnnnnnnnnnnnnnnnnnnnnnnnnnnnnnnnnnnnnnnnnnnnnnnnnnnnnnnnnnnnnnnnnnnnnnnnnnnnnnnnnnnnnnnnnnnnnnnnnnnnnnnnnnnnnnnnnnnnnnnnnnnnnnnnnnnnnnnnnnnnnnnnnnnnnnnnnnnnnnnnnnnnnnnnnnnnnnnnnnnnnnnnnnnnnnnnnnnnnnnnnnnnnnnnnnnnnnnnnnnnnnnnnnnnnnnnnnnnnnnnnnnnnnnnnnnnnnnnnnnnnnnnnnnnnnnnnnnnnnnnnnnnnnnnnnnnnnnnnnnnnnnnnnnnnnnnnnnnnnnnnnnnnnnnnnnnnnnnnnnnnnnnnnnnnnnnnnnnnnnnnnnnnnnnnnnnnnnnnnnnnnnnnnnnnnnnnnnnnnnnnnnnnnnnnnnnnnnnnnnnnnnnnnnnnnnnnnnnnnnnnnnnnnnnnnnnnnnnnnnnnnnnnnnnnnnnnnnnnnnnnnnnnnnnnnnnnnnnnnnnnnnnnnnnnnnnnnnnnnnnnnnnnnnnnnnnnnnnnnnnnnnnnnnnnnnnnnnnnnnnnnnnnnnnnnnnnnnnnnnnnnnnnnnnnnnnnnnnnnnnnnnnnnnnnnnnnnnnnnnnnnnnnnnnnnnnnnnnnnnnnnnnnnnnnnnnnnnnnnnnnnnnnnaaaatgagtaaaatctttgtatttctgctggcattaagggttgatggtgttaccatgtatcatcatggcggtactattttttaaaagaaacactgattctctccttaagccaacattgaaaagacttgccacacttctgagtccaaacactggaaagctctcctttgccaccattagctgggctcattctccatgtgccttaaccttacacatgcccccactaccccatctctcaccctgtcccctcctccccaaattcccagtccctccacaatgtttggccagcctaggactgatgaatagctctgaaagagggaggagctggtggcttttatacttcttcctgggtttnnnnnnnnnnnnnnnnnnnnnnnnnnnnnnnnnnnnnnnnnnnnnnnnnnnggaagtattatcttctatgtgtgctattttcagcagcagagtaagtacaaggttttaatcgagctgcattagacacctttgcctagctatttaattgcccaatataaaactttaatgccatttctaatgcttttattcatttttgaagtatgagtttgtagggacaaagaatgtatgttatcatagacaagacccccagagactcttgtcagcagaaagttatgcttctagttgccttaccatgtttcatgcaaaactgtccgtggtcctcaagggtgttggaa

SEQ ID NO: 23767 - DNA, 2788 bp, Macaca Mulatta
  misc_feature (1)...(2788): n = A,T,C or G
ctaagctcagcattggccagagagaagtaacagttcagaaaggaccactgtttagagctgaaggttacccagtcagcattggctgcaatgtaactggccaccagggaccttctgagcagcatttccagtggtctgtttacctaccaacaaacccgacccaggaagtccagatcattagcaccaaggatgctgccttctcttacgcagtatatacgcagcgggtgcgaagcagagacatctacgtggagagggtccggggcaactcggtcttgttgcacatctcaaagctccagatgaaggatgctggcgagtatgagtgtcacacaccgaacactgatgagaaatactatgggagctacagtgcaaagactaatctaattgnnnnnnnnnnnnnnnnnnnnnnnnnnnnnnnnnnnnnnnnnnnnnnnnnnnnnnnnnnnnnnnnnnnnnnnnnnnnnnnnnnnnnnnnnnnnnnnnnnnnnnnnnnnnnnnnnnnnnnnnnnnnnnnnnnnnnnnnnnnnnnnnnnnnnnnnnnnnnnnnnnnnnnnnnnnnnnnnnnnnnnnnnnnnnnnnnnnnnnnnnnnnnnnnnnnnnnnnnnnnnnnnnnnnnnnnnnnnnnnnnnnnnnnnnnnnnnnnnnnnnnnnnnnnnnnnnnnnnnnnnnnnnnnnnnnnnnnnnnnnnnnnnnnnnnnnnnnnnnnnnnnnnnnnnnnnnnnnnnnnnnnnnnnnnnnnnnnnnnnnnnnnnnnnnnnnnnnnnnnnnnnnnnnnnnnnnnnnnnnnnnnnnnnnnnnnnnnnnnnnnnnnnnnnnnnnnnnnnnnnnnnnnnnnnnnnnnnnnnnnnnnnnnnnnnnnnnnnnnnnnnnnnnnnnnnnnnnnnnnnnnnnnnnnnnnnnnnnnnnnnnnnnnnnnnnnnnnnnnnnnnnnnnnnnnnnnnnnnnnnnnnnnnnnnnnnnnnnnnnnnnnnnnnnnnnnnnnnnnnnnnnnnnnnnnnnnnnnnnnnnnnnnnnnnnnnnnnnnnnnnnnnnnnnnnnnnnnnnnnnnnnnnnnnnnnnnnnnnnnnnnnnnnnnnnnnnnnnnnnnnnnnnnnnnnnnnnnnnnnnnnnnnnnnnnnnnnnnnnnnnnnnnnnnnnnnnnnnnnnnnnnnnnnnnnnnnnnnnnnnnnnnnnnnnnnnnnnnnnnnnnnnnnnnnnnnnnnnnnnnnnnnnnnnnnnnnnnnnnnnnnnnnnnnnnnnnnnnnnnnnnnnnnnnnnnnnnnnnnnnnnnnnnnnnnnnnnnnnnnnnnnnnnnnnnnnnnnnnnnnnnnnnnnnnnnnnnnnnnnnnnnnnnnnnnnnnnnnnnnnnnnnnnnnnnnnnnnnnnnnnnnnnnnnnnnnnnnnnnnnnnnnnnnnnnnnnnnnnnnnnnnnnnnnnnnnnnnnnnnnnnnnnnnnnnnnnnnnnnnnnnnnnnnnnnnnnnnnnnnnnnnnnnnnnnnnnnnnnnnnnnnnnnnnnnnnnnnnnnnnnnnnnnnnnnnnnnnnnnnnnnnnnnnnnnnnnnnnnnnnnnnnnnnnnnnnnnnnnnnnnnnnnnnnnnnnnnnnnnnnnnnnnnnnnnnnnnnnnnnnnnnnnnnnnnnnnnnnnnnnnnnnnnnnnnnnnnnnnnnnnnnnnnnnnnnnnnnnnnnnnnnnnnnnnnnnnnnnnnnnnnnnnnnnnnnnnnnnnnnnnnnnnnnnnnnnnnnnnnnnnnnnnnnnnnnnnnnnnnnnnnnnnnnnnnnnnnnnnnnnnnnnnnnnnnnnnnnnnnnnnnnntccataagaagacgaaggtttcacagtctttatttcgttcacaactcctggtgcatgatgccactgaggaagagacaggagtgtatcagtgtaaagtagaaatttatgacagaaattccctatacaacaaccaccctccgagagcttctgccatctctcacccattgagaatagcggtcactttaccagnagagagcaagctaaaagtgaattcaaggagtcaaatccaagagctctccatcaactccaacactgatatagaatgtagcatcttgtcccggtccagtggaaaccttcagttagccatcatttggtatttttctcctatttccactaatgcctcttggctaaagatcctggaggtggaccaaaccaatgttataaaaactggggatgagtttcacaccccatggagaaaacaaaaatttcatactgagaaggtttcccaagacttatttcagctgcacattctgaatgtggaagacagcgatcagggcaaatatcactgtgctgtggaggaatggctcctgtctacaaatggcacttggcacaagcttggagaaaagaagtcaggactaacagaattgaaactcaagcccacaggnaggaagtaaggtacgtgtctccaaagtgtactggaccgaaaatgtgaccgagcacagagaggtggccatccactgcagcctggagagtgtaggcagcccagccgctctgtactctgtgatgtggtactggaacagagaaaactctggaagtaaaatgctggtgcacttgcaacatgatggcttgctggagtatggggaagaggggcttaggaggcacctgcactgttaccgttcatcccctacagactttgtcctgaagcttcatcaggtggagatggaggatgcaggaatgtactggtgtagggtggcagagtggcagctccatggacacccaagcaagtggattaatcaagcatccgatgagtcacagcggatggtgctcacggtgctgccttcag

SEQ ID NO: 23768 - DNA, 744 bp, Macaca Mulatta
  misc_feature (1)...(744): n = A,T,C or G
tcctctatcccgaccgatttaagcattgtgatgaaacaggtcttttgcttatgtttttcctttttctcttctctcatcccagcatactatttattaattagttgatttattttnnnnnnnnnnnnnnnaacttatatcagtcacttgccactccccccacccctcctgtccacagctcctttccactttaggtcaatttttctctcttagatcttccagcagccccaggggtaggaagctcctcttagtactaagagacttcaagcttcttgctttaagtcctcaccctttacattatctaattcttcagttttgatgctgatttacctttcccccagccctaccttagctctgtggcattatatctcctctctgggactcttcaacctggtactccatacctcttgtgccctctcactttaggcagcttgcactattcttgaatgaatgaagaattatttcctcacttggaagtaggaggggctgaagaaattctccccaggcactgtgggactgagggtccnnnnnnnnnnnnnnnnnnnnnnttcccctagtaatatgagttctcaaagcctacattcaggatctccctctaggatgtgacagatctggtccctctccttgaactacccctccacacgctctagtcccttcaacctaccggtctattcagtggtggcttttctctccttggagtgccccaattttatattctcaggggccaaggcaaggtctataaccctc

SEQ ID NO: 23769 - DNA, 125 bp, Macaca Mulatta
gttaacacagattatgcgaactggacagaacacttgggaaagtaaaaatatccttgctgtttcatttgctccacttgtgcaaccaagtaagaatgatcatggcaaaccagattctgtgggactcc

SEQ ID NO: 23770 - DNA, 483 bp, Macaca Mulatta
  misc_feature (1)...(483): n = A,T,C or G
aggaaattggccctgatggagacagttgtgctgtgtgcattgaattgtataaaccaaatgatttggtacgcatcttaacctgcannnnnnnnnnnnnnnnnnnnnnnnnnnnnnnnnnnnnnnnnnnnnnnnnnnnnnnnnnnnnnnnnnnnnnnnnnnnnnnnnnnnnnnnnnnnnnnnnnnnnnnnnnnnnnnnnnnnnnnnnnnnnnnnnnnnnnnnnnnnnnnnnnnnnnnnnnnnnnnnnnnnnnnnnnnnnnnnnnnnnnnnnnnnnnnnnnnnnnnnnnnnnnnnnnnnnnnnnnnnnnnnnnnnnnnnnnnnnnnnnnnnnnnnnnnnnnnnnnnnnnnnnnatgaaaatctacagctggtaaaccatgaagcaaattctgtgtcagtggatgttgttcctcatgttgacaacccaacttttgaagaagatgaaactcctgatcaagagactgctgttcgagaaattaaatctta

SEQ ID NO: 23771 - DNA, 762 bp, Macaca Mulatta
ggggaggcgtgacggcgctgtgcgcgtgcacaaaagggagctgtggtgggcgcgccgcggcacagctggcttgagcaactggaaacaagatgcaggaccccaacgcagacactgagtggaatgacatcttacgcaaaaagggtatcttaccccgtgaaggaaaggctgaaagaactggaagaggagtcagatgaggagcagcacatcctccagcagtcagtggtgaaaacatatgaagatatgactttggaagagctggaggatcatgaagatgagtttaatgaggaggatgaacgtgctattgaaatgtacagacggcagagactggctgagtggaaagcaactaaactgaagaattaatttggagaagttttagagatctcagggaaggattatgtttaagaagttaccaaagctggcgagggcttgtgggtcgtcttgcacttttacaaacaaggaattcccctgtttgccctgataaatcagcacctcagtggacttgccaggaagtttcctgatgtcaaatttatcaaagccttttcaacaacctggatacccaattatccgggtaggaatttgcccacgatatttgtttacctggaaggagatatcaaggctcagtttattggtcctctggtgtttggcggcatgaacctgacaagagatgaattggaatggaaactgtctgaatctggagcaattatgacggacctggaggaaaaccccaagaagccgattgaagacgtgttgctgtcctcggtg

SEQ ID NO: 23772 - DNA, 1935 bp, Macaca Mulatta
  misc_feature (1)...(1935): n = A,T,C or G
gccaggacctgtcggacagcgagctcctagccgatgcatcctttggtctatgcagggccctgtgtgaggacgtggcctcactgcagagctttgactcgctcacgggttgtggggaggtctttgcggatgatagctcggtgccatccctggagctgaatgagggcctggagagcccaacccaggcagctcttggcctggagagcaaggttcccaggggccccctccaaggctgtgtggagcagctggcctcgcccgcgcagaacgaagcatctgacttcaccaggttctgggacagtgtgaatcgctcagtgcggcagcagcagcgtgccctgctaggcccatggctttcgggcccccagggcacagacagggaccaatcccggctggacacagctgggctcgctgaactgcccctctgcccctgcagggaccctcgcagcggctccaaagccagctccatcgacacaggcacccccaagagtgagcagcccgaatccgtgtccacgagtgacgagggctactatgattccttctcgccaggacttgaggaggacaagaaggaagctgagagcccaggcactcccgccaccaccttcccacgggacagctacagtggggacgccctctacgagctcttccatgaccccagtgagggtcctgttggccccagcccagatgatgacctgtgcgtgtctgagagtctgtcagggccggccctggggacgccactgtccatgtgcagcttccgagtgggggccgaggagaacttggccccagcaccaggccccgacctgctcagccagggcttcctacagagctcctggaagggcaaggagtgcctgctgaagctgtgtgacactgagctcgccatcaccatgggcatcgtcagcnnnnnnnnnnnnnnnnnnnnnnnnnnnnnnnnnnnnnnnnnnnnnnnnnnnnnnnnnnnnnnnnnnnnnnnnnnnnnnnnnnnnnnnnnnnnnnnnnnnnnnnnnnnnnnnnnnnnnnnnnnnnnnnnnnnnnnnnnnnnnnnnnnnnnnnnnnnnnnnnnnnnnnnnnnnnnnnnnnnnnnnnnnnnnnnnnnnnnnnnnnnnnnnnnnnnnnnnnnnnnnnnnnnnnnnnnnnnnnnnnnnnnnnnnnnnnnnnnnnnnnnnnnnnnnnnnnnnnnnnnnnnnnnnnnnnnnnnnnnnnnnnnnnnnnnnnnnnnnnnnnnnnnnnnnnnnnnnnnnnnnnnnnnnnnnnnnnnnnnnnnnnnnnnnnnnnnnnnnnnnnnnnnnnnnnnnnnnnnnnnnnnnnnnnnnnnnnnnnnnnnnnnnnnnnnnnnnnnnnnnnnnnnnnnnnnnnnnnnnnnnnnnnnnnnnnnnnnnnnnnnnnnnnnnnnnnnnnnnnnnnnnnnnnnnnnnnnnnnnnnnnnnnnnnnnnnnnnnnnnnnnnnnnnnnnnnnnnnnnnnnnnnnnnnnnnnnnnnnnnnnnnnnnnnnnnnnnnnnnnnnnnnnnnnnnnnnnnnnnnnnnnnnnnnnnnnnnnnnnnnnnnnnnnnnnnnnnnnnnnnnnnnnnnnnnnnnnnnnnnnnnnnnnnnnnnnnnnnnnnnnnnnnnnnnnnnnnnnnnnnnnnnnnnnnnnnnnnnnnnnnnnnnnnnnnnnnnnnnnnnnnnnnnnnnnnnnnnnnnnnnnnnnnnnnnnnnnnnnnnnnnnnnnnggctgtggagcaggtggcatacagcagaaagctggactctgagcccccatcagcccctgctgcccagtggagtccccagggccaccatccagaaagcctgggcctcactttgaaccgccagcgggaagggggggtctctgcaagtgccccagaatgccgctgcagcctcctggcccgtgagggcctcctaaaaggccagccagaagtgggggcctccaggccagccgtggcggagcc

SEQ ID NO: 23773 - DNA, 945 bp, Macaca Mulatta
taaatagctccaaggcccacacactgtccatggctttataaaatgtccttgcagtcaggttctacagccagagtcttgactcagaaagccagcgcgctcctgtagtgtgtggatttgaatttgcgtctttgtggttcccgttgcctcctggtgaacacagtgctgacctctctttgcttgcaggtgtgcttcagaagtgtccttctgttgatgacttcgtaagtgccctggtttctgacttggatctggacttcgaaactttcctcatggattctgaataacagaaacatgctaaacctcttcaatcaaggtgatgtagataatgactttgtcacgaatgctacagcggtgagagcttgtttctcatttcagtgttcacttctgtaataaattcggaaaaactttaaactgagagaacttggaataaatcatttgttttaattctgctggcttttcacctgtttggcatgtttttgagcacatggaaatctctgacctagtaacaaccatccttctgcatggcactgttaaacggagggtgtgggcatttcctagtataaccactcccctgttgagcttttccccctttccatggatctgtaattagtttaattaaatatttaattaaaagcaaaagtgtttaagacagagtttgaagcaatattcggaaaggttacacatatagttcttttgagaatgatgaccatttcttaagaccactatctaaagtaggcttaaaaaatacactttaaatagttacaagcaaccgacaaaccaagtgtggtttccaaaatacatgtaatcatctgtactgttttttcctgaatgtttaggcaaatagactcaaaacacagaggactggcttggcaatgaaggtagaatgagtaagtgcacgtacaattcataagtgacataccagtgtcaagcaactggtgaatcaggaaa

SEQ ID NO: 23774 - DNA, 1345 bp, Macaca Mulatta
  misc_feature (1)...(1345): n = A,T,C or G
atggcggcgcccagcggcgtccacctgctcgtccgcagaggnnnnnnnnnnnnnnnnnnnnnnnnnnnnnnnnnnnnnnnnnnnnnnnnnnnnnnnnnnnnnnnnnnnnnnnnnnnnnnnnnnnnnnnnnnnnnnnnnnnnnnnnnnnnnnnnnnnnnnnnnnnnnnnnnnnnnnnnnnnnnnnnnnnnnnnnnaagcacataaagaagccagactatgtgacgacaggcattgtaccagactggggagacagcatagaagttaaaaatgaagatcagatccaagggcttcatcaggcttgtcagctggcccgccacgtcctcctcttggctgggaagagtttaaaggnnnnnnnnnnnnnnnnnnnnnnnnnnnnnnnnnnnnnnnnnnnnnnnnnnnnnnnnnnnnnnnnnnnnnnnnnnnnnnnnnnnnnnnnnnnnnnnnnnnnnnnnnnnnnnnnnnnnnnnnnnnnnnnnnnnnnnnnnnnnnnnnnnnnnnnnnnnnnnnnnnnnnnnnnnnnnnnnnnnnnnnnnnnnnnnnnnnnnnnnnnnnnnnnnnnnnnnnnnnnnnnnnnnnnnnnnnnnnnnnnnnnnnnnnnnnnnnnnnnnnnnnnnnnnnnnnnnnnnnnnnnnnnnnnnnnnnnnnnnnnnnnnnnnnnnnnnnnnnnnnnnnnnnnnnnnnnnnnnnnnnnnnnnnnnnnnnnnnnnnnnnnnnnnnnnnnnnnnnnnnnnnnnnnnnnnnnnnnnnnnnnnnnnnnnnnnnnnnnnnnnnnnnnnnnnnnnnnnnnnnnnnnnnnnnnnnnnnnnnnnnnnnnnnnnnnnnnnnnnnnnnnnnnnnnnnnnnnnnnnnnnnnnnnnnnnnnnnnnnnnnnnnnnnnnnnnnnnnnnnnnnnnnnnnnnnnnnnnnnnnnnnnnnnnnnnnnnnnaggtcggcccagttcgagcacacggttctcatcacgtcgaggggcgcgcagatcctgaccaaactgccccatgaggcctgaggagccgcccgaaggtcgcggtgaccgggtgcctttttaaataaattgctgaaatctgactagagaacttttagaagaaacaggggaatgaccggtcatgcggtaacctacgtggcacctaatagnnnnnnnnnnnnnnnnnnnnnnnnnnnnngcaactgggaactcggatctgaagccctgccggggttgtgcggctatggaaaaacaaatcctggccctggactcggtttcccagcgcggtcaacgcatctggaggggactggaggaaacctgttcgtctggaagacgagagattccaagagaagcacggttttctatgtcccttgtcctgactgt

SEQ ID NO: 23775 - DNA, 265 bp, Macaca Mulatta
cagaggggtggggccccgaccaaggcggccttggggtactggccgacggctctgaaacgaagcctttcctgcacggccgggagccggctgcgaacctgctgtcgccctgggcgttccccgccgcagtggctccgctggccgggcggcccgagaccacgtgcgacgtgtgcggcaaggtctttccgcaccgctcgcggctagccaagcaccagcgctaccacgcggccgtcaagcccttcggctgtgaagagtgcggcaagggctt

SEQ ID NO: 23776 - DNA, 503 bp, Macaca Mulatta
cccgtgactacgtggagccctgggcttcccgtagagtccctagacggagcgaaaacgggaaaaggggccttaactggggcccctggctccctcgggcgctcggagtttctgactggcctgcgcaacaccccagaggcaaggcgaacgcgagggcctttaatgcaagaaccaaggcaattcacaccctgtctgggagaaagagggaataaagactcctcagctacagcctggcagcgtattccgacccagggtccgccgccggagctttcctgcgctgtcgcgtagttacactagtgtccgaggctttccagggctgcggcgggccaactcgagtgcttccgccacactcatcatggcggtggcagtatgtcacttccgcctgggaccggaagtgtggaatactgctagcatggagatgccgaaggtgaagcaggacatgcccccgccggggggctatgggcccatcgactacaaacgaaacttgccgcgtcgaggactgtcgg

SEQ ID NO: 23777 - DNA, 2581 bp, Macaca Mulatta
  misc_feature (1)...(2581): n = A,T,C or G
tcgcatttctagctggagctccaccagcaagagcaccttattctgcagacagacaccgtgaatgctaaagttctcccctgaaagtgcatcaacgtgatcctggccttcatgactgtcatcttagtgtgtgtgtccaccatcgcgaagttcgtctcgcccatgatgaacagccgctgccacattcttggcaccttctttgccgtgactcttcttgctatattttgtaaaaactgggaccatatcctgtgtgccatacaaaggataataataccaagatgaagccgctggttcctgccttcaagttctttcaagtttttattttaaagaaaactctgtgcatattaccaaattttacaatgaatgattgtgtggactcgtgtgcaagaaaaactagggctgtgtggtgtaaataactacaattctcttaactcggtagcagttgccaactcagtccttgtactttgttaacacgaatctatttcagagctctcctaccttgctcactgccttaatcagaccgatttcctgcccacctgactagcccagcgtggtaaacctctgtatatcgagaccttggcgtaattggtgatccagaagaaaggtctctctcctaagtctctgtcagaatggagcttcacaattgctaatggttgttttctgtgagtcctataaaaagcaaggatatgcacgattcagggaatgaagaaccacaggcttgggcagtgttaaacactgtggcctttggtccccatgtgatccaccctgcttgtctccaggcaaccataggtcccgtcatgtactcagtgtccacagcggtcagtcgtttgtgaccctgtaagatggaaatcttatcacacacctgttatccaacaagtctacctgaggggttttgttacactttaaatggtaagacatagggatttatgaatggagctttccccttctcatatgcaggaaacagacacctgattttacctgaactggccagcaaatggccagccttcagagtgtgcaggaatgttttcagatccctcatcagactgtgactttaacattaatttggaatcccgtgatcactactctgaagnnnnnnnnnnnnnnnnnnnnnnnnnnnnnnnnnnnnnnnnnnnnnnnnnnnnnnnnnnnnnnnnnnnnnnnnnnnnnnnnnnnnnnnnnnnnnnnnnnnnnnnnnnnnnnnnnnnnnnnggactgcaggcacaagccaccatgcctggctgtttttttggcaaatcttgattgtgataagcccccctggaggatatgattcactttatgtgattcattttattcacaggtctgtgagggactgcaaagcttactcaggaaatgaaaacaaatgacggtcatgttgcagttttttccttgaaggacgatggaatcatagcctctaaagttaaagtggactgaggtgtcagaacactgaaagcatgaggaaacgaggacatggggtgtgactgagtggcagctagattagtgggggcaatttacctggatgaagattgagtgtccttttcaagatgtgaaaggctagcaggaataaaataaataagtccagtgtttgagccaaggttgacccctgtctcttaacatctcaccgaacgtaagtcctgaggtactaggatggccacaatgcctctgcgctgaaagcattcaaaagttcacatccctgtgtgggggataccgttcaccaccttcagcctagatgatactttcctttaaatctgtgtctctgtgtatataacaaagaggaagatgtaaacaatgttcatggaaactgctgttgagccccttgtcccaccactcccgccagctgctgcaggcaggaaggcatgtgagtgcacattttctcccagaagatatcaggtctcttggattcaaattaagtgcaatattttgcaaacagctcttcttagggaaatctcctgaaggaaaaaaatgtgacagaatgtgccatagtctgagagaatggaatagttgagcatttagtacaaagtccagtgtgtatgagttggacttatgcagctcaagcttgnnnnnnnnnnnnnnnnncaattcagtggttttagtaaattcacaaacttgttcaaccatcaccactgtctaattccagactcatgcttttttaaacaataaatgtcatttcatgaaatctttggtgataaagtattttggattcagggaagagggaattaccagtcccactccgatctcatgactgtctctcctttcattgtcagactccccctggtctcccacgttgatgtgtatacactgatcgttcaagtccaggggacagataaggagaccaggtgcaaggcagggaggcagagagaatgttgtgcttccttcagcttttgtatttccatggccagcattaccctttacctgtgggcatcagactgagcgtgggctgagagctgagtgtaacttacactcctaaatcaagctggggcctggatgggcccctcttggtatctgtgaatctttcccaagcaccactttggacacaccaggtattgagtgctgctgttagtttagagaataagagatttctaaccct

SEQ ID NO: 23778 - DNA, 649 bp, Macaca Mulatta
ggatcgagctgctgcgggcccagcgcaaattccgaccctactgagccgcgagagccgcagtggatggctagaggtgcagggcctggagaaacatgaggcgaggcagggcctgcagccatctctgagaggccgagctctgggaaacgggccccaggttgaggccaccacgtacaacagccccatgagagtccacacaggccaggagtaagggccaggccacccctcgggtcttgggcttcagcagtcctggggacctgggcgtgcccagaggaggacttgccccttccgcatcctgcctccacaccctcctgtcaaggaccctggatgaatctgctctgttctcccttttccctcaatggaaaagcccttgatggtaacgaaacagcctcgaaagcagtgagaacgcgagaagcttttattttccacccagttgggcagcagggaaaggctaggtggccccagcctgcccttcctccctgcagctggctggagattattagccaggaggcagcagccccccgaacccagactctgtctcccccttgaggtcacagatgttgaagttggagtctcactccttcccctgactacaccctaggctgggcgtcaagaccagtgaggcatgtccccacaggcctggccttgttgc

SEQ ID NO: 23779 - DNA, 558 bp, Macaca Mulatta
  misc_feature (1)...(558): n = A,T,C or G
ggggaagtcataggttagggagcacctcacactttcctcaggagaagacacacaacgatgaccctcagcctggggaccccaactccagaccctccagccccaaacctgtccagtcagccctgaaaatgcaagtcttgtatgagtttgaagctaggaacccacgggaactgactgtggtccagggagaagagctggaggnnnnnnnnnnnnnnnnnnnnnnnnnnnnnnnnnnnnnnnnnnnnnnnnnnnnnnnnnnnnnnnnnnnnnnnnnnnnnnnnnnnnnnnnnnnnnnnnnnnnnnnnnnnnnnnnnnnnnnnnnnnnnnnnnnnnnnnnnnnnnnnnnnnnnnnnnnnnnnnnnnnnnnnnnnnnnnnnnnnnnnnnnnnnnnnnnnnnnnnnnacggtgaggacacttgggtccctgacggggagccagctacttcacatgagacctggggagctacagatgctatgtccacaggaggccccaagaatcctgtcccggctggaggctgtcagaaggatgctggggngataagcccttaggcaccagcttaga

SEQ ID NO: 23780 - DNA, 655 bp, Macaca Mulatta
  misc_feature (1)...(655): n = A,T,C or G
ggggaagtcttcctatttcctttcaaagaaatctcttgtaaattacaaaactgtgaaatgggttgccaaaaactgttgcccttcgttagatgcttcaaacagtgtaaatcctgtactgcaccctgtccacctctgctccctcctccctcccctgagattgaggacctcatccgaccatgtaattaccattcgcttgctattaaagagcctttcaaactnnnnnnnnnnnnnnnnnnnnnnnnnnnnnnnnnnnnnnnnnnnnnnnnnnnnnnnnnnnnnnnnnnnnnnnnnnnnnnnnnnnnnnnnnnnnnnnnnnnnnnnnnnnnnnnnnnnnnnnnnnnnnnnnnnnnnnnnnnnnnnnnnnnnnnnnnnnnnnnnnnnnnnnnnnnnnnnnnnnnnnnnnnaaaannnnnnnnnnnnnnnnnnnnnnnnnnnnnnnnnnnnnnnnnnnnggcccggcccccaagagaaaaaaaaggacactgttttacaaaaacctgttaaaaattggtgggnnnnnnnnnnnnnnnnnnnnnnnnnnngcnnnnnnnnnnnnnnnnnntttggggttttgtggttccaaagggacccgcccctttataannnnnnnnnnnnnnnnnnnnnnnnnnnnnnnnattctcccaaaaaaaccaaa

SEQ ID NO: 23781 - DNA, 1305 bp, Macaca Mulatta
  misc_feature (1)...(1305): n = A,T,C or G
gagtgtcacagatagataacaagtccgatttcctgcagaagaggcctcatcgccagcaccctggcatcctaaacctaccgcacgtgcggctgccacaggcactggctaacggtgcccagttactgctacttggnnnnctgggcccactatggagaatcaggtgcaaacactgaccagttatctctggagcagacatttgcctgtggagccagaggagttgcaaagacgggctaggcattttgagaagaaatttctggaaaacccagnnnnnnnnnnnnnnnnnnnnnnnnnnnnnnnnnnnnnnnnnnnnnnnnnnnnnnnnnnnnnnnnnnnnnnnnnnnnnnnnnnnnnnnnnnnnnnnnnnnnnnnnnnnnnnnnnnnnnnnnnnnnnnnnnnnnnnnnnnnnnnnnnnnnnnnnnnnnnnnnnngatccgggctcgaaatccagcatttcagccacaaactttgatggactttggctcgggtactggttctgtcacctggnnnnnnnnnnnnnnnnnnnnnnnnnnnnnnnnnnnnnnnnnnnnnnnnnnnnnnnnnnnnnnnnnnnnnnnnnnnnnnnnnnnnnnnnnnnnnnnnnnnnnnnnnnnnnnnnnnnnnnnnnnnnnnnnnnnnnnnnnnnnnnnnnnnnnnnnnnnnnnnnnnnnnnnnnnnnnnnnnngtgcagtttgatgtagtagtatcagccttttccttaagtgaactgcccagcagggctgaccgcactgaggtggttcaaaccttatggcgtaagacaggtcatttcctggnnnnnnnnnnnnnnnnnnnnnnnnnnnnnnnnnnnnnnnnnnnnnnnnnnnnnnnnnnnnnnnnngggaaatgagaagtcacctttggaccctcgacctagttttgtctttgccccgngtgtccccatgaactcccttgtccccagttgacnnnngaacaagaaaccaaaggaagaaaagttctctatggtgatccttgctcgggggtctccagaggaggctaatcgctggccccgtatcactcagcctgtccttagacgacctcgccatgtgcattgtcacttgtgctgtccagatgggcatatgcagcatgctgtgatcacagcccgccgggcatggcaggtatagggggtgtgaccaaaattagtgggatgtggcaagaacctgcagcccacattaacgtctcatttccatagggatttgtatcgttgtgcccgtgtcagctcctggggagatcttttacctgtgcttactccgtctgcgtttcctccatccactgctcaagatccctctg

SEQ ID NO: 23782 - DNA, 492 bp, Macaca Mulatta
agcacccagatgccattttgccggcccccaaggcctctgggaaagccgtgttcctggctgagtccaagggggttgccctcaaccagctgtcattacaggagttgcacatcatcaggtgcggcacacccttttcccgacactgccttctaagaggtgagcttgggtgcctggaggccagggtggcccggtggcctggcccacctcttcctctctccccagccccctgttctcaggtgacatgagccacgtgtgggactatgggcacagtgtggggcagtatcgtgccctaggtggcactgcgtgctccggcatcaacaggcagatctgccaggtgcgggcactattgcaggcacagcaggcttaggtcctcccatgcctggccccatataaagtgagcacaagaggacgctgctgcgtgtttctcgccccagcctggctccctcattgctgcgctttccagggctggccagtggggacagtcagagactggag

SEQ ID NO: 23783 - DNA, 1605 bp, Macaca Mulatta
  misc_feature (1)...(1605): n = A,T,C or G
ggatctcaccttgaagacccagctagaggcagtaaatggaaaaacgatgcccgccctggaggtgttcgcccatgccctccgcttcttcagggagcacgcccttcagnnnnnnnnnnnnnnnnnnnnnnnnnnnnnnnnnnnnnnnnnnnnnnnnnnnnnnnnnnnnnnnnnnnnnnnnnnnnnnnnnnnnnnnnnnnnnnnnnnnnnnnnnnnnnnnnnnnnnnnnnnnnnnnnnnnnnnnnnnnnnnnnnnnnnnnnnnnnnnnnnnnnnnnnnnnnnnnncctcggtatactgccgcaagctgcgcctgcccagctccgggatctgagtggccgggccccaggtggtgggcgcctgggtgagcgccgctccatcgactccagcttccgtcaggnnnnnnnnnnnnnnnnnnnnnnnnnnnnnnnnnnnnnnnnnnnnnnnnnnnnnnnnnnnnnnnnnnnnnnnnnnnnnnnnnnnnnnnnnnnnnnnnnnnnnnnnnnnnnnnnnnnnnnnnnnnnnnnnnnnnnnnnnnnnnnnnnnnnnnnnnnnnnnnnnnnnnnnnnnnnnnnnnnnnnnnnnnnnnnnnnnnnnnnnnnnnnnnnnnnnnnnnnnnnnnnnnnnnnnnnnnnnnnnnnnnnnnnnnnnnnnnnnnnnnnnnnnnnnnnnnnnnnnnnnnnnnnnnnnnnnnnnnnnnnnnnnnnnnnnnnnnnnnnnnnnnnnnnnnnnnnnnnnnnnnnnnnnnnnnnnnnnnnnnnnnnnnnnnnnnnnnnnnnnnnnnnnnnnnnnnnnnnnnnnnnnnnnnnnnnnnnnnnnnnnnnnnnnnnnnnnnnnnnnnnnnnnnnnnnnnnnnnnnnnnnnnnnnnnnnnnnnnnnnnnnnnnnnnnnnnnnnnnnnnnnnnnnnnnnnnnnnnnnnnnnnnnnnnnnnnnnnnnnnnnnnnnnnnnnnnnnnnnnnctgctggcccgcccggaggtgcagggtttaaagttgtttttcttggtgggcgggttcgccgagtcagcggtgttgcagcacgcggtgcaggcagcgctgggcgcccgcggtttgcgtgtcgtgttcccgcaagactgggcctcncccatctcaaagggcgcggtgctgtttgcccagccgccgggcgtggtgcggttccgccgctcgccgctcacctatggcgtgggcgtgctcaaccgctttgtgcctgggcgccacccgcccgagaagctgctggttcgcgacggccgccgctggtgcaccgacgtcttcgagcgcttcgtggccgccgagcagtcggtggccctgggcgaggaggtgcggcgcagctactgcccggcgcgtccgggccagcggcgcgtgctcatcaacctgtactgctgcgcgaccgaggatgcgcgcttcatcaccgaccccggcgtgcgcaaatgcggcgcgctcagtctcgagcttgagcccgccgactgcggccaggacgctgccggcgctcctcccggccgccgcgagatccgcgccgccatgcagtttggcgacaccgaaattaaggtcaccgccgtcgacgtcagcaccaatcgctccgtgcgcgcgtccatcgactttctttccaactg

SEQ ID NO: 23784 - DNA, 116 bp, Macaca Mulatta
tgctgcaactcaaactaaccaacccactaggagaagatgcctgggggtccaggagtcctccaagctctgcctgccaccatcttcctcttcttcctgctgtctgctgcctacctggg

SEQ ID NO: 23785 - DNA, 4116 bp, Macaca Mulatta
  misc_feature (1)...(4116): n = A,T,C or G
caccaagaatttagtttcctcctcaaagaaagggtatgtcctcttgtgataaagctcttttctccaaatataaagttcagacaaggttccagcacctcatcttctccagcaccagttgaaaaaccatattttcctatctgcatgcgtttgctgagagtagtatctgttctgattaagcaattttacagtcttttggtannnnnnnnnnnnnnnnnnnnnnnnnnnnnnnnnnnnnnnnnnnnnnnnnnnnnnnnnnnnnnnnnnnnnnnnnnnnnnnnnnnnnnnnnnnnnnnnnnnnnnnnnnnnnnnnnnnnnnnnnnnnnnnnnnnnnnnnnnnnnnnnnnnnnnnnnnnnnnnnnnnnnnnnnnnnnnnnnnnnnnnnnnnnnnnnnnnnnnnnnnnnnnnnnnnnnnnnnnnnnnnnnnnnnnnnnnnnnnnnnnnnnnnnnnnnnnnnnnnnnnnnnnnnnnnnnnnnnnnnnnnnnnnnnnnnnnnnnnnnnnnnnnnnnnnnnnnnnnnnnnnnnnnnnnnnnnnnnnnnnnnnnnnnnnnnnnnnnnnnnnnnnnnnnnnnnnnnnnnnnnnnnnnnnnnnnnnnnnnnnnnnnnnnnnnnttagaaatgttggacaaagttgagcctccaactatacctgaaggttacgccatgtctgtggcattccattgtttgctagaccttgttcgtggaatcacaagtatgattgaaggagagttaggagaggttgaaacagaatgtcaaaccaccactgaagaagcttcttcaccaacacagtcgtcagaacagcaggatttacagtcaacatcagaccaaatggataaggaaattgnnnnnnnnnnnnnnnnnnnnnnnnnnnnnnnnnnnnnnnnnnnnnnnnnnnnnnnnnnnnnnnnnnnnnnnnnnnnnnnnnnnnnnnnnnnnnnnnnnnnnnnnnnnnnnnnnnnnnnnnnnnnnnnnnnnnnnnnnnnnnnnnnnnnnnnnnnnnnnnnnnnnnnnnnnnnnnnnnnnnnnnnnnnnnnnnnnnnnnnnnnnnnnnnnnnnnnnnnnnnnnnnnnnnnnnnnnnnnnnnnnnnnnnnnnnnnnnnnnnnnnnnnnnnnnnnnnnnnnnnnnnnnnnnnnnnnnnnnnnnnnnnnnnnnnnnnnnnnnnnnnnnnnnnnnnnnnnnnnnnnnnnnnnnnnnnnnnnnnnnnnnnnnnnnnnnnnnnnnnnnnnnnnnnnnnnnnnnnnnnnnnnnnnnnnnnnnnnnnnnnnnnnnnnnnnnnnnnnnnnnnnnnnnnnnnnnnnnnnnnnnnnnnnnnnnnnnnnnnnnnnnnnnnnnnnnnnnnnnnnnnnnnnnnnnnnnnnnnnnnnnnnnnnnnnnnnnnnnnnnnnnnnnnnnnnnnnnnnnnnnnnnnnnnnnnnnnnnnnnnnnnnnnnnnnnnnnnnnnnnnnnnnnnnnnnnnnnnnnnnnnnnnnnnnnnnnnnnnnnnnnnnnnnnnnnnnnnnnnnnnnnnnnnnnnnnnnnnnnnnnnnnnnnnnnnnnnnnnnnnnnnnnnnnnnnnnnnnnnnnnnnnnnnnnnnnnnnnnnnnnnnnnnnnnnnnnnnnnnnnnnnnnnnnnnnnnnnnnnnnnnnnnnnnnnnnnnnnnnnnnnnnnnnnnnnnnnnnnnnnnnnnnnnnnnnnnnnnnnnnnnnnnnnnnnnnnnnnnnnnnnnnnnnnnnnnnnnnnnnnnnnnnnnnnnnnnnnnnnnnnnnnnnnnnnnnnnnnnnnnnnnnnnnnnnnnnnnnnnnnnnnnnnnnnnnnnnnnnnnnnnnnnnnnnnnnnnnnnnnnnnnnnnnnnnnnnnnnnnnnnnnnnnnnnnnnnnnnnnnnnnnnnnnnnnnnnnnnnnnnnnnnnnnnnnnnnnnnnnnnnnnnnnnnnnnnnnnnnnnnnnnnnnnnnnnnnnnnnnnnnnnnnnnnnnnnnnnnnnnnnnnnnnnnnnnnnnnnnnnnnnnnnnnnnnnnnnnnnnnnnnnnnnnnnnnnnnnnnnnnnnnnnnnnnnnnnnnnnnnnnnnnnnnnnnnnnnnnnnnnnnnnnnnnnnnnnnnnnnnnnnnnnnnnnnnnnnnnnnnnnnnnnnnnnnnnnnnnnnnnnnnnnnnnnnnnnnnnnnnnnnnnnnnnnnnnnnnnnnnnnnnnnnnnnnnnnnnnnnnnnnnnnnnnnnnnnnnnnnnnnnnnnnnnnnnnnnnnnnnnnnnnnnnnnnnnnnnnnnnnnnnnnnnnnnnnnnnnnnnnnnnnnnnnnnnnnnnnnnnnnnnnnnnnnnnnnnnnnnnnnnnnnnnnnnnnnnnnnnnnnnnnnnnnnnnnnnnnnnnnnnnnnnnnnnnnnnnnnnnnnnnnnnnnnnnnnnnnnnnnnnnnnnnnnnnnnnnnnnnnnnnnnnnnnnnnnnnnnnnnnnnnnnnnnnnnnnnnnnnnnnnnnnnnnnnnnnnnnnnnnnnnnnnnnnnnnnnnnnnnnnnnnnnnnnnnnnnnnnnnnnnnnnnnnnnnnnnnnnnnnnnnnnnnnnnnnnnnnnnnnnnnnnnnnnnnnnnnnnnnnnnnnnnnnnnnnnnnnnnnnnnnnnnnnnnnnnnnnnnnnnnnnnnnnnnnnnnnnnnnnnnnnnnnnnnnnnnnnnnnnnnnnnnnnnnnnnnnnnnnnnnnnnnnnnnnnnnnnnnnnnnnnnnnnnnnnnnnnnnnnnnnnnnnnnnnnnnnnnnnnnnnnnnnnnnnnnnnnnnnnnnnnnnnnnnnnnnnnnnnnnnnnnnnnnnnnnnnnnnnnnnnnnnnnnnnnnnnnnnnnnnnnnnnnnnnnnnnnnnnnnnnnnnnnnnnnnnnnnnnnnnnnnnnnnnnnnnnnnnnnnnnnnnnnnnnnnnnnnnnnnnnnnnnnnnnnnnnnnnnnnnnnnnnnnnnnnnnnnnnnnnnnnnnnnnnnnnnnnnnnnnnnnnnnnnnnnnnnnnnnnnnnnnnnnnnnnnnnnnnnnnnnnnnnnnnnnnnnnnnnnnnnnnnnnnnnnnnnnnnnnnnnnnnnnnnnnnnnnnnnnnnnnnnnnnnnnnnnnnnnnnnnnnnnnnnnnnnnnnnnnnnnnnnnnnnnnnnnnnnnnnnnnnnnnnnnnnnnnnnnnnnnnnnnnnnnnnnnnnnnnnnnnnnnnnnnnnnnnnnnnnnnnnnnnnnnnnnnnnnnnnnnnnnnnnnnnnnnnnnnnnnnnnnnnnnnnnnnnnnnnnnnnnnnnnnnnnnnnnnnnnnnnnnnnnnnnnnnnnnnnnnnnnnnnnnnnnnnnnnnnnnnnnnnnnnnnnnnnnnnnnnnnnnnnnnnnnnnnnnnnnnnnnnnnnnnnnnnnnnnnnnnnnnnnnnnnnnnnnnnnnnnnnnnnnnnnnnnnnnnnnnnnnnnnnnnnnnnnnnnnnnnnnnnnnnnnnnnnnnnnnnnnnnnnnnnnnnnnnnnnnnnnnnnnnnnnnnnnnnnnnnnnnnnnnnnnnnnnnnnnnnnnnnnnnnnnnnnnnnnnnnnnnnnnnnnnnnnnnnnnnnnnnnnnnnnnnnnnnnnnnnnnnnnnnnnnnnnnnnnnnnnnnnnnnnnnnnnnnnnnnnnnnnnnnnnnnnnnnnnnnnnnnnnnnnnnnnnnnnnnnnnnnnnnnnnnnnnnnnnnnnnnnnnnnnnnnnnnnnnnnnnnnnnnnnnnnnnnnnnnnnnnnnnnnnnnnnnnnnnnnnnnnnnnnnnnnnnnnnnnnnnnnnnnnnnnnnnnnnnnnnnnnnnnnnnnnnnnnnnnnnnnnnnnnnnnnnnnnnnnnnnnnnnnnnnnnnnnnnnnnnnnnnnnnnnnnnnnnnnnnnnnnnnnnnnnnnnnnnnnnnnnnnnnnnnnnnnnnnnnnnnnnnnnnnnnnnnnnnnnnnnnnnnnnnnnnnnnntttacagaagcagagattgatattcgtttgagagaggaattttctaaaatgtgttttgaaacattgcttcagttttccttcagtaataaagtcacaacacctcaagaaggctacatctcacgaatggcactctcagtgcttttaaagaggtcccaagatgtactacatcgctatatagaggatgaaagattaagtggtaaatgccctcttccaag

SEQ ID NO: 23786 - DNA, 797 bp, Macaca Mulatta
gggactcttgtctggctgccgcgcatgtaaaagctggttttgctcttctcccctcttctgcaccagagcgggtgcgcgtactcccagctgtggtcgcccgctcaccccttctgctgctctcgtggccccctcgcgatggcgggcatcctctttgaagatattttcgatgtgaaggatattgacccggagggcaagaagtttgaccgagtgtctcgactgcattgtgagagtgaatctttcaagatggatctaatcttagatgtaaacattcaaatttaccctgtagacttgggtgacaagttccggttggtcatagctagtaccttgtatgaagatggtaccctggatgatggtgaatacaaccccactgatgataggccttccagggctgaccaatttgaatatgtaatgtatggaaaagtgtacaggattgagggagacgaaacttaaacttctactgaagcagcaacacgccctctctgcctatgtgtccctatgggggcctgctcatgaggctgcagggggatgccaacaacctgcatggattcgaggtggattccagagtttttctcctgatgaagaagctagccttctgaacctcggcggaaagcagcctttgctgctggtcactcaggtcatcgggattgtttcaagcctgagtggcagccagttcttgctccccctgtttgaagaagggccttggctcactgttccactgttggtggcatccttttaactgggcctgcacttcaaagggaaaactggaatcgccctggtaaaaaaacgttgggaaaagc

SEQ ID NO: 23787 - DNA, 244 bp, Macaca Mulatta
aaggacattgtttaacacctaaacttatttaacagaggatcctagaagaacagggacagtgtggggagaaatcttcttttgatggcatatttgcttcctatatttcttctggaatcatgttcgcttggcttcctgattaaaaacacagttttattgctctctgcactgccaaaccaataaatttccagaagagaaagctgtattccactgtaccccttgcagcatcaataaaactgacagccaa

SEQ ID NO: 23788 - DNA, 91 bp, Macaca Mulatta
cagaaaagattttggctgaaacacaacctgaattgggaacctggggagatggcaaaggtgaagatgagttatccccagaagaaatacaaat

SEQ ID NO: 23789 - DNA, 7868 bp, Macaca Mulatta
  misc_feature (1)...(7868): n = A,T,C or G
aagctttctttggaaaagatcttctagatacaagtagacaaagcaagataagtttagataatctatcagaagatgcagctcagctttcatataaaacaaacatgaacgcaggtttcttggatccttcgttggatccactaagttcatcctcggctccagcaaaatctggaactcacggtnnnnnnnnnnnnnnnnnnnnnnnnnnnnnnnnnnnnnnnnnnnnnnnnnnnnnnnnnnnnnnnnnnnnnnnnnnnnnnnnnnnnnnnnnnnnnnnnnnnnnnnnnnnnnnnnnnnnnnnnnnnnnnnnnnnnnnnnnnnnnnnnnnnnnnnnnnnnnnnnnnnnnnnnnnnnnnnnnnnnnnnnnnnnnnnnnnnnnnnnnnnnnnnnnnnnnnnnnnnnnnnnnnnnnnnnnnnnnnnnnnnnnnnnnnnnnnnnnnnnnnnnnnnnnnnnnnnnnnnnnnnnnnnnnnnnnnnnnnnnnnnnnnnnnnnnnnnnnnnnnnnnnnnnnnnnnnnnnnnnnnnnnnnnnnnnnnnnnnnnnnnnnnnnnnnnnnnnnnnnnnnnngatgttttttcacggatgccactcatgaatggccttattggacccagtcctcatctcccacataattctttgccacctggaagcggactgggaactttctctgcaattgcacaatccccttatcctgatgccagnnnnnnnnnnnnnnnnnnnnnnnnnnnnnnnnnnnnnnnnnnnnnnnnnnnnnnnnnnnnnnnnnnnnnnnnnnnnnnnnnnnnnnnnnnnnnnnnnnnnnnnnnnnnnnnnnnnnnnnnnnnnnnnnnnnnnnnnnnnnnnnnnnnnnnnnnnnnnnnnnnnnnnnnnnnnnnnnnnnnnnnnnnnnnnnnnnnnnnnnnnnnnnnnnnnnnnnnnnnnnnnnnnnnnnnnnnnnnnnnnnnnnnnnnnnnnnnnnnnnnnnnnnnnnnnnnnnnnnnnnnnnnnnnnnnnnnnnnnnnnnnnnnnnnnnnnnnnnnnnnnnnnnnnnnnnnnnnnnnnnnnnnnnnnnnnnnnnnnnnnnnnnnnnnnnnnnnnnnnnnnnnnnnnnnnnnnnnnnnnnnnnnnnnnnnnnnnnnnnnnnnnnnnnnnnnnnnnnnnnnnnnnnnnnnnnnnnnnnnnnnnnnnnnnnnnnnnnnnnnnnnnnnnnnnnnnnnnnnnnnnnnnnnnnnnnnnnnnnnnnnnnnnnnnnnnnnnnnnnnnnnnnnnnnnnnnnnnnnnnnnnnnnnnnnnnnnnnnnnnnnnnnnnnnnnnnnnnnnnnnnnnnnnnnnnnnnnnnnnnnnnnnnnnnnnnnnnnnnnnnnnnnnnnnnnnnnnnnnnnnnnnnnnnnnnnnnnnnnnnnnnnnnnnnnnnnnnnnnnnnnnnnnnnnnnnnnnnnnnnnnnnnnnnnnnnnnnnnnnnnnnnnnnnnnnnnnnnnnnnnnnnnnnnnnnnnnnnnnnnnnnnnnnnnnnnnnnnnnnnnnnnnnnnnnnnnnnnnnnnnnnnnnnnnnnnnnnnnnnnnnnnnnnnnnnnnnnnnnnnnnnnnnnnnnnnnnnnnnnnnnnnnnnnnnnnnnnnnnnnnnnnnnnnnnnnnnnnnnnnnnnnnnnnnnnnnnnnnnnnnnnnnnnnnnnnnnnnnnnnnnnnnnnnnnnnnnnnnnnnnnnnnnnnnnnnnnnnnnnnnnnnnnnnnnnnnnnnnnnnnnnnnnnnnnnnnnnnnnnnnnnnnnnnnnnnnnnnnnnnnnnnnnnnnnnnnnnnnnnnnnnnnnnnnnnnnnnnnnnnnnnnnnnnnnnnnnnnnnnnnnnnnnnnnnnnnnnnnnnnnnnnnnnnnnnnnnnnnnnnnnnnnnnnnnnnnnnnnnnnnnnnnnnnnnnnnnnnnnnnnnnnnnnnnnnnnnnnnnnnnnnnnnnnnnnnnnnnnnnnnnnnnnnnnnnnnnnnnnnnnnnnnnnnnnnnnnnnnnnnnnnnnnnnnnnnnnnnnnnnnnnnnnnnnnnnnnnnnnnnnnnnnnnnnnnnnnnnnnnnnnnnnnnnnnnnnnnnnnnnnnnnnnnnnnnnnnnnnnnnnnnnnnnnnnnnnnnnnnnnnnnnnnnnnnnnnnnnnnnnnnnnnnnnnnnnnnnnnnnnnnnnnnnnnnnnnnnnnnnnnnnnnnnnnnnnnnnnnnnnnnnnnnnnnnnnnnnnnnnnnnnnnnnnnnnnnnnnnnnnnnnnnnnnnnnnnnnnnnnnnnnnnnnnnnnnnnnnnnnnnnnnnnnnnnnnnnnnnnnnnnnnnnnnnnnnnnnnnnnnnnnnnnnnnnnnnnnnnnnnnnnnnnnnnnnnnnnnnnnnnnnnnnnnnnnnnnnnnnnnnnnnnnnnnnnnnnnnnnnnnnnnnnnnnnnnnnnnnnnnnnnnnnnnnnnnnnnnnnnnnnnnnnnnnnnnnnnnnnnnnnnnnnnnnnnnnnnnnnnnnnnnnnnnnnnnnnnnnnnnnnnnnnnnnnnnnnnnnnnnnnnnnnnnnnnnnnnnnnnnnnnnnnnnnnnnnnnnnnnnnnnnnnnnnnnnnnnnnnnnnnnnnnnnnnnnnnnnnnnnnnnnnnnnnnnnnnnnnnnnnnnnnnnnnnnnnnnnnnnnnnnnnnnnnnnnnnnnnnnnnnnnnnnnnnnnnnnnnnnnnnnnnnnnnnnnnnnnnnnnnnnnnnnnnnnnnnnnnnnnnnnnnnnnnnnnnnnnnnnnnnnnnnnnnnnnnnnnnnnnnnnnnnnnnnnnnnnnnnnnnnnnnnnnnnnnnnnnnnnnnnnnnnnnnnnnnnnnnnnnnnnnnnnnnnnnnnnnnnnnnnnnnnnnnnnnnnnnnnnnnnnnnnnnnnnnnnnnnnnnnnnnnnnnnnnnnnnnnnnnnnnnnnnnnnnnnnnnnnnnnnnnnnnnnnnnnnnnnnnnnnnnnnnnnnnnnnnnnnnnnnnnnnnnnnnnnnnnnnnnnnnnnnnnnnnnnnnnnnnnnnnnnnnnnnnnnnnnnnnnnnnnnnnnnnnnnnnnnnnnnnnnnnnnnnnnnnnnnnnnnnnnnnnnnnnnnnnnnnnnnnnnnnnnnnnnnnnnnnnnnnnnnnnnnnnnnnnnnnnnnnnnnnnnnnnnnnnnnnnnnnnnnnnnnnnnnnnnnnnnnnnnnnnnnnnnnnnnnnnnnnnnnnnnnnnnnnnnnnnnnnnnnnnnnnnnnnnnnnnnnnnnnnnnnnnnnnnnnnnnnnnnnnnnnnnnnnnnnnnnnnnnnnnnnnnnnnnnnnnnnnnnnnnnnnnnnnnnnnnnnnnnnnnnnnnnnnnnnnnnnnnnnnnnnnnnnnnnnnnnnnnnnnnnnnnnnnnnnnnnnnnnnnnnnnnnnnnnnnnnnnnnnnnnnnnnnnnnnnnnnnnnnnnnnnnnnnnnnnnnnnnnnnnnnnnnnnnnnnnnnnnnnnnnnnnnnnnnnnnnnnnnnnnnnnnnnnnnnnnnnnnnnnnnnnnnnnnnnnnnnnnnnnnnnnnnnnnnnnnnnnnnnnnnnnnnnnnnnnnnnnnnnnnnnnnnnnnnnnnnnnnnnnnnnnnnnnnnnnnnnnnnnnnnnnnnnnnnnnnnnnnnnnnnnnnnnnnnnnnnnnnnnnnnnnnnnnnnnnnnnnnnnnnnnnnnnnnnnnnnnnnnnnnnnnnnnnnnnnnnnnnnnnnnnnnnnnnnnnnnnnnnnnnnnnnnnnnnnnnnnnnnnnnnnnnnnnnnnnnnnnnnnnnnnnnnnnnnnnnnnnnnnnnnnnnnnnnnnnnnnnnnnnnnnnnnnnnnnnnnnnnnnnnnnnnnnnnnnnnnnnnnnnnnnnnnnnnnnnnnnnnnnnnnnnnnnnnnnnnnnnnnnnnnnnnnnnnnnnnnnnnnnnnnnnnnnnnnnnnnnnnnnnnnnnnnnnnnnnnnnnnnnnnnnnnnnnnnnnnnnnnnnnnnnnnnnnnnnnnnnnnnnnnnnnnnnnnnnnnnnnnnnnnnnnnnnnnnnnnnnnnnnnnnnnnnnnnnnnnnnnnnnnnnnnnnnnnnnnnnnnnnnnnnnnnnnnnnnnnnnnnnnnnnnnnnnnnnnnnnnnnnnnnnnnnnnnnnnnnnnnnnnnnnnnnnnnnnnnnnnnnnnnnnnnnnnnnnnnnnnnnnnnnnnnnnnnnnnnnnnnnnnnnnnnnnnnnnnnnnnnnnnnnnnnnnnnnnnnnnnnnnnnnnnnnnnnnnnnnnnnnnnnnnnnnnnnnnnnnnnnnnnnnnnnnnnnnnnnnnnnnnnnnnnnnnnnnnnnnnnnnnnnnnnnnnnnnnnnnnnnnnnnnnnnnnnnnnnnnnnnnnnnnnnnnnnnnnnnnnnnnnnnnnnnnnnnnnnnnnnnnnnnnnnnnnnnnnnnnnnnnnnnnnnnnnnnnnnnnnnnnnnnnnnnnnnnnnnnnnnnnnnnnnnnnnnnnnnnnnnnnnnnnnnnnnnnnnnnnnnnnnnnnnnnnnnnnnnnnnnnnnnnnnnnnnnnnnnnnnnnnnnnnnnnnnnnnnnnnnnnnnnnnnnnnnnnnnnnnnnnnnnnnnnnnnnnnnnnnnnnnnnnnnnnnnnnnnnnnnnnnnnnnnnnnnnnnnnnnnnnnnnnnnnnnnnnnnnnnnnnnnnnnnnnnnnnnnnnnnnnnnnnnnnnnnnnnnnnnnnnnnnnnnnnnnnnnnnnnnnnnnnnnnnnnnnnnnnnnnnnnnnnnnnnnnnnnnnnnnnnnnnnnnnnnnnnnnnnnnnnnnnnnnnnnnnnnnnnnnnnnnnnnnnnnnnnnnnnnnnnnnnnnnnnnnnnnnnnnnnnnnnnnnnnnnnnnnnnnnnnnnnnnnnnnnnnnnnnnnnnnnnnnnnnnnnnnnnnnnnnnnnnnnnnnnnnnnnnnnnnnnnnnnnnnnnnnnnnnnnnnnnnnnnnnnnnnnnnnnnnnnnnnnnnnnnnnnnnnnnnnnnnnnnnnnnnnnnnnnnnnnnnnnnnnnnnnnnnnnnnnnnnnnnnnnnnnnnnnnnnnnnnnnnnnnnnnnnnnnnnnnnnnnnnnnnnnnnnnnnnnnnnnnnnnnnnnnnnnnnnnnnnnnnnnnnnnnnnnnnnnnnnnnnnnnnnnnnnnnnnnnnnnnnnnnnnnnnnnnnnnnnnnnnnnnnnnnnnnnnnnnnnnnnnnnnnnnnnnnnnnnnnnnnnnnnnnnnnnnnnnnnnnnnnnnnnnnnnnnnnnnnnnnnnnnnnnnnnnnnnnnnnnnnnnnnnnnnnnnnnnnnnnnnnnnnnnnnnnnnnnnnnnnnnnnnnnnnnnnnnnnnnnnnnnnnnnnnnnnnnnnnnnnnnnnnnnnnnnnnnnnnnnnnnnnnnnnnnnnnnnnnnnnnnnnnnnnnnnnnnnnnnnnnnnnnnnnnnnnnnnnnnnnnnnnnnnnnnnnnnnnnnnnnnnnnnnnnnnnnnnnnnnnnnnnnnnnnnnnnnnnnnnnnnnnnnnnnnnnnnnnnnnnnnnnnnnnnnnnnnnnnnnnnnnnnnnnnnnnnnnnnnnnnnnnnnnnnnnnnnnnnnnnnnnnnnnnnnnnnnnnnnnnnnnnnnnnnnnnnnnnnnnnnnnnnnnnnnnnnnnnnnnnnnnnnnnnnnnnnnnnnnnnnnnnnnnnnnnnnnnnnnnnnnnnnnnnnnnnnnnnnnnnnnnnnnnnnnnnnnnnnnnnnnnnnnnnnnnnnnnnnnnnnnnnnnnnnnnnnnnnnnnnnnnnnnnnnnnnnnnnnnnnnnnnnnnnnnnnnnnnnnnnnnnnnnnnnnnnnnnnnnnnnnnnnnnnnnnnnnnnnnnnnnnnnnnnnnnnnnnnnnnnnnnnnnnnnnnnnnnnnnnnnnnnnnnnnnnnnnnnnnnnnnnnnnnnnnnnnnnnnnnnnnnnnnnnnnnnnnnnnnnnnnnnnnnnnnnnnnnnnnnnnnnnnnnnnnnnnnnnnnnnnnnnnnnnnnnnnnnnnnnnnnnnnnnnnnnnnnnnnnnnnnnnnnnnnnnnnnnnnnnnnnnnnnnnnnnnnnnnnnnnnnnnnnnnnnnnnnnnnnnnnnnnnnnnnnnnnnnnnnnnnnnnnnnnnnnnnnnnnnnnnnnnnnnnnnnnnnnnnnnnnnnnnnnnnnnnnnnnnnnnnnnnnnnnnnnnnnnnnnnnnnnnnnnnnnnnnnnnnnnnnnnnnnnnnnnnnnnnnnnnnnnnnnnnnnnnnnnnnnnnnnnnnnnnnnnnnnnnnnnnnnnnnnnnnnnnnnnnnnnnnnnnnnnnnnnnnnnnnnnnnnnnnnnnnnnnnnnnnnnnnnnnnnnnnnnnnnnnnnnnnnnnnnnnnnnnnnnnnnnnnnnnnnnnnnnnnnnnnnnnnnnnnnnnnnnnnnnnnnnnnnnnnnnnnnnnnnnnnnnnnnnnnnnnnnnnnnnnnnnnnnnnnnnnnnnnnnnnnnnnnnnnnnnnnnnnnnnnnnnnnnnnnnnnnnnnnnnnnnnnnnnnnnnnnnnnnnnnnnnnnnnnnnnnnnnnnnnnnnnnnnnnnnnnnnnnnnnnnnnnnnnnnnnnnnnnnnnnnnnnnnnnnnnnnnnnnnnnnnnnnnnnnnnnnnnnnnnnnnnnnnnnnnnnnnnnnnnnnnnnnnnnnnnnnnnnnnnnnnnnnnnnnnnnnnnnnnnnnnnnnnnnnnnnnnnnnnnnnnnnnnnnnnnnnnnnnnnnnnnnnnnnnnnnnnnnnnnnnnnnnnnnnnnnnnnnnnnnnnnnnnnnnnnnnnnnnnnnnnnnnnnnnnnnnnnnnnnnnnnnnnnnnnnnnnnnnnnnnnnnnnnnnnnnnnnnnnnnnnnnnnnnnnnnnnnnnnnnnnnnnnnnnnnnnnnnnnnnnnnnnnnnnnnnnnnnnnnnnnnnnnnnnnnnnnnnnnnnnnnnnnnnnnnnnnnnnnnnnnnnnnnnnnnnnnnnnnnnnnnnnnnnnnnnnnnnnnnnnnnnnnnnnnnnnnnnnnnnnnnnnnnnnnnnnnnnnnnnnnnnnnnnnnnnnnnnnnnnnnnnnnnnnnnnnnnnnnnnnnnnnnnnnnnnnnnnnnnnnnnnnnnnnnnnnnnnnnnnnnnnnnnnnnnnnnnnnnnnnnnnnnnnnnnnnnnnnnnnnnnnnnnnnnnnnnnnnnnnnnnnnnnnnnnnnnnnnnnnnnnnnnnnnnnnnnnnnnnnnnnnnnnnnnnnnnnnnnnnnnnnnnnnnnnnnnnnnnnnnnnnnnnnnnnnnnnnnnnnnnnnnnnnnnnnnnnnnnnnnnnnnnnnnnnnnnnnnnnnnnnnnnnnnnnnnnnnnnnnnnnnnnnnnnnnnnnnnnnnnnnnnnnnnnnnnnnnnnnnnnnnnnnnnnnnnnnnnnnnnnnnnnnnnnnnnnnnnnnnnnnnnnnnnnnnnnnnnnnnnnnnnnnnnnnnnnnnnnnnnnnnnnnnnnnnnnnnnnnnnnnnnnnnnnnnnnnnnnnnnnnnnnnnnnnnnnnnnnnnnnnnnnnnnnnnnnnnnnnnnnnnnnnnnnnnnnnnnnnnnnnnnnnnnnnnnnnnnnnnnnnnnnnnnnnnnnnnnnnnnnnnnnnnnnnnnnnnnnnnnnnnnnnnnnnnnnnnnnnnnnnnnnnnnnnnnnnnnnnnnnnnnnnnnagcagaataatttaagtaatcctccaacaccccctgcctctcttcctcctacaccacctcctatggcttgtcagaagatggccaatggttttgcaacacactgaagaacttgctggaaaagccggagtgttagtgagccacgaagnagttaccaaaactctaggacctaaaccatttcagctgcccttcagaccccaggatgacttgttggcccgagcgcttgctcagggccccaagacagttgatgtgccagcctccctcccaacaccacctcacaacaatcaggaagaattaagg

SEQ ID NO: 23790 - DNA, 5386 bp, Macaca Mulatta
  misc_feature (1)...(5386): n = A,T,C or G
aggtagctgcaatcaacccaaatcaccctcttgctcagatgcctttgcctccgtcgatgaaaaactgcatccagctggcagcctgcgaggccactgagctgctgcccatgatccccgacctcccggctgacctgttcacctcctgcctcaccacccccatcaagatcgccctgcgctggnnnnnnnnnnnnnnnnnnnnnnnnnnnnnnnnnnnnnnnnnnnnnnnnnnnnnnnnnnnnnnnnnnnnnnnnnnnnnnnnnnnnnnnnnnnnnnnnnnnnnnnnnnnnnnnnnnnnnnnnnnnnnnnnnnnnnnnnnnnnnnnnnnnnnnnnnnnnnngatctcttccaaaagctcttcagacaggacttactggtggctagtctgttccgaaattttttattggcggagagggattatgaggtcgtacaactgcactcccgtcagcagcccgcgtctgccgcccacgtacatgcnnnnnnnnnnnnnnnnnnnnnnnnnnnnnnnnnnnnnnnnnnnnnnnnnnnnnnnnnnnnnnnnnnnnnnnnnnnnnnnnnnnngcacagcccgttcttcgccgagcagctgaccgctttccaggtgtggctcaccatgggcgtggagaaccggaacccaccggaacagctgcccatcgtcctgcaggtnnnnnnnnnnnnnnnnnnnnnnnnnnnnnnnnnnnnnnnnnnnnnnnnnnnnnnnnnnnnnnnnnnnnnnnnnnnnnnnnnggccttgtccgtcggcatcttcccctacgtgctgaagctgctccagagctcggcccgagagctgcggccacttctcgttttcatctgggccaagatccttcgcagtggacagcnnnnnnnnnnnnnnnnnnnnnnnnnnnnnnnnnnnnnnnnnnnnnnnnnnnnnnnnnnnnnnnnnnnnnnnnnnnnnngaacacaggaccatgacggctttcattctcgccgtgattgtcaacagctataacacggggcagnnnnnnnnnnnnnnnnnnnnnnnnnnnnnnnnnnnnnnnnnnnnnnnnnnnnnnnnnnnnnnnnnnnnnnnnnnnnnnnnnnnnnnnnnnnnnnnnnnnnnnnnnnnnnnnnnnnnnnnnnnnnnnnnnnnnnnnnnnnnnnnnnnnnnnnnnnnnnnnnnnnnnnnnnnnnnnnnnnnnnnnnnnnnnnnnnnnnnnnnnnnnnnnnnnnnnnnnnnnnnnnnnnnnnnnnnnnnnnnnnnnnnnnnnnnnnnnnnnnnnnnnnnnnnnnnnnnnnnnnnnnnnnnnnnnnnnnnnnnnnnnnnnnnnnnnnnnnnnnnnnnnnnnnnnaggagctggtggtggctctgagtcatctcgtggttcagtacgaaagcaatttctgcactgtggccctgcagttcatagaagaggagaagaactaccccttgccttctccagcgaccacannnnnnnnnnnnnnnnnnnnnnnnnnnnnnnnnnnnnnnnnnnnnnnnnnnnnnnnnnnnnnnnnnnnnnnnnnnnnnnnnnnnnnnnnnnnnnnnnnnnnnnnnnnnnnnnnnnnnnnnnnnnnnnnnnnnnnnnnnnnnnnnnnnnnnnnnnnnnnnnnnnnnnnnnnnnnnnnnnnnnnnnnnnnnnnnnnnnnnnnnnnnnnnnnnnnnnnnnnnnnnnnnnnnnnnnnnnnnnnnnnnnnnnnnnnnnnnnnnnnnnnnnnnnnnnnnnnnnnnnnnnnnnnnnnnnnnnnnnnggagtttcctttaatagcgtttacactcagatttggagagtcctgctgctcctgaatgctgacccctatccagaggtctcagacgtggccatgaaagtgctcaacagcatcgcctataagnnnnnnnnnnnnnnnnnnnnnnnnnnnnnnnnnnnnnnnnnnnnnnnnnnnnnnnnnnnnnnnnnnnnnnnnnnnnnnnnnnnnnnnnnnnnnnnnnnnnnnnnnnnnnnnnnnnnnnnnnnnnnnnnnnnnnnnnnnnnnnnnnnnnnnnnnnnnnnnnnnnnnnnnnnnnnnnnnnnnnnnnnnnnnnnnnnnnnnnnnnnnnnnnnnnnnnnnnnnnnnnnnnnnnnnnnnnnnnnnnnnnnnnnnnnnnnnnnnnnnnnnnnnnnnnnnnnnnnnnnnnnnnnnnnnnnnnnnnnnnnnnnnnnnnnnnnnnnnnnnnnnnnnnnnnnnnnnnnnnnnnnnnnnnnnnnnnnnnnnnnnnnnnnnnnnnnnnnnnnnnnnnnnnnnnnnnnnnnnnnnnnnnnnnnnnnnnnnnnnnnnnnnnnnnnnnnnnnnnnnnnnnnnnnnnnnnnnnnnnnnnnnnnnnnnnnnnnnnnnnnnnnnnnnnnnnnnnnnnnnnnnnnnnnnnnnnnnnnnnnnnnnnnnnnnnnnnnnnnnnnnnnnnnnnnnnnnnnnnnnnnnnnnnnnnnnnnnnnnnnnnnnnnnnnnnnnnnnnnnnnnnnnnnnnnnnnnnnncttttgggactgggagaaaggggagaaactggactatttccacaatgggaaccctcggtacacaagggtcactgccatggagtatctgaacggccaggactgctcactcctgctgacggccacagnnnnnnnnnnnnnnnnnnnnnnnnnnnnnnnnnnnnnnnnnnnnnnnnnnnnnnnnnnnnnnnnnnnnnnnnnnnnnnnnnnnnnnnnnnnnnnnnnnnnnnnnnnnnnnnnnnnnnnnnnnnnnnnnnnnnnnnnnnnnnnnnnnnnnnnnnnnnnnnnnnnnnnnnnnnnnnnnnnnnnnnnnnnnnnnnnnnnnnnnnnnnnnnnnnnnnnnnnnnnnnnnnnnnnnnnnnnnnnnnnnnnnnnnnnnnnnnnnnnnnnnnnnnnnnnnnnnnnnnnnnnnnnnnnnnnnnnnnnnnnnnnnnnnnnnnnnnnnnnnnnnnnnnnnnnnnnnnnnnnnnnnnnnnnnnnnnnnnnnnnnnnnnnnnnnnnnnnnnnnnnnnnnnnnnnnnnnnnnnnnnnnnnnnnnnnnnnnnnnnnnnnnnnnnnnnnnnnnnnnnnnnnnnnnnnnnnnnnnnnnnnnnnnnnnnnnnnnnnnnnnnnnnnnnnnnnnnnnnnnnnnnnnnnnnnnnnnnnnnnnnnnnnnnnnnnnnnnnnnnnnnnnnnnnnnnnnnnnnnnnnnnnnnnnnnnnnnnnnnnnnnnnnnnnnnnnnnnnnnnnnnnnnnnnnnnnnnnnnnnnnnnnnnnnnnnnnnnnnnnnnnnnnnnnnnnnnnnnnnnnnnnnnnnnnnnncctcacctggccgtgggaagcaacgactactacatctccgtgtactcggtggagaagcgcgtcagatagcggcgcgacccggcccgccaggccacggccgcctgctgtacatagtgaagctgccacttgccggggcgcggggtgtcggctgctgcggccccgcggtgtgaacgttggctgctgccttagctgctgatgacggcaggagggccctgctactcgcttttgtctgtcttcgctgtcgtgtccggaacgtcagggacggggagggcttaggttgacggtggcttcccactgagcaccagcatccaggtgcacccccgcggccgcagcggtctgtccctctcctgttctgtgtttctctgagacgttgaaaggggaaacacctcattttatttcccatgtatcagagcattagctgcagnnnnnnnnnnnnnnnnnnnnnnnnnnnnnnnnnnnnnnnnnnnnnnnnnnnnnnnnnnnnnnnnnnnnnnnnnnnnnnnnnnnnnnnnnnnnnnnnnnnnnnnnnnnnnnnnnnnnnnnnnnnnnnnnnnnnnnnnnnnnnnnnnnnnnnnnnnnnnnnnnnnnnnnnnnnnnnnnnnnnnnnnnnnnnnnnnnnnnnnnnnnnnnnnnnnnnnnnnnnnnnnnnnnnnnnnnnnnnnnnnnnnnnnnnnnnnnnnnnnnnnnnnnnnnnnnnnnnnnnnnnnnnnnnnnnnnnnnnnnnnnnnnnnnnnnnnnnnnnnnnnnnnnnnnnnnnnnnnnnnnnnnnnnnnnnnnnnnnnnnnnnnnnnnnnnnnnnnnnnnnnnnnnnnnnnnnnnnnnnnnnnnnnnnnnnnnnnnnnnnnnnnnnnnnnnnnnnnnnnnnnnnnnnnnnnnnnnnnnnnnnnnnnnnnnnnnnnnnnnnnnnnnnnnnnnnnnnnnnnnnnnnnnnnnnnnnnnnnnnnnnnnnnnnnnnnnnnnnnnnnnnnnnnnnnnnnnnnnnnnnnnnnnnnnnnnnnnnnnnnnnnnnnnnnnnnnnnnnnnnnnnnnnnnnnnnnnnnnnnnnnnnnnnnnnnnnnnnnnnnnnnnnnnnnnnnnnnnnnnnnnnnnnnnnnnnnnnnnnnnnnnnnnnnnnnnnnnnnnnnnnnnnnnnnnnnnnnnnnnnnnnnnnnnnnnnnnnnnnnnnnnnnnnnnnnnnnnnnnnnnnnnnnnnnnnnnnnnnnnnnnnnnnnnnnnnnnnnnnnnnnnnnnnnnnnnnnnnnnnnnnnnnnnnnnnnnnnnnnnnnnnnnnnnnnnnnnnnnnnnnnnnnnnnnnnnnnnnnnnnnnnnnnnnnnnnnnnnnnnnnnnnnnnnnnnnnnnnnnnnnnnnnnnnnnnnnnnnnnnnnnnnnnnnnnnnnnnnnnnnnnnnnnnnnnnnnnnnnnnnnnnnnnnnnnnnnnnnnnnnnnnnnnnnnnnnnnnnnnnnnnnnnnnnnnnnnnnnnnnnnnnnnnnnnnnnnnnnnnnnnnnnnnnnnnnnnnnnnnnnnnnnnnnnnnnnnnnnnnnnnnnnnnnnnnnnnnnnnnnnnnnnnnnnnnnnnnnnnnnnnnnnnnnnnnnnnnnnnnnnnnnnnnnnnnnnnnnnnnnnnnnnnnnnnnnnnnnnnnnnnnnnnnnnnnnnnnnnnnnnnnnnnnnnnnnnnnnnnnnagtcccggcctcactcagctcacagggcatgccaggcggcaacaccagaatcttccagaagcccagctccacccgcacacacagcttcccgtccagtccttcaactcgattcttacctaacacgcgtttctgtttgttttgagacaaaaccaccacctgtcaaaaggcaggtggctccagaggggacaagaccctcctgcgcccgctccgccctggagccgcccccgcgggctccgcgtgccacctgcacgtgggctgtcttcacaggtccgatgcggaaattcaatcacgacgtcaaccagggctcgagagagcgccggcctaaaggctccttatctctatttattttaccaaatgcgaattgagaaagactttgacaaaacacaaaatggcaatgtgaagctaagagcaggacaaacaataaacaacacgcgcagactc

SEQ ID NO: 23791 - DNA, 344 bp, Macaca Mulatta
gggtgacagatctcttcaaccaggtcaaagctgatctttctggaatgtcaccaaccaagggtctatatttatcaaaagccatccacaagtcatacctggatgtcagcgaagagggcacggaggcagcagccgccactggggacagcatcgctgtgaaaagcctacccatgcgagctcagttcaaggcgaaccaccccttcttgttctttataaggcacactcataccaatgtaattctattctgtggcaagcttgcctctccctaatcagatgggggtgagcaagtgtcagagttgcagatgagatgcagagactatcctgtgactttcccatggccaaaaagc

SEQ ID NO: 23792 - DNA, 923 bp, Macaca Mulatta
  misc_feature (1)...(923): n = A,T,C or G
ttgatactccagatccctatgtggaactttttatctctacaacccctgacagcaggaagagaacaagacacttcaataatgatataaaccctgtgtggaatgagacctttgaatttattctggatcctaatcaggaaaatgttttggagnnagattacgttaatggatgcccattatgtcatgaatgaaactctagggaccgccacatttnnnnnnnnnnnnnnnnnnnnnnnnnnnnnnnnnnnnnnnnnnnnnnnnnnnnnnnnnnnnnnnnnnnnnnnnnnnnnnnnnnnnnnnnnnnnnngctcatgcccagacctacgattttagtatggctctgtgtgaccagggaaagactttcagacaacaggaaaaagagaacataagggagagcatgaaaaaactcttgggtccaaagaatagtgaaggattgaattctgcacgtgatgtgnnnnnnnnnnnnnnnnnnnnnnnnnnnnnnnnnnnnnnnnnnnnnnnnnnnnnnnnnnnnnnnnnnnnnnnnnnnnnnnnnnnnnnnnnnnnnnnnnnnnnnnnnnnnnnnnnnnnnnnnnnnnnnnnnnnnnnnnnnnnnnnnnnnnnnnnnnnnnnnnnnnnnnnnnnnnnnnnnnnnnnnnnnnnnnnnnnnnnnnnnnnnnnnnnnnnnnnnnnnnnnnnnnnnnnnnnnnnnnnnnnnnnnnnnnnnnnnnnnnnnnnnnnnnnnnnnnnnnnnnnnnnnnnnnnnnnnnnnnnnnnnnnnnnnnnnnnnnnnnnnnnnnnnnnnnnnnnnnnnnnnnnnnnnnnnnnnnnnagaatgaatactaccctgagtagtttgaaggaaaaagtcaatactgcacaatgccctttacctcttttcacctgtcttcatgtcaaacctgacgtttcagagctaatgtttgcag

SEQ ID NO: 23793 - DNA, 326 bp, Macaca Mulatta
  misc_feature (1)...(326): n = A,T,C or G
agaatgcaaagtatggcgaaatccactaaatttatttaggggtgctgaatataatcggtanggtatacttgggtgacaggacgagagcctcttacttactatgacatgaatctctctgcccaggaccaccagacgttctttacttgtgactcggaccatctgcgtcccgcagatgcaantaatgcagaaagcctggagagagagaaacccccaagctaggatttctgcagctcatgaagcgttggagataaatganattaggtccagagttgaagttcccctaattgcttcctctaccatctgggagataaaattgttaccaaagt

SEQ ID NO: 23794 - DNA, 88 bp, Macaca Mulatta
ggtaattgggttaacagactatatgtcccttatgaacaaggagcaccttgcgccagttgcccaaataactgtgacgatggactatgca

SEQ ID NO: 23795 - DNA, 720 bp, Macaca Mulatta
  misc_feature (1)...(720): n = A,T,C or G
actgcccaggaatcaagaagtgctgtgaaggctcttgcgggatggcctgtatggttcnccagtgaggtgagcactagctggaggaagaggagacccctgaagacacaaaagaaggctgagcggtggggaaccatcccaggttggtgggagggaggttgtggcaggtgacagaaaaactgggagactgaggggtctgagaggctataaccagtaccgagaaggatgatctggcctcctcactgcctctgagtgcttcgatgtgctgactctcacgtctgattctcttctcttccacagatggagcctgtcattgctgcacctgtgccatacccagagctacaggccccatctgatcctaggtccctgctgcccttccccttcccacactgtccattcttcctcccatacaggatgcccaagcctggagctgcctgtctcatccactttccaataaagagtcccgtctgctccacttgcttctggttcctatgatttctgggctcctggacgctttggggaaatgggtgtagaattgggacttcttctgtccagtgaggaggggaaagggtcccgtggtgaaagagagcagggtgcggggaggaaacaggaggcccgttgctagggcttcatattaccaatccagtaatcagcctcagcactgccatctccttttcaccagaaaatggaaatcaggaaatcttgcctttggccaaggaacag

SEQ ID NO: 23796 - DNA, 873 bp, Macaca Mulatta
atggacattgaagcatattttgaaagaattggctataagaactctaggaacaagctggacttggaaacattaactgacattcttgagcaccagatccgagctgttccctttgagaaccttaacatgcattgtggggaagctatggagttgggcttagagactatttttgatcacattgtaagaagaaaccggggtgggtggtgtctccaggtcaatcaacttctgtactgggctctgaccacaatcggttttcagaccacaatgttaggagggtatgtttacatccctgcagctaacaaatacagcactggcatgattcaccttctcctgcaggtaaccattgatggcaggaactacattgctgatgctggctttggaagctcctcccagatgtggcagcctctggaattaatttctgggaaggatcagcctcagatgccttccattttccgcttgacagaacagaaaggaatctggtacctggaccaaatcagaagagagcagtatattccaaacacagaatttcttaattctgatctcctgccaaagacgacacaccaaaaagtgtactcttttacgcttgaacctcgaaaaattgaagattttgagtctatgaatacatatctgcaaacgtctccaacatctgcatttacaaccacatcattttgttccttgcagaccccagaaggggttcactgtttggtgggcttcaccctcacctatagaatattcaattataaagacaatacagatctgatcgagtttaaaactctgattgaggaagaagttgaagaagtgctgaaaaatatatttaagatttccttggggagaaagctcgtgcccaaacctggtaatggatccttcactatttag

SEQ ID NO: 23797 - DNA, 680 bp, Macaca Mulatta
gagtacgccaacgccatttgccaatgggagcgtaacaagtcacagtgttctgacacggagcaggtggaggctgacctggagtgaggcctccggactctggcatgctccagcagccctcctctggaagctgcgtcccctcaccccctgtttcaggtctcccatctccctcagtgacctggatctgacctcacaccatcagcagggggcacccaccatgcacacctgtctcggagtaggcagctcttcctgggagctccagcttatttttgtgcttagttactggttttctccattgcattgttagtcatggtgacaagtgacagagttcttgccctctgtccagtttcagcatctggttgcttttaagccaagtacatctagtttgcctattaaaaatgtgtctgaatagcaagtttgctttgccaccaaaaggcttttccctgagaacagtgaagggtgtatgtcattttgtggtggtttgtatgtgtccttacgtagaccttaaaaagagctcacccttccaggccaatgctgaagacacagctcagcttggaagcctgagaagccaggcttcccaggccagagtgtggcttcttaaatggcaaaggaaattcctttgagtcacaagccaagttttcaccctatcttctaagatcatttccctacactttgctgctgct

SEQ ID NO: 23798 - DNA, 871 bp, Macaca Mulatta
  misc_feature (1)...(871): n = A,T,C or G
agagattccgctgtgtgccggctgtgaccagcacatcctggaccgattcatcctcaaggctctggaccgccactggcacagcaagtgcctcaaatgcagcgactgccacacgccactggccgagcgctgcttcagccgaggggagagtgttactgccaggatgactttttcnnnnnnnnnnnnnnnnnnnnnnnnnnnnnnnnnnnnnnnnnnnnnnnnnnnnnnnnnnnnnnnnnnnnnnnnnnnnnnnnnnnnnnnnnnnnnnnnnnnnnnnnnnnnnnnnnnnnnnnnnnnnnnnnnnnnnnnnnnnnnnnnnnnnnnnnnnnnnnnnnnnnnnnnnnnnnnnnnnnnnnnnnnnnnnnnnnnnnnnnnnnnnnnnnnnnnnnnnnnnnnnnnnnnnnnnnnnnnnnnnnnnnnnnnnnnnnnnnnnnnnnnnnnnnnnnnnnnnnnnnnnnnnnnnnnnnnnnnnnnnnnnnnnnnnnnnnnnnnnnnnnnnnnnnnnnnnnnnnnnnnnnnnnnnnnnnnnnnnnnnnnnnnnnnnnnnnnnnnnnnnnnnnnnnnnnnnnnnnnnnnnnnnnnnnnnnnnnnnnnnnnnnnnnnnnnnnnnnnnnnnnnnnnnnnnnnnnnnnnnnnnnnnnnnnnnnnnnnnnnnnnnnnnnnnnnnnnnnnnnnnnnnnnnnnnnnnnnnnnnnnnnngatgagccttctttggcggaaatgggcccggccaccggcctctacgggagcttgggggaacccacaccggccttgggccggccctcgggagccctgggcaacttcgcactagagcatggaggcctggcaggcccagagcagtaccgagagctgcgtcccggcagcccctatggtg

SEQ ID NO: 23799 - DNA, 425 bp, Macaca Mulatta
ttccccgcagcaggcagcagaactcggccaaggcgcgctcgtgtgggagcagcgggccagccagctacggctgcagaacttgcgggccagctgcgaggcgctgtacagcgagatggaccccgaggagcggcggcgtttcgccaccacgcgccacctgcggcccgacatgaagacgcacctggaccggccgctggtggtggagctgggccgcgaaggcgcgcgggggcccgtgggaggcaaggcccggccggaggctgcggaggcccccgagggcgtcgaccctccgcgcaggcaccaccggcaccgcgacaaggacaagacccccgcggcgggggaccaggaccgagcagaggccccgaaggcagagagcggggagcctgttgcccgggaggagcggccgcggccgcaccggagccacagcaagg

SEQ ID NO: 23800 - DNA, 1128 bp, Macaca Mulatta
  misc_feature (1)...(1128): n = A,T,C or G
agattctgaagactaccttgaggtcaacattccaacagacctacaagtaaaacattctggggaaataagtgagagaaaagaaattgaagaactgccagaagcttcaagaaacaccataccactagcagtggtgcttcctgctgaaattccatgtgagnnnnnnnnnnnnnnnnnnnnnnnnnnnnnnnnnnnnnnnnnnnnnnnnnnnnnnnnnnnnnnnnnnnnnnnnnnnnnnnnnnnnnnnnnnnnnnnnnnnnnnnnnnnnnnnnnnnnnnnnnnnnnnnnnnnnnnnnnnnnnnnnnnnnnnnnnnnnnnnnnnnnnnnnnnnnnnnnnnnnnnnnnnnnnnnnnnnnnnnnnnnnnnnnnnnnnnnnnnnnnnnnnnnnnnnnnnnnnnnnnnnnnnnnnnnnnnnnnnnnnnnnnnnnnnnnnnnnnnnnnnnnnnnnnnnnnnnnnnnnnnnnnnnnnnnnnnnnnnnnnnnnnnnnnnnnnnnnnnnnnnnnnnnnnnnnnnnnnnnnnnnnnnnnnnnnnnnnnnnnnnnnnnnnnnnnnnnnnnnnnnnnnnnnnnnnnnnnnnnnnnnnnnnnnnnnnnnnnnnnnnnnnnnnnnnnnnnnnnnnnnnnnnnnnnnnnnnnnnnnnnnnnnnnnnnnnnnnnnnnnnnnnnnnnnnnnnnnnnnnnnnnnnnnnnnnnnnnnnnnnnnnnnnnnnnnnnnnnnnnnnnnnnnnnnnnnnnnnnnnnnnnnnnnnnnnnnnnnnnnnnnnnnnnnnnnnnnnnnnnnnnnnnnnnnnnnnnnnnnnnnnnnnnnnnnnnnnnnnnnnccacacagaacccagcatgtcatcatgaaagcaggaagacctacaggcagagtgcagatgttgctgaggcaagtgaaatggaaggggaaggaaaagagaatggatcagacatggaggccaagcacagcccactagaggttggcagtgagagttctgaggaccagtatgatgacttgtatgtgttcattcctggtgccgatccagaaaataattcacaagagccactcatgagcagcagacctcctctccctcctccgcgacccatagctactgccttccaactggaaagacctcacttcaccttaccagg

SEQ ID NO: 23801 - DNA, 766 bp, Macaca Mulatta
  misc_feature (1)...(766): n = A,T,C or G
agcgtcccaagagccactttctcgccaggacgatgctacagcggttttcagcttcccttcatcgtcgctcccacactcatttttagccactgctgccggtttttatatccttctccatcatgcatcgtgagcctccaaagaagaaggcagaaaagcggctgtttgacgcctcgtctttcgggaaggaccttctggccggtggagtcgcggcagctgtgtccaagacagcggtggcgcccatcgagcgggtgaagctgctgctgcaagtgcaggcgtcgtcgaagcagatcagcccggaggcgcggtacaaaggcatggtggactgcctggtacggattcctcgcgagcagggtnncagttctggaggtggtttttggcaaacctggcttctggtggagctgctggagcaacatccttatgtgtagtatatcctctagattttgcccgaacccgattaggtgtcgatattggaaaaggtnaggtcctgaagagcgacaattcaagggtttaggtgactgtattatgaaaatagcaaaatcagatggaattgctggtttataccaagggtttggtgtttcagtacagggcatcattgtgtaccgagcctcttattttggagcttatgacacagttaaggnagggtttattaccaaagccaaagaaaactccatttcttgtctcctttttcattgctcaagttgtgactacatgctctggaatactttcttatccctttgacacagttagaagacgtatgatgatgcag

SEQ ID NO: 23802 - DNA, 838 bp, Macaca Mulatta
  misc_feature (1)...(838): n = A,T,C or G
gaccttttgttacagcaatcaaagttagctattcccttaagaatcctctccagatctcaagtgatgcatttggctttagtaaagtccagtggtgtatgctagctccaggcttctcagatgggggttcctgtctcctctggctctgcactgggctaggtgggtggggaagaacatctactgcccagactcctgcccattcactcgaattcctttccaaccaccttggggaagctggaggggggccagtgtcactcagttagaattggtgtgtgggtcagagccaagggggctggcaggccacagcaaggcctgttggtacccaggannnnnnnnnnnnnnnnnncccatgctgccacatgccagcttcatgctctgtcatctgagatacatcaatgtcttcagtggagacaagactgggaaaccggctattacttgtcacttctttatgtgctctgggtcttgggacctgcaagaccaggagaagggaatttccttcctgccttcttccccagtcatatctaaaaaccctggtatgtgggtgtcttggtgttctattggccaagtctcgcttttctctctaggctccactctttcactgggagagaatgttcagccccccttcaagaatgtggacccagaatggtggcccagcgctggtttcagggcagatgttggtctttgacaatctgcccctgcagtctgggggtacacccaggggcttctggtgagaacaagatggggtacattggccctaaccccagttccttctgctttctttggatacttctaggtctaagggagaaagaacagaagaccccaaggagactgaggctcattc

SEQ ID NO: 23803 - DNA, 810 bp, Macaca Mulatta
  misc_feature (1)...(810): n = A,T,C or G
ctggcgcacgctgcaaagggggtgctctataccaccangcaaaaagcgtccagatgtgtaaatgttttatttctgccccaagtcgcaggttggggcaaagggtttgccacccccctacaaatgcaatatgggaacagccgtacccactccaacttagggccctggcggcaagggaatttatgttggtcttgttcttgcagggggagtatggaaatttgctttaatcccgccgacgccaaagagtttctgcctttaccaatacgttccaccgatgtaacttaagagacattttgtagcccagaacatccaaaagacaaatgaattttcatgtacctccgacagcttgaatggagctgctgtcacctgttctgatggtgagattcagttacttggctttgctgggctatgcattcagagtccaagagagggctccactgtgtggcaggcagatctgtgattggaattgcagaacacacagacacagacacacacagttgcagtgggttctgagcagcaggcttcaactcataccagggtcatggtagggtatgtaaactccttcaactagccaccaatgatgtgagctgtgcttcccgccttttctatttgtttctagaaagtaggaggcaataaatcccaaatgtctctttgggtcttatttggagaaggccttttgtcagaaactttagtggagaaagttctacttgccaggaatccaaggaatgaggtgtgttggcccattacacagattaataagggatggaggcttgaacttccactacccaccatttctcctctcctctcctctcc

SEQ ID NO: 23804 - DNA, 120 bp, Macaca Mulatta
gtgatcaagggaggacccctggaacacaactaccgattgaagcagttccattttcactggggggccatcgatgcctggggttctgagcacaccgtggacagcaaatgcttcccagcagag

SEQ ID NO: 23805 - DNA, 1946 bp, Macaca Mulatta
  misc_feature (1)...(1946): n = A,T,C or G
ggcaaatgtttgtagactacggctgaccgtacctcctgagagtccagttcctgagcaaagtgaaaagaagattgagagaaaggagcanncttgacctgagcaatggagaacctaccaggaaacttcctcagggtgttgtttatggtgtggtgcgaagatcagatcaaaatcagcagaaagaaatggtggtgtatgggtggtccacgagtcaactgaaggaagagatgaactacatcaaagatgtgagnnnntgagagccactttggaaaaagtgagaaagcgaatgtatggagactatggtgagatgaggcagaagattcgacagctcacccaggaactttcagtnnnnnnnnnnnnnnnnnnnnnnnnnnnnnnnnnnnnnnnnnnnnnnnnnnnnnnnnnnnnnnnnnnnnnnnnnnnnnnnnnnnnnnnnnnnnnnnnnnnnnnnnnnnnnnnnnnnnnnnnnnnnnnnnnnnnnnnnnnnnnnnnnnnnnnnnnnnnnnnnnnnnnnnnnnnnnnnnnnnnnnnnnnnnnnnnnnnnnnnnnnnnnnnnnnnnnnnnnnnnnnnnnnnnnnnnnnnnnnnnnnnnnnnnnnnnnnnnnnnnnnnnnnnnnnnnnnnnnnnnnnnnnnnnnnnnnnnnnnnnnnnnnnnnnnnnnnnnnnnnnnnnnnnnnnnnnnnnnnnnnnnnnnnnnnnnnnnnnnnnnnnnnnnnnnnnnnnnnnnnnnnnnnnnnnnnnnnnnnnnnnnnnnnnnnnnnnnnnnnnnnnnnnnnnnnnnnnnnnnnnnnnnnnnnnnnnnnnnnnnnnnnnnnnnnnnnnnnnnnnnnnnnnnnnnnnnnnnnnnnnnnnnnnnnnnnnnnnnnnnnnnnnnnnnnnnnnnnnnnnnnnnnnnnnnnnnnnnnnnnnnnnnnnnnnnnnnnnnnnnnnnnnnnnnnnnnnnnnnnnnnnnnnnnnnnnnnnnnnnnnnnnnnnnnnnnnnnnnnnnnnnnnnnnnnnnnnnnnnnnnnnnnnnnnnnnnnnnnnnnnnnnnnnnnnnnnnnnnnnnnnnnnnnnnnnnnnnnnnnnnnnnnnnnnnnnnnnnnnnnnnnnnnnnnnnnnnnnnnnnnnnnnnnnnnnnnnnnnnnnnnnnnnnnnnnnnnnnnnnnnnnnnnnnnnnnnnnnnnnnnnnnnnnnnnnnnnnnnnnnnnnnnnnnnnnnnnnnnnnnnnnnnnnnnnnnnnnnnnnnnnnnnnnnnnnnnnnnnngcaggactcgtgaaatcgttatgccttctaggaactacaccccatacacaagagtcccgtagttaaccatgaagaaaactctgacttaggcactcagaggcgcacactttttataggtggacaaaggctctggaaccctgtggcttgaaatcctttgggaagggtgactcttgtttcccctatacacagtgtaagccgaaatggaaatcgctgaggctctgatccacttctaagacaggaaggaaagtgaaggtggagtgggcaggtaagagagggatatacaaggtcacgtttcagacacccacccggcataccctgctgtactgcgccatcatttgttttctctgtagatactgaaatcctatcaggaggattccctcacaatgtattttatttgctagacttcggttgggagggaaaaggacattaatttgaagtttcatgttattcatgccaggatcgtttgatagagcatgaaggtcttgattacccataaaagtattagaggcagcgtttctctggtacagagaggcctgtccacaaggagcatgggcacccagccaaacttgaacctggaagggagggttcccaggctgcaggtgctctttcctcttggtcccaagcatctgtgcagggtcatgggagccgcagttagagacttgtgtgggccagacgagcttcatgccaatgcgctagtcccttg

SEQ ID NO: 23806 - DNA, 2871 bp, Macaca Mulatta
  misc_feature (1)...(2871): n = A,T,C or G
gtttcaccatattagccagcctagtctcaaactcctgacctcnnnnnnnnnnnnnnnnnnnnnnnnnnnnnnnnnnnnnnnnnnnnnnnnnnnnnnnnnnnnnnnnnnnnnnnnnnnnnnnnnnnnnnnnnnnnnnnnnnnnnnnnnnnnnnnnnnnnnnnnnnnnnnnnnnnnnnnnnnnnnnnnnnnnnnnnnnnnnnnnnnnnnnnnnnnnnnnnnnnnnnnnnnnnnnnnnnnnnnnnnnnnnnnnnnnnnnnnnnnnnnnnnnnnnnnnnnnnnnnnnnnnnnnnnnnnnnnnnnnnnnnnnnnnnnnnnnnnnnnnnnnnnnnnnnnnnnnnnnnnnnnnnnnnnnnnnnnnnnnnnnnnnnnnnnnnnnnnnnnnnnnnnnnnnnnnnnnnnnnnnnnnnnnnnnnnnnnnnnnnnnnnnnnnnnnnnnnnnnnnnnnnnnnnnnnnnnnnnnnnnnnnnnnnnnnnnnnnnnnnnnnnnnnnnnnnnnnnnnnnnnnnnnnnnnnnnnnnnnnnnnnnnnnnnnnnnnnnnnnnnnnnnnnnnnnnnnnnnnnnnnnnnnnnnnnnnnnnnnnnnnnnnnnnnnnnnnnnnnnnnnnnnnnnnnnnnnnnnnnnnnnnnnnnnnnnnnnnnnnnnnnnnnnnnnnnnnnnnnnnnnnnnnnnnnnnnnnnnnnnnnnnnnnnnnnnnnnnnnnnnnnnnnnnnnnnnnnnnnnnnnnnnnnnnnnnnnnnnnnnnnnnnnnnnnnnnnnnnnnnnnnnnnnnnnnnnnnnnnnnnnnnnnnnnnnnnnnnnnnnnnnnnnnnnnnnnnnnnnnnnnnnnnnnnnnnnnnnnnnnnnnnnnnnnnnnnnnnnnnnnnnnnnnnnnnnnnnnnnnnnnnnnnnnnnnnnnnnnnnnnnnnnnnnnnnnnnnnnnnnnnnnnnnnnnnnnnnnnnnnnnnnnnnnnnnnnnnnnnnnnnnnnnnnnnnnnnnnnnnnnnnnnnnnnnnnnnnnnnnnnnnnnnnnnnnnnnnnnnnnnnnnngtgtttgggcttgggccccctgccccagagagcgacgatgcggtggccttgaccctgcagcaggagtttgcacgggtaggagcatcggcacatgatgatagcnnnnnnnnnnnnnnnnnnnnnnnnnnnnnnnttgtcaaaagaacctgtcagccatgaacgtgacccgaagggaacagcatgtaaacaggtgggggcagcgtgggccgtcacctctcccgtgtacgtgaccagaatccccgggcaccccagggctggagtggggatctccacaccttactgtgaaaatagcacctcagctttgttgtcaacctacccctttttaaaaaataactttgttgagatataattcacagaacatatagttcacccatttnnnnnnnnnnnnnnnnnnnnnnnnnntattcacacagttgtgcaactgtcaccacaatcactttggattttcatcaccgccaaaagaatctccacacccattagcagccactccctattgcccctctctcccctgacaaccactaatcaactttctgtctggatggatttgccgattctgaaattgcacagttgtccttttgtgtctgccttctttgactgaatatgttgtttttgaggttcatccatgttgtagcatgggacaggcttcattcctttttgtggctgagtagtatctcattgtatggatagactgtgtttttttcccattcttagatgaggaatatgaccgtggtttatcctnnnnnnnnnnnnnnnnnnnnnnnnnnnnnnnnnnnnnnnnnnnnnnnnnnnnnnnnnnnnnnnnnnnnnnnnnnnnnnnnnnnnnnnnnnnnnnnnnnnnnnnnnnnnnnnnnnnnnnnnnnnnnnnnnnnnnnnnnnnnnnnnnnnnnnnnnnnnnnnnnnnnnnnnnnnnnnnnnnnnnnnnnnntgctaacagatacctaagtgtagtgtctaggggctgactgccaggagacggagtcaggctgtgtggagggattagctttggggaacttgctttcaccacagcacatccatgatgacctagacccacatgtgctccaatccacattcccggggagggtggttctcctgtattaaccgtcttcctacaggtgcctggatgaagctgaaaaggcactaagaccttccgtgcctcagatccctgagtgcccgatttgtgggaaaccgtttctgaccttaaagaacagagccagccacttgaagcagtgtgctgtgaagatggaggttggcccccagctcctgctgcaggccgtccggctgcagacagcacagcctgaggggagcagcagcnnnnnnnnnnnnnnnnnnnnnnnnnnnnnnnnnnnnnnnnnnnnnnnnnnnnnnnnnnnnnnnnnnnnnnnnnnnnnnnnnnnnnnnnnnnnnnnnnnnnnnnnnnnnnnnnnnnnnnnnnnnnnnnnnnnnnnnnnnnnnnnnnnnnnnnnnnnnnnnnnnnnnnnnnnnnnnnnnnnnnnnnnnnnnnnnnnnnnnnnnnnnnnnnnnnnnnnnnnnnnnnnnnnnnnnnnnnnnnnnnnnnnnnnnnncccccattgttgttagtccaggactctgaaaccacaggccgacagatagaggaccgtgtggccctgctcctgtctgaggaagtggaattgtctagcacgccaccacttcctgccagcaggattttaaaggaagggtgggaaagagcgggccagtgtcctcctccacctgaatgcaagcagagctttctgtgggagggcagtgccctgaatggggcctgggccacggaggccttctacacggccaggctggtccctcccctcgtgccccagcggcctgcccag

SEQ ID NO: 23807 - DNA, 564 bp, Macaca Mulatta
aaacattccaaaagctttgaatactactttccagatcctggctcaatccaatcctagtcatggacactaggaataattctgcaaaagaaaccatggaaaaggaaaagccagtcaaacgtaacatgaagtcgtctatactcccaaaggcgtccactctttcaaagtcatcagctgtcattgagcaaggagattgtaagaacaacgctcttgtaccaggaaccattcaagtacatggccatggaggacagccatcaaaacttgtgaagaggggacctggaaggaaacctaaagtagaagttcacaccaatagtggtgaaattatacacaagacaaggggtagaaagcccaaaaagctacagtatgcaaagccagaaaatttagagccaaataatgtgcatcccatcagagatgaagtacttccttcttcaacatgcaatatactttctgaaactaataatgtacaggaagcttcgttacagaaaaagagtcgtggaggtagaaaacccaaaaggaagatgaagacacaaaactagattcagatctcctaatcactgcaagtgtcaa

SEQ ID NO: 23808 - DNA, 781 bp, Macaca Mulatta
actccatgctggaccagatcaactcctgtctggaccacctggaggagaagaacgaccacctccacgcccgcctccaggagctgctggagtccaaccggcagacacgcctggagttccagcagcagctcggggaggcccccagtgatgccagcccctaggctccgagagcccccaaccgggacccaaccctgcctccctggattaggctctggcctgggtactcacctcctggcttagacaccttctcaagggctggtcttcagggtcccctggtgggtctgcctacctggaccacccttcctgcctgggcctccccttggcctacctgggccagcccccactgcctggcatcccctcctggggccaagagtggggcctgcaacccacccacatgcctgcccacccaactcctgggcactccccactctgcccaggccttgagtgtccacattaaatgggtctcccacaccgctgtgcctctctcctctgtatcccaggacgagaaccccaggagctgctggaggtgaacagggccatctaggtgttcaggtgttgatcatgtactggcggctcagaggccaggtggtggggctggggttcttggtcacctgtacttctggacacagaaggtgcaggtgagggcagggcttcctccctacattcctggccagcagctgcgtcctagcccagaagcccaattgaggctgctggacaggctgtgggaccttgtgtgatgctctcagcctctctgggtacgaagaccttttgccaagacagccaa

SEQ ID NO: 23809 - DNA, 448 bp, Macaca Mulatta
ttctctggctctcacagaagaatcctttacacatgaaaacaatgggactggaaaatcttgtctcttagaaaagaagttaatcacaactatctctcttgcctaaaagataaatgtatgtaaacccaaggaaaggggaatttagtttctccacatgtcatttcggtctctaaactccctgttggctttttaatgcaattttaattgttgaaataaaaaagtcccaagggtgttttgttactgttttctccaaaaaaaaactcacttgattttaaattaaagatctatatctgtctttggggtttagtgtatctggaattaggtttttttgtctgtttttctttgctgtattgttcatgctattgaagccctctaactgtttctgccctacaccaccctgctcttccctaagtattctttgtggctgtctcacagaagagagaacatttct

SEQ ID NO: 23810 - DNA, 104 bp, Macaca Mulatta
ggtccccacccaaaaagaaaaacaagtcctcagggagaagaagcaagtctcctcggagtaagagaaaccgaagtcctcactactcaacagtcaaagtgaagcag

SEQ ID NO: 23811 - DNA, 303 bp, Macaca Mulatta
  misc_feature (1)...(303): n = A,T,C or G
tctccaggttcatggggccgtcggcgggcgtgaatgtggccggcatggggtcgctgacgggcatcgcggacgccgccaagtcgctggccccgctgcannnnnnnnnnnnnnnnncgctccgcgaaggaagcgccgcgtgctcttctcgcaggcgcaggtctacgagctggagaggcgcttcaagcagcagaagtacctgtcggcgcccgagcgcgagcacctggccagcatgatccacctgacaaacacgcaggtcaagatctggttccagaaccaccgctacaaaaggaaacggcaggccaa

SEQ ID NO: 23812 - DNA, 5289 bp, Macaca Mulatta
  misc_feature (1)...(5289): n = A,T,C or G
atggccaaaccaacaagcaaagattcaggctagaaggagaagtttaggattctgtttggactgggaacaccgaggccaaatcccaggtcnnnnnnnnnnnnnnnnnnnnnnnnnnnnnnnnnnnnnnnnnnnnnnnnnnnnnnnnnnnnnnnnnnnnnnnnnnnnnnnnnnnnnnnnnnnnnnnnnnnnnnnnnnnnnnnnnnnnnnnnnnnnnnnnnnnnnnnnnnnnnnnnnnnnnnnnnnnnnnnnnnnnnnnnnnnnnnnnnnnnnnnnnnnnnnnnnnnnnnnnnnnnnnnnnnnnnnnnnnnnnnnnnnnnnnnnnnnnnnnnnnnnnnnnnnnnnnnnnnnnnnnnnnnnnnnnnnnnnnnnnnnnnnnnnnnnnnnnnnnnnnnnnnnnnnnnnnnnnnnnnnnnnnnnnnnnnnnnnnnnnnnnnnnnnnnnnnnnnnnnnnnnnnnnnnnnnnnnnnnnnnnnnnnnnnnnnnnnnnnnnnnnnnnnnnnnnnnnnnnnnnnnnnnnnnnnnnnnnnnnnnnnnnnnnnnnnnnnnnnnnnnnnnnnnnnnnnnnnnnnnnnnnnnnnnnnnnnnnnnnnnnnnnnnnnnnnnnnnnnnnnnnnnnnnnnnnnnnnnnnnnnnnnnnnnnnnnnnnnnnnnnnnnnnnnnnnnnnnnnnnnnnnnnnnnnnnnnnnnnnnnnnnnnnnnnnnnnnnnnnnnnnnnnnnnnnnnnnnnnnnnnnnnnnnnnnnnnnnnnnnnnnnnnnnnnnnnnnnnnnnnagctgatgcggaacctccttggcacccacatgggccacagtgccatctacaacatgtgccacctcatggaggacannnnnnnnnnnnnnnnnnnnnnnnnnnnnnnnnnnnnnnnnnnnnnnnnnnnnnnnnnnnnnnnnnnnnnnnnnnnnnnnnnnnnnnnnnnnnnnnnnnnnnnnnnnnnnnnnnnnnnnnnnnnnnnnnnnnnnnnnnnnnnnnnnnnnnnnnnnnnnnnnnnnnnnnnnnnnnnnnnnnnnnnnnnnnnnnnnnnnnnnnnnnnnnnnnnnnnnnnnnnnnnnnnnnnnnnnnnnnnnnnnnnnnnnnnnnnnnnnnnnnnnnnnnnnnnnnnnnnnnnnnnnnnnnnnnnnnnnnnnnnnnnnnnnnnnnnnnnnnnnnnnnnnnnnnnnnnnnnnnnnnnnnnnnnnnnnnnnnnnnnnnnnnnnnnnnnnnnnnnnnnnnnnnnnnnnnnnnnnnnnnnnnnnnnnnnnnnnnnnnnnnnnnnnnnnnnnnnnnnnnnnnnnnnnnnnnnnnnnnnnnnnnnnnnnnnnnnnnnnnnnnnnnnnnnnnnnnnnnnnnnnnnnnnnnnnnnnnnnnnnnnnnnnnnnnnnnnnnnnnnnnnnnnnnnnnnnnnnnnnnnnnnnnnnnnnnnnnnnnnnnnnnnnnnnnnnnnnnnnnnnnnnnnnnnnnnnnnnnnnnnnnnnnnnnnnnnnnnnnnnnnnnnnnnnnnnnnnnnnnnnnnnnnnnnnnnnnnnnnnnnnnnnnnnnnnnnnnnnnnnnnnnnnnnnnnnnnnnnnnnnnnnnnnnnnnnnnnnnnnnnnnnnnnnnnnnnnnnnnnnnnnnnnnnnnnnnnnnnnnnnnnnnnnnnnnnnnnnnnnnnnnnnnnnnnnnnnnnnnnnnnnnnnnnnnnnnnnnnnnnnnnnnnnnnnnnnnnnnnnnnnnnnnnnnnnnnnnnnnnnnnnnnnnnnnnnnnnnnnnnnnnnnnnnnnnnnnnnnnnnnnnnnnnnnnnnnnnnnnnnnnnnnnnnnnnnnnnnnnnnnnnnnnnnnnnnnnnnnnnnnnnnnnnnnnnnnnnnnnnnnnnnnnnnnnnnnnnnnnnnnnnnnnnnnnnnnnnnnnnnnnnnnnnnnnnnnnnnnnnnnnnnnnnnnnnnnnnnnnnnnnnnnnnnnnnnnnnnnnnnnnnnnnnnnnnnnnnnnnnnnnnnnnnnnnnnnnnnnnnnnnnnnnnnnnnnnnnnnnnnnnnnnnnnnnnnnnnnnnnnnnnnnnnnnnnnnnnnnnnnnnnnnnnnnnnnnnnnnnnnnnnnnnnnnnnnnnnnnnnnnnnnnnnnnnnnnnnnnnnnnnnnnnnnnnnnnnnnnnnnnnnnnnnnnnnnnnnnnnnnnnnnnnnnnnnnnnnnnnnnnnnnnnnnnnnnnnnnnnnnnnnnnnnnnnnnnnnnnnnnnnnnnnnnnnnnnnnnnnnnnnnnnnnnnnnnnnnnnnnnnnnnnnnnnnnnnnnnnnnnnnnnnnnnnnnnnnnnnnnnnnnnnnnnnnnnnnnnnnnnnnnnnnnnnnnnnnnnnnnnnnnnnnnnnnnnnnnnnnnnnnnnnnnnnnnnnnnnnnnnnnnnnnnnnnnnnnnnnnnnnnnnnnnnnnnnnnnnnnnnnnnnnnnnnnnnnnnnnnnnnnnnnnnnnnnnnnnnnnnnnnnnnnnnnnnnnnnnnnnnnnnnnnnnnnnnnnnnnnnnnnnnnnnnnnnnnnnnnnnnnnnnnnnnnnnnnnnnnnnnnnnnnnnnnnnnnnnnnnnnnnnnnnnnnnnnnnnnnnnnnnnnnnnnnnnnnnnnnnnnnnnnnnnnnnnnnnnnnnnnnnnnnnnnnnnnnnnnnnnnnnnnnnnnnnnnnnnnnnnnnnnnnnnnnnnnnnnnnnnnnnnnnnnnnnnnnnnnnnnnnnnnnnnnnnnnnnnnnnnnnnnnnnnnnnnnnnnnnnnnnnnnnnnnnnnnnnnnnnnnnnnnnnnnnnnnnnnnnnnnnnnnnnnnnnnnnnnnnnnnnnnnnnnnnnnnnnnnnnnnnnnnnnnnnnnnnnnnnnnnnnnnnnnnnnnnnnnnnnnnnnnnnnnnnnnnnnnnnnnnnnnnnnnnnnnnnnnnnnnnnnnnnnnnnnnnnnnnnnnnnnnnnnnnnnnnnnnnnnnnnnnnnnnnnnnnnnnnnnnnnnnnnnnnnnnnnnnnnnnnnnnnnnnnnnnnnnnnnnnnnnnnnnnnnnnnnnnnnnnnnnnnnnnnnnnnnnnnnnnnnnnnnnnnnnnnnnnnnnnnnnnnnnnnnnnnnnnnnnnnnnnnnnnnnnnnnnnnnnnnnnnnnnnnnnnnnnnnnnnnnnnnnnnnnnnnnnnnnnnnnnnnnnnnnnnnnnnnnnnnnnnnnnnnnnnnnnnnnnnnnnnnnnnnnnnnnnnnnnnnnnnnnnnnnnnnnnnnnnnnnnnnnnnnnnnnnnnnnnnnnnnnnnnnnnnnnnnnnnnnnnnnnnnnnnnnnnnnnnnnnnnnnnnnnnnnnnnnnnnnnnnnnnnnnnnnnnnnnnnnnnnnnnnnnnnnnnnnnnnnnnnnnnnnnnnnnnnnnnnnnnnnnnnnnnnnnnnnnnnnnnnnnnnnnnnnnnnnnnnnnnnnnnnnnnnnnnnnnnnnnnnnnnnnnnnnnnnnnnnnnnnnnnnnnnnnnnnnnnnnnnnnnnnnnnnnnnnnnnnnnnnnnnnnnnnnnnnnnnnnnnnnnnnnnnnnnnnnnnnnnnnnnnnnnnnnnnnnnnnnnnnnnnnnnnnnnnnnnnnnnnnnnnnnnnnnnnnnnnnnnnnnnnnnnnnnnnnnnnnnnnnnnnnnnnnnnnnnnnnnnnnnnnnnnnnnnnnnnnnnnnnnnnnnnnnnnnnnnnnnnnnnnnnnnnnnnnnnnnnnnnnnnnnnnnnnnnnnnnnnnnnnnnnnnnnnnnnnnnnnnnnnnnnnnnnnnnnnnnnnnnnnnnnnnnnnnnnnnnnnnnnnnnnnnnnnnnnnnnnnnnnnnnnnnnnnnnnnnnnnnnnnnnnnnnnnnnnnnnnnnnnnnnnnnnnnnnnnnnnnnnnnnnnnnnnnnnnnnnnnnnnnnnnnnnnnnnnnnnnnnnnnnnnnnnnnnnnnnnnnnnnnnnnnnnnnnnnnnnnnnnnnnnnnnnnnnnnnnnnnnnnnnnnnnnnnnnnnnnnnnnnnnnnnnnnnnnnnnnnnnnnnnnnnnnnnnnnnnnnnnnnnnnnnnnnnnnnnnnnnnnnnnnnnnnnnnnnnnnnnnnnnnnnnnnnnnnnnnnnnnnnnnnnnnnnnnnnnnnnnnnnnnnnnnnnnnnnnnnnnnnnnnnnnnnnnnnnnnnnnnnnnnnnnnnnnnnnnnnnnnnnnnnnnnnnnnnnnnnnnnnnnnnnnnnnnnnnnnnnnnnnnnnnnnnnnnnnnnnnnnnnnnnnnnnnnnnnnnnnnnnnnnnnnnnnnnnnnnnnnnnnnnnnnnnnnnnnnnnnnnnnnnnnnnnnnnnnnnnnnnnnnnnnnnnnnnnnnnnnnnnnnnnnnnnnnnnnnnnnnnnnnnnnnnnnnnnnnnnnnnnnnnnnnnnnnnnnnnnnnnnnnnnnnnnnnnnnnnnnnnnnnnnnnnnnnnnnnnnnnnnnnnnnnnnnnnnnnnnnnnnnnnnnnnnnnnnnnnnnnnnnnnnnnnagtcacagtcctttgagcggtcggtgcagctcctcgaccagatcccatcatacgacacccacaagatcgccgtcctgtatgtgggagaaggccannnnnnnnnnnnnnnnnnnnnnnnnnnnnnnnnnnnnnnnnnnnnnnnnnnnnnnnnnnnnnnnnnnnnnnnnnnnnnnnnnnnnnnnnnnnnnnnnnnnnnnnnnnnnnnnnnnnnnnnnnnnnnnnnnnnnnnnnnnnnnnnnnnnnnnnnnnnnnnnnnnnnnnnnnnnnnnnnnnnnnnnnagccgtcttccacatcgccaccctgatgcccaccaaggacgtggacaagcatcgttgcgacaagaagcgccacctgggcaacgatttcgtgtccattgtctacaatgactctggcgaggacttcaagctcggcaccatcaagnnnnnnnnnnnnnnnnnnnnnnnnnnnnnnnnnnnnnnnnnnnnnnnnnnnnnnnnnnnnnnnnnnnnnnnnnnnnagacatggagggccttgtggacaccagcgtggccaagatcgtgtctgaccgcaacctgccttttgtggcccgtcagatggccctgcatgcaannnnnnnnnnnnnnnnnnnnnnnnnnnnnnnnnnnnnnnnnnnnnnnnnnnnnnnnnnnnnnnnnnnnnnnnnnnnnnnnnnnnnnnnnnnnnnnnnnngatctgcgaggaagccgcctactccaaccccagcctgcctctggtgcaccccccatcccataccaaagggcctgcacagactccagccgagcccacgcctggctacgagatgggccagcggaagcgcctcatctcctctgtggaggacttcaccgagttcgtgtg

SEQ ID NO: 23813 - DNA, 793 bp, Macaca Mulatta
gctccttttctgtgaaatgtctccccccacgctttagtgtttgtgaaggctgggggagtagccatgtatgctgtgtcttggtgtttcatgtttagcatctggcgcttgcatggagggaagagcatcaagaagtaccatgcttgagaaagcaggcggagtgaggaacggcagctgaaacacaacggacatctcaaaatacactagccaaggctgctccagattatggattgggttaagtcagccatgggaaccaggttggaaatatgactgttatggaattatgcttataacaaacttaggtttcaaaaaagggctaaatttattgatcagtttggtcagtcttcaagccgagcatatatcagtattaaaacaccaacttctacagtggcacagttgtcaaaagtgagactactccatggtagctgggaataagtcagagctgtgaagtgagtacaactggcatttgttttcatttgcggtgaccctgggtcctcctgtccctgggaggtttgatgttcaggcagtttagaaaggaactggaaaaagattagtgctatttcttgttcctttgagaagtaactctttcaataaacacttatttctgcttttcatgtatctatttatctaagtttaccccatttactatagtgaggggctttcagaaagagacacgcatttgggattctgaacattagatcggggaattgggccacttaaacagaggggcgtaggagggcgagagtgaaactgtggcagcgagggggagcgttacttactgaacctcctattccaa

SEQ ID NO: 23814 - DNA, 144 bp, Macaca Mulatta
  misc_feature (1)...(144): n = A,T,C or G
ngacattgaagtacgggcactggaggtggccctgggtgcacatctacgagatgccaggcgcgggcagagactccgctcaggggcacacgtagtggtcactggaccccccaatgccggcaagagcagcctagtgaacctgctcag

SEQ ID NO: 23815 - DNA, 438 bp, Macaca Mulatta
gtagtctaaatcacttcatgtgttcacaaaactgactccccagcagagattatgcaataagataataatttaactgaataatacgatgtgcgtgtatcttacctcagatacactcatgcaaatatgaatataattctgatatagtttggctctgtgtccccacccaaatctcatcttgaatgtgtactcccttaattcccacatgttatgggagggatccggtgagagataatttgcatcaagggggcagtttcccccatactgttcttgtggtagtgaataagtctcatgagatacgatggttttatcaggggcttctgcttttgcatccttctcattttcttttgctgctaccaagtaagaagtgcctcttgcctcccaccatgattctgaggctttcccagccatgtggaactgtaagtccagctaaaccccttt

SEQ ID NO: 23816 - DNA, 556 bp, Macaca Mulatta
  misc_feature (1)...(556): n = A,T,C or G
tggagctgaagaaggacatcaacgccgtatctatcgacatgctgctgatcgtgcactcggagaagcggcgcgccgcacagggtacgcactcagaccagcaggcggacccgagcgcgctgctgcagcgccgaggaggnnnnnnnnnnnnnnnnnnnnnnnnnnnnnnnnnnnnnnnnnnnnnnnnnnnnnnnnnnnnnnnnnnnnnnnnnnnnnnnnnnnnnnnnnnnnnnnnnnnnnnnnnnnnnnnnnnnnnnnnnnngggacacaactgactgtggaagtccaccctcgagatgccatgccccagctactcaagaagttctccttggctaaacgtnnnnnnnnnnnnnnnnnnnnnnnnnnnnnnnnnnnnnnnnnnnnnnnnnnnnnnnnnnnnnnnnnnnnnnnnnnnnnnnnnnnnnnnnnnnnnnnnnnnnnnnnnnnnnnnnnnnnnnnnnnnnnnnnnnnnnnnnnnnnncaggtgacagccaagagtggcctagacgaactggtgagtaacgtgctccaggaggcccatactgacctggaaagggtc

SEQ ID NO: 23817 - DNA, 548 bp, Macaca Mulatta
  misc_feature (1)...(548): n = A,T,C or G
tcttgcccttctggctggatggngggcacagtatgtggtcagccttgccccgagggtcgcttcggaaagaactgnnnnnnnnnnnnnnnnnnnnnnnnnnnnnnnnnnnnnnnnnnnnnnnnnnnnnnnnnnnnnnnnnnnnnnnnnnnnnnnnnnnnnnnnnnnnnnnnnnnnnnnnnnnnnnnnnnnnnnnnnnnnnnnnnnnnnnnnnnnnnnnnnnnnnnnnnnnnnnnnnnnnnnnnnnnnnnnnnnnnnnnnnnnnnnnnnnnnnnnnnnnnnnnnnnnnnnnnnnnnnnnnnnnnnnnnnnnnnnnnnnnnnnnnnnnnnnnnnnnnnnnnnnnnnnnnnnnnnnnnnnnnnnnnnnnnnnnnnagctgtcatcccatgtctggagagtgtgcctgcaagccgggctggtcaggactctactgtaatgagacatgttctcctggattctacggggaagcttgccagcagatttgcagctgccaaaatggggcagactgtgacagtgtgactggaaagtgcacctgtgccccaggattcaaa

SEQ ID NO: 23818 - DNA, 2218 bp, Macaca Mulatta
  misc_feature (1)...(2218): n = A,T,C or G
cagagtaaagcatgaatcatcctccagtgatgaggagcgcgcagctgccaagccatcaaactcaggccacctccctcttctgcctaacgtcagctacaagaagactctccggctgacttccgagcagcttnnnnnnnnnnnnnnnnnnnnnnnnnnnnnnnnnnnnnnnnnnnnnnnnnnnnnnnnnnnnnnnnnnnnnnnnnnnnnnnnnnnnnnnnnnnnnnnnnnnnnnnnnnnnnnnnnnnnnnnnnnnnnnnnnnnnnnnnnnnnnnnnnnnnnnnnnnnnnnnnnnnnnnnnnnnnnnnnnnnnnnnnnnnnnnnnnnnnnnnnnnnnnnnnnnnnnnnnnnnnnnnnnnnnnnnnnnnngaatggatataaatttctctagtgctatgcccgtgccatcgggatggnnnnnnnnnnnnnnnnnnnnnnnnnnnnnnnnnnnnnnnnnnnnnnnnnnnnnnnnnnnnnnnnnnnnnnnnnnnnnnnnnnnnnnnnnnnnnnnnnnnnnnnnnnnnnnnnnnnnnnnnnnnnnnnnnnnnnnnnnnnnnnnnnnnnnnnnnnnnnnnnnnnnnnnnnnnnnnnnnnnnnnnnnnnnnnnnnnnnnnnnnnnnnnnnnnnnnnnnnnnnnnnnnnnnnnnnnnnnnnnnnnnnnnnnnnnnnnnnnnnnnnnnnnnnnnnnnnnnnnnnnnnnnnnnnnnnnnnnnnnnnnnnnnnnnnnnnnnnnnnnnnnnnnnnnnnnnnnnnnnnnnnnnnnnnnnnnnnnnnnnnnnnnnnnnnnnnnnnnnnnnnnnnnnnnnnnnnnnnnnnnnnnnnnnnnnnnnnnnnnnnnnnnnnnnnnnnnnnnnnnnnnnnnnnnnnnnnnnnnnnnnnnnnnnnnnnnnnnnnnnnnnnnnnnnnnnnnnnnnnnnnnnnnnnnnnnnnnnnnnnnnnnnnnnnnnnnnnnnnnnnnnnnnnnnnnnnnnnnnnnnnnnnnnnnnnnnnnnnnnnnnnnnnnnnnnnnnnnnnnnnnnnnnnnnnnnnnnnnnnnnnnnnnnnnnnnnnnnnnnnnnnnnnnnnnnnnnnnnnnnnnnnnnnnnnnnnnnnnnnnnnnnnnnnnnnnnnnnnnnnnnnnnnnnnnnnnnnnnnnnnnnnnnnnnnnnnnnnnnnnnnnnnnnnnnnnnnnnnnnnnnnnnnnnnnnnnnnnnnnnnnnnnnnnnnnnnnnnnnnnnnnnnnnnnnnnnnnnnnnnnnnnnnnnnnnnnnnnnnnnnnnnnnnnnnnnnnnnnnnnnnnnnnnnnnnnnnnnnnnnnnnnnnnnnnnnnnnnnnnnnnnnnnnnnnnnnnnnnnnnnnnnnnnnnnnnnnnnnnnnnnnnnnnnnnnnnnnnnnnnnnnnnnnnnnnnnnnnnnnnnnnnnnnnnnnnnnnnnnnnnnnnnnnnnnnnnnnnnnnnnnnnnnnnnnnnnnnnnnnnnnnnnnnnnnnnnnnnnnnnnnnnnnnnnnnnnnnnnnnnnnnnnnnnnnnnnnnnnnnnnnnnnnnnnnnnnnnnnnnnnnnnnnnnnnnnnnnnnnnnnnnnnnnnnnnnnnnnnnnnnnnnnnnnnnnnnnnnnnnnnnnnnnnnnnnnnnnnnnnnnnnnnnnnnnnnnnnnnnnnnnnnnnnnnnnnnnnnnnnnnnnnnnnnnnnnnnnnnacgccttagattaatatcgatagaaatattactaaggcagtattttgaatgagttcgacactgccagcttccttccatccagcaaggtggtgctgactatgtggacttgagcgcacttatgccaaatgataatgataactgacttctattgagagctctccaaagaaactggttggttttaagaaaatagtttcaagaagttaaactgtattcttttagatattatttattgttttactctgattaggttactgtggtaggcattttagtcatattctttctataccactgtcattaatatattaaaaagatgtatgtgttagactatccaaagggccttattctctctttctcatagactgatcttcttttgggatttatgagtcatttattttccttagctttttccactcaagttaagggcaagtgaaaaagtaataatttgagtggcattctttaagctgacagaatgtgattcttttacttgtttattacactggcttgtggacagaacggtttgaaaagtgaaagaattattttggtaaaag

SEQ ID NO: 23819 - DNA, 391 bp, Macaca Mulatta
tagccaaaacttttgcttttacatttcccagaaagtgaaacattctaagaacttttaccccagggtttatgaaaaattccaaacttatgaagaatgtttctatcagaagttgtaatacctttgtttcctttcctctgtaaccttgtgctctgatctctcttcaggggcctttgcacaaggattacatcattcagggacgaagcactatctcagtaatagttaggagtagtctttaaataatcatttcagggactgtgtgttctagtctcacaatttacactcattaatttgtaatgcatactttttatatatactttaggatactttggcagtgttttttaatatggatataatgctttatctaaccaaaatgccttagggtataagtggg

SEQ ID NO: 23820 - DNA, 865 bp, Macaca Mulatta
acaaggggggagtgggctgctcaacggcaccgcggggggccgggcgcccagaggggttagagccgcggaggacggggggaagggggacagcggaatgtggcacgggtgtccgaacaaggcatagccggaacgcggccgggccaccacggaaagggggatggaacagtttttaggagaggaaggaagaaggcacgaagaggcacagtccgtgattcaggtaggcggggtgcgggggtgcggagccgttttactgggacgtgacagagaagtgaccttgcggggaatgaagatcctttgacgcaaagaataaagccgcgctgggttgaaactgcagtgcagccgtgcgggccgcctggagccaggctcgttggacttggggattgcgacgtcgtcccaccccccacttcttccaccccacttcttcgttcaccaacatgcaagttctttccttccctgccagccagatagacagatgggaaaggcaggcgcggccttcgttgtcagtagttctttgatgtgaaaggggcagcacagtcatttaaacttgatccaacctctttgcatcttacaaagttaaacagctaaaagaagtaaaataagaaggcaatgcttgtggaatgtacagtgcatattggcggcgcacgcctcattacgattcgcctgcttgcttctcctgttcaatcgtttctttggaaggcagtggatttttctcttgcgtctctgtcttcttcagtttcgacttatcgaatttctcgatctcagccatatcgggtttgtcagacatggttgcggaggaaaagcggagcgaggcgcacgaaaacgagcgaagtctggtctgagcagtggccaccaccgagttgtcccc

SEQ ID NO: 23821 - DNA, 630 bp, Macaca Mulatta
  misc_feature (1)...(630): n = A,T,C or G
gggagagtcctccgttgtgtttacattaatagtggtgtttttaactatgaaattattctggatctcatagtacattttacaaaatggcaagtatggaaaaccatggattctgaaagtaaaaaatttagttgttctttccaatgtgtattttaatttggatggcagtctcatgcagattttttaaaatattctttaataacatgatttatttgcctttctagatttctttatctttctgaccagcaacttaggtttcagaatttaagttaggaagacaaagggaaagattggcttaaaccgtatttttacaaagtttgtcatttgccccaaggtcaaattttaaattcttaattttcgttttatttcccattttagataaaaatttacatttaatcttcgaattatgttatttttgttagtagtgccgaaacctagagaacgtattgtatggtgccttgcaaaaatagaaatagaaagattttagcatgcataccaatatagtatattacgcaatatataagcacacctaattaacggattaataacagtaaaggtactgctgctggaatgaagaaaacgggatatgtttcttcctttttttctatggtaccatattgccatgtggactgn

SEQ ID NO: 23822 - DNA, 548 bp, Macaca Mulatta
gtccctctgctgaaatgctaggtgctagctgtaattctggctttaaaaccgaaaccccaaatatttaataaataaaaattagaattagtcgccattctactccaaaccagctagcctagctgaagaggaaaggggaagaggccagagaaaggaggcggcagtcagatcttagacctgtggctacagggacagctgaaagaagtagcacaaagaaagatcatccgagcagtccccagtacagcccccactttttggcagaagtaggataagggttatgtgcaccctcctaccctcaattcatttgtgtcatagagggaaaaagttaaaagtcagctcagctttggtttctggcccaagttttagggagcttagaaaggtgagccctggtccagctttggcagaatgaggcccacagatgggacaataaggcacaaccttgactctggaggtcagggagtcaaaggcaaacagctaggccaaattctcagaataaggaatgtgagtgtaacccctacccacaagagagctgagggaggccctcaaaagca

SEQ ID NO: 23823 - DNA, 917 bp, Macaca Mulatta
  misc_feature (1)...(917): n = A,T,C or G
gggtggcgttttttattttgccttcctggaagactcaagatgtgtctcttcattctctctcagtatttgtttactttggtttttttgtttttaatctcagagagaggtgtgtttagtgggcacaagctgtaatattcagcaaaactttgtcaattggcactgtttacaagtctgttagctgcataagctcaataaaaagttggtctgggcattacatcccctctggcaggccaatagctgcatcaagctgttgggagaaacgggagggcaggggaaagatgtaaagccaaaggacagcaggaacctaccacctgtttcccttctcccattctactcccagtctggaatgccacaaggaccttaaccttgtttctggctttagctgctagttttcccaaatctccgtgctttccctttttaaaacttcccttctattaaaacagatgtcttaattcatcaggctgtcttggaagggtattgtattgagggacaaggggcggtggtggacctcaccttcatccaagtttcaagatactttctcatactctaagaggctggataggaacctacatctgtagatccaccgcgaaacagtagaggttnnnnnnnnnnnnnnnnnnnnnnnnnnnnnnnnnnnnnnnnnnnnnnnnnnnnnnnnnnnnnnnnnnnnnnnnnnnnnnnnnnnnnnnnnnnnnnnnnnnnnnnnnnnnnnnnnnnnnnnnnnnnnnnnnnnnnnnnnnnnnnnnnnnnnnnnnnnnnnnnnnnnnnnnnnnnnnnnnnnnnnnnnnnnnnnnnnnnnnnnnnnnnnnnnnnnnnnnnnnnnnnnnnnnnnnnnnnnnnnnnnnnnnnnnnnnnnnnnnnnnnnnnnnnnnnnnnnnnnnnnnnnnnnnnnnnnnnnnnnnnnnnnnnnnnnnnnn

SEQ ID NO: 23824 - DNA, 767 bp, Macaca Mulatta
  misc_feature (1)...(767): n = A,T,C or G
tggggagcagcccataagaaaacggggaccacagtgccagaatctattcattctttcattggagacggtttggtgaaaccagaggccctaaataagaaagctattcagattattaacagggttcgagataagctcactggtcgggacttctctcatgatgacactttggatgttccaacgcaagttgagctgctcatcaaacaagcgacatcccatgaaaacctctgccagtgctatattggctggtgccctttctggtaactggaggcccagatgtgactgtcacgttttttctgaggcttttttactttagtaaatgcttccactaaactgaaaccatggtgagaaagtttgactttgttaaatattttgaaatgtaaatgaaaagaactactgtatattaaaagttggtttgaaccaactttctagctgctgttgaagaatatattgtcagaaacacaaggcttgatttggttcccaggacagtgaaacacagtaataccacgtaaatcaagccattcattttggggaacagaagatccataactttagaaatacgggttttgacttaactcacaagagaactcatcacaagtacttgctgatggaagaatgacctagttgctcctctcaacatgggtacagcaaacagcacagccaagaagcctcaggtcatggaggacatggattaggatcctagaccgtaaagacacagaagatgccaagcttcaccctggcanctatccaagacctcactggtctgcgga

SEQ ID NO: 23825 - DNA, 1490 bp, Macaca Mulatta
  misc_feature (1)...(1490): n = A,T,C or G
agtggagagcagcccaaaaatatgcagnnnnnnnnnnnnnnnnnnnnnnnnnnnnnnnnnnnnnnnnnnnnnnnnnngaggatggcaagagcgttcttcccgccgggcgccaccaggccccgcgccgagcgacccgcagcggttctcggagcagacgtgcgcgctgagcctggagcggttctccgcgggccgccactactgggaggtgcacgtgggccgccgcagccgctggttcctgggcgcctgcctggccgcggtgccgcgcgcggggcccgtgcgcctgagcccggcgaccggctactgggtgctggggctgtggaacggctgcgagtacttcgtcctggccccgcaccgcgtggcgctccccctgcgcgtgcctccgcggcgcctgggcgtcttcctggactgcgaggcgggacagctgtccttcttcaacgtgtccgacggctcccacatcttcaccttccacgacaccttctcgggcgcgctgtgtgcctacttcaggccccgggcccacgacggcggcgaacgtccggatcccctgaccatctgcccgctgcgggtgagagggacgcgcgtccccgaagagaacgacagtgacacgtggctgcagccctacgagcccacggaccccgcgccggactggtggtgaggcgccctcgtggccgcaggactggcccgggaggctccccggatcccaggcccgcgctttgctctcctgctccggctgaagtgagcaggtgcaccagccaaaatgtcagccagggggacaaagagggggacctttgcctacgtagatnnnnnnnnnnnnnnnnnnnnnnnnnnnnnnnnnnnnnnnnnnnnnnnnnnnnnnnnnnnnnnnnnnnnnnncgaatgagtacaaagacatccacgtcgctgagagccggggttgcctgcggtgggcggtgggaaaccagccagcgtggaagaaagacgggagaaagctttggtggctgcattagagggatcagttaatttgcatagttttatattttttgtatacgtttgctagctctaaaaaagtccagacgcaatgacacttcgtaagcaacgagttcacctaagtaaggctcagatcatagttttaaatagcatttctcattaaaatgaagttgaagaaacagctgcttctggggctggggcaaaaatttcaaggtgagcctggagcattgtgtgtggtaaagtaaaataagcgctcaaaacgtgacggcaacatggcaaaagggtagaggagccaggctgaagggacctcactgaccaattgtgggacaatttgaacatcaggatgaataatgacaggagagatgataacacactgaataaaaacataatccttgagttcatgctgatactcaaatttctttttaaaaagaagaaacaggaaggtttcttttanaggtgaagtctaattattggtgagagtcttttggagaacagggtattttcagtctcaaagcagtgaccttata

SEQ ID NO: 23826 - DNA, 215 bp, Macaca Mulatta
ggggccatgcaccccctgcgcagtggcttactcaactccacctcagactccgacctcgtgcgctaccgcaccatcagcaagattccccaaatcaccctcaactttgtggacctcaagggtgaccccttcttggcttctcccaccagtgaccgtgagatcatagcacccaagataaaggagcgaacccacaatgtcaccgagaaggtcacccaggt

SEQ ID NO: 23827 - DNA, 938 bp, Macaca Mulatta
  misc_feature (1)...(938): n = A,T,C or G
ctgagacctgtgctgagaaaggtctgagcactgacggtgccctctgcccagggctgggtcctgagcagctggttttcctgcaggaatgttggagcaagcaaagtccttctctgccctcagggtcagctgcccagactggggtggatgccagagaggcaggtgggctgtggctagactggtccggagctggcttcattgccagaaaagcctcagccttcctctgtaagcatcccccgttctgggcaagggggaagggctcctttaaggggtgtgctttcccagcggggagcagtctggccctgccccctactaaagcctctgctctcagcactttcccccaagtccttgtaacttgcttgaaggtgggttctggctgccagccagtccctggacaaactctcctgcccctttaaaatttcactcattttgtataaacccagcaggctggtgtttacttagccctgtagnnnnnnnnnnnnnnnnnnnnnnnnnnnnnnnnnnnnnnnnnnnnnnnnnnnnnnnnnnnnnnnnnnnnnnnnnnnnnnnnnnnnnnnnnnnnnnnnnnnnnnnnnnnnnnnnnnnnnnnnnnnnnnnnnnnnnnnnnnnnnnnnnnnnnnnnnnnnnnnnnnnnnnnnctttccttctttgttgttgagttcacggttcaatattgtctcctcccccaggtgaggggaggtgctgcttttctgccccacttgccggctggttccagcagtgctggggcccagctggggggccgggatgggggcttctctctctgggaggggtgcaggtgccctccccagacggggagggttccttccctagttccccgtcttcccttgctggtgagagttgggctgcttggtattggaactccctggcattgggaccagagcatttttagcatttgttgttgttttactcacctaaccctt

SEQ ID NO: 23828 - DNA, 933 bp, Macaca Mulatta
gggggctctctcgggtggagtcttctaacagctggtgcgcctctcctggcaacatcctcctggcctcaatcatggcttgtggtctggtcgccagcaacctgaatctcaaacctggagagtgcctccgagtgcggggcgaggtggcccccgacgccaagagcttcgtgctgaacctgggcaaagatagcaacaacctgtgcctgcacttcaaccctcgcttcaacgcccacggcgacgccaacaccatcgtgtgcaacagcaaggacggtggggcctgggggaccgagcagcgggaggctgcctttcctttccagcctggaagtgtcgcagaggtgtgcatcacctttgaccaggccgacctgaccatcaagctgccagatggatacgaattcaagttccccaaccgcctcaacctggaggccatcaactacatggcagctgacggtgacttcaagatcaagtgtgtggcctttgactgaaatcagtcagcccatggcccccaataaaggcagctgagttttcagaccccccattttagagtagatagctgtgattatgattgaaatgtagtgaaggcgcgatttttcggcgcgcgccttctgagggtcttctggggagaaaatgttcttgagataaacaattactgttttgggccgccccaggcgtccgcacagaaagagttaattgggaaaaaatgagtcctaaaacgtgtgtttctctaagaaagatatccctggtagagtagaagaagagggttctttgtgtctttcacgcgatcgattgatgaaaaatgcccctcggcggcggcgtagaaataaggtgaagtattctgtgaagagaatgattacaggagagatagatgtgtgttagacgcgcggtgattaatctgtagagagcttcattggccagagacgaagatgctatcatgcgaac

SEQ ID NO: 23829 - DNA, 318 bp, Macaca Mulatta
tttaaatggtggcaaatgttatgaagagcaagcccaggaagtcatggtgtagaattacgggtggtgtcctggaccttggaacgtggacgaggcatgagagaaagcacactccaagagagaatgtctgcctttcttgaaggatattgaagatgctacctaggcagcgggggaggggagggacgctgttcctggaagagagacgcttggctcggaccctgggttttggggagccccacaggaccccatttggttacctgtgaattgggtagtggcgtgcactgtgctgaggagggtgaatgttcgaggagatgacgggcc

SEQ ID NO: 23830 - DNA, 133 bp, Macaca Mulatta
ctcgagccgggagctatttgcctcctaggaggaagccagggcagggttccgcggggaatggcgcttagggagccactcgggacgaggaggccctaaaatgaaaaagcttcagcctgaggcttcgggagcggcg

SEQ ID NO: 23831 - DNA, 191 bp, Macaca Mulatta
tcaaagatgactcatggccctggatatgaagaactattgacttcttaagaaaaaagggagaaatattaatcagaaagttgattcttatgataatacggaaaagttaaccgttataaaaaagcaaagcttgagtttcctaaatgtaagcctttaaagtaatgaacattaaaaccaaacattatttcactgtc

SEQ ID NO: 23832 - DNA, 176 bp, Macaca Mulatta
cttaactcatattctgcacgatctgtatatagtatatcaaacttagaggtgtgaccttaaatttaactttttttaaaaactgggaggtcaataaaatttaaactgcttaactatgtatatgaatatttgaattttttacttgtatatttttataaatacagctgaattttcttaaa

SEQ ID NO: 23833 - DNA, 2060 bp, Macaca Mulatta
  misc_feature (1)...(2060): n = A,T,C or G
aatgacatcccattcattaaatcgttaatcaataggcaccacctttaaccagactgtcctgacttgcacaggagacacactcctcacctcagcaacctcaagccctcccttctcacgtctccatgcaaagacccgggcaggtcaaagcagggctgtcccccctgatgagcccctcgaagcacctggctggccatggctgtcattttgagggcagaaaataactggatttctggttaattggtgacatcnnnnnnnnnnnnnnnnnnnnnnnnnnnnnnnnnnnnnnnnnnnnnnnnnnnnnnnnnnnnnnnnnnnnnnnnnnnnnnnnnnnnnnnnnnnnnnnnnnnnnnnnnnnnnnnnnnnnnnnnnnnngcgttacccaaacttaatcgctttgcagatgctgtcctgattgttgctgctggtgttggtgaatttgaagctggtatctccaagaatgggcagacccgagagcatgctcttctggcttacacactgggtgtgaaacaactaattgttggtgttaacaaaatggattccactgagccaccctacagccagaagagatacgaggaaattgttaaggaagtcagcacttacattaagaaaattggctacaaccccgacacagtagcatttgtgccaatttctggttggaatggtgacaacatgctggagccaagtgctaacatgccttggttcaagggatggaaggtcacccgtaaggatggcaatgccagtggaaccacgctgcttgaggctctggactgcatcctaccaccaactcgtccaactgacaagcccttgcgcctgcctctccaggatgtctacaaaattggtggtattggtactgttcctgttggccgagtggagactggtgttctcaaacccggtatggtggtcacctttgctccagtcaacgttacaactgaagtaaaatctgtcgaaatgcaccatgaagctttgagtgaagctcttcctggggacaatgtgggcttcaatgtcaagaatgtgtctgtcaaggatgttcgtcgtggcaacgttgctggtgacagcaaaaacgacccaccaatggaagcagctggcttcactgctcaggtgattatcctgaaccatccaggccaaataagtgctggctatgcccctgtgttggattgccacacagctcacattgcatgcaagtttgctgagctgaaggaaaagattgatcgccgtttctggtaaaaaactggaagatgggccctaaattccttgaaagtctggttgatgctgcccattgttgatatggttcctggcaagcctatgtgtgttgagagctttctcagactatccacctttgggtcgctttgctgttcgtgatatgaggcagacagttgcggtgggtggtcatcaaagcagtggacaagaaaggctgctggaagctggcaaggtcaccaagtctgcccagaaagctcagaaggctaaatgaatattatccctaatacctgccaccccactcttaatcagtggtgggaagaaaacggtctcaagaactgttttgtttcaatttggccattttaagttttagtagtaaaaagactggtttaatgataacaatgcatcgtaaaaccttcagaaggaaaggagaatgttttgtggaccactttgggttttcttttttgcgtgtggcagttttaagttattaggtttttaaaatcagtactttttaaatgggaaacaactttgaaccaaaatgttggtctcagaaattttgagacccatttaaaaagtttaaatgaggaaaaaatatgaagtcttgataagattttattttctatattccccaaacaatcatctagctcattgcctgtcctgcctacctgaagccattcagaatgtttgttcgaacctctccccctttgagggggttttctccaacatttatcttttggggaaggttttccccacaacattttttattgagaaccggctccccccaagtgtttcttcaaaaaaaaatccccttaactatgttacctccccgagaatttcccccccagaaatataatgcggcccggggt

SEQ ID NO: 23834 - DNA, 1298 bp, Macaca Mulatta
  misc_feature (1)...(1298): n = A,T,C or G
ggaccttcaagcaaccctatccaaccttcaaaccaagcacacccaaatcctgcgaccccagattgacatttgatgctatcaccacactccgtggagaaataatgttctttaaagannnnnnnnnnnnnnnnnnnnnnnnnnnnnnnnnnnnnnnnnnnnnnnnnnnnnnnnnnnnnnnnnnnnnnnnnnnnnnnnnnnnnnnnnnnnnnnnnnnnnnnnnnnnnnnnnnnnnnnnnnnnnnnnnnnnnnnnnnnnnnnnnnnnnnnnnnnnnnnnnnnnnnnnnnnnnnnnnnnnnnnnnnnnnnnnnnnnnnnnnnnnnnnnnnnnnnnnnnnnnnnnnnnnnnnnnnnnnnnnnnnnnnnnnnnnnnnnnnnnnnnnnnnnnnnnnnnnnnnnnnnnnnnnnnnnnnnnnnnnnnnnnnnnnnnnnnnnnnnnnnnnnnnnnnnnnnnnnnnnnnnnnnnnnnnnnnnnnnnnnnnnnnnnnnnnnnnnnnnnnnnnnnnnnnnnnnnnnnnnnnnnnnnnnnnnnnnnnnnnnnnnnnnnnnnnnnnnnnnnnnnnnnnnnnnnnnnnnnnnnnnnnnnnnnnnnnnnnnnnnnnnnnnnnnnnnnnnnnnnnnnnnnnnnnnnnnnnnnnnnnnnnnnnnnnnnnnnnnnnnnnnnnnnnnnnnnnnnnnnnnnnnnnnnnnnnnnnnnnnnnnnnnnnnnnnnnnnnnnnnnnnnnnnnnnnnnnnnnnnnnnnnnnnnnnnnnnnnnnnnnnnnnnnnnnnnnnnnnnnnnnnnnnnnnnnnnnnnnnnnnnnnnnnnnnnnnnnnnnnnnnnnnnnnnnnnnnnnnnnnnnnnnnnnnnnnnnnnnnnnnnnnnnnnnnnnnnnnnnnnnnnnnnnnnnnnnnnnnnnnnnnnnatatctgacttctagaatttgttatattacttgcctatctgacttcatacatccttcagtctctttaaatgtcctatgtatatcttctacaagcaatttagaactagattttggttagaaataagggttataaacaatctagcaataccttttgcctttacagaaaatgtggtgctgttttctacccttggaaagaaatgtggatgatatatttcgtgggttgaattgtgtcccccataaaagatacgttgaagttctaaccccaggtacctatgaatgtgagcttaccagggtctttgcagatgtaattagttaagttaaggtgaggtcacactgaattagggtgggctctaaatcctttatgactgttgttcttataagaagaagagagacatag

SEQ ID NO: 23835 - DNA, 1596 bp, Macaca Mulatta
  misc_feature (1)...(1596): n = A,T,C or G
ggccgggaagaactggatgttcagcaatgccaagtccccaccgcactgtgagctgatggccggccacctccggaaccgcatcacggctgacggggcacactttgagctgcggctgcacctcatctacctgatcaacgacgtgctgcaccactgncagnnnnnnnnnnnnnnnnnnnnnnnnnnnnnnnnnnnnnnnnnnnnnnnnnnnnnnnnnnnnnnnnnnnnnnnnnnnnnnnnnnnnnnnnnnnnnnnnnnnnnnnnnnnnnnnnnnnnnnnnnnnnnnnnnnnnnnnnnnnnnnnnnnnnnnnnnnnnnnnnnnnnnnnnnnnnnnnnnnnnnnnnnnnnnnnnnnnnnnnnnnnnnnnnnnnnnnnnnnnnnnnnnnnnnnnnnnnnnnnnnnnnnnnnnnnnnnnnnnnnnnnnnnnnnnnnnnnnnnnnnnnnnnnnnnnnnnnnnnnnnnnnnnnnnnnnnnnnnnnnnnnnnnnnnnnnnnnnnnnnnnnnnnnnnnnnnnnnnnnnnnnnnnnnnnnnnnnnnnnnnnnnnnnnnnnnnnnnnnnnnnnnnnnnnnnnnnnnnnnnnnnnnnnnnnnnnnnnnnnnnnnnnnnnnnnnnnnnnnnnnnnnnnnnnnnnnnnnnnnnnnnnnnnnnnnnnnnnnnnnnnnnnnnnnnnnnnnnnnnnnnnnnnnnnnnnnnnnnnnnnnnnnnnnnnnnnnnnnnnnnnnnnnnnnnnnnnnnnnnnnnnnnnnnnnnnnnnnnnnnnnnnnnnnnnnnnnnnnnnnnncagccgccagagcagccgccctacccgcaccaccagggcggcccaccccactgccccccctggaacaacagccacgaaggcatgtggggcgagcagcgtggtgaccctggctggaacggccagcgcgacgcgccctggaacaaccagcctgacccggcctggaacagccagttcgagggcccctggaacagccagcacgagcagccgccctggggcgggggccagcgcgagccgcccttccgcatgcagcggcccccacacttccgggggcccttcccgccccaccagcagcacccgcagttcaaccagcctccacacccccacaacttcaaccgcttcccgccccgcttcatgcaggacgacttcccgccgcggcaccccttcgagcggccgccctatccccaccgcttcgactacccccagggggacttccctgccgngaaatgggcccccctcaccaccaccctggccatcgcatgcctcatcctggtatcaacgagcacccgccctgggctggaccccagcaccccgacttcggccctcccccccacggcttcaacgggcagcccccacacatgcggcgacagggcccgccccacatcaaccacgatgaccccagcctggtccccaacgtgccctatttcgatctccctgccgggctgatggcccccctcgtgaagnnagctggaagatcacgagtacaagcctttggaccctaaagacatccgccttccaccccccatgccgcccagcgagaggctgctggctgcggtggaggccttctacagccccccatcccacgacagacccaggaaca

SEQ ID NO: 23836 - DNA, 451 bp, Macaca Mulatta
  misc_feature (1)...(451): n = A,T,C or G
atggcctcagaccaccagacccaggcgggcaagccacagtccctcaaccccaagnnnnnnnnnnnnnnnnnnnnnnnnnnnnnnnnnnnnnnnnnnnnnnnnnnnnnnnnnnnnnnnnnnnnnnnnnnnnnnnnnnnnnnnnnnnnnnnnnnnnnnnnnnnnnnnnnnnnnnnnnnnnnnnnnnnnnnnnnnnnnnnnnnnnnnnnnnnnnnnnnnnnnnnnnnnnnnnnnnnnnnnnnnnnnnnnnnnnnnnnnnnnnnnnnnnnnnnnnnnnnnnnnnnnnnnnnnnnnnnnnnnnnnnnnnnggacagccaagagcacaagatcatcctctatgaaaaccccaacttcaccgggaagaagatggaaatcatagatgacgacgtacccagcttccacgcccacggctaccaggagaaggtgtcatctgtgcgggtgcagagtggcacgt

SEQ ID NO: 23837 - DNA, 700 bp, Macaca Mulatta
atacacaggcatatatttaaaaaggagggccccttttaatataaaattctggttatataccaatatggttaattagcatttacactatggtttgaacatattttaaatagcataatgtgtatacaatgtctcccacgcccactggcaaccagggtcgtgggaagcttggtgaggagttaaccaggtcctgtggtttaagcagtgcagcacccgggattcctgcccccctttctgctcacacaattgcactccattcttccaccttccttgttttctccaaaaccacctgatagggggatgtcctgatttctgaggtgtgcttctcatcatgactgcttcgttttgcccttctgatttccacggcacaagattatctaccaaaatcaaaacagaatggccttactcttctcagaaagaggctgggaggcaggtgcattatgaacaggtctgtgcccatgcagagtgagcagggagaggctgggcactgtggaatttttctatctgacctcgctcatggccacagaacagtcacccagcttatttagatgtagacaagtatgacacagttctagcaaatactgactgtataaaaatatctgtgtgtgtgtatatatttatatgtatatgtatatattttttaaaggctcatcttacttgtaaacatggactgctcaatcactattaaaaagtctgtttagcc

SEQ ID NO: 23838 - DNA, 735 bp, Macaca Mulatta
tctctatgggatggccacgcttttttgagcattacaccaaacattaaggaagaaggagcaatgaaagaggattccggaatgcaagatacaccatacaatgagaatatcctggtggagcagctatacatgtgtgtggagtttctctggaagtctgagcgatacgaactcattgctgatgtcaacaagcccatcattgctgtctttgagaaacaacgagacttcaaaaaattgtcagatctctactatgacattcatcggtcatacctgaaagtggcagaggtggtgaattcagagaagcggctgtttggtcgctactatcgtgtggcattttatgggcaggagtgtcttggagagatgggggtctatggtggtgagctctgagcattctcagaggtgatgggagtaattcccaacataaaagatgaactggggaataaatctttacccaatacgtctgggtaagtctccagagatgcaggaaggagcaagggcttttttgaagaagaagaaggtaaagagtatatttataaagagcctaagctgacaggtctgtccgagatttcccaaagactcctcaagctctatgcaagataatttggagcagacaatgtgacgataatccaggattccaacaaggtaaaccccaaggatttggaccccaaatatgcctacatccaggtgacctatgtcacgccattctttgaggaacaggaaatcgaagaccggaagacagat

SEQ ID NO: 23839 - DNA, 929 bp, Macaca Mulatta
ccctgaaggtggataagccaaccatgccctccgtagaggtcccctatccttaaataagagacctctaagagatccccatggccgaatactccaaagaatcctatgtcacaatatattccactgcatctgacatatccttctatgtttccaaagaagaattatccacatctcccctgcttcttcctcttcctctctctgcctaagggtggtgatggtggggagtggttggtaaaggcacacagaagggccattgaggctctcaggggaaccattctgatctagctttctatcaagaatgcatctcaaggggctaggcaaggggaaaactgttgtgtgtggtcttggaactggttgctgtcaagtttatctcattctaacacctccataatattctctgctaaagaagtgactgtgcatataagtaaaggcaacctctcaggaagccagaggtagtggtctattctttagacccctcgtgatcaaccagggtgatgaaggctggggcgtgggggcaatagtgatgccatctgagtgatcttattctctgggccagagaatgaggggcatgggtcagggacaaagatctcatccccaccccacattatctgccctgttgtgcagtgggctacttcctgatagcctgtggtttgctgattccctaataagagggtgggtacaatccatgcatactcaagagcttttggctttgaggggaaaccagagcttagaacaagtatctggaggcccttctatctgggagcccaaagttagaagccgcgagttgagctcttcccacttacacttcctttctggacctgagcctcttctttatgatggtgatgtaaggcagactaccacagcatcttccttcgggctcagatctctcctgggctacctgtggagctgtgtcctctaacagccacattact

SEQ ID NO: 23840 - DNA, 1129 bp, Macaca Mulatta
  misc_feature (1)...(1129): n = A,T,C or G
gctgacacagcccttggcactgatgatgtatatgatgaaaaaggatgccagtgtgatgtatcagtggaagacctcaccccaccacttaaaactgtcattcgagctatcannnnnnnnnnnnnnnnnnnnnnnnnnnnnnnnnnnnnnnnnnnnnnnnnnnnnnnnnnnnnnnnnnnnnnnnnnnnnnnnnnnnnnnnnnnnnnnnnnnnnnnnnnnnnnnnnnnnnnnnnnnnnnnnnnntgttgatcaaattcttggaaaagggcaaatcacatcagataagaagagccgagagaaaataacagcagaacatgagaccacagatgatctcagtatgctcggtcgggtggtcaaggttgaaaaacaggtacannnnnnggtacagtccatagattccaagctggactgcctactagacatctatcaacaggtccttcggaaaggctctgcctcagcccttgctttggcttcattccagatcccaccttttgaatgtgaacagacatctgactatcaaagccccgtggatagcaaagatctttcgggttctacacaaaatagtggctgcttatccagatcaactagtgccaacatctcaagaggcctgcagttcattctgacgccaaatgagttcagtgcccagactttctacgcgcttagccctactatgcacagtcaagcaacacaggtgccaatgagtcaaagcgatggctcagcagtggcagccaccaataccgttgcaaaccaaataaacacggcacccaagccagcagccccaacaactttacagatcccacctcctctcccagccatcaagcatctgcccaggccagaaactctgcacccaaaccctgcaggcttacaggaaagcatttctgacgtcaccacctgccttgttgcctccaaggaaaatgttcaggttgcacagtcaaatctcgccaaggaccgttctatgaggaaaagctttgacatgggaggagaaactctgttgtctgtctgtcccatggtgccaaaggacttgggcaaatctttgtctgtgcaaaacctgatcaggtcgaccgaggaactgaatatacaactttcagggagtgagtcaagtggctccagaggcagccaagatttttacccc

SEQ ID NO: 23841 - DNA, 152 bp, Macaca Mulatta
  misc_feature (1)...(152): n = A,T,C or G
tcccagggtctggcagttcgtctctgctgtgctcttctctggcattgccatcatggnncttgccttccctgaccagctctatgatgcggtctttgatggagcccaggtgaccagcaagacccccatccgcctctatggcggtgccctcctca

SEQ ID NO: 23842 - DNA, 1275 bp, Macaca Mulatta
  misc_feature (1)...(1275): n = A,T,C or G
tgcagggtctaaatgctccaagtgagccatcgtttgagccccaagccccagcctcataccttggacctccaccacacacactttaatgcccctgctcaatccacccagatgctggcttcccacttcctccaccaccttatgagctcccagcatctacatcccatgtcccagacgccccatactcctatggcaacatgaccataccagtctccaagccactgagcctctcaggcctgctcagtgagccactccaagaccccttagctctcctggacattgggctgccagtggggccacctaagccccttgaagacccagaatccgactcaggattatccctcaactatagtgatgctgaatctcttgagctggaggggacagaggctggtcggcggcgcagcgagtatgtggagatgtacccggtggagtacccctactcactcatgcccaactccttggcccactccaactataccttgccagctgctgagacccccttggccttagagcccgcctcaggccctgtgcgggctaagcccactgcacggggggaggcagggagtcgggatgaacgtcgggccttggccatgaagattccttttcctacggacaagatcgtcaacttgccggtagatgattttaatgagctattggcgaggtacccgctgacagagagccagctggcgctagtccgggacatccgacgacggggcaaaaacaaggtagcagcccagaactgccgcaagaggaagctggaaaccatcgtgcagctggagcgggagctggagcggctgagcaatgaacgggagcggcttctcagggcccgcggggaggcagaccggaccctggaggtcatgcgccaacagctgacagagctgtatcgtgacattttccagcaccttcgggatgaatcaggcaacagctactctcctgaagagtacgcgctgcaacaggctgccgatgggaccatcttcttataggccccgggggaccaagatggaggccacagacnnnnnnnnnnnnnnnnnnnnnnnnnnnnnnnnnnnnnnnnnnnnnnnnnnnnnnnnnnnnnnnnnnnnnnnnnnnnnnnnnnnnnnnnnnnnnnnnnnnnnnnnagaagaggatgataatgggaacgggtgtttggaagttccaaggtgtgtcctttaaagcttgccttgacgaagggctggcatctgtcttccctgactcagcttctcaggtcttcagcctccacctcgtctaagctttggtctataaagtgcgctacagaaa

SEQ ID NO: 23843 - DNA, 1054 bp, Macaca Mulatta
  misc_feature (1)...(1054): n = A,T,C or G
tcaactttgaccactttgaaattttgcgagccattgggaaaggcagttttgggaaggtnnnaggtctgcattgtacagaagaatgataccaagaagatgtacgcaatgaagtacatgaataaacaaaagtgtgtggagcgcaatgaagtgagaaatgtcttcaaggaactccagatcatgcagggtctggagcaccctttcctggttaatttgtggnnnnnnnnnnnnnnnnnnnnnnnnnnnnnnnnnnnnnnnnnnnnnnnnnnnnnnnnnnnnnnnnnnnnnnnnnnnnnnnnnnnnnnnnnnnnnnnnnnnnnnnnnnaagctcttcatttgcgagctggtcatggccctggactacctgcagagccagcgcatcattcacaggnnnnnnnnnnnnnnnnnnnnnnnnnnnnnnnnnnnnnnnnnnnnnnnnnnnnnnnnnnnnnnnnnnnnnnnnnnnnnnnnnnnnnnnnnnnnnnnnnnnnnnnnnnnnnnnnnnnnnnnnnnnnnnnnnnnnnnnnnnnnnnnnnnnnnnnnnnnnnnnnnnnnnnnnnnnnnnnnnnnnnnnnnnnnnnnnnnnnnnnnnnnnnnnnnnnnnnnnnnnnnnnngagaccatatcatattcgctccagtacttccagcaaggaaattgtacgcatgtttgagacgactgttgtaacttatccttctgcctggtcacaggaaatggcgtcacttcttaaaaangctacttgaacttaatccagaccaacgattttctcagttgtctgatgtccagaacttcccatacatgaatgatataaactgggatgcagtttttcagnnnnnnnnnnnnnnnnnnnnnnnnnnnnnnnnnnnnnnnnnnnnnnnnnnnnnnnnnnnnnnnnnnnnnnnnnnnnnnnnnnnnnnnnnnnnnnnnnnnnnnnnnnnnnnnnnnnnnnnnnnnnnnnnnnnnnnnnnnnnnnnnnnnnnnnnnnnnnagacatgtctttttcaagagcaccttgactctgtccagaaggagttcataattttcaacagagaaaagta

SEQ ID NO: 23844 - DNA, 744 bp, Macaca Mulatta
gggagtgcagatttaaaccgctggcacctggggcagtctcagagttcagcctgcttccggacgggtgaggagactcgtgttctggttctaggacttccttaacagcatggcccctaaacgccagtctccactcctgcctcaaaagaagaaaccaagaccaccgcctgctctgggaccggaggagacatcagcctctgcaggcttgccgaagaagggagaaaaagaacagcaagaagcaattgaacacattgatgaagtacaaaatgaaatagacagacttaatgaacaagccagtgaggagattttgaaagtagaacagaaatataacaaactccgccaaccattttttcagaagaggtcagaattgatcgccaaaatcccaaatttttgggtaacaacatttgtcaaccatccacaagtgtctgcactgcttggggaggaagacgaagaggcactgcattatttgaccagagttgaagtgacagaatttgaagatattaaatcaggttacagaatagatttttattttgatgaaaatccttactttgaaaataaagttctctccaaagaatttcatctgaatgagagtggtgatccctcttcgaagtccaccgaaaatcaaatggaaaatctgggaaagggattttgacgaaaacgtttcaaggtcaaaaccccaggaaataaaagccccagccaggaaaagaaggccagccatgggagggaaaccccaggaagaaagcttta

SEQ ID NO: 23845 - DNA, 544 bp, Macaca Mulatta
  misc_feature (1)...(544): n = A,T,C or G
gatcaagatgaatgccatgctggagacccccgagctcccagccgtgtttgatggagtgaagctggctgcagtggctgctgtgctgtacgagattgtccggtgtttgaacctgaagagccccacagnnnnnnnnnnnnnnnnnnnnnnnnnnnnnnnnnnnnnnnnnnnnnnnnnnnnnnnnnnnnnnnnnnnnnnnnnnnnnnnnnnnnnnnnnnnnnnnnnnnnnnnnnnnnnnnnnnnnnnnnnnnnnnnnnnnnnnnnnnnnnnnnnnnnnnnnnnnnnnnnnnnnnnnnnnnnnnnnnnnnnnnnnnnnnnnnnnnnnnnnnnnnnnnnnnnnnnnnnnnnnnnnnnnnnnnnnnnnnnnnnnnnnnnnnnnnnnnnnnnnnnnnnnnnnnnnnnnnnnnnnnnnnnatcacagcgagaagcagtacatccgcactttcgttgactacgcccagaaaaatggctatcggtgcgctgtgctgaaccacctgggtgccctgcccaacattgaactgacctcgccacgcatgttcacctatgg

SEQ ID NO: 23846 - DNA, 421 bp, Macaca Mulatta
ctgctgcggtgtcactgggctaccatgagatccaagttgaaatcaggagcctactttgattgtaggtttgaatgacgtgtcctgaagcctcagaggcagcaggagactatcaaagcttagatgcctccttctctgcccccagactctgtcccacttggaggagggctgtaggaagattccttcctgccaagccaccttccagtgagctctggatgaagctctggccaaccaaagacactgtccccacagcaggtgcctggtgggccacgtgttctcacacaggtagaggagctgggcttctcgcccaagcacaaacctttctatggaaagcagccatatttgcagataccactgtctccttttgtcctcttcgtggctggaattcaaaagcatgtatttctgaagccccttgtgacattgt

SEQ ID NO: 23847 - DNA, 2376 bp, Macaca Mulatta
  misc_feature (1)...(2376): n = A,T,C or G
gacccacgtcggggtgcactcaggaccacagggcagggctgggtggggcaccacctcgctctctgtacatagaaaagctggagcttattctgcgaatggagacgatcaaaccatgactgatgaatccagacaggagggattgactctgaggacctgagctgcatcagtcccactctgtgaacatctcagttacctcattctgcaataagttcagtgactgactaatagtctctgtttttccagactttgaattgannnnnnnnnnnnnnnnnnnncatgtttcttgtaaatatcccattttgaatgcatacccgtggtggttctgtccgggctaatccccatgctagaatgtcctttccagctacgtgagtaagaagtcccatgcctgcacccaccggaagcagaacccggtggatgcctggttcgttccgcagcaccagggcctccaccgcgctgtgacagcaccccccgtgtcggtatttctgaataaccttatttatacctgcagagatacacgtcagtcccattcggaagtcttctcttaaagcagcgttccagtcccagacctgcggggttccgagggcagcttgctggttgacagactcagtcctgacctcaaggaaggcccatacggcaccgctgcatccacctagaggtgtttgctcttgtccgctgtgtgagtcctgtgattctcagatggatttgctgtgttttgggagattacacagacgtttctgtgcaggctagttcagtaacaacaaagtaacactgttttgtcttcccttaaagagagctcttactagaacctgtaaatagaatgtattatttattgtaggtcactgcagctgnnnnnnnnnnnnnnnnnnnnnnnnnnnnnnnatactgatgggtggagctttgccgtcaggccagcctcatcctgaggtctgctccaccactggctgcagccagcaggcttcagtgctcaccgaaagtgaaatcccctccttcagcaagcataaagcaatatacaccctaggttccactaagcaacgtaggcgtaagcagggagcgtgtcccccactgtgttccagtgcagaggagacggacgaagcctgtcctcgccgcggcttgctgggcccaggctggctctggaaagcctgtgcagtcccgggcgggaagcccagcccgtggggcaggttttcgttctgcttcagcaataaataagggtgaccgcagggactttgcttttggtttcccttcccgtgaagaggttggttttaaagtgagatacacttttccatagaacaagtgttctatctttaaacaccaaaattgcaacgccatggattactggtctcagaacagctcattttgcatcagatttgactttctgcttttccgtctattggccaaattgccctttaactgcacctgaatcctttgtatactgatgcctttgagctgggcaccctgggagagtgttctgttactgtttacggttcttcctcgcccttgctaattacagtctctggtgcccagcaagccccttnnnnnnnnnnnnnnnnnnnnnnnnnnnnnnnnnnnnnnnnnnnnnnnnnnnnnnnnnnnnnnnnnnnnnnnnnnnnnnnnnnnnnnnnnnnnnnnnnnnnnnnnnnnnnnnnnnnnnnnnnnnnnnnnnnnnnnnnnggcacaagcaaaaatcaacactttctctcttggtaagcttgagttttacacgttattttttggtgatgcgtaagacattgcagtgggaaaccattcaccttgagcgtactggagtttgctgttgtagcaggttttaactcaggaacaactctcctctgatctctccgccctctgccgggaggcgacgttcgccgtcctctcggagccggtagcgttgctgtccgagtccccaggacggatctcctgcagacctgccttaatgctcagatcgaagtatttcacaagaatacttgtgtttttaacagcccttcccctagacggtgcggccatgagggcctcatgtgactgcattgccttttctttctgtggatccagtatcttcctcggctttttagggagcaggaaaaacgtgtctgagagcaagtctttaaaaacccgccctgttatatataactgtatctgtttcaccatgtgacctcccaagggggtgggaacttgatataaacatttaaaggggccacgatctgcccgagggttactcctttgctctcaccttgtatggatgaggagattaagccatttcttatcctgtagatgtgaagcactttcagttttcagcaatgttggaatgtagcatctgaagctcgtcccttcacattcggcagagtctgtgcttgtccacatgcgctgggcgcctgggaccttgaa

SEQ ID NO: 23848 - DNA, 1193 bp, Macaca Mulatta
  misc_feature (1)...(1193): n = A,T,C or G
ttcctgaagaagatagtggtgagctggcaaagccaaagattggttttccagagactacagaagaggagatagaagaaattgcttcagagaattcagattgcatctatccttcagctcctgatgttaaggcctgagcgtcaatcatatgccacagttagtatacaactgactaaaacgagcaagcagagaaaagcatcagccttccagagttactctctgcttaaggcagaaacagcagtaaataatgaggaaaatgaattatctccagtgctggaacaacttactaacttggtgttacctgtaagtgaaaactcaggagtgtcagataaagggaggtggagttatcctcttatagtacagtggcctgttatctttttaatgaatatatacaagccaacatccaatttctattattacaattagggttcttgtagccgtttatgttattatggagaagaaaaatatattggcttatttttctgatctttttccttaaagcagaatgnnnnnnnnnnnnnnnnnntcagttgtaaggaagagggagtacatgataaagtaactggtttgatttctctttcattgtacactgcttctgaacatctaattgtttttagttgtctaaataaaatgcctctaaaacaaaacaannnnnnnnnnnnnnnnnnnnnnnnctactaatttgagttttataagtggaaatagctagaaagttttctgtatcataatcatagcaaaagatatgctgattaatctgtagtaaacattactttataatattgagattcagttacttgtactgaatttttgaaattcttaaatcctttactagtgtttcatttacctcctctattcccagattggatagaagtgcttgacatgcctttttaaatgattatttaaagaatacatgctagttataggaaaaaaaaactgaaattttagcagtaagctgaaagatcacttaaaatcctaccactcgtcaaaaaactattaaaatcgaatgaccgttaatacatgttaaggcatctctgtatgtatataccgatagatagaatggattttataaaaatgggattactatagaacctgcagtgggtttaagaagtatgggaatttttaccctctttcctttaaatttaaattttggggtgggcatttcccgaaaagcccccttttttaaaaaccctttcttt

SEQ ID NO: 23849 - DNA, 1178 bp, Macaca Mulatta
  misc_feature (1)...(1178): n = A,T,C or G
tcggatcttcgagctgactgtcatcaaggacaagtacaccgggctgcacaaggnnnnnnnnnnnnnnnnnnnnnnnnnnnnnnnnnnnnnnnnnnnnnnnnnnnnnnnnnnnnnnnnnnnnnnnnnnnnnnnnnatgaacaggccgatccaggtcaagccagccgacagcgagagccgaggagnagaagaccggaagctgtttgtggggatgctagggaagcagcagacagatgaggatgtccggaannnnnnnnnnnnnnnnnnnnnnnnnnnnnnnnnnnnnnnnnnnnnnnnnnnnnnnnnnnnnnnnnnnnnnnnnnnnnnnnnnnnnnnnnnnnnnnnnnnnnnnnnnnnnnnnnnnnnnnnnnnnnnnnnnnnnnnnnnnnnnnnnnnnggtgcctcgtccagcctggtggtgaagtttgctgacactgagaaggagcggggtctccgccgcatgcagcaggtggccacccagctgggcatggtcaaaaccatcgccctccagttcggagcctacagcgcctacacccaggcnnnnnnnnnnnnnnnnnnnnnnnnnnnnnnnnnnnnnnnnnnnnnnnnnnnnnnnnnnnnnnnnnnnnnnnnnnnnnnnnnnnnnnnnnnnnnnnnnnnnnnnnnnnnnnnnnnnnnnnnnnnnnnnnnnnnnnnnnnnnnnnnnnnnnnnnnnnnnnnnnnnnnnnnnnnnnnnnnnnnnnnnnnnnnnnnnnnnnnnnnnnnnnnnnnnnnnnnnnnnnnnnnnnnnnnnnnnnnnnnnnnnnnnnnnnnnnnnnnnnnnnnnnnnnnnnnnnnnnnnnnnnnnnnnnnnnnnnnnnnnnnnnnnnnnnnnnnnnnnnnnnnnnnnnnnnnnnnnnnnnnnnnnnnnnnnnnnnnnnnnnnnnnnnnnnnnnnnnnnnnnnnnnnnnnnnnnnnnnnnnnnnnnnnnnnnnnnnnnnnnnnnnnnnnnnnnnnnnnnnnnnnnnnnnnnnnnnnnnnnnnnnnnnnnnnnnnnnnnnnnnnnnnnnnnnnnnaggccctgatggctgcaatatcttcatctaccacctgccccaggagttcactgactcagagatcctccagatgtttgtcccctttggccatgtcatctcagccaaagtctttgttgaccgggccaccaatcagagcaaatgttttg

SEQ ID NO: 23850 - DNA, 335 bp, Macaca Mulatta
  misc_feature (1)...(335): n = A,T,C or G
tttaaacctntccaatgaggaaactgaccaaagtgaaattaggatgtctgacacatgcacaggacaaccaagttcaagaacttctcagaaacttctctcattaactaaagtcagctctcccgctgagcccactgaagataatgacttgtctaggaaggcagttgcccaggcacctagtagaagatacagaggaaaaagaaaatcagcctgcaccccagcatcagatcattgtgaaccacttttgccagcttgcaacccatcagttattaacaggtccaaggaggaagtcacctcacataaatatcagaacaaaaaagcagttattcgagtgaaag

SEQ ID NO: 23851 - DNA, 814 bp, Macaca Mulatta
  misc_feature (1)...(814): n = A,T,C or G
gtatctggagatgcgcttcagccgcgcggtgcggctctgcgggacgttgcagtacattgtagccacgngatgctgtacactggcatcgtgatctacgcaccggccctcatcctgaaccaagnnnnnnnnnnnnnnnnnnnnnnnnnnnnnnnnnnnnnnnnnnnnnnnnnnnnnnnnnnnnnnnnnnngggcggcatgaaggctgtggtctggactgatgtgttccaggtcgtggtgatgctaaaagggttctgggttgtcctggcccgaggtgtcatgcttgtggaggggcccgccaggtgctcannnnnnnnnnnnnnnnnnnnnnnnnnnnnnnnnnnnnnnnnnnnnnnnnnnnnnnnnnnnnnnnnnnnnnnnnnnnnnnnnnnnnnnnnnnnnnnnnnnnnnnnnnnnnnnnnnnnnnnnnnnnnnnnnnnnnnnnnnnnnnnnnnnnnnnnnnnnnnnnnnnnnnnnnnnnnnnnnnnnnnnnnnnnnnnnnnnnnnnnnnnnnnnnnnnnnnnnnnnnnnnnnnnnnnnnnnnnnnnnnnnnnnnnnnnnnnnnnnnnnnnnnnnnnnnnnnnnnnnnnnnnnnnnnnnnnnnnnnnnnnnnnnnnnnnnnnnnnnnnnnnnnnnnnnnnnnnnnnnnnnnnnnnnnnnnnnnnnnnnnnnnnnnnnnnnnnnnnnnnnnnnnnnnnnnnnagcacagcatccaccagcatcaatgccatggctgcagtcactgtggaagacctcatcaaacctcggctacagaacctggcacccaggaaactcgtgattatctccaaggggctct

SEQ ID NO: 23852 - DNA, 777 bp, Macaca Mulatta
  misc_feature (1)...(777): n = A,T,C or G
gtctctgacactttatctcattatccgccggagggaggcggagagcccgggaccctgcagcctaattacagccgcgcttgtcagagtagggggcggtggaggtatcagtgcgaaggaaagggagggggaccctagaaagcgccctctccctccctgtaccccgaggatcccagccataggtgcgtaactggctcccgcccgcgccctccacagggcaggctctggannnnnnnnnnnnnnnnnnnnnnnnnnnnnnnnnnnnnnnnnnnnnnnnnnnnnnnnnnnnnnnnnnnnnnnnnnnnnnnnnnnnnnnnnnnnnnnnnnnnnnnnnnnnnnnnnnnnnnnnnnnnnnnnnnnnnnnnnnnnnnnnnnnnnnnnnnnnnnnnnnnnnnnnnnnnnnnnnnnnnnnnnnnnnnnnnnnnnnnnnnnnnnnnnnnnnnnnnnnnnnnnnnnnnnnnnnnnnnnnnnnnnnnnnnnnnnnnnnnnnnnnnnnnnnnnnnnnnnnnnnnnnnnnnnnnnnnnnnnnnnnnnnnnnnnnnnnnnnnnnnnnnnnnnnnnnnnnnnnnnnnnnnnnnnnnnnnnnnnnnnnnnnnnnnnnnnnnnnnnnnnnnnnnnnnnnnnnnnnnnnnnnnnnnnnnnnnnnnnnnnnnnnnnngggcgggatcccaggaggagggagaggacagagccactggagaagaccagacactggaaaaacgatatggcaggagccagtcttggggcccgcttctaccagcagatcaaaagacatccggg

SEQ ID NO: 23853 - DNA, 641 bp, Macaca Mulatta
  misc_feature (1)...(641): n = A,T,C or G
cgggtgccccgntggcccggcgggatacagcagaatccgagtgagtgtttngccaggcttaaggagaggagaaactgagaaatgaatgctgagacccccggggcaggggtctgagccacagccgtattcgcccacaaactgatttctcacggcgtgtcaccccaccagggcacaagcctcactattacttgaactttccaaaacctagagaggaaaagtgcaatgtgtgttgtacatatagaggtaactatcaatatttaagtttgttgctgtcaagagtttttttgtaacttcaaatatagagatatttttgtacgttatatattgtattaagggcattttaaaagcaattatattgtcctcctccccctattttaagacgtgaatgtctcagtgaggtgtaaagttgctcgctgcgtggaatgtgagtgtgtttgtgtttgtgtgcatgaaagagaaagactgattacctcctgtttggaagaaggaaacaccaagtctctgtataatctatttacatgaaatgggtgatatgcgaacagcaaaccaataaactgtctcaatgnnnnnnnnnnnnnnnnnnnnnnnnnnnnnnnnnnnnnnnnnnnnnnnnnnnnnnnnnnnnnnnnnnnnnnnnnnnt

SEQ ID NO: 23854 - DNA, 226 bp, Macaca Mulatta
ctggccccgcccccttggtcagccccgcccaccgaacctcgccccctcccggaccaagccgcagggattttggtaaaggcgagttgggcttctcccaggtagagggtctgggcgagtcccgcggcctcggggtggatctcagacctggagactcaggagtaaccgggtcgtctgtagggcatggaggtgggggtcgtgatctgccccccgggccggggtcactcac

SEQ ID NO: 23855 - DNA, 891 bp, Macaca Mulatta
  misc_feature (1)...(891): n = A,T,C or G
gggacatttcctaatcaagaagttggcgtgcagccgggcgagctggagtgagttggtcatgatgcagaagctactcaaatgcagtcggctcgtcctggctcttgccctcatcctggttctggaatcctcagttcaaggttatccagccaggtaccaatgggtgcgctgcaatccagacagtaattctgcaaactgcattgaagaaaaaggaccaatgttcgacctacttccaagtgaatccaacaagatcccccggctgaggactgacctttttccaaagacaagaatccaggacttgaatcgtatcttcccactttctgaggactattctggatcaagttccggctccggctctggatcaggatctgggagtggcttcgtaactgaaatggaacaagaattaccaaccagtagatgaaaagtgatgcttttccatgacaaccttaagtctctttgaaaggaaatctgccctcaaaccagccaggacttgggtcaacatggatttaaaagaggattttatgaaataaaagagaatttttcccccccctttgacaccaggcaatgaattttagcatatttttggccgtaaccaagggctaaatgattcaaccctttgggacaaagggatttttaatcgaacttttttaaaacttctctaaaaaaaaaagcttcaaggttttaatccannnnnnnnnnnnnnnnnnaggaatttctttaaagggaataagggcatataaggggatggttcatttccaacccttaatttgcgtcccnnnnnnnnnnnnnnnnnncatttttgtattgggggagatccaatttcccggctccaacgttcatttgtggtgaaaatatataatttatggatttctcacctggggacccttaaaaaag

SEQ ID NO: 23856 - DNA, 1432 bp, Macaca Mulatta
  misc_feature (1)...(1432): n = A,T,C or G
ggggcgagggctacccgctctttgccgtgacaacaccgttcccccagccgggctggnnnnnnnnnnnnnnnnnnnnnnnnnnnnnnnnnnnnnnnnnnnnnnnnnnnnnnnnnnnnnnnnnnnnnnnnnnnnnnnnnnnnnnnnnnnnnnnnnnnnnnnnnnnnnnnnnnnnnnnnnnnnnnnnnnnnnnnnnnnnnnnnnnnnnnnnnnnnnnnnnnnnnnnnnnnnnnnnnnnnnnnnnnnnnaggtgactttcaccaagcggaagtttggcctgatgaagaaggcgtatgaactgagcgtgctatgtgactgcgagatcgcactcatcatcttcaaccactccaacaagctgttccagtacgctagcaccgacatggacaaggtgctgctcaagtacacggagtacaatgagccacacgagagccgcaccaatgccgacatcatcgagncccannnnnnnnnnnnnnnnnnnnnnnnnnnnnnnnnnnnnnnnnnnnnnnnnnnnnnnnnnnnnnnnnnnnnnnnnnnnnnnnnnnnnnnnnnnnnnnnnnnnnnnnnnnnnnnnnnnnnnnnnnnnnnnnnnnnnnnnnnnnnnnnnnnnnnnnnnnnnnnnnnnnnnnnnnnnnnnnnnnnnnnnnnnnnnnnnnnnnnnnnnnnnnnnnnnnnnnnnnnnnnnnnnnnnnnnnnnnnnnnnnnnnnnnnnnnnnnnnnnnnnnnnnnnnnnnnnnnnnnnnnnnnnnnnnnnnnnnnnnnnnnnnnnnnnnnnnnnnnnnnnnnnnnnnnnnnnnnnnnnnnnnnnnnnnnnnnnnnnnnnnnnnnnnnnnnnnnnnnnnnnnnnnnnnnnnnnnnnnnnnnnnnnnnnnnnnnnnnnnnnnnnnnnnnnnnnnnnnnnnnnnnnnnnnnnnnnnnnnnnnnnnnnnnnnnnnnnnnnnnnnnnnnnnnnnnnnnnnnnnnnnnnnnnnnnnnnnnnnnnnnnnnnnnnnnnnnnnnnnnnnnnnnnnnnnnnnnnnnnnnnnnnnnnnnnnnnnnnnnnnnnnnnnnnnnnnnnnnnnnnnnnnnnnnnnnnnnnnnnnnnnnnnnnnnnnnnnnnnnnnnnnnnnnnnnnnnnnnnnnnnnnnnnnnnnnnnnnnnnnnnnnnnnnnnnnnnnnnnnnnnnnnnnnnnnnnnnnnnnnnnnnnnnnnnnnnnnnnnnnnagattaccagttgaccagtgcagagctctcctccttaccaccctacagatcgcctggggggctgtcgctaggcaacgtcaccgcctggcnnnnnnnnnnnnnnnnnnnnnnnnnnnnnnnnnnnnnnnnnnnnnnnnnnnnnnnnnnnnnnnnnnnnnnnnnnnnnnnnnnnnnnnnnnnnnnnnnnnnnnnnnnnnnnnnnnnnnnnnnnacctggtccctgtatctctcagca

SEQ ID NO: 23857 - DNA, 579 bp, Macaca Mulatta
  misc_feature (1)...(579): n = A,T,C or G
gggtggatgatttgatgattagacagtcatctctaacntattaaatatctgcattcttgttaacataaatctctccttggctattttaatagccacagtcccaaacttcatcccagcttagatttctcagcactgaggtaaactctgcattttcatcccagcgtacacctttaatgttttattgatttcattggcactgtatttggacctgtccttgtatatgtagagacatatgtggcttcattggtaatttacaagcaaaagatgacatgacgtcacacctgtatgaaaatgtgatgattgaactccctgtgtatagtgagcgaattaaaatgtctgcctctccagacatttcttaatgattccacttaatagattctatgtatgctgaatgttcctgtgtacatacgtgtgttaaataaaacaattgtnnnnnnnnnnnnnnnnnnnnnnnnnnnnnnnnnnnnnnnnnnnnnnnnnnnnnnnnnnnnnnnnnnnnnnnnnnnnnnnnnnnnnnnnnnnncnnnnnnnnnnnnnnnnnnnnnnngcgttaccaacttaatcgcttgcagcacatcc

SEQ ID NO: 23858 - DNA, 2719 bp, Macaca Mulatta
  misc_feature (1)...(2719): n = A,T,C or G
cagggaaaaggaaagagccaagagagaaaaagcccgagagagtgagagcaccatcgctgcccgagaagtgcggggtctcatggacactannnnnnnnnnnnnnnnnnnnnnnnnnnnnnnnnnnnnnnnnnnnnnnnnnnnnnnnnnnnnnnnnnnnnnnnnnnnnnnnnnnnnnnnnnnnnnnnnnnnnnnnnnnnnnnnnnnnnnnnnnnnnnnnnnnnnnnnnnnnnnnnnnnnnnnnnnnnnnnnnnnnnnnnnnnnnnnnnnnnnnnnnnnnnnnnnnnnnnnnnnnnnnnnnnnnnnnnnnnnnnnnnnnnnnnnnnnnnnnnnnnnnnnnnnnnnnnnnnnnnnnnnnnnnnnnnnnnnnnnnnnnnnnnnnnnnnnnnnnnnnnnnnnnnnnnnnnnnnnnnnnnnnnnnnnnnnnnnnnnnnnnnnnnnnnnnnnnnnnnnnnnnnnnnnnnnnnnnnnnnnnnnnnnnnnnnnnnnnnnnnnnnnnnnnnnnnnnnnnnnnnnnnnnnnnnnnnnnnnnnnnnnnnnnnnnnnnnnnnnnnnnnnnnnnnnnnnnnnnnnnnnnnnnnnnnnnnnnnnnnnnnnnnnnnnnnnnnnnnnnnnnnnnnnnnnnnnnnnnnnnnnnnnnnnnnnnnnnnnnnnnnnnnnnnnnnnnnnnnnnnnnnnnnnnnnnnnnnnnnnnnnnnnnnnnnnnnnnnnnnnnnnnnnnnnnnnnnnnnnnnnnnnnnnnnnnnnnnnnnnnnnnnnnnnnnnnnnnnnnnnnnnnnnnnnnnnnnnnnnnnnnnnnnnnnnnnnnnnnnnnnnnnnnnnnnnnnnnnnnnnnnnnnnnnnnnnnnnnnnnnnnnnnnnnnnnnnnnnnnnnnnnnnnnnnnnnnnnnnnnnnnnnnnnnnnnnnnnnnnnnnnnnnnnnnnnnnnnnnnnnnnnnnnnnnnnnnnnnnnnnnnnnnnnnnnnnnnnnnnnnnnnnnnnnnnnnnnnnnnnnnnnnnnnnnnnnnnnnnnnnnnnnnnnnnnnnnnnnnnnnnnnnnnnnnnnnnnnnnnnnnnnnnnnnnnnnnnnnnnnnnnnnnnnnnnnnnnnnnnnnnnnnnnnnnnnnnnnnnnnnnnnnnnnnnnnnnnnnnnnnnnnnnnnnnnnnnnnnnnnnnnnnnnnnnnnnnnnnnnnnnnnnnnnnnnnnnnnnnnnnnnnnnnnnnnnnnnnnnnnnnnnnnnnnnnnnnnnnnnnnnnnnnnnnnnnnnnnnnnnnnnnnnnnnnnnnnnnnnnnnnnnnnnnnnnnnnnnnnnnnnnnnnnnnnnnnnnnnnnnnnnnnnnnnnnnnnnnnnnnnnnnnnnnnnnnnnnnnnnnnnnnnnnnnnnnnnnnnnnnnnnnnnnnnnnnnnnnnnnnnnnnnnnnnnnnnnnnnnnnnnnnnnnnnnnnnnnnnnnnnnnnnnnnnnnnnnnnnnnnnnnnnnnnnnnnnnnnnnnnnnnnnnnnnnnnnnnnnnnnnnnnnnnnnnnnnnnnnnnnnnnnnnnnnnnnnnnnnnnnnnnnnnnnnnnnnnnnnnnnnnnnnnnnnnnnnnnnnnnnnnnnnnnnnnnnnnnnnnnnnnnnnnnnnnnnnnnnnnnnnnnnnnnnnnnnnnnnnnnnnnnnnnnnnnnnnnnnnnnnnnnnnnnnnnnnnnnnnnnnnnnnnnnnnnnnnnnnnnnnnnnnnnnnnnnnnnnnnnnnnnnnnnnnnnnnnnnnnnnnnnnnnnnnnnnnnnnnnnnnnnnnnnnnnnnnnnnnnnnnnnnnnnnnnnnnnnnnnnnnnnnnnnnnnnnnnnnnnnnnnnnnnnnnnnnnnnnnnnnnnnnnnnnnnnnnnnnnnnnnnnnnnnnnnnnnnnnnnnnnnnnnnnnnnnnnnnnnnnnnnnnnnnnnnnnnnnnnnnnnnnnnnnnnnnnnnnnnnnnnnnnnnnnnnnnnnnnnnnnnnnnnnnnnnnnnnnnnnnnnnnnnnnnnnnnnnnnnnnnnnnnnnnnnnnnnnnnnnnnnnnnnnnnnnnnnnnnnnnnnnnnnnnnnnnnnnnnnnnnnnnnnnnnnnnnnnnnnnnnnnnnnnnnnnnnnnnnnnnnnnnnnnnnnnnnnnnnnnnnnnnnnnnnnnnnnnnnnnnnnnnnnnnnnnnnnnnnnnnnnnnnnnnnnnnnnnnnnnnnnnnnnnnnnnnnnnnnnnnnnnnnnnnnnnnnnnnnnnnnnnnnnnnnnnnnnnnnnnnnnnnnnnnnnnnnnnnnnnnnnnnnnnnnnnnnnnnnnnnnnnnnnnnnnnnnnnnnnnnnnnnnnnnnnnnnnnnnnnnnnnnnnnnnnnnnnnnnnnnnnnnnnnnnnnnnnnnnnnnnnnnnnnnnnnnnnnnnnnnnnnnnnnnnnnnnnnnnnnnnnnnnnnnnnnnnnnnnnnnnnnnnnnnnnnnnnnnnnnnnnnnnnnnnnnnnnnnnnnnnnnnnnnnnnnnnnnnnnnnnnnnnnnnnnnnnnnnnnnnnnnnnnnnnnnnnnnnnnnnnnnnnnnnnnnnnnnnnnnnnnnnnnnnnnnnnnnnnnnnnnnnnnnnnnnnnnnnnnnnnnnnnnnnnnnnnnnnnnnnnnnnnnnnnnnnncagcgaccacagaagaactcctcggcttcgtccaaacttggaaagaaaaactgagccagaggattcagtaccttaactgcagcctggacaaggtgtccatgactgaactggtctttac

SEQ ID NO: 23859 - DNA, 106 bp, Macaca Mulatta
aggttcaccttgttggaattgatattttcacgggcaaaaaatatgaagatatttgtccttctactcacaacatggatgttccaaatattaagagaaatgattatca

SEQ ID NO: 23860 - DNA, 894 bp, Macaca Mulatta
  misc_feature (1)...(894): n = A,T,C or G
ggttcatgcatgggagatctcagaccagttgttacagatccgacaggatgtggaatcatgctattttgctgcacagaccatgaaaatgaagattcagacctcattttatgagctccccacagactctcatgcctctttacgggactcattgctaacccatatccagaactgaaagacttgtcacctnnnnnnnnnnnnnnnnnnnnnnnnnnnnnnnnnnnnnnnnnnnnnnnnnnnnnnnnnnnnnnnnnnnnnnnnnnnnnnnnnnnnnnnnnnnnnnnnnnnnnnnnnnnnnnnnnnnnnnnnnnnnnnnnnnnnnnnnnnnnnnnnnnnnnnnnnnnnnnnnnnnnnnnnnnnnnnnnnnnnnnnnnnnnnnnnnnnnnnnnnnnnnnnnnnnnnnnnnnnnnnnnnnnnnnnnnnnnnnnnnnnnnnnnnnnnnnnnnnnnnnnnnnnnnnnnnnnnnnnnnnnnnnnnnnnnnnnnnnnnnnnnnnnnnnnnnnnnnnnnnnnnnnnnnnnnnnnnnnnnnnnnnnnnnnnnnnnnnnnnnnnnnnnnnnnnnnnnnnnnnnnnnnnnnnnnnnnnnnnnnnnnnnnnnnnnnnnnnnnnnnnnnnnnnnnnnnnnnnnnnnnnnnnnnnnnnnnnnnnnnnnnnnnnnnnnnnnnnnnnnnnnnnnnnnnnnnnnnnnnnnnnnnnnnnnnnnnnnnnnnnnnnnnnnnnnnnnnnnnnnnnnnnnnnnnnnnnnnnnnnnnnngttctgaattactgccgtattttcactgaactatgtgaaacttttcttgaaaaaattgtttgtactccaggccaaggtcttggggacctccgaactctggagctgcttcttatctgtgcaggacatcctcaatatgaggtagt

SEQ ID NO: 23861 - DNA, 459 bp, Macaca Mulatta
  misc_feature (1)...(459): n = A,T,C or G
gggtttattggatctgaagagtaggttcgatcgcttcctcctggaatcattcaacaatgaccggctctttaaacaaactattgcgggtgactttgagtattttctcaacctcaactccaggtctcctgaatacctctcattatttattgatgataagctgaaaaagggagtcaaagggnnnnnnnnnnnnnnnnnnnnnnnnnnnnnnnnnnnnnnnnnnnnnnnnnnnnnnnnnnnnnnnnnnnnnnnnnnnnnnnnnnnnnnnnnnnnnnnnnnnnnnnnnnnnnnnnnnnnnnnnnnnnnnnnnnnnnnnnnnnnnnnnnnnnnnnnnnnnnnnnnnnnnnnnnagactgaatgtggatgtcagttcacgtcaaaactggaaggaatgtttagggatatgagcatctcaaacacaacgatggatgaattcaggcaacatctacaggcaactggtgt

SEQ ID NO: 23862 - DNA, 4578 bp, Macaca Mulatta
  misc_feature (1)...(4578): n = A,T,C or G
gcgcgctgggcggggctggatgggctgtgttgggagggctgcagcgccgcgcgaaaggcgagnnnnnnnnnnnnnnnnnnnnnnnnnnnnnnnnnnnnnnnnnnnnnnnnnnnnnnnnnnnnnnnnnnnnnnnngtctccgggagctgatgtgtactgtgtgcgccggggacgcgccggcgtgtattgtgcagcgcgggaatgaagtttgctgatttgttgtctagcctggatgcttgggttgcaggccctgcttgtggtggcgctccacagtcatccggctgaaggagaagacctgttggactttatcttctcagggnnnnnnnnnnnnnnnnnnnnnnnnnnnnnnnnnnnnnnnnnnnnnnnnnnnnnnnnnnnnnnnnnnnnnnnnnnnnnnnnnnnnnnnnnnnnnnnnnnnnnnnnnnnnnnnnnnnnnnnnnnnnnnnnnnnnnnnnnnnnnnnnnnnnnnnnnnnnnnnnnnnnnnnnnnnnnnnnnnnnnnnnnnnnnnnnnnnnnnnnnnnnnnnnnnnnnnnnnnnnnnnnnnnnnnnnnnnnnnnnnnnnnnnnnnnnnnnnnnnnnnnnnnnnnnnnnnnnnnnnnnnnnnnnnnnnnnnnnnnnnnnnnnnnnnnnnnnnnnnnnnnnnnnnnnnnnnnnnnnnnnnnnnnnnnnnnnnnnnnnnnnnnnnnnnnnnnnnnnnnnnnnnnnnnnnnnnnnnnnnnnnnnnnnnnnnnnnnnnnnnnnnnnnnnnnnnnnnnnnnnnnnnnnnnnnnnnnnnnnnnnnnnnnnnnnnnnnnnnnnnnnnnnnnnnnnnnnnnnnnnnnnnnnnnnnnnnnnnnnnnnnnnnnnnnnnnnnnnnnnnnnnnnnnnnnnnnnnnnnnnnnnnnnnnnnnnnnnnnnnnnnnnnnnnnnnnnnnnnnnnnnnnnnnnnnnnnnnnnnnnnnnnnnnnnnnnnnnnnnnnnnnnnnnnnnnnnnnnnnnnnnnnnnnnnnnnnnnnnnnnnnnnnnnnnnnnnnnnnnnnnnnnnnnnnnnnnnnnnnnnnnnnnnnnnnnnnnnnnnnnnnnnnnnnnnnnnnnnnnnnnnnnnnnnnnnnnnnnnnnnnnnnnnnnnnnnnnnnnnnnnnnnnnnnnnnnnnnnnnnnnnnnnnnnnnnnnnnnnnnnnnnnnnnnnnnnnnnnnnnnnnnnnnnnnnnnnnnnnnnnnnnnnnnnnnnnnnnnnnnnnnnnnnnnnnnnnnnnnnnnnnnnnnnnnnnnnnnnnnnnnnnnnnnnnnnnnnnnnnnnnnnnnnnnnnnnnnnnnnnnnnnnnnnnnnnnnnnnnnnnnnnnnnnnnnnnnnnnnnnnnnnnnnnnnnnnnnnnnnnnnnnnnnnnnnnnnnnnnnnnnnnnnnnnnnnnnnnnnnnnnnnnnnnnnnnnnnnnnnnnnnnnnnnnnnnnnnnnnnnnnnnnnnnnnnnnnnnnnnnnnnnnnnnnnnnnnnnnnnnnnnnnnnnnnnnnnnnnnnnnnnnnnnnnnnnnnnnnnnnnnnnnnnnnnnnnnnnnnnnnnnnnnnnnnnnnnnnnnnnnnnnnnnnnnnnnnnnnnnnnnnnnnnnnnnnnnnnnnnnnnnnnnnnnnnnnnnnnnnnnnnnnnnnnnnnnnnnnnnnnnnnnnnnnnnnnnnnnnnnnnnnnnnnnnnnnnnnnnnnnnnnnnnnnnnnnnnnnnnnnnnnnnnnnnnnnnnnnnnnnnnnnnnnnnnnnnnnnnnnnnnnnnnnnnnnnnnnnnnnnnnnnnnnnnnnnnnnnnnnnnnnnnnnnnnnnnnnnnnnnnnnnnnnnnnnnnnnnnnnnnnnnnnnnnnnnnnnnnnnnnnnnnnnnnnnnnnnnnnnnnnnnnnnnnnnnnnnnnnnnnnnnnnnnnnnnnnnnnnnnnnnnnnnnnnnnnnnnnnnnnnnnnnnnnnnnnnnnnnnnnnnnnnnnnnnnnnnnnnnnnnnnnnnnnactctttgttgccagcacccaatgaagagcaagttacttgcctcaagatgtactttggccattccagttttaaaccnnnnnnnnnnnnnnnnnnnnnnnnnnnnnnnnnnnnnnnnnnnnnnnnnnnnnnnnnnnnnnnnnnnnnnnnnnnnnnnnnnnnnnnnnnnnnnnnnnnnnnnnnnnnnnnnnnnnnnnnnnnnnnnnnnnnnnnnnnnnnnnnnnnnnnnnnnnnnnnnnnnnnnnnnnnnnnnnnnnnnnnnnnnnnnnnnnnnnnnnnnnnnnnnnnnnnnnnnnnnnnnnnnnnnnnnnnnnnnnnnnnnnnnnnnnnnnnnnnnnnnnnnnnnnnnnnnnnnnnnnnnnnnnnnnnnnnnnnnnnnnnnnnnnnnnnnnnnnnnnnnnnnnnnnnnnnnnnnnnnnnnnnnnnnnnnnnnnnnnnnnnnnnnnnnnnnnnnnnnnnnnnnnnnnnnnnnnnnnnnnnnnnnnnnnnnnnnnnnnnnnnnnnnnnnnnnnnnnnnnnnnnnnnnnnnnnnnnnnnnnnnnnnnnnnnnnnnnnnnnnnnnnnnnnnnnnnnnnnnnnnnnnnnnnnnnnnnnnnnnnnnnnnnnnnnnnnnnnnnnnnnnnnnnnnnnnnnnnnnnnnnnnnnnnnnnnnnnnnnnnnnnnnnnnnnnnnnnnnnnnnnnnnnnnnnnnnnnnnnnnnnnnnnnnnnnnnnnnnnnnnnnnnnnnnnnnnnnnnnnnnnnnnnnnnnnnnnnnnnnnnnnnnnnnnnnnnnnnnnnnnnnnnnnnnnnnnnnnnnnnnnnnnnnnnnnnnnnnnnnnnnnnnnnnnnnnnnnnnnnnnnnnnnnnnnnnnnnnnnnnnnnnnnnnnnnnnnnnnnnnnnnnnnnnnnnnnnnnnnnnnnnnnnnnnnnnnnnnnnnnnnnnnnnnnnnnnnnnnnnnnnnnnnnnnnnnnnnnnnnnnnnnnnnnnnnnnnnnnnnnnnnnnnnnnnnnnnnnnnnnnnnnnnnnnnnnnnnnnnnnnnnnnnnnnnnnnnnnnnnnnnnnnnnnnnnnnnnnnnnnnnnnnnnnnnnnnnnnnnnnnnnnnnnnnnnnnnnnnnnnnnnnnnnnnnnnnnnnnnnnnnnnnnnnnnnnnnnnnnnnnnnnnnnnnnnnnnnnnnnnnnnnnnnnnnnnnnnnnnnnnnnnnnnnnnnnnnnnnnnnnnnnnnnnnnnnnnnnnnnnnnnnnnnnnnnnnnnnnnnnnnnnnnnnnnnnnnnnnnnnnnnnnnnnnnnnnnnnnnnnnnnnnnnnnnnnnnnnnnnnnnnnnnnnnnnnnnnnnnnnnnnnnnnnnnnnnnnnnnnnnnnnnnnnnnnnnnnnnnnnnnnnnnnnnnnnnnnnnnnnnnnnnnnnnnnnnnnnnnnnnnnnnnnnnnnnnnnnnnnnnnnnnnnnnnnnnnnnnnnnnnnnnnnnnnnnnnnnnnnnnnnnnnnnnnnnnnnnnnnnnnnnnnnnnnnnnnnnnnnnnnnnnnnnnnnnnnnnnnnnnnnnnnnnnnnnnnnnnnnnnnnnnnnnnnnnnnnnnnnnnnnnnnnnnnnnnnnnnnnnnnnnnnnnnnnnnnnnnnnnnnnnnnnnnnnnnnnnnnnnnnnnnnnnnnnnnnnnnnnnnnnnnnnnnnnnnnnnnnnnnnnnnnnnnnnnnnnnnnnnnnnnnnnnnnnnnnnnnnnnnnnnnnnnnnnnnnnnnnnnnnnnnnnnnnnnnnnnnnnnnnnnnnnnnnnnnnnnnnnnnnnnnnnnnnnnnnnnnnnnnnnnnnnnnnnnnnnnnnnnnnnnnnnnnnnnnnnnnnnnnnnnnnnnnnnnnnnnnnnnnnnnnnnnnnnnnnnnnnnnnnnnnnnnnnnnnnnnnnnnnnnnnnnnnnnnnnnnnnnnnnnnnnnnnnnnnnnnnnnnnnnnnnnnnnnnnnnnnnnnnnnnnnnnnnnnnnnnnnnnnnnnnnnnnnnnnnnnnnnnnnnnnnnnnnnnnnnnnnnnnnnnnnnnnnnnnnnnnnnnnnnnnnnnnnnnnnnnnnnnnnnnnnnnnnnnnnnnnnnnnnnnnnnnnnnnnnnnnnnnnnnnnnnnnnnnnnnnnnnnnnnnnnnnnnnnnnnnnnnnnnnnnnnnnnnnnnnnnnnnnnnnnnnnnnnnnnnnnnnnnnnnnnnnnnnnnnnnnnnnnnnnnnnnnnnnnnnnnnnnnnnnnnnnnnnnnnnnnnnnnnnnnnnnnnnnnnnnnnnnnnnnnnnnnnnnnnnnnnnnnnnnnnnnnnnnnnnnnnnnnnnnnnnnnnnnnnnnnnnnnnnnnnnnnnnnnnnnnnnnnnnnnnnnnnnnnnnnnnnnnnnnnnnnnnnnnnnnnnnnnnnnnnnnnnnnnnnnnnnnnnnnnnnnnnnnnnnnnnnnnnnnnncagatatgagtaaaattaacctaatcagaatgttagttcctgaaaacattgacacataccttatccacatggcaattgcgatccttaaacatggtactgacagcagacttcagccttcatgtgatgtcaacaaaaggagatattttcccagttctgaagagatctcttcaagttctaagagaagcaaggaagaagtaggcatcaata

SEQ ID NO: 23863 - DNA, 235 bp, Macaca Mulatta
aggagaacagtcaccaggtaaaggaagagctgagccagaaatttgacacgctgtatgccatcgtggatgagaagaaaagagaaaaggtgcagcggatcacgcaggagcaggaggaaaagctcagcttcatcgaggccctcatccagcagtaccaggaacagctggacaagtccacaaagctggtggagacggccatccagtccctggacgagcctgggggagccaccttcctctt

SEQ ID NO: 23864 - DNA, 4249 bp, Macaca Mulatta
  misc_feature (1)...(4249): n = A,T,C or G
gtccaggaatcagtgcacataatggaaggtgtctactctgaattgcacagcgtggtggctgaagtgggtgtacctgtctccgtctcccactttgacttgcacgaggagatgctgtgggtggggagccacgggnnnnnnnnnnnnnnnnnnnnnnnnnnnnnnnnnnnnnnnnnnnnnnnnnnnnnnnnnnnnnnnnnnnnnnnnnnnnnnnnnnnnnnnnnnnnnnnnnnnnnnnnnnnnnnnnnnnnnnnnnnnnnnnnnnnnnnnnnnnnnnnnnnnnnnnnnnnnnnnnnnnnnnnnnnnnnnnnnnnnnnnnnnnnnnnnnnnnnnnnnnnnnnnnnnnnnnnnnnnnnnnnnnnnnnnnnnnnnnnnnnnnnnnnnnnnnnnnnnnnnnnnnnnnnnnnnnnnnnnnnnnnnnnnnnnnnnnnnnnnnnnnnnnnnnnnnnnnnnnnnnnnnnnnnnnnnnnnnnnnnnnnnnnnnnnnnnnnnnnnnnnnnnnnnnnnnnnnnnnnnnnnnnnnnnnnnnnnnnnnnnnnnnnnnnnnnnnnnnnnnnnnnnnnnnnnnnnnnnnnnnnnnnnnnnnnnnnnnnnnnnnnnnnnnnnnnnnnnnnnnnnnnnnnnnnnnnnnnnnnnnnnnnnnnnnnnnnnnnnnnnnnnnnnnnnnnnnnnnnnnnnnnnnnnnnnnnnnnnnnnnnnnnnnnnnnnnnnnnnnnnnnnnnnnnnnnnnnnnnnnnnnnnnnnnnnnnnnnnnnnnnnnnnnnnnnnnnnnnnnnnnnnnnnnnnnnnnnnnnnnnnnnnnnnnnnnnnnnnnnnnnnnnnnnnnnnnnnnnnnnnnnnnnnnnnnnnnnnnnnnnnnnnnnnnnnnnnnnnnnnnnnnnnnnnnnnnnnnnnnnnnnnnnnnnnnnnnnnnnnnnnnnnnnnnnnnnnnnnnnnnnnnnnnnnnnnnnnnnnnnnnnnnnnnnnnnnnnnnnnnnnnnnnnnnnnnnnnnnnnnnnnnnnnnnnnnnnnnnnnnnnnnnnnnnnnnnnnnnnnnnnnnnnnnnnnnnnnnnnnnnnnnnnnnnnnnnnnnnnnnnnnnnnnnnnnnnnnnnnnnnnnnnnnnnnnnnnnnnnnnnnnnnnnnnnnnnnnnnnnnnnnnnnnnnnnnnnnnnnnnnnnnnnnnnnnnnnnnnnnnnnnnnnnnnnnnnnnnnnnnnnnnnnnnnnnnngataccttacagactcaaggagtcagacagtgaatttgacagcttcagccaggtcactgagtcaccagtaggacgagaagaggagccacatctccacgtttctaagaaataccgcaaggtgnnnnnnnnnnnnnnnnnnnnnnnnnnnnnnnnnnnnnnnnnnnnnnnnnnnnnnnnnnnnnnnnnnnnnnnnnnnnnnnnnnnnnnnnnnnnnnnnnnnnnnnnnnnnnnnnnnnnnnnnnnnnnnnnnnnnnnnnnnnnnnnnnnnnnnnnnnnnnnnnnnnnnnnnnnnnnnnnnnnnnnnnnnnnnnnnnnnnnnnnnnnnnnnnnnnnnnnnnnnnnnnnnnnnnnnnnnnnnnnnnnnnnnnnnnnnnnnnnnnnnnnnnnnnnnnnnnnnnnnnnnnnnnnnnnnnnnnnnnnnnnnnnnnnnnnnnnnnnnnnnnnnnnnnnnnnnnnnnnnnnnnnnnnnnnnnnnnnnnnnnnnnnnnnnnnnnnnnnnnnnnnnnnnnnnnnnnnnnnnnnnnnnnnnnnnnnnnnnnnnnnnnnnnnnnnnnnnnnnnnnnnnnnnnnnnnnnnnnnnnnnnnnnnnnnnnnnnnnnnnnnnnnnnnnnnnnnnnnnnnnnnnnnnnnnnnnnnnnnnnnnnnnnnnnnnnnnnnnnnnnnnnnnnnnnnnnnnnnnnnnnnnnnnnnnnnnnnnnnnnnnnnnnnnnnnnnnnnnnnnnnnnnnnnnnnnnnnnnnnnnnnnnnnnnnnnnnnnnnnnnnnnnnnnnnnnnnnnnnnnnnnnnnnnnnnnnnnnnnnnnnnnnnnnnnnnnnnnnnnnnnnnnnnnnnnnnnnnnnnnnnnnnnnnnnnnnnnnnnnnnnnnnnnnnnnnnnnnnnnnnnnnnnnnnnnnnnnnnnnnnnnnnnnnnnnnnnnnnnnnnnnnnnnnnnnnnnnnnnnnnnnnnnnnnnnnnnnnnnnnnnnnnnnnnnnnnnnnnnnnnnnnnctgataggaaggaactagggagtccagagggtgtgctggtatgtccctccattgaggagttgaagaatgtctggcttcctttctccattcgcatgaagatgaccaggaacaaagggctggatgtttgcaattggactgatggggatgagatgcannnnnnnnnnnnnnnnnnnnnnnnnnnnnnnnnnnnnnnnnnnnnnnnnnnnnnnnnnnnnnnnnnnnnnnnnnnnnnnnnnnnnnnnnnnnnnnnnnnnnnnnnnnnnnnnnnnnnnnnnnnnnnnnnnnnnnnnnnnnnnnnnnnnnnnnnnnnnnnnnnnnnnnnnnnnnnnnnnnnnnnnnnnnnnnnnnnnnnnnnnnnnnnnnnnnnnnnnnnnnnnnnnnnnnnnnnnnnnnnnnnnnnnnnnnnnnnnnnnnnnnnnnnnnnnnnnnnnnnnnnnnnnnnnnnnnnncaagaaccctattgaggcaagtgtcttgctggctgaagcctcgctggcacggaagcagcggaaaacacatactacctttattccactgatgctgaatgagatgccacagattggggacctggtgggtctggatgctgagtttgtcacccttaatgaggnaggaggaagcagagttacgcagtgatggtaccaagtctaccattaaaccaagtcagatgtcagtagccaggattacctgtgtccggggccagggacctaatgagggtatccccttcattgatgactacatctctacccaggagcaggtnnnnnnnnnnnnnnnnnnnnnnnnnnnnnnnnnnnnnnnnnnnnnnnnnnnnnnnnnnnnnnnnnnnnnnnnnnnnnnnnnnnnnnnnnnnnnnnnnnnnnnnnnnnnnnnnnnnnnnnnnnnnnnnnnnnnnnnnnnnnnnnnnnnnnnnnnnnnnnnnnnnnnnnnnnnnnnnnnnnnnnnnnnnnnnnnnnnnnnnnnnnnnnnnnnnnnnnnnnnnnnnnnnnnnnnnnnnnnnnnnnnnnnnnnnnnnnnnnnnnnnnnnnnnnnnnnnnnnnnnnnnnnnnnnnnnnnnnnnnnnnnnnnnnnnnnnnnnnnnnnnnnnnnnnnnnnnnnnnnnnnnnnnnnnnnnnnnnnnnnnnnnnnnnnnnnnnnnnnnnnnnnnnnnnnnnnnnnngacctgaagattcaaggggaaacccatgacagtattgaggatgcacgcacagcccttcagctctaccgaaagtatctggagctaagcaaaaatggcacaaaggctgagtctttccacaaggtgctcaagggnnnnnnnnnnnnnnnnnnnnnnnnnnnnnnnnnnnnnnnnnnnnnnnnnnnnnnnnnnnnnnnnnnnnnnnnnnnnnnnnnnnnnnnnnnnnnnnnnnnnnnnnnnnnnnnnnnnnnnnnnnnnnnnnnnnnnnnnnnnnnnnnnnnnnnnnnnnnnnnnnnnnnnnnnnnnnnnnnnnnnnnnnnnnnnnnnnnnnnnnnnnnnnnnnnnnnnnnnnnnnnnnnnnnnnnnnnnnnnnnnnnnnnnnnnnnnnnnnnnnnnnnnnnnnnnnnnnnnnnnnnnnnnnnnnnnnnnnnnnnnnnnnnnnnnnnnnnnnnnnnnnnnnnnnnnnnnnnnnnnnnnnnnnnnnnnnnnnnnnnnnnnnnnnnnnntcttaatatcctggttcactattatccaggcagagaagctcctggaaccataattgtccctttatagctggctagggattgaagtcctggacagcgacagaggataccacagtagttcaagacttagcacaagtcaccaactgcttcagggatgcctggaggggccagcaagtagagtgttggtggcccaaacaaaccagtgttgccaataccattgccaaaagggcctttggatcctggacaaagcttggctgctggcttcatttattcctgctgatggctgagaagcatctgtcttccatcccactctcctgtcccaagttttgttccgttttttaaaaatttgttgtaaactgcatgttttataaaataaaaacaaaataccgtttgtcatttatctc

SEQ ID NO: 23865 - DNA, 369 bp, Macaca Mulatta
ccccttgactaagaaaacttctacctctgccatgcgatgtttctgaaaagcctccctatgtccccatttgctttggttttgtcctgccttctccagtatcacatgctcagttttgcctttacttacccatggagtcaggataacgctgacgccccctggcatcctgtcttattcagccctaccgtcttgccagctctgtctttccagctgtctgtcgctaaaacggcctatagcttcccttccggaaagcttgctttgaaaaacttaaaaagccccggtttacatgcaggcaggactgtgataacagtgcaaggtctgtgttgacaagaattgtggacagaaagccaaaataaatattcttcctgatta

SEQ ID NO: 23866 - DNA, 506 bp, Macaca Mulatta
  misc_feature (1)...(506): n = A,T,C or G
gaaagatatgatggtgtcctttttctacactatccttacacctgtgttgaatcctagcatttacagtntcaggaataaggatgtcacaggggctttgagaaaaatgctaagaatgcagaaagctccatattaaagtgtgaaagaacttaagttggtcctctcttcttagggtctctctcttcactttaggtgtccttcctataaacaatcagcacatcgtggtggtgtctggctccctgagttgccattcagggggtttcagtccactgttcttctctcctataatcacacttgagatgatgttcacttaccccctcttccctcatagcattgatctctagtccagtccttccgggccaatagtccttttttagatggcagttgataaatatgaaaagaaatgtgtttatgacccttgagcaccttgtaccagagagaaaatttgttttgaaatcatgggctcattgagtatgaaataacaccatattcagattgttcctcagcat

SEQ ID NO: 23867 - DNA, 3953 bp, Macaca Mulatta
  misc_feature (1)...(3953): n = A,T,C or G
ctccgcccgggagcggcggcctctccggtgacagaggagtagtgagcggcacggggtgaggctgcctctaactccgctccccgcgcactcggctgcccaggcgctcgggacccagcagcggcgctcctccgcggtgccggtcgcccgcgatgcccgcttagcagcgtgtagcagcgtccagcatcaccacacccgcggcaccgcgctcccggccgcagagccgggccagagccttgcannnnnnnnnnnnnnnnnnnnnnnnnnnnnnnnngaaatgacttgttaatcggcgcagacaccaccaaggggactcaccggagtggaatccaagtggaatttgcatttggagaagagtttcttgaacatttaccctcttccttgnnnnnnnnnnnnnnnnnnnnnnnnnnnnnnnnnnnnnnnnnnnnnnnctctccccttctccgctcgtcattggagatgaacacatcgcggtttgcatcacagaaagnnnnnnnnnnnnnnnnnnnnnnnnnnnnnnnnnnnnnnnnnnnnnnnnnnnnnnnnnnnnnnnnnnnnnnnnnnnnnnnnnnnnnnnnnnnnnnnnnnnnnnnnnnnnnnnnnnnnnnnnnnnnnnnnnnnnnnnnnnnnnnnnnnnnnnnnnnnnnnnnnnnnnnnnnnnnnnnnnnnnngggtgaagtagagaaataaagtctccccgctgaactactatgaggtcagaagccttgctgctatatttcacactgctacactttgctggggctggtttcccagaagattctgagccaatcagtatttcgcatggcaactnnnnnnnnnnnnnnnnnnnnnnnnnnnnnnnnnnnnnnnnnnnnnnnnnnnnnnnnnnnnnnnnnnnnnnnnnnnnnnnnnnnnnnnnnnnnnnnnnnnnnnnnnnnnnnnnnnnagggaccatatttatactgtcgatatagacacatcacacacggaagaaatttattgtagcaaannnnnnnnnnnnnnnnnnnnnnnnnnnnnnnnnnnnnnnnnnnnnnnnnnnnnnnnnnnnnnnnnnnnnnnnnnnnnnnnnnnnnnnnnnnnnnnnaagaaaaacgatgatgcattgtttgtctgtggaactaatgccttcaacccttcctgcagaaactataannnnnnnnnnnnnnnnnnnnnnnnnnnnnnnnnnnnnnnnnnnnnnnnnnnnnnnnnnnnnnnnnnnnnnnnnnnnnnnnnnnnnnnnnnnnnnnnnnnnnnnnnnnnnnnnnnnnnnnnnnnnnnnnnnnnnnnnnnnnnnnnnnnnnnnnnnnnnnnnnnnnnnnnnnnnnnnnnnnnnnnnnnnnnnnnnnnnnnnnnnnnnnnnnnnnnnnnnnnnnnnnnnnnnnnnnnnnnnnnnnnnnnnnnnnnnnnnnnnnnnnnnnnnnnnnnnnnnnnnnnnnnnnnnnnnnnnnnnnnnnnnnnnnnnnnnnnnnnnnnnnnnnnnnnnnnnnnnnnnnnnnnnnnnnnnnnnnnnnnnnnnnnnnnnnnnnnnnnnnnnnnnnnnnnnnnnnnnnnnnnnnnnnnnnnnnnnnnnnnnnnnnnnnnnnnnnnnnnnnnnnnnnnnnnnnnnnnnnnnnnnnnnnnnnnnnnnnnnnnnnnnnnnnnnnnnnnnnnnnnnnnnnnnnnnnnnnnnnnnnnnnnnnnnnnnnnnnnnnnnnnnnnnnnnnnnnnnnnnnnnnnnnnnnnnnnnnnnnnnnnnnnnnnnnnnnnnnnnnnnnnnnnnnnnnnnnnnnnnnnnnnnnnnnnnnnnnnnnnnnnnnnnnnaggccaggttgctgtgctggctcatcctccttagaaagatatgcaacctccaatgagtttcctgatgataccctgaacttcatcaagacgcacccactcatggatgaggcagtgccctccatcttcaacaggccatggttcctgagaacaatggtcannnnnnnnnnnnnnnnnnnnnnnnnnnnnnnnnnnnnnnnnnnnnnnnnnnnnnnnnnnnnnnnnnnnnnnnnnnnnnnnnnnnnnnnnnnnnnnnnnnnnnnnnnnnnnnnnnnnnnnnnnnnnnnnnnnnnnnnnnnnnnnnnnnnnnnnnnnnnnnnnnnnnnnnnnnnnnnnnnnnnnnnnnnnnnnnnnnnnnnnnnnnnnnnnnnnnnnnnnnnnnnnnnnnnnnnnnnnnnnnnnnnnnnnnnnnnnnnnnnnnnnnnnnnnnnnnnnnnnnnnnnnnnnnnnnnnnnnnnnnnnnnnnnnnnnnnnnnnnacctgtattgcctccatatgacccctattgtgggtggataaaggaaggtggtgcctgtacccatttatcacccaatagcagnnnnnnnnnnnnnnnnnnnnnnnnnnnnnnnnnnnnnnnnnnnnnnnnnnnnnnnnnnnnnnnnnnnnnnnnnnnnnnnnnnnnnnnnnnnnnnnnnnnnnnnnnnnnnnnnnnnnnnnnnnnnnnnnnnnnnnnnnnnnnnnnnnnnnnnnnnnnnnnnnnnnnnnnnnnnnnnnnnnnnnnnnnnnnnnnnnnnnnnnnnnnnnnnnnnnnnnnnnnnnnnnnnnnnnnnnnnnnnnnnnnnnnnnnnnnnnnnnnnnnnnnnnnnnnnnnnnnnggagtgattcgggaaagttacctcaaaggccacgaccagctggttcccgtcaccctcttggccattgcagtcatcctggctttcgtcatgggggccgtcttctcgggcatcaccgtctactgcgtctgtgatcaccggcgcaaagacgtggccgtggtgcagcgcaaggagannnnnnnnnnnnnnnnnnnnnnnnnnnnnnnnnnnnnnnnnnnnnnnnnnnnnnnnnnnnnnnnnnnnnnnnnnnnnnnnnnnnnnnnnnnnnnnnnnnnnnnnnnnnnnnnnnnnnnnnnnnnnnnnnnnnnnnnnnnnnnnnnnnnnnnnnnnnnnnnnnnnnnnnnnnnnnnnnnnnnnnnnnnnnnnnnnnnnnnnnnnnnnnnnnnnnnnnnnnnnnnnnnnnnnnnnnnnnnnnnnnnnnnnnnnnnnnnnnnnnnnnnnnnnnnnnnnnnnnnnnnnnnnnnnnnnnnnnnnnnnnnnnnnnnnnnnnnnnnnnnnnnnnnnnnnnnnnnnnnnnnnnnnnnnnnnnnnnnnnnnnnnnnnnnnnnnnnnnnnnnnnnnnnnnnnnnnnnnnnnnnnnnnnnnnnnnnnnnnnnnnnnnnnnnnnnnnnnnnnnnnnnnnnnnnnnnnnnnnnnnnnnnnnnnnnnnnnnnnnnnnnnnnnnnnnnnnnnnnnnnnnnnnnnnnnnnnnnnnnnnnnnnnnnnnnnnnnnnnnnnnnnnnnnnnnnnnnnnnnnnnnnnnnnnnnnnnnnnnnnnnnnnnnnnnnnnnnnnnnnnnnnnnnnnnnnnnnnnnnnnnnnnnnnnnnnnnnnnnnnnnnnnnnnnnnnnnnnnnnnnnnnnnnnnnnnnnnnnnnnnnnnnnnnnnnnnnnnnnnnnnnnnnnnnnnnnnnnnnnnnnnnnnnnnnnnnnnnnnnnnnnnnnnnnnnnnnnnnnnnnnnnnnnnnnnnnnnnnnnnnnnnnnnnnnnnnnnnnnnnnnnnnnnnnnnnnnnnnnnnnnnnnnnnnnnnnnnnnnnnnnnnnnnnnnnnnnnnnnnnnnnngccaggccgtgactgtctccaggcagcccattctcaacgcctgcaactcactgacgaggtcggggctgaagcttacgccctcactaaagccggacgtaccccctaaaccttcctttgctcccctttccacatccatgaagcccaatgatgcgtgtacataatcccagggggagggggtcaggtgtcgaaccagcaggcaaggcgaggtgcccgctcagctcagcaaggttctcaactgcctcgagtacccaccagaccaagatggcccgcggcagagccgaggacg

SEQ ID NO: 23868 - DNA, 602 bp, Macaca Mulatta
ttttcactccatcctgcgcattcttctgactaatcaactcatcttcagtgcctccagtgtcatccagcactttttctgcaatgaccaaccagtgctaaaattgtcctgttcctcccattttgtcaaagaaatcattgtaatgacagaaggcttggctgtcataataacccccttttcatgtatcatcatctcttatttaagaatcctcatgactgttctaaagattccttcagttgctggaaagctgaaagcattttctacctgtggctctcatctcacagtggtgaccctgttttatggaagcattagctatgtgtattttcagcccctgtccaactatactgtcaaggatctaatagcaacaattatctacaccatactgactacagtgctaaatccatttatccatttatccatttgtctgaggaacaaagacatgaagcagggtttggcaaagttgatgcacgggatgaaatgtcaataaaagacctgaagtcttaggagaataccacagatctcttgccctggactataggttattaatgggtatgtgattctgaaatgattattagattctgaaaggataggaccttcaatgatga

SEQ ID NO: 23869 - DNA, 796 bp, Macaca Mulatta
  misc_feature (1)...(796): n = A,T,C or G
ggggtcttcgaggtccctgaccctcgaagttgccccgccttcagcctaaaagtgctgggattaccaggtgtgaggccgttgcacccnccccagatgccttttttatactcagacagaagcaaggagcccttacaacgggccctgcatttgatctttcagtcccgcgaaaaatagagatgcttcctgacttgcagtggggtttgtcctgagaaacccactgtaaatcgaaaatattgtaagtcaaaaaagcatntaatacacctaactaccaaacatcatagcctcgcccagcctccctgaaacgtgctcagaacacttatgttagcctccatttgggcaaaatcatctaacacagagcctattgatgataaagtgttgaagatctcctgttatttattcaacactgtactgaagtgtggttggtttctattgaattcatatccctccgggttgagaaatcttaagttggaccctggtaagtcggggctgtctttatggacagaatgcagagtgattttgtcactcggcacctccctgttggctctgagcagcgctctctggctgggagaaacttcggtgagcatgaggttgagccctcactgtgacgagggatgcgacatggtgcaaggacaaccacctgcaacagcatctgggtgaaacaccttcttgattcggttcagatttgttaggagttcctgtgggccaagccctgagccagtcacgtggagtcatccctcttcctgatatccctgctgagtgtccctcacctgaggctccaagagcctgggacttgccc

SEQ ID NO: 23870 - DNA, 293 bp, Macaca Mulatta
gatattccaggcctacctggcattccaggacctccgaaatgatgctccagtcccttacaagcgctccctggatgagggcggcatggtgctgaccaccctcccctcgccctccgccaccagctctgtgaacatgcccaccactggccccaacagcctgagttatgccagctctgccctgtccccttgtctgaccgctccaaaggccccccgcctcgctatgatgcctgacaactaaatatccttatccacatcaataaagagagaatcctccctccagaagggtttctaaaaac

SEQ ID NO: 23871 - DNA, 633 bp, Macaca Mulatta
cgctgttgttatcaagaagtgatgagatcctacaggcacgaggaaagaagggaactgatcgtgctgcccagattgagctgctgcaactgctggttcagatcgcagcagaaaacaacctgggagagggcgtcattgtcaagatccaggaagagtcactgaggacctacctcttcacctacagcagtgtctacgactccatcagcatggagaccctgtcagacatgtttgagctggatctgcccactgtgcactccatcatcagcaaaatgatcattaatgaggagctgatggcctccctggaccagccaacgcagacagtggtgatgcaccgcaccgagcccactgcccagcagaacctggccctgcagctggccgagaagctgggcagcctggtggagaacaatgagcgagtgtttgaccacaaacaaggcacctacgggggctacttccgagaccagaaggacggctaccgcaaaaacgagggctacatgcgccgcggtggctaccgccagcagccatctcaaacggcctactgagctctccactctgtctcacgcctagactatctaaccttgaagtcctaagccacaccccaggcattaaaagtctatttaaagttcagcaacacaaacg

SEQ ID NO: 23872 - DNA, 143 bp, Macaca Mulatta
agatcatgaaaatggaactgggactaacacctatgcagccctaaacagtgtctatctcatgatgaacaatcaaatgcaactccttggcatgaaaacgatggcctggcaggaaatccgacatgccatcatccttctgacagatg

SEQ ID NO: 23873 - DNA, 1479 bp, Macaca Mulatta
  misc_feature (1)...(1479): n = A,T,C or G
agtgtgaagccccaggaagcccccaaggaactcgtcatccctttgatccagaatggccatcgcaggcagtcaccagcccggccccctggtccannnnnnnnnnnnnnnnnnnnnnnnnnnnnnnnnnnnnnnnnnnnnnnnnnnnnnnnnnnnnnnnnnnnnnnnnnnnnnnnnnnnnnnnnnnnnnnnnnnnnnnnnnnnnnnnnnnnnnnnnnnnnnnnnnnnnnnnnnnnnnnnnnnnnnnnnnnnnnnnnnnnnnnnnnnnnnnnnnnnnnnnnnnnnnnnnnnnnnnnnnnnnnnnnnnnnnnnnnnnnnnnnnnnnnnnnnnnnnnnnnnnnnnnnnnnnnnnnnnnnnnnnnnnnnnnnnnnnnnnnnnnnnnnnnnnnnnnnnnnnnnnnnnnnnnnnnnnnnnnnnnnnnnnnnnnnaggggttagggctgggtgccaacctgtctgaggcccaggccttgacccccaccggcccctcccacatgccaaggccagatgaggagcaagagaaggataaggaagatcagcctcaagggctggtgccaggaggagctgtggtggttctttctggccctcaccgaggcctctatgggaaggnnnnnnnnnnnnnnnnnnnnnnnnnnnnnnnnnnnnnnnnnnnnnnnnnnnnnnnnnnnnnnnnnnnnnnnnnnnnnnnnnnnnnnnnnnnnnnnnnnnnnnnnnnnnnnnnnnnnnnnnnnnnnnnnnnnnnnnnnnnnnnnnnnnnnnnnnnnnnnnnnnnnnnnnnnnnnnnnnnnnnnnnnnnnnnnnnnnnnnnnnnnnnnnnnnnnnnnnnnnnnnnnnnnnnnnnnnnnnnnnnnnnnnnnnnnnnnnnnnnnnnnnnnnnnnnnnnnnnnnnnnnnnnnnnnnnnnnnnnnnnnnnnnnnnnnnnnnnnnnnnnnnnnnnnnnnnnnnnnnnnnnnnnnnnnnnnnnnnnnnnnnnnnnnnnnnnnnnnnnnnnnnnnnnnnnnnnnnnnnnnnnnnnnnnnnnnnnnnnnnnnnnnnnnnnnnnnnnnnnnnnnnnnnnnnnnnnnnnnnnnnnnnnnnnnnnnnnnnnnnnnnnnnnnnnnnnnnnnnnnnnnnnnnnnnnnnggtgggacatttgctgagccgggacagagcacggagccgggctttggtgcaactgccaagagaagatcaggtggtggagcttcactacgatgccatctgccagtacatgggccctagtgacacagatgatgactgacccatgggactcctcccatcccccaggctggtaccagttctgtaccatatgagaaagttgccttcaagaaggtgggaagatcattgttccatcctctacttctggtgcagtcctgggacaaggacaagggaaagggatgggtgaaccagtagggaagctagaaacaaacccaaggtttaccaaaatttagggtataataaaaaccatttcaagtacttaataga

SEQ ID NO: 23874 - DNA, 927 bp, Macaca Mulatta
  misc_feature (1)...(927): n = A,T,C or G
agatacaataacagaacctactccattgatgacattgactggtcagtgaagcccacacacacctttcagaggcgaaatggcaccgagatcacctatgtggattactacaagcannnnnnnnnnnnnnnnnnnnnnnnnnnnnnnnnnnnnnnnnnnnnnnnnnnnnnnnnnnnnnnnnnnnnnnnnnnnnnnnnnnnnnnnnnnnnnnnnnnnnnnnnnnnnnnnnnnnnnnnnnnnnnnnnnnnnnnnnnnnnnnnnnnnnnnnnnnnnnnnnnnnnnnnnnnnnnnnnnnnnnnnnnnnnnnnnnnnnnnnnnnnnnnnnnnnnnnnnnnnnnnnnnnnnnnnnnnnnnnnnnnnnnnnnnnnnnnnnnnnnnnnnnnnnnnnnnnnnnnnnnnnnnnnnnnnnnnnnnnnnnnnnnnnnnnnnnnnnnnnnnnnnnnnnnnnnnnnnnnnnnnnnnnnnnnnnnnnnnnnnnnnnnnnnnnnnnnnnnnnnnnnnnnnnnnnnnnnnnnnnnnnnnnnnnnnnnnnnnnnnnnnnnnnnnnnnnnnnnnnnnnnnnnnnnnnnnnnnnnnnnnnnnnnnnnnnnnnnnnnnnnnnnnnnnnnnnnnnnnnnnnnnnnnnnnnnnnnnnnnnnnnnnnnnnnnnnnnnnnnnnnnnnnnnnnnnnnnnnnnnnnnnnnnnnnnnnnnnnnnnnnnnnnnnnnnnnnnnnnnnnnnnnnnnnngtaatgtgcattctgccttctaatcagaagacctattatgattccattaaaaaatatttgagctcagactgcccagtcccaagccaatgtgtgcttgctcggactttgaataaacaggggccatgatgatgagtatcgccaccaagatcgccatgcagatgacttgcaagctcggaggcgaactgtgggctgtggaaatacct

SEQ ID NO: 23875 - DNA, 1630 bp, Macaca Mulatta
  misc_feature (1)...(1630): n = A,T,C or G
aaaaataccccttctggccagcagtggnnnnnnnnnnnnnnnnnnnnnnnnnnnnnnnnnnnnnnnnnnnnnnnnnnnnnnnnnnnnnnnnnnnnnnnnnnnnnnnnnnnnnnnnnnnnnnnnnnnnnnnnnnnnnnnnnnnnnnnnnnnnnnnnnnnnnnnnnnnnnnnnnnnnnnnnnnnnnnnnnnnnnnnnnnnnnnnnnnnnnnnnnnnnnnnnnnnnnnnnnnnnnnnnnnnnnnnnnnnnnnnnnnnnnnnnnnnnnnnnnnnnnnnnnnnnnnnnnnnnnnnnnnnnnnnnnnnnnnnnnnnnnnnnnnnnnnnnnnnnnnnnnnnnnnnnnnnnnnnnnnnnnnnnnnnnnnnnnnnnnnnnnnnnnnnnnnnnnnnnnnnnnnnnnnnnnnnnnnnnnnnnnnnnnnnnnnnnnnnnnnnnnnnnnnnnnnnnnnnnnnnnnnnnnnnnnnnnnnnnnnnnnnnnnnnnnnnnnnnnnnnnnnnnnnnnnnnnnnnnnnnnnnnnnnnnnnnnnnnnnnnnnnnnnnnnnnnnnnnnnnnnnnnnnnnnnnnnnnnnnnnnnnnnnnnnnnnnnnnnnnnnnnnnnnnnnnnnnnnnnnnnnnnnnnnnnnnnnnnnnnnnnnnnnnnnnnnnnnnnnnnnnnnnnnnnnnnnnnnnnnnnnnnnnnnnnnnnnnnnnnnnnnnnnnnnnnnnnnnnnnnnnnnnnnnnnnnnnnnnnnnnnnnnnnnnnnnnnnnnnnnnnnnnnnnnnnnnnnnnnnnnnnnnnnnnnnnnnnnnnnnnnnnnnnnnnnnnnnnnnnnnnnnnnnnnnnnnnnnnnnnnnnnnnnnnnnnnnnnnnnnnnnnnnnnnnnnnnnnnnnnnnnnnnnnnnnnnnnnnnnnnnnnnnnnnnnnnnnnnnnnnnnnnnnnnnnnnnnnnnnnnnnnnnnnnnnnnnnnnnnnnnnnnnnnnnnnnnnnnnnnnnnnnnnnnnnnnnnnnnnnnnnnnnnnnnnnnnnnnnnnnnnnnnnnnnnnnnnnnnnnnnnnnnnnnnnnnnnnnnnnnnnnnnnnnnnnnnnnnnnnnnnnnnnnnnnnnnnnnnnnnnnnnnnnnnnnnnnnnnnnnnnnnnnnnnnnnnnnnnnnnnnnnnnnnnnnnnnnnnnnnnnnnnnnnnnnnnnnnnnnnnnnnnnnnnnnnnnnnnnnnnnnnnnnnnnnnnnnnnnnnnnnnnnnnnnnnnnnnnnnnnnnnnnnnnnnnnnnnnnnnnntctgccgtgatgatggagcttcagaagcgggaatagttcttccgggtttgtcgttttgtctgtttcctcctcgtgtggtttctgcctgcgacggttccagaatttgctctgcccctcagtgtgctttgcagctgtgaggaaacagccttcgttagaggcgggagctgagacgagccgctgctctgtgtcgtgtttgctgtggctgcagggagaggagcgggacacgcacctttccaggggcctctgtgctccgcactgtgggtgagtggaccacagcgcacagccacatgccctggctgctgtgggctggaccacctccacctcccccgcccgtacgcctggcctgagtgagttttcctgcgttgtgtcgtcactgc

SEQ ID NO: 23876 - DNA, 404 bp, Macaca Mulatta
cgaccagaaaattgtttattgggaaatgctgtggtttgcgttttcacattcttagcttggcagtgtatattcttttcacaagtttgcctagtgtcttggtttacacaatatgacaactgtaactgtactttagctagtgtttgcctgcacatacatgttgtaatatgcacagtgattaccacctttaaagcaagaggaggaaagttaatttggatgagtgtgattttgttgattgaatgtaagttttcaaataggagtctttttctgcaaattttttgcactttttagaagtgcaaacagtaaatgaataagagccttcagtaataatcatgacagtacaagaggctgagctagactacagggaaaaactattgtgttgtaaagttgcatcgctattttatatt

SEQ ID NO: 23877 - DNA, 1156 bp, Macaca Mulatta
  misc_feature (1)...(1156): n = A,T,C or G
aagccttctcacagaagtcactgctcactattcatcaaagaactcactcaggagaaaaaccgtatgggtgcagcgaatgtcagaaagcttttagtaggaagtcactcctcattttacatcagagaattcatactggagagaagccgtatggatgcagtgaatgtggaaaagccttcagtaggaagtcgcagcttaaaagacatcagataactcacacaatagagaaaccctacagttgcagtgagtgcgggaaagcattctcgcagaaattaaaactcatcacacatcagagaacgcacacaggagagaaaccctatacgtgtagtcactgtggaaaatccttcttttggaagtcgcagcttattactcatcagaggacccacacagggaagaaaccttatgcatgtagtgagtgtcaaaaagccttcagcaggaactcacttctcattaggcatcagaggattcatacaggagagaagccctacgaatgcaatgaatgtggtgaagccttcatcagaaaaccacagctgattaaacatcagataactcacacaggagagaagaactatcgatgcagtgattgtgaagaggccttctttaagaagtcagagttaataagacatcaaaaaattcacttaggagagaaaccatatggatgcattcaatgtgggaaaaccttctttgggaagtcccagctcctaacgcatcacagaacacacactgnnnnnnnnnnngaacacacactggggagaagccttatgaatgcagtgagtgtgggaaagccttcacccagaagtcaagcctgatatcacatcagagaacacatacaggtgagaaaccctatgaatgcagtgaatgtgggaaagcatttgttcagaaagtgcagctcattaagcatcaaagaaatcacacgggagagaaaacctatggatgcagtgattgtgcaaaagctttctttgagaaggcacagctcattatacatcagagaattcatacaggagagagaccatataaatgtggtgaatgtgggaagtctttcacgagaaagtcacaccttatgaggcatcagaggattcatacaggagataaatactatggatgcaatgagtgtgggaccaccttcaacaggaagtcgcagcttatgatacatcagaga

SEQ ID NO: 23878 - DNA, 580 bp, Macaca Mulatta
ctgagaggacggcgtttcggtaatgacccaaatttaaaagacataagatggataattttacatttctgtgcaagtatatttatgtatatagactaggtatattgtgtatataatttattttacaagaatattcttttgatattccaagtaaataaatgactacttttgaatggaaacaaagaaaattctagcatttacgaaacttccaggggagcgtagagccacatccagggtcctctattccgagagtatttcgagctattgttagaacagtttaaaatattgttacattactactagattttaaagagtctaccatgaaaatgtatcttaatgaactattttcttatgcataaaatatatgcacacacgtctaaattaaaaggaattactccactgaaatgacctctgccaacagtgttttcttaaaattcttgagcaccttcttttgggattattggaatgccatatttgcagagcaagtcagacacgttttccattagtactaaaagttgtccttgtgtggaaatcatacaagtaaatgaactcccttgaattttgtagctcaggtagaccagga

SEQ ID NO: 23879 - DNA, 4799 bp, Macaca Mulatta
  misc_feature (1)...(4799): n = A,T,C or G
tttgaggccggccagtcgtgaccgggcggcagtgccgtcagtgagtgccgggtgttctgcaggcgcgcggcggcgccaagcgcggggagcccgggtgaggggcagcccagnnnnnnnnnnnnnnnnnnnnnnnnnnnnnnnnnnnnnnnnnnnnnnnnnnnnnnnnnnnnnnnnnnnnnnnnnnnnnnnnnnnnnnnnnnnnnnnnnnnnnnnnnnnnnnnnnnnnnnnnnnnnnnnnnnnnnnnnnnnnnnnnnnnnnnnnnnnnnnnnnnnnnnnnnnnnnnnnnnnnnnnnnnnnnnnnnnnnnnnnnnnnnnnnnnnnnnnnnnnnnnnnnnnnnnnnnnnnnnnnnnnnnnnnnnnnnnnnnnnnnnnnnnnnnnnnnnnnnnnnnnnnnnnnnnnnnnnnnnnnnnnnnnnnnnnnnnnnnnnnnnnnnnnnnnnnnnnnnnnnnnnnnnnnnnnnnnnnnnnnnnnnnnnnnnnnnnnnnnnnnnnnnnnnnnnnnnnnnnnnnnnnnnnnnnnnnnnnnnnnnnnnnnnnnnnnnnnnnnnnnnnnnnnnnnnnnnnnnnnnnnnnnnnnnnnnnnnnnnnnnnnnnnnnnnnnnnnnnnnnnnnnnnnnnnnnnnnnnnnnnnnnnnnnnnnnnnnnnnnnnnnnnnnnnnnnnnnnnnnnnnnnnnnnnnnnnnnnnnnnnnnnnnnnnnnnnnnnnnnnnnnnnnnnnnnnnnnnnnnnnnnnnnnnnnnnnnnnnnnnnnnnnnnnnnnnnnnnnnnnnnnnnnnnnnnnnnnnnnnnnnnnnnnnnnnnnnnnnnnnnnnnnnnnnnnnnnnnnnnnnnnnnnnnnnnnnnnnnnnnnnnnnnnnnnnnnnnnnnnnnnnnnnnnnnnnnnnnnnnnnnnnnnnnnnnnnnnnnnnnnnnnnnnnnnnnnnnnnnnnnnnnnnnnnnnnnnnnnnnnnnnnnnnnnnnnnnnnnnnnnnnnnnnnnnnnnnnnnnnnnnnnnnnnnnnnnnnnnnnnnnnnnnnnnnnnnnnnnnnnnnnnnnnnnnnnnnnnnnnnnnnnnnnnnnnnnnnnnnnnnnnnnnnnnnnnnnnnnnnnnnnnnnnnnnnnnnnnnnnnnnnnnnnnnnnnnnnnnnnnnnnnnnnnnnnnnnnnnnnnnnnnnnnnnnnnnnnnnnnnnnnnnnnnnnnnnnnnnnnnnnnnnnnnnnnnnnnnnnnnnnnnnnnnnnnnnnnnnnnnnnnnnnnnnnnnnnnnnnnnnnnnnnnnnnnnnnnnnnnnnnnnnnnnnnnnnnnnnnnnnnnnnnnnnnnnnnnnnnnnnnnnnnnnnnnnnnnnnnnnnnnnnnnnnnnnnnnnnnnnnnnnnnnnnnnnnnnnnnnnnnnnnnnnnnnnnnnnnnnnnnnnnnnnnnnnnnnnnnnnnnnnnnnnnnnnnnnnnnnnnnnnnnnnnnnnnnnnnnnnnnnnnnnnnnnnnnnnnnnnnnnnnnnnnnnnnnnnnnnnnnnnnnnnnnnnnnnnnnnnnnnnnnnnnnnnnnnnnnnnnnnnnnnnnnnnnnnnnnnnnnnnnnnnnnnnnnnnnnnnnnnnnnnnnnnnnnnnnnnnnnnnnnnnnnnnnnnnnnnnnnnnnnnnnnnnnnnnnnnnnnnnnnnnnnnnnnnnnnnnnnnnnnnnnnnnnnnnnnnnnnnnnnnnnnnnnnnnnnnnnnnnnnnnnnnnnnnnnnnnnnnnnnnnnnnnnnnnnnnnnnnnnnnnnnnnnnnnnnnnnnnnnnnnnnnnnnnnnnnnnnnnnnnnnnnnnnnnnnnnnnnnnnnnnnnnnnnnnnnnnnnnnnnnnnnnnnnnnnnnnnnnnnnnnnnnnnnnnnnnnnnnnnnnnnnnnnnnnnnnnnnnnnnnnnnnnnnnnnnnnnnnnnnnnnnnnnnnnnnnnnnnnnnnnnnnnnnnnnnnnnnnnnnnnnnnnnnnnnnnnnnnnnnnnnnnnnnnnnnnnnnnnnnnnnnnnnnnnnnnnnnnnnnnnnnnnnnnnnnnnnnnnnnnnnnnnnnnnnnnnnnnnnnnnnnnnnnnnnnnnnnnnnnnnnnnnnnnnnnnnnnnnnnnnnnnnnnnnnnnnnnnnnnnnnnnnnnnnnnnnnnnnnnnnnnnnnnnnnnnnnnnnnnnnnnnnnnnnnnnnnnnnnnnnnnnnnnnnnnnnnnnnnnnnnnnnnnnnnnnnnnnnnnnnnnnnnnnnnnnnnnnnnnnnnnnnnnnnnnnnnnnnnnnnnnnnnnnnnnnnnnnnnnnnnnnnnnnnnnnnnnnnnnnnnnnnnnnnnnnnnnnnnnnnnnnnnnnnnnnnnnnnnnnnnnnnnnnnnnnnnnnnnnnnnnnnnnnnnnnnnnnnnnnnnnnnnnnnnnnnnnnnnnnnnnnnnnnnnnnnnnnnnnnnnnnnnnnnnnnnnnnnnnnnnnnnnnnnnnnnnnnnnnnnnnnnnnnnnnnnnnnnnnnnnnnnnnnnnnnnnnnnnnnnnnnnnnnnnnnnnnnnnnnnnnnnnnnnnnnnnnnnnnnnnnnnnnnnnnnnnnnnnnnnnnnnnnnnnnnnnnnnnnnnnnnnnnnnnnnnnnnnnnnnnnnnnnnnnnnnnnnnnnnnnnnnnnnnnnnnnnnnnnnnnnnnnnnnnnnnnnnnnnnnnnnnnnnnnnnnnnnnnnnnnnnnnnnnnnnnnnnnnnnnnnnnnnnnnnnnnnnnnnnnnnnnnnnnnnnnccaggctggagtgcaatggcgtgatctcggctcactgcaacctcnnnnnnnnnnnnnnnnnnnnnnnnnnnnnnnnnnnnnnnnnnnnnnnnnnnnnnnnnnnnnnnnnnnnnnnnnnnnnnnnnnnnnnnnnnnnnnnnnnnnnnnnnnnnnnnnnnnnnnnnnnnnnnnnnnnnnnnnnnnnnnnnnnnnnnnnnnnnnnnnnnnnnnnnnnnnnnnnnnnnnnnnnnnnnnnnnnnnnnnnnnnnnnnnnnnnnnnnnnnnnnnnnnnnnnnnnnnnnnnnnnnnnnnnnnnnnnnnnnnnnnnnnnnnnnnnnnnnnnnnnnnnnnnnnnnnnnnnnnnnnnnnnnnnnnnnnnnnnnnnnnnnnnnnnnnnnnnnnnnnnnnnnnnnnnnnnnnnnnnnnnnnnnnnnnnnnnnnnnnnnnnnnnnnnnnnnnnnnnnnnnnnnnnnnnnnnnnnnnnnnnnnnnnnnnnnnnnnnnnnnnnnnnnnnnnnnnnnnnnnnnnnnnnnnnnnnnnnnnnnnnnnnnnnnnnnnnnnnnnnnnnnnnnnnnnnnnnnnnnnnnnnnnnnnnnnnnnnnnnnnnnnnnnnnnnnnnnnnnnnnnnnnnnnnnnnnnnnnnnnnnnnnnnnnnnnnnnnnnnnnnnnnnnnnnnnnnnnnnnnnnnnnnnnnnnnnnnnnnnnnnnnnnnnnnnnnnnnnnnnnnnnnnnnnnnnnnnnnnnnnnnnnnnnnnnnngagatggaggcgccatagagaagcacaggttcactcgctccgtccagtgtcacccacacattggtccagggacccctcagtgcagagcctgaagttgggggcttgtgggtagaaaaggctttgtgaactgttatgatacggaccccttccagacggcacagcactttcccatggtgctcactggcctcagtctccccgaccggcagtgggaggggatggatccatagtggagcgtgtggtgcaggtgacattcacgagctccgacttcttggtgccaggttggcgtgagcctgggcccggcccactcagcagcccacattggccagcatccatctgcacgtgtgcactgcgtgcttcacatcctctattgagagttgcagcaagtgttaaacgaggcgagttcacataacaggaattctggaactgcttgaaaaccaggaagattgtgcaatatcggccttaactccacctgatggcaggtggcccagatagaaaatggccctgcctttagccaggacgtggctctccagcttgtcttccgtgtgatcacttgtcactgcgctttttctttctatagtgaaatccttctccatgccacgttttgttttgtttcttaagttgggaaacagaatgggccaaggaggctgagtgactgaagaccgagggtcggtgcagcctcctcgccgcgctgcagggctgggccgtacaggccttctgctcttctcggtgtccagcctccttcggtgacgctggagctgtcatggtggcagttcagtgtgagannnnnnnnnnnnnnnnnnnnnnnnnnnnnnnnnnnnnnnnnnnnnnnnnnnnnnnnnnnnnnnnnnnnnnnnnnnnnnnnnnnnnnnnnnnnnnnnnnnnnnnnnnnnnnnnnnnnnnnnnnnnnnnnnnnnnnnnnnnnnnnnnnnnnnnnnnnnnnnnnnnnnnnnnnnnnnnnnnnnnnnnnnnnnnnnnnnnnnnnnnnnnnnnnnnnnnnnnnnnnnnnnnnnnnnnnnnnnnnnnnnnnnnnnnnnnnnnnnnnnnnnnnnnnnnnnnnnnnnnnnnnnnnnnnnnnnnnnnnnnnnnnnnnnnnnnnnnnnnnnnnnnnnnnnnnnnnnnnnnnnnnnnnnnnnnnnnnnnnnnnnnnnnnnnnnnnnnnnnnnnnnnnnnnnnnnnnnnnnnnnnnnnnnnnnnnnnnnnnnnnnnnnnnnnnnnnnnnnnnnnnnnnnnnnnnnnnnnnnnnnnnnnnnnnnnnnnnnnnnnnnnnnnnnnnnnnnnnnnnnnnnnnnnnncagaggttgcagtgagccgagatcacgccattgcactccagcctgggtgacacagtgag

SEQ ID NO: 23880 - DNA, 757 bp, Macaca Mulatta
  misc_feature (1)...(757): n = A,T,C or G
ggctggttacagcagctctacccctcacgacgcagacatggcagcccagaaggaccagcagaaagatgtcgaggcggaagggctgagcgccacgnnnnnnnnnnnnnnnnnnnnnnnnnnnnnnnnnnnnnnnnnnnnnnnnnnnnnnnnnnnnnnnnnnnnnnnnnnnnnnnnnnnnnnnnnnnnnnnnnnnnnnnnnnnnnnnnnnnnnnnnnnnnnnnnnnnnnnnnnnnnnnnnnnnnnnnnnnnnnnnnnnnnnnnnnnnnnnnnnnnnnnnnnnnnnnnnnnnnnnnnnnnnnnnnnnnnnnnnnnnnnnnnnnnnnnnnnnnnnnnnnnnnnnnnnnnnnnnnnnnnnnnnnnnnnnnnnnnnnnnnnnnnnnnnnnnnnnnnnnnnnnnnnnnnnnnnnnnnnnnnnnnnnnnnnnnnnnnnnnnnnnnnnnnnnnnnnnnnnnnnnnnnnnnnnnnnnnnnnnnnnnnnnnnnnnnnnnnnnnnnnnnnnnnnnnnggagccaccctggtggtcatcggctcccatgctgccttccaccagattgaggctgtggacggggaggagctgcagatggaacccgtgtgaggtgtcttctgggacctgccagcctcccgggccagctgccccgcccctgcctactcctgtcctgcacagctctgctgctcgggcccatagcgccgtcccatcacaagcccggggagggatcccgccttgaaaataaagctgttacgggtgtcattcaggaaa

SEQ ID NO: 23881 - DNA, 107 bp, Macaca Mulatta
gtaatcaattgtttccccaaacaatggttcatgaatctgaaaggagaaaggactatttctcagttagaaaacttttgccgatacctagtgcacttagcagatacaat

SEQ ID NO: 23882 - DNA, 600 bp, Macaca Mulatta
  misc_feature (1)...(600): n = A,T,C or G
tcacacacaccaggccctgccaggacaaggcagctcctggaagctccaccaggacccacgtccaccagnnnnnnnnnnnnnnnnnnnnnnnnnnnnnnnnnnnnnnnnnnnnnnnnnnnnnnnnnnnnnnnnnnnnnnnnnnnnnnnnnnnnnnnnnnnnnnnnnnnnnnnnnnnnnnnnnnnnnnnnnnnnnnnnnnnnnnnnnnnnnnnnnnnnnnnnnnnnnnnnnnnnnnnnnnnnnnnnnnnnnnnnnnnnnnnnnnnnnnnnnnnnnnnnnnnnnnnnnnnnnnnnnnnnnnnnnnnnnnnnnnnnnnnnnnnnnnnnnnnnnnnnnnnnnnnnnnnnnnnnnnnnnnnnnnnnnnnnnnnnnnnnnnnnnnnnnnnnnnnnnnnnnnnnnnnnnnnnnnnnnnnnnnnnnnnnnnnnnnnnnnnnnnnnnnnnnnnnnnnnnnnnnnnnnnnnnnctgggaccccatcctgggctacatcaacgagcaatacgagcagtacctccaggaggagatcctcatcacccgccagcgccatatcccagacacccgggtgcactgctgcgtgtactttgtaccacccactgggcactg

SEQ ID NO: 23883 - DNA, 1704 bp, Macaca Mulatta
  misc_feature (1)...(1704): n = A,T,C or G
catggcctggctagcccgcgggtccgcgcgcgccctgctcgccgccctgctggcgtcgacgctgttggcgctgctcgtgtcgcccgcgcggggtcgcggtggccgggaccacggggactgggacgaggcctcgctgctgccgccgctaccaccccgcgaggacgcggcgcgcgtggcccgcttcgtgacgcacgtctccgactggggcgctctggccaccatctctacgctggaggcggtgcgcggccggcccttcgccgacgtgctctcgctcagcgacgggcccccgggcgcgggcagcggcgtgccctacttctacctgagcccgctgcagctctccgtcaacaacctgcaggagaatccatatgctacactgaccatgactttggcacagaccaacttctgcaagaaacatggatttgatccacaaagtcccctttgtgctcacataatactgtcaggaactgtgaccaaggtgaatgaaacagaaatggatattgcaaagcattcgttattcattcgacaccctgagatgaaaacctggccttccagccataattggttctttgctaagttgaatataaccagtatctgggtcctggactactttggtggaccaaaaatcgtgacaccggaagaatattataatgtcacagttcagtgaagcagactgtgacgaatttagcaacacttatgaagtttcttaaagtggctcatacacacttaaagggcttaatgtttctctggaaagcatctcagaatattagcctgttttctgtcacatgctggtttgtttgcttgcttgtttacgaatagagttgacctgttactggatttcttggaagatgtggttgctacttttttcatattttgaagccattttcatagagaaatatccttcactataatcaaataagttttgtcccatcaattccaaagatgtttccagtggtgctcttgaagaggagtgagtaccagatttaaattgcccattggcattgaaggtacttgagtatgtgttctttatttctggaagccactgtgctgggtagagtgcgtcactcaccacagctgcctcctgagctgtctgagcctcgtgcaaaagattggcccccattatggtgcgcctgaatacatcttgcctagaatagacaaacaatggatgaaactcaaatggagcttcctacttcacgttgatttatggtctccacaatccctgggtattgtttaactccaaccatagagtggaaacttatttcctgataaagaaacttttttggaaaacttttttacactccctaaagggtgatactcagaacaaaagaaagtcatgaaactcctgaatttaatttccccacctaagttgagactgtattatcaaaacacatgtgcacacagattactttttggccccaaaactggattacaaaagaaagaggagaagaatattttgtgtgttactggtattcttttataagtaaagtttacccagcatggaccagcttcaaccagggacaaaatcccctccaaaaccactctccacaggctttttaaaaatactgctactcttaacaattacctaaacccttctcaactggctccaaaatctcttaaataggcgtcctagtggctacntaccgatctaaaggtcacccanaaggggaagaaagaacatgggccatttaaaaaggaatccacattcct

SEQ ID NO: 23884 - DNA, 590 bp, Macaca Mulatta
aaagcacatgtttgaacttgtgatatcagaaggacacatgaatgctgtatggtccatgactctctgacgcctagtcttcgatgatttatcctgaccttaacgggctgactgttcatttctagtctacctggatattatttctgctctgtttgttggagttgcaggcaatggagccattctttctcctcagatcacaaacgaagcaaagacaagcaggccttctccatccttataagcatattctactacttcattctgcagagagtctagatgccatggtgacatggccaatcaaaggataaaggggaagacagatggaggaggaggaggatgagtcaaaggctgaatgcctgttttccatttctcctagctgtgcactctgaacagacaataacttgcaaagatgttttactttgtatttgtgtgcctgactttgagaccctttcagccaagggtggaaatttggaactcctcctgcattgcatgtcttcccaatgaagcaacatcagtaggtggttggggctgggggtgtctccatctgcttgaagtcacatatgcattttctctttggttgagattttgaatactaa

SEQ ID NO: 23885 - DNA, 1190 bp, Macaca Mulatta
  misc_feature (1)...(1190): n = A,T,C or G
tgggtggttatggcccgtggttggtgaggcagtggaggttactacgggcaaggtggcatgagtggaggtggatggcgtgggatgtactgaaagcgagagacaccaacatacaagtcttgacaacagcatctggtctactagactttcttacagatttaatttcttttgtattttaagaactttataatgactgaaggaatgtgttttcaaaatattatttggtaaagcaacagattgtgatgggaaaatctgttttctgtaggtttatttgttgcatactttgacttaaaaataaatttttatattcaaaccactgatgttgatactttttatatactagttactcctaaagatgtgctgccttcataagatttgggttgatgtattttactattagttctacaagacgtagtgtggtgtaattttagaagataatggttcaccttcgcataaactgcaagtcttaagcagacatctggaatagagcttgacaaataattagtgtaacttttttctttaattcctcctggacaacactgtaaatataaagcctcaagatgaagtggcttcaggagtataaattcagctaattatttctatattattatttttcaaatgtcatttatcaggcatagctctgaaacgatctaagaggtattgatttctgaatattcataattgtgttacctgggtatgggagtgttggaagtttgttctagccctagattttggagtaaaatcccttcagcacttgaccgaaataccaaaaatgtctccaaaaaattgatagttgcaagttattgcaagatgtcttaagagtagggttaaggttctcagtgacacaagaattcagtataagtacataggtatttactatggagtataattctcaaaaatgtattttaaagttttctgcccaatagagcatatggtttttaaataactgtataaatgatgacttttaaaaaatgtaagcaacaagtccatgtcatagtcaattaaaacaatcctgcagttgggttttgtatctgatatctgcttggagttttagtttaaagaatctatatgtagcaaggaaaaggtgctttttaattttaaatccccttgatcaatatgggcttttttccaaaattggctaattggatcaaaaatgaaacccntgttgatgttgaaatccagttccttgaacc

SEQ ID NO: 23886 - DNA, 164 bp, Macaca Mulatta
gaagaggccgtgaacgaggtgaagcggcaggccatgtcggagctgcagaaagccgtgtcggacgcggagcgcaaagcgcacgagctcatctccacggagcgttcaaggatggagcgggccctggccgaggcgaagcggcaggccacggaggacgccctgacggt

SEQ ID NO: 23887 - DNA, 184 bp, Macaca Mulatta
atttgtttgcaatgtccctttttggtgaccatgtcttctattcaacatggaaaacgaggacaatttggatagccaacaaacacactggaaaggacatggttagaattaacctccatccatcatttgtaccacctggtgaactgaaagtagtgcatccacttgcacagcccaaggcagaagatga

SEQ ID NO: 23888 - DNA, 76 bp, Macaca Mulatta
gaaatgatgatgcacatgcagcagctgtctcttgcctctttatgtgtgaaaaaacaagagccaaagaagccagagg

SEQ ID NO: 23889 - DNA, 463 bp, Macaca Mulatta
ctccgtccagaacccgcctccttccagaacctcgatacagaacccacctccttctagcacctatctctggaacccacgtgctttcagaactacctgtttgtagaacttgtttccagaacgaacctgctttctgaatctctttacttccagagcttgcttcctggactgatctgttttcagaacctactttcagaaccagcttgcctccaggaccacctgcttggagaactggcctgcaaccccaggactggaagccttgagcccgcactgctccctgcggggctcacccggctgtgtgtgtccttcccggccttccatacttccctaggtgtctggtgacttcggagcccgcttagatttcatgtgggtctccttagctcagaacacaccctttgaagggaaggaaggccagggcacagatggtaaccacggctcctgttcatcaagttcctctgaagcccag

SEQ ID NO: 23890 - DNA, 272 bp, Macaca Mulatta
ggtgtcctagtccacatgggtgtggggtggcacactccataatctctactcttctttttttgcagctgagtcatggagctttcagcccctgcacgtggctcctccttaactgcatctgctcagcctccctcagccctgcgaatagcctccccacacacagaccacagagcagggctctctctgctgtcacttcaccttcctgagagaggaccagccggccagagcctacatgaccgccaccctggaggacagggcacaacagccgtttctgg

SEQ ID NO: 23891 - DNA, 662 bp, Macaca Mulatta
  misc_feature (1)...(662): n = A,T,C or G
ggggagtgacggagactgtccaggggtggtcaccatgttcctctccgtcgtcttctttgccaagagcaagtcaaaaaacattttggtgagaatggtgagccaagctgggacaggtttctgcttcaacaccaagagaaaccgactgaaggaaaaactgactcttttgcattatgatccagttgtgaaacaaagagtcctcttcgtggaagataaaaaaatacgctccctttaactggtggattgaaagtgactttgatttataaagagaagactgagggcggggatactgattcagaaatcctgtagtgtgtaataaaagaagaggaaatggcatggaatcactgcctcctgtgatttgaaggccattgtgaaggaaaacaatgcagtgaaagaaagttcttcatattaggacagatatcattgcatcacatttatttatctttctgggtatttttatagcccttaataaaaaatattanattnnnnnaaaannnnnnnnnnnnnnnnnnnnnnnnnnnnnnnnnnnnnnnnnnnnnnnnnnnnnnnnnnnnnnnnnnnnnnnnnnnnnnnnnnnnnnnnnnnnggcgcccctcccccacaaaatttttaaaaccttttttggcccgggcgnnnnnnnnnnnnnnnnnnnatattttttctaa

SEQ ID NO: 23892 - DNA, 970 bp, Macaca Mulatta
  misc_feature (1)...(970): n = A,T,C or G
ggggtttttttcacatttcacatctcactcatcaagtcatgttggtgttaatttctaattaacccttgaaattgccgtcttctcatcctctgtacaaaagcctcaagtgagggtcaaatttaacattatcctgatctagacagtccccattctcaatccacccttttccaagttgattgcccaaggacttctaacataataaactctttaactcttttgcaccacagacttctttggaaatatatatgctgttgaccctctctgtagaaaactgcacacataaaacttaccaacagatgtcattggttctcgggttctcccgaagcctatccatggtttatagattaagaattgacgaggtagctgggcnnnnnnnnnnnnnnnnnngatcannnnnnnnnnnnnnnnnnnagcaagcannnnnnnnnnnnnnnnnnnnnnnnnnnnnnnnnnnnnggcatggtgaagccctgtctctattaaaaatacaaaaanagcccggccgtgatggcgggcgcctgtagtcttacctacccggaagctgaacatgagagttgctgggcccggaagcgagttgcatgaccttgatccaccctgactccactggaaaaaaagaaatcctccaaagaaaaaaatgttatgccctgaggattccnnnnnnnctgatgtgacccatgaagggaagtcattttcctcgtaatttctggactgccccacataggtatctttagttcttcgaaagcccccattttttatcattaagacctatttgttactaaagtagagcttttattcttcaatggtcttcctggaaacccttcctgtaaaccacagttggactaccaagaagtttcttttctcccatatgaaattgaaagggtcccaaaaattaaaaaaataggtcctttgggaaaaacctttaaaatttccccctccaccaactgggggggtttaacaccagtccctggat

SEQ ID NO: 23893 - DNA, 2978 bp, Macaca Mulatta
  misc_feature (1)...(2978): n = A,T,C or G
gtaagtggggtgggacagagatggcacctggggattctgaggcacccgctcctctctgagacagacagggatcaggagccggattgggaccagaccacagcaacacaccagaggatgttctnnnnnnnnnnnnnnnnnnnnnnnnnnnnnnnnnnnnnnnnnnnnnnnnnnnnnnnnnnnnnnnnnnnnnnnnnnnnnnnnnnnnnnnnnnnnnnnnnnnnnnnnnnnnnnnnnnnnnnnnnnnnnnnnnnnnnnnnnnnnnnnnnnnnnnnnnnnnnnnnnnnnnnnnnnnnnnnnnnnnnnnnnnnnnnnnnnnnnnnnnnnnnnnnnnnnnnnnnnnnnnnnnnnnnnnnnnnnnnnnnnnnnnnnnnnnnnnnnnnnnnnnnnnnnnnnnnnnnnnnnnnnnnnnnnnnnnnnnnnnnnnnnnnnnnnnnnnnnnnnnnnnnnnnnnnnnnnnnnnnnnnnnnnnnnnnnnnnnnnnnnnnnnnnnnnnnnnnnnnnnnnnnnnnnnnnnnnnnnnnnnnnnnnnnnnnnnnnnnnnnnnnnnnnnnnnnnnnnnnnnnnnnnnnnnnnnnnnnnnnnnnnnnnnnnnnnnnnnnnnnnnnnnnnnnnnnnnnnnnnnnnnnnnnnnnnnnnnnnnnnnnnnnnnnnnnnnnnnnnnnnnnnnnnnnnnnnnnnnnnnnnnnnnnnnnnnnnnnnnnnnnnnnnnnnnnnnnnnnnnnnnnnnnnnnnnnnnnnnnnnnnnnnnnnnnnnnnnnnnnnnnnnnnnnnnnnnnnnnnnnnnnnnnnnnnnnnnnnnnnnnnnnnnnnnnnnnnnnnnnnnnnnnnnnnnnnnnnnnnnnnnnnnnnnnnnnnnnnnnnnnnnnnnnnnnnnnnnnnnnnnnnnnnnnnnnnnnnnnnnnnnnnnnnnnnnnnnnnnnnnnnnnnnnnnnnnnnnnnnnnnnnnnnnnnnnnnnnnnnnnnnnnnnnnnnnnnnnnnnnnnnnnnnnnnnnnnnnnnnnnnnnnnnnnnnnnnnnnnnnnnnnnnnnnnnnnnnnnnnnnnnnnnnnnnnnnnnnnnnnnnnnnnnnnnnnnnnnnnnnnnnnnnnnnnnnnnnnnnnnnnnnnnnnnnnnnnnnnnnnnnnnnnnnnnnnnnnnnnnnnnnnnnnnnnnnnnnnnnnnnnnnnnnnnnnnnnnnnnnnnnnnnnnnnnnnnnnnnnnnnnnnnnnnnnnnnnnnnnnnnnnnnnnnnnnnnnnnnnnnnnnnnnnnnnnnnnnnnnnnnnnnnnnnnnnnnnnnnnnnnnnnnnnnnnnnnnnnnnnnnnnnnnnnnnnnnnnnnnnnnnnnnnnnnnnnnnnnnnnnnnnnnnnnnnnnnnnnnnnnnnnnnnnnnnnnnnnnnnnnnnnnnnnnnnnnnnnnnnnnnnnnnnnnnnnnnnnnnnnnnnnnnnnnnnnnnnnnnnnnnnnnnnnnnnnnnnnnnnnnnnnnnnnnnnnnnnnnnnnnnnnnnnnnnnnnnnnnnnnnnnnnnnnnnnnnnnnnnnnnnnnnnnnnnnnnnnnnnnnnnnnnnnnnnnnnnnnnnnnnnnnnnnnnnnnnnnnnnnnnnnnnnnnnnnnnnnnnnnnnnnnnnnnnnnnnnnnnnnnnnnnnnnnnnnnnnnnnnnnnnnnnnnnnnnnnnnnnnnnnnnnnnnnnnnnnnnnnnnnnnnnnnnnnnnnnnnnnnnnnnnnnnnnnnnnnnnnnnnnnnnnnnnnnnnnnnnnnnnnnnnnnnnnnnnnnnnnnnnnnnnnnnnnnnnnnnnnnnnnnnnnnnnnnnnnnnnnnnnnnnnnnnnnnnnnnnnnnnnnnnnnnnnnnnnnnnnnnnnnnnnnnnnnnnnnnnnnnnnnnnnnnnnnnnnnnnnnnnnnnnnnnnnnnnnnnnnnnnnnnnnnnnnnnnnnnnnnnnnnnnnnnnnnnnnnnnnnnnnnnnnnnnnnnnnnnnnnnnnnnnnnnnnnnnnnnnnnnnnnnnnnnnnnnnnnnnnnnnnnnnnnnnnnnnnnnnnnnnnnnnnnnnnnnnnnnnnnnnnnnnnnnnnnnnnnnnnnnnnnnnnnnnnnnnnnnnnnnnnnnnnnnnnnnnnnnnnnnnnnnnnnnnnnnnnnnnnnnnnnnnnnnnnnnnnnnnnnnnnnnnnnnnnnnnnnnnnnnnnnnnnnnnnnnnnnnnnnnnnnnnnnnnnnnnnnnnnnnnnnnnnnnnnnnnnnnnnnnnnnnnnnnnnnnnnnnnnnnnnnnnnnnnnnnnnnnnnnnnnnnnnnnnnnnnnnnnnnnnnnnnnnnnnnnnnnnnnnnnnnnnnnnnnnnnnnnnnnnnnnnnnnnnnnnnnnnnnnnnnnnnnnnnnnnnnnnnnnnnnnnnnnnnnnnnnnnnnnnnnnnnnnnnnnnnnnnnnnnnnnnnnnnnnnnnnnnnnnnnnnnnnnnnnnnnnnnnnnnnnnnnnnnnnnnnnnnnnnnnnnnnnnnnnnnnnnnnnnnnnnnnnnnnnnnnnnnnnnnnnnnnnnnnnnnnnnnnnnnnnnnnnnnnnnnnnnnnnnnnnnnnnnnnnnnnnnnnnnnnnnnnnnnnnnnnnnnnnnnnnnnnnnnnnnnnnnnnnnnnnnnnnnnnnnnnnnnnnnnnnnnnnnnnnnnnnnnnnnnnnnnnnnnnnnnnnnnnnnnnnnnnnnnnnnnnnnnnnnnnnnnnnnnnnnnnnnnnnnnnnnnnnnnnnnnnnnnnnnnnnnnnnnnnnnnnnnnnnnnnnnnnnnnnnnnnnnnnnnnnnnnnnnnnnnnnnnnnnnnnnnnnnnnnnnnnnnnnnnnnnnnnnnnnnnagtccaacccctgtcgcaatggaggtgtttgccattccctgtgggatgacttctcctgttcctgtcctgcccacatgagtgggaaagcctgtgaggaggttcagtggtgtggattcagcccgtgtcctcacgaagcccagtgccagccggtgcttcaaggatttgaatgt

SEQ ID NO: 23894 - DNA, 1162 bp, Macaca Mulatta
gggggggccgtgtagtcgtcgtagtcgctaccgctgctgccgtcgttgttgttgtggtcggtgcgctgagctccgcggctccgagagccggttccgtccctttcccgccgccgccatgaagtggatgttcaaggaggaccactcgctggaacacagatgcgtggagtccgcgaagattcgagcgaaatatcccgacagggttccggtgattgtggaaaaggtctcaggctctcagattgttgacattgacaaacggaagtacttggttccatctgatatcactgtggctcagttcatgtggatcatcaggaaaaggatccagcttccttctgaaaaggcgatcttcctgtttgtggataagacagtcccacagtccagcctaactatgggacagctttacgagaaggaaaaagatgaagatggattcttgtatgtggcctacagcggagagaacacttttggcttctgagggccattgctgggctaggtgcaccgtaactgcttgtgtatcttgtaaatagccagccattttcagttattataccagaacctcttcacatagacctattagtgcatttgtaactggatttatttcttaatatattggaaaggttttgtttccttagatttagtaaattatcatacagagtttttattttgagttgttcttttctgtgcactgttcttcatgggctggtattattccagggaaaacttgttcttttctgggaaaatcatatttttaatggatacttctatatcaaagtgaggtaggcgcggtattaaagtgaaagggaaggtgatacatttattctgggttatgcttgaagtgttagatggctaagtattaaaattatccaaattaaatccttagcagtcagaacactttgcttcactagaatatgccaactgccaatcatgttggactgagctaatttgttcctcttttctgaaactatttaggggaaataattaaacaataaaaaattatctcataaagggcaaaaaaaaaacggagcaggcgtcgcgcccatacccttggtcggcccgccttcggccccttcaaaaaacttttcttaaaacctttcgttttggggcgcccgggggccccagaagggaaaggggaacatggggccataaactgggttccccaagagagaac

SEQ ID NO: 23895 - DNA, 304 bp, Macaca Mulatta
  misc_feature (1)...(304): n = A,T,C or G
atggaaggaactgtaaacctccagctcagtgccaaaagtgtgggtgtgtttgaagctttttataattctgttaannnnnnnnnnnnnnnnnnnnnnnnnnnnnnnnnnnnnnnnnnnnnnnnnnnnnnnnnnnnnnnnnnnnnnnnnnnnnnnnnnnnnnnnnnnnnnnnnnnnnnnnnnnnnnnnnnnnnnnnnnnnnnnnnnnnnnnnnnnnnnnnnnnnagtacacactgcgctgcgacatgaggcggtctctgttggccaaggacttgacaaagacctgtgaatttatcgttcactccgc

SEQ ID NO: 23896 - DNA, 3296 bp, Macaca Mulatta
  misc_feature (1)...(3296): n = A,T,C or G
cagcccagtttactgtcgtggggccagctagtcccatcctggccatagtgggagaaaacactacgttacgctgccatctgtcatccaagaaaaatgctgaggatatggaggtgcggtggttccggtctcagttctcccccgcagtgtttgtgtataagggcaggagagagagaacagaggagcagatggaagagtaccgaggaagaatcacgtttgtgagcaaagacatcagcaggggcagtgtggccctggtcatacacaacgtcacaacccaggagaatggcatctaccgctgttacttccaagaaggcaggtcctacgatgaggccatcctgcgcctcgtggtggcagnnnnnnnnnnnnnnnnnnnnnnnnnnnnnnnnnnnnnnnnnnnnnnnnnnnnnnnnnnnnnnnnnnnnnnnnnnnnnnnnnnnnnnnnnnnnnnnnnnnnnnnnnnnnnnnnnnnnnnnnnnnnnnnnnnnnnnnnnnnnnnnnnnnnnnnnnnnnnnnnnnnnnnnnnnnnnnnnnnnnnnnnnnnnnnnnnnnnnnnnnnnnnnnnnnnnnnnnnnnnnnnnnnnnnnnnnnnnnnnnnnnnnnnnnnnnnnnnnnnnnnnnnnnnnnnnnnnnnnnnnnnnnnnnnnnnnnnnnnnnnncagaatcctttatgcccagcacatctccgtggatggtggccctggctgtcatcctgaccacatctccctggatggtgtccatggctgtcatcctggctgttttcatcatcttcatggctgtgagcatctgttgcatcaagaaacttcaaagggaaaaaaagattctgtcaggggaaaaggaagttgaacaagaggaaaaagaaattgcacagcaacttcaagaagaattgcgatggagaacattcttacatgctgcntgctgatgtggtcctggatccagacaccactcatcccgannnnnnnnnnnnnnnnnnnnnnnnnnnnnnnnnnnnnnnnnnnnnnnnnnnnnnnnnnnnnnnnnnnnnnnnnnnnnnnnnnnnnnnnnnnnnnnnnnnnnnnnnnnnnnnnnnnnnnnnnnnnnnnnnnnnnnnnnnnnnnnnnnnnnnnnnnnnnnnnnnnnnnnnnnnnnnnnnnnnnnnnnnnnnnnnnnnnnnnnnnnnnnnnnnnnnnnnnnnnnnnnnnnnnnnnnnnnnnnnnnnnnnnnnnnnnnnnnnnnnnnnnnnnnnnnnnnnnnnnnnnnnnnnnnnnnnccctttgaaggagtccctttgctgggtgcccatcttcctggactacgaagctggagatgtctccttctacaacatgagggacagatcgcacatctacacatgtccccgttcagcattttccgtgcctgtgaggcccttcttcaggatagggtctggtgacagccccatcttcatctgccctgtactcacaggagccagtggggtcacggtgcctgacgagggcctgacacttcacagagtggggacccagcagagcctgtagaatcaattccctggactcacagccatgcagataagccctggccatctcagcagccactgcacaacactcctaatggaagacatgccctcctcccctctgctcacatgagagaacatcttcccgctgcctttttcacacccactccagccctcagccccagttttctcctcctcactaggccgtggctttagtagctcctttgcttgtaattatgggatggaatccaggcatgggaactagttgtttcatagctcccagccaagaggaaagtgtgagaaactgttgggcagcgaacctgctgtttacatcagaatgaccacattgagcccaatatgccagttggcaccagatgctatggacttggaatgaggccaacaggattcgccaggatgagagagnnnnnnnnnnnnnnnnnnnnnnnnnnnnnnnnnnnnnnnnnnnnnnnnnnnnnnnnnnnnnnnnnnnnnnnnnnnnnnnnnnnnnnnnnnnnnnnnnnnnnnnnnnnnnnnnnnnnnnnnnnnnnnnnnnnnnnnnnnnnnnnnnnnnnnnnnnnnnnnnnnnnnnnnnnnnnnnnnnnnnnnnnnnnnnnnnnnnnnnnnnnnnnnnnnnnnnnnnnnnnnnnnnnnnnnnnnnnnnnnnnnnnnnnnnnnnnnnnnnnnnnnnnnnnnnnnnnnnnnnnnnnnnnnnnnnnnnnnnnnnnnnnnnnnnnnnnnnnnnnnnnnnnnnnnnnnnnnnnnnnnnnnnnnnnnnnnnnnnnnnnnnnnnnnnnnnnnnnnnnnnnnnnnnnnnnnnnnnnnnnnnnnnnnnnnnnnnnnnnnnnnnnnnnnnnnnnnnnnnnnnnnnnnnnnnnnnnnnnnnnnnnnnnnnnnnnnnnnnnnnnnnnnnnnnnnnnnnnnnnnnnnnnnnnnnnnnnnnnnnnnnnnnnnnnnnnnnnnnnnnnnnnnnnnnnnnnnnnnnnnnnnnnnnnnnnnnnnnnnnnnnnnnnnnnnnnnnnnnnnnnnnnnnnnnnnnnnnnnnnnnnnnnnnnnnnnnnnnnnnnnnnnnnnnnnnnnnnnnnnnnnnnnnnnnnnnnnnnnnnnnnnnnnnnnnnnnnnnnnnnnnnnnnnnnnnnnnnnnnnnnnnnnnnnnnnnnnnnnnnctttactgcaccctactgagagaatgagatgaaaaatggttaatgtttcattattattattgtgaaaatagtgttaacactggggactccttaagagtatatcagagttcgtgctaggaatcccaagaccgcatttggaaactagaatagtggatcctggaagttaatccatgtgctggttaattttagatgtcaacttgactggattatggaatacctagacaactggtacaacattatttctggatgtgtctgtgagtgtgtttccagaagagactggcatgtgagtcagtgggaaattctcccgtccaattggctgggggcccaatagaaccaaaaggcagaggaaagacaaattcttctctcctctggagctgagacactcttcttcttctgcccttggacatcagaactcctagctcttcagcctttgaacttcaggacttgtaccaggaggccctgggttctcaggcctttggctttggactgagagttacacaaccagcttccctggttctgaggctttcggacttcaaatgagccatgctaccagcatcccagggtctccagcctacagacgggctgttgtgtgatttcttagcctctatattcacatcagccaatttccttaataaatgtctgctcataaatct

SEQ ID NO: 23897 - DNA, 1081 bp, Macaca Mulatta
ggggcttctgcgcatgcgcggtgaggcctgcgtgaccgaccttcagcagggctggggctaccatgttctctcgcgcgggcgtagctgggctgtcggcctggaccttgcagcctcaatggattcaagttcgaaatatggcaactttgaaagatattaccaggagactaaagtccatcaaaaacatccagaaaattaccaagtctatgaaaatggtagcagcagcaaaatatgcccgagctgagagagagctgaaaccagctcgaatatatggattgggatctttggctttgtatgaaaaagctgatatcaaggttcctgaagacaagaagaaacacctccttattggtgtgtcctcagatcgaggactgtgtggtgctattcattcctccatcgctaaacagatgaaaagtgaggttgctacgctaacagcagctgggaaagaagttatgcttgttggaattggtgacaaaatcagaggcatactttataggactcattctgaccagtttctggtggcattcaaagaagtgggaagaaagccccccacttttggagatgcgtcagtcattgcccttgaattactaaattctggatatgaatttgatgaaggctccatcatctttaatcgattcaggtctgtcatctcctataagacagaagaaaagcccatcttttcccttaataccattgcaagtgctgagagcatgagtatctacgatgatattgatgctgatgtgctacaaaattaccaagaatacaatctggccaacatcatctactactctctgaaggagtccagcactagtgagcagagtgccagaatgacaggcatggacaatgccagcaagaatgcttctgagatgattgacaaattgacattgacattcaaccgtacccgccaagctgtcatcacaaaagaattgattgaaattatctctggtgctcggctctggattaatgaaaatcaagctccatccctcagacagaggtaaagaaaggaaattcagccagttgattttgtttttagcatactgctgtctttgtccgaagaaactgttccctcattatttgaattactgaa

SEQ ID NO: 23898 - DNA, 388 bp, Macaca Mulatta
  misc_feature (1)...(388): n = A,T,C or G
ggggctctgggagtagttcgatcctcacagcctcgtaaaaggcggtgtgacagttttgccacaggcagaaggaagaaacgacgtcgtagccagtagggagcagcaggaccatctgaccccacttgccagtccctaaaggtgggtgccccagagtagattccagccctgctgcccaccaatggagatcccaatgttgaatctcatcccaatgttgttttgttgttctgcaaaagtggcaagcatggagagagaggtcagactggctaggctgcagggggagtcacctttggaggcagctatagagaaagaaaacgaataaagtgtttttgnnnnnnnnnnnnnnnnnnnnnnnnnnnnnnnnnnnnnnnnnnnnnnnnnnnnnnnnnnc

SEQ ID NO: 23899 - DNA, 116 bp, Macaca Mulatta
tcttgggtgcttggcgcttttgctcttctgtgtcttcttggcctcacctggtcatttgggttgctttttattaacgaggaaactattgtgatgggcatatctcttcaccatatttt

SEQ ID NO: 23900 - DNA, 754 bp, Macaca Mulatta
  misc_feature (1)...(754): n = A,T,C or G
cagtggctatgcatccgctcttgatgtcttgggaaagaatagtgctccgcagccgactgcctccccagccacttcacatgtaccactgcaatgtgacgctccttctgtccccacctgttcgaagacaacaacctccgtttctttataaacagtcggctttttcttaacaagccctcactgtacagaacagcccgttgatggtttatttggggtccccctctccccccagcccttttttctgttggtttagcacaaatacttccctcctccggcacctccaaacctaccccacagtcagtgtacttgttttatatatatttaatcttattcaatggaaaccatgcttttgtcgttttatactttgctaggtagactttattaccccccgacgatgccctnnnnnnnnnnnnnnnnnnnnnnnnnnnnnnnngggttccagtcttaattcattttccgtgccaggttttatttcgtgtgtgtgtgagtgtgttccgttttgnnnnnnnnnnnnnnnnnnnnnnnntagttgtttgnnnnnnnnnnnnnnnnnnncgcgcccctccagtcccatacttcacagcactctggtgcaggnnnnnnnnnnnnnnnnnnnnnnnnnnnnnnnnnnnnnnnnnnnnnnnnggggggggccccggtaccaattcgccctaagtgagttgttacaatcactgcccgcgtttacacgtgtgactggacacctgcgtacattaccctctcgggaggnggcacaccc

SEQ ID NO: 23901 - DNA, 912 bp, Macaca Mulatta
cctatcattttgccctaatgaagtatttctgctttaactattgtaggttcgttttccagtttggcagcagcactacaaatttcaacttcacaaacaacaatccatcaggagtgttcacatttggtgcaaattctagcacacctgcagcctcagcccagccttcaggctccgggggctttccatttaaccagtcgccagcagcatttacagtggggtaagagaattttttattgaaatggagaattcacattggtaagggtatgtgcatgtatatgttttgtttttaaaagtcatcaagattcagtatggtttgggtaaaattaaatatattctccaacataaatttaccgtactacaattctggagagttgtattacagtttgagaaaaaaataacagtagcgtgtgtgttaggtatagcagaaaatgtacataacaatgtgagtctgctcccccgccaccctacccttctgctgctcatggtaaatgttagcatttggaaattttgctcagagcatcatgtcacattatgaagtttttatttttcacaggtcaaatgggaaaaatgtgttctcttctggaacttcagtctctggtcggaagataaagactgctgttagacgcaggaaataaaggtcacattggtgttatacgcaattttaacaacagctggtgccctgctttcagatactggattgtactttgtgctggggttatctgaagtcagatctgcctaaggacttctttaattttggaattttcctcctttttcgttacagaagccccaacccgcctcacccaccctttttaaaaaatataatagctagactggtgactgattcttcagcaaaaatattttatgatccagcagattattcactgatttgacatagtctggctgtacccaggaatg

SEQ ID NO: 23902 - DNA, 145 bp, Macaca Mulatta
aggttggaagtacaagcagatgtacagaaagaacggtacagtctaagtggagaatctggcacagtcagcttgggaacagttagtgataatgccagcaccaaagcaatggcaggatccattctgaattcctacatcccattggaca

SEQ ID NO: 23903 - DNA, 101 bp, Macaca Mulatta
caagttctggagcatttgtctcagcaaagtgaaagtcagtacctaaagattctaacaagccttgctgaagttgctacaacaaatggtcataaactgcttag

SEQ ID NO: 23904 - DNA, 864 bp, Macaca Mulatta
  misc_feature (1)...(864): n = A,T,C or G
gttcagaggaagccagagccggagcagtggccggcccggccggcgacatggagccgctgtaccagcaaacgcacaannnnnnnnnnnnnnnnnnnnnnnnnnnnnnnnnnnnnnnnnnnnnnnnnnnnnnnnnnnnnnnntagtagaaaacgaaatccaagcaagcatagaccagatattcagccgtctagaacgtctggagattttgtccagcaaggagccccctaacaaaaggcaaaatgccnnnnnnnnnnnnnnnnnnnnnnnnnnnnnnnnnnnnnnnnnnnnnnnnnnnnnnnnnnnnnnnnnnnnnnnnnnnnnnnnnnnnnnnnnnnnnnnnnnnnnnnnnnnnnnnnnnnnnnnnnnnnnnnnnnnnnnnnnnnnnnnnnnnnnnnnnnnnnnnnnnnnnnnnnnnnnnnnnnnnnnnnnnnnnnnnnnnnnnnnnnnnnnnnnnnnnnnnnnnnnnnnnnnnnnnnnnnnnnnnnnnnnnnnnnnnnnnnnnnnnnnnnnnnnnnnnnnnnnnnnnnnnnnnnnnnnnnnnnnnnnnnnnnnnnnnnnnnnnnnnnnnnnnnnnnnnnnnnnnnnnnnnnnnnnnnnnnnnnnnnnnnnnnnnnnnnnnnnnnnnnaggcacccaaggatcctgccagacagcacactgtgaaggaaggtctgcagggagcagctgagccatttgttcgtgaactctgggaggcaggagtccccgcacccatcatgcgtggaccgataggacgtcttttcatggtgtgcaccagtgctttccacatttgaccagttggcttagatgaactctcatgctgcaccttcagagccagttctctaatttgggataaaaatgcagaggt

SEQ ID NO: 23905 - DNA, 774 bp, Macaca Mulatta
cacccccatgtacttcttcctggccacctgtccctggttgatttctgtctggccaccaacaccatccccaagatgctggtgagccttcaaaccgggagcaaggccatctcttatccctgctgcctgacccagatgtacttcttccatttcttcggcatcgtggacagcatcataatcgccgtgatggcttatgaccggttcgtggccatctgccacccgttgcactacgccacgatcatgagcccacgcctctgtggtctgctggtcggcgtcccctgggcattttcctgcttcatctctctcacccacatcctcctgatggcccgcctcgttttctgcggcagccacgaggtgcctcactacttctgcgacctcactcccatcctccgactttcgtgcacagacacatcagtgaacaggatcttcatcctcattgtggcagggatggtgatagccacgcccttcgtctgcatcctggcctcctatgctcgcatccttgcagccgtcatgaaggtcccctccgcaggcggcaggaagaaagccttctccacctgcagctcccacctgtctgtggttgctctcttctatgggaccaccattggcgtctatctgtgtccctcctccgtccgcacggctgtgaaggagaaagcttctgccgtgatgtacacagcagtcacccccatgctgaaccccttcatctacagcttgaggaacagagacctgaaaggggctctcaggaagctggtcaatagaaagatcacctcatcttcctga

SEQ ID NO: 23906 - DNA, 372 bp, Macaca Mulatta
atgtgagtctcagagactataaccaggccagatattaaagatgctttgcctttctcatcctggtgttgcaaaacacaaagaggccaacttacgtttactcctgactcccaaagcccaacacttgacagtcatctttcttgtatttcagggttcctggtggcctggcccatggtcctcctgactgtcctcctggcttggctgttctgagagctccactgagcatctggccttgaagttgtgttcttccctctggcaatggctcccttcactacttctgctttccactccaattcacccagtcttggtattaacagactcaaggccaggctaggtttcgggaaagggaacaactttcaccttctttaaaactct

SEQ ID NO: 23907 - DNA, 616 bp, Macaca Mulatta
  misc_feature (1)...(616): n = A,T,C or G
ggggggagcgggagatgggatcaaacctgacagccagcgaggaggagttcctgcgcacctatgcaggggtggtcaacagccagctcagccagctccctccgcactccattgaccagggtgcagaggacgtggtgatggcattttccaggtcggagacagaagaccgaaggcagtagctgcaaagcccttggaacaccctggatgctgttgagggccaagagatctgtgtggctcctgggccggctgagtggcagcagacccccttgccccacctcccacttcccctacccaaccctgccctgccccatcccacctcacagctactcagtggggctggcatcaagggagacaccagtggtgcgtttatgattggcttaaagggatggacttgtgattggctgcaggaagaaannnnnnnnnnnnnnnnnncttgaccaacagaaaccttttatttttatttctgactcnnnnnnnnnnnnnnnnnnncgcctcggtatctggcttccctggaagctgtccgagctctggtgttttagttaggttatttttttagaaatgtgaagaggtctgattggctgcttaactggnaagggatgtgattggctgttaatgggaa

SEQ ID NO: 23908 - DNA, 345 bp, Macaca Mulatta
tccccgcctaccaaaggacctttggccttcatcggtccttgtgacagaattgggcttgtggcctcaggtcattaggatccaccgatggcggggacatttgaacaccaccagccccgtgaccccggctggccgcacgtgtaaaaagccccgtgtgcaggcagcagggcggcgtggaagcttcaggcagacgcgggacggggagaacccaaatgtccaagttgctgaactgatgatcactggagaaggagaaactatccaccaggacagatgacacctcgaaaccaagtagaattctctgtgaagatgggagcgctgtagaattttaagtaatttaattggaaacct

SEQ ID NO: 23909 - DNA, 720 bp, Macaca Mulatta
tatttgacaaaggagtttctatggccatgttttgcaaattttgaattttttgatcctatattcaatactgatacttttactatgatgtgttccataaatgtaagtagaaatttttctactttaaggtgattgcaaaagttgcgtctctatttcttccacttcagtcttcctgcctttccctatatgctggctgtctctgtaagactcatcaaaaaatattatttaccctctgaaggaggcagctccataaacttgctttgcttgatcttcccatactaagagtacctctcccttcaatgcatactctgcactcagagaaactggttacaggtgacctgcagtgtcctggtaggtgactgggtgaatgggaagacagaggaggaagatggcttattaacctttggttctgattacataaactaattatgatgtatgttttgatatttttaagggtgaatgtttcttctccacctttgttaaaggatgcgcttctaaactcattggggaaaaggtacaataagacagcagctcaaattgttttgcgtttcaacatccagcgaggggtggttgtcattcctaaaagcttcaatcttgaaaggatcaaagaaaattttcaggtaagagaattgcttttggaaatgtgaaaagatgggtatgtttgctgtttttgcttttatagaatatgttcagcttaataggaaacttgtaacactctcatat

SEQ ID NO: 23910 - DNA, 266 bp, Macaca Mulatta
tacggggaccccaagcagtgggcagccttcctaggcacgccgttcctgagcggcgcggaggggcagctggagcgcgtggcgcgcatctacaagcacccgttctacaatctctacacgctcgactacgacgtggcgctgctggagctggcggggccggtgcgccgcagccgcctggtgcgtcccatctgcctgcccgagcccgtgccgcgacccccagacggtgcgcgctgcgtcatcaccggctggggctcggtgcgcgaaggagg

SEQ ID NO: 23911 - DNA, 2407 bp, Macaca Mulatta
  misc_feature (1)...(2407): n = A,T,C or G
agggagaaagtgagaagggaaatcggaaagagaaaggggaggaaaccgcagnnnnnnnnnnnnnnnnnnnnnnnnnnnnnnnnnnnnnnnnnnnnnnnnnnnnnnnnnnnnnnnnnnnnnnnnnnnnnnnnnnnnnnnnnnnnnnnnnnnnnnnnnnnnnnnnnnnnnnnnnnnnnnnnnnnnnnnnnnnnnnnnnnnnnnnnnnnnnnnnnnnnnnnnnnnnnnnnnnnnnnnnnnnnnnnnnnnnnnnnnnnnnnnnnnnnnnnnnnnnnnnnnnnnnnnnnnnnnnnnnnnnnnnnnnnnnnnnnnnnnnnnnnnnnnnnnnnnnnnnnnnnnnnnnnnnnnnnnnnnnnnnnnnnnnnnnnnnnnnnnnnnnnnnnnnnnnnnnnnnnnnnnnnnnnnnnnnnnnnnnnnnnnnnnnnnnnnnnnnnnnnnnnnnnnnnnnnnnnnnnnnnnnnnnnnnnnnnnnnnnnnnnnnnnnnnnnnnnnnnnnnnnnnnnnnnnnnnnnnnnnnnnnnnnnnnnnnnnnnnnnnnnnnnnnnnnnnnnnnnnnnnnnnnnnnnnnnnnnnnnnnnnnnnnnnnnnnnnnnnnnnnnnnnnnnnnnnnnnnnnnnnnnnnnnnnnnnnnnnnnnnnnnnnnnnnnnnnnnnnnnnnnnnnnnnnnnnnnnnnnnnnnnnnnnnnnnnnnnnnnnnnnnnnnnnnnnnnnnnnnnnnnnnnnnnnnnnnnnnnnnnnnnnnnnnnnnnnnnnnnnnnnnnnnnnnnnnnnnnacagccgcgaggagagtgtcctgggcagtgtcctgctccccagctacaatattaggccagatgggccgggagccccccgagggcggcgcttcaccttcaccgnnnnnnnnnnnnnnnnnnnnnnnnnnnnnnnnnnnnnnnnnnnnnnnnnnnnnnnnnnnnnnnnnnnnnnnnnnnnnnnnnnnnnnnnnnnnnnnnnnnnnnnnnnnnntgggcaaaccagatcacccgcacggccccagcccggggagggccctggcggccccggtggtcccccggaggtgagcagcggggaagaggggcgcatctcggaatcaccggaagtggctcgactctccagaggtcgtggtagacccaggctgctcactcccagccccacaattgacctccagtctggactccagatccggcgggcaagaagccccgnnnnnnnnnnnnnnnnnnnnnnnnnnnnnnnnnnnnnnnnnnnnnnnnnnnnnnnnnnnnnnnnnnnnnnnnnnnnnnnnnnnnnnnnnnnnnnnnnnnnnnnnnnnnnnnnnnnnnnnnnnnnnnnnnnnnnnnnnnnnnnnnnnnnnnnnnnnnnnnnnnnnnnnnnnnnnnnnnnnnnnnnnnnnnnnnnnnnnnnnnnnnnnnnnnnnnnnnnnnnnnnnnnnnnnnnnnnnnnnnnnnnnnnnnnnnnnnnnnnnnnnnnnnnnnnnnnnnnnnnnnnnnnnnnnnnnnnnnnnnnnnnnnnnnnnnnnnnnnnnnnnnnnnnnnnnnnnnnnnnnnnnnnnnnnnnnnnnnnnnnnnnnnnnnnnnnnnnnnnnnnnnnnnnnnnnnnnnnnnnnnnnnnnnnnnnnnnnnnnnnnnnnnnnnnnnnnnnnnnnnnnnnnnnnnnnnnnnnnnnnnnnnnnnnnnnnnnnnnnnnnaggagcaactagaagcagctctggagttgacccggcagcagctgggccaagccaccagggaggctggggctcccgggagggcctggggtcgccagcgcctcctgcaggaccggctggtcagtgtgagggcgaccctctgtcacttgactcagnnnnnnnnnnnnnnnnnnnnnnnnnnnnnnnnnnnnnnnnnnnnnnnnnnnnnnnnnnnnnnnnnnnnnnnnnnnnnnnnnnnnnnnnnnnnnnnnnnnnnnnnnnnnnnnnnnnnnnnnnnnnnnnnnnnnnnnnnnnnnnnnnnnnnnnnnnnnnnnnnnnnnnnnnnnnnnnnnnnnnnnnnnnnnnnnnnnnnnnnnnnnnnnnnnnnnnnnnnnnnnnnnnnnnnnnnnnnnnnnnnnnnnnnnnnnnnnnnnnnnnnnnnnnnnnnnnnnnnnnnnnnnnnnnnnnnnnnnnnnnnnnnnnnnnnnnnnnnnnnnnnnnnnnnnnnnnnnnnnnnnnnnnnnnnnnnnnnnnnnnnnnnnnnnnnnnnnnnnnnnnnnnnnnnnnnnnnnnnnnnnnnnnnnnnnnnnaggccccggtggcccggccccgaatgagtgcccaggagcagctggagcggatgcgcagaaaccaggaatgtggacggcccctccctcgcccgacctccccgcggctcctcaccctgggaaggacactgtccccagccagacgccagcctgatgtggagcaaag

SEQ ID NO: 23912 - DNA, 1234 bp, Macaca Mulatta
gggattccagcggctgacagcacccgggccgagatgtctccctcagtggccttagccgtgctggcgctactctctctttctggcctggaggctatccagcgtactccaaagattcaggtttactcacgccatccaccagagaatggaaagccaaatttcctgaattgctatgtgtctggatttcatccatctgatattgaagttgacttactgaagaatggagagaaaatgggaaaagtggagcattcagacttgtctttcagcaaagactggtctttctatctcttgtactacactgaattcacccccaatgaaaaaaatgaagtatgcctgccgtgtgaaccatggtgactttgtcagggcaccaggaatagttattggctgtggggatctggtgaccttgtcaagcaagcatttcattgggagggttttgaagaatgccgcttcattttcagaatatgggtatgaaattcttcaaatattcctgccttccccttgcctttttttctaaaatattagatatatagcgcttttataaccaggtctatattgcatcaatgaatattggctaccagatgtgttgttgatattgtcgtatcgttttaaatacactcaaggggccagaaatgggaatacccctctccctacttttacaccaaaagtattttcacagaacccttttttacaaatatccgtttgggccccttagataaacatttctcctaaacggagttatttctgttgtagaaaggaggtaaaatacccttaggggggagctcccaaattccccctatcagatctcttatctttaaaagaggtaaaggaggggccttatatgggaccttaatatctctatctaagaattaactagggttcgctcggcgggaaaaaccactcccgtttaaaaacaacgactcctagtgtcacagaagcatattctcccgtaacaccctgtgctaattctctttgttccgcgagggggggaggtcccaaggatacatccctgagaggtgcgctttcctttcatgacgaacgccacttcctatagatcattaatatgccatgtaaacacgacacctgagggagaaaagagagaaagatataccgtatcactagagtcagatataattaactatataggtatcgataaacttatagtcacacaatttcattaataatgatcacactcttgtgctaccgtcagagaaaaaatatttctgggcaatagggaaaa

SEQ ID NO: 23913 - DNA, 412 bp, Macaca Mulatta
tttccaaggttctagtgctttgttgtcagggtgccataggccctctgtagccctctccagaatggtgccctccctgggcacctgttagagggcccccatcttcactctaattccttccgtctaccccctcacattgtgccttagggatgttggggcctccagatacatttcagtgggcacttttcttacttgaagttggagaaagaacagcagaagaaaaccttttactttctgcccattgacctggtaggctggaggtctgggaaagcggggctccactctatatcaacctgttaactgagaggccctgagaatctaccaactgcaaggggaggcactagctttgatgctgtgaggatcaaaaagataagacatgccccaaagagtatacaatctggtttgagaaatagac

SEQ ID NO: 23914 - DNA, 668 bp, Macaca Mulatta
tacattttccttctcctattgtgggtctcgggaaatagcccacttcttctgtgagttcccttccctactaatcctctcatgcaatgacacatcaatatttgaaaaggttcttttcatctgctgtatagtaatgcttgttttccccgttgcaatcatcattgcttcctatgctcgagttattctggctgtgattcacatgggatctggagagggtcatcgcaaagcttttactacctgttcctctcacctcacagtggtgggaatgtactatggagcaggtttgtttatgtacatacgccccacatctgatcgatccccaataaaggacaagatggtgtctgtattctacaccattctcactcccatgctgaatcccctcatctacagcctccgcaacaaggaagtgaccagagcattcaagaagatgttaggaaagggaaagtctggagagagagttacctcataaactttatgttttgatgtctgctaaattattctttttaatatcctcctttttctattaagtcctaaaagtatcattgattgtgtgcattgctcaacatatttatgggcacctatattatttatttcagataaactattttagatatctttacattcaattcagttgtgactacaatgtaagtcgttttaaataaagacattaa

SEQ ID NO: 23915 - DNA, 770 bp, Macaca Mulatta
gggtaggatgcagtgaagaccttggaagagacagcacaaaactgcacttgatgaattttactgcaacatacacaagacatcctcctctctcaccaaatggcaaagctctttgtcatgccgcatcttcccccttaccaggagatataaaggttttatcagagaaagcagtcctccagtcatggacagacaatgagagatccatccctaatgatggtacatgctttcaggaacacagttcttatggcagaaattctctttctctggaagacaattcctgggtatttccaagtcctcctaaatcaagtgagacggcatttggggaaactaaaagtaaaactttacctttacccaaccttccaccactgcattacttggatcagcataatcagaaccgcctttataagaattaatttggaagagattcacgatttgaccatgaggacactacctctttcagtggtcctcccaagaaattatttaacaaactgaaaggggatttcgattaaaattttgcagagttcttcagtaactatatttgaacatactgtacaatatttacaaaaaaccaacatagttgggttttctagtatgaaagagcaccctctagctccatattctaagaatccgaaatacactactctactaattaataagtaaacttaaggtgttctaaaaagagaactctgcccttcaattattggaaaattttgcccctcacaaaaaaggaattggagattgttgaacgtggtttttctactacgaaatggtct

SEQ ID NO: 23916 - DNA, 1366 bp, Macaca Mulatta
  misc_feature (1)...(1366): n = A,T,C or G
cgtgggagcagtggggttcgacggcgcggccgctaggccgccatggccgctcacgggaagctgcggcgggagcgggggctgcaggctgagtatgagacgcaagtcaaannnnnnnnnnnnnnnnnnnnnnnnnnnnnnnnnnnnnnnnnnnnnnnnnnnnnnnnnnnnnnnnnnnnnnnnnnnnnnnnnnnnnnnnnnnnnnnnnnnnnnnnnnnnnnnnnnnnnnnnnnnnnnnnnnnnnnnnnnnnnnnnnnnnnnnnnnnnnnnnnnnnnnnnnnnnnnnnnnnnnnnnnnnnnnnnnnnnnnnnnnnnnnnnnnnnnnnnnnnnnnnnnnnnnnnnnnnnnnnnnnnnnnnnnnnnnnnnnnnnnnnnnnnnnnnnnnnnnnnnnnnnnnnnnnnnnnnnnnnnnnnnnnnnnnnnnnnnnnnnnnnnnnnnnnnnnnnnnnnnnnnnnnnnnnnnnnnnnnnnnnnnnnnnnnnnnnnnnnnnnnnnnnnnnnnnnnnnnnnnnnnnnnnnnnnnnnnnnnnnnnnnnnnnnnnnnnnnnnnnnnnnnnnnnnnnnnnnnnnnnnnnnnnnnnnnnnnnnnnnnnnnnnnnnnnnnnnnnnnnnnnnnnnnnnnnnnnnnnnnnnnnnnnnnnnnnnnnnnnnnnnnnnnnnnnnnnnnnnnnnnnnnnnnnnnnnnnnnnnnnnnnnnnnnnnnnnnnnnnnnnnnnnnnnnnnnnnnnnnnnnnnnnnnnnnnnnnnnnnnnnnnnnnnnnnnnnnnnnnnnnnnnnnnnnnnnnnnnnnnnnnnnnnnnnnnnnnnnnnnnnnnnnnnnnnnnnnnnnnnnnnnnnnnnnnnnnnnnnnnnnnnnnnnnnnnnnnnnnnnnnnnnnnnnnnnnnnnnnnnnnnnnnnnnnnnnnnnnnnnnnnnnnnnnnnnnnnnnnnnnnnnnnnnnnnnnnnnnnnnnnnnnnnnnnnnnnnnnnnnnnnnnnnnnnnnnnnnnnnnnnnnnnnnnnnnnnnnnnnnnnnnnnnnnnnnnnnnnnnnnnnnnnnnnnnnnnnnnnnnnnnnnnnnnnnnnnnnnnnnnnnnnnnnnnnnnnnnnnnnnnnnnnnnnnnnnnnnnnnnnnnnnnnnnnnnnnnnnnnnnnnnnnnnnnnnnnnnnnnnnnnnnnnnnnnnnnnnnnnnnnnnnaggtgaacaagacactgaaggcgacactgcaggccctgctggaggtggtggcctcggatgacggggatgtgctcgactccttccagaccagcccctccaccgagtccctcaagtccaccagctcagacccaggcagccggcaggcaggccggaggcgtggccagcagcaggagaccgaaaccttctacctcac

SEQ ID NO: 23917 - DNA, 3820 bp, Macaca Mulatta
  misc_feature (1)...(3820): n = A,T,C or G
taagaaatgtggaaaatcttttgcttctggttcagcactacttcaacatcagcgaattcacacgggtgagaaaccctatcattgtaaggaatgtgaaaaatcttttacttttcgctcagggctaattggacatcaggcagttcacactggtgagaaaccctatgattgtaaagaatgtggaaaatcttttacttctcgctcagcactaattcaacatcagcgaattcacactggtgagaaaccctatcactgtaaggaatgtggaaaatcttttgctgttggctcaacattaattcaacatcagcaaattcacactggtgagaaaccctatgattgtaaggaatgtgggaaatcttttactctccgctcagcactaattcaacatcggccaattcacactggtgagaaaccctgtgattgtaaggaaagtgggaaatcttttacttctcactcaacactaattcaacatcagcaaattcacactggtgagaaaccctgtgattgtaaggaatgtggaaaatcttttacttctcactcaacactaattcaacatcagcaaatacacactggtgagaagctctatgattgtaaggaatgtgggaaatcttttgcttctcattcaacactaattcaacatcagcgaattcacactggtgagaaaccctatcattgnntcaacatcagagaattcatactggtgagaaaccttatgaatgtaaagaatgtgggaaatcttttactttctgctcaggactaattcaacatcagcaaaatcacactggtgagaaaccctgtgattgtaaggaaagtgggaaatcttttacttctcactcaacactaattcaacatcagcaaattcacactggtgagaaaccctgtgattgtaaggaatgtggaaaatcttttacttctcactcaacactaattcaacatcagcaaatacacactggtgagaagctctatgattgttaagaaatgtggaaaatcttttgcttctggttcagcactacttcaacatcagcgaattcacacgggtgagaaaccctatcattgtaaggaatgtgaaaaatcttttacttttcgctcagggctaattggacatcaggcagttcacactggtgagaaaccctatgattgtaaagaatgtggaaaatcttttacttctcgctcagcactaattcaacatcagcgaattcacactggtgagaaaccctatcactgtaaggaatgtggaaaatcttttgctgttggctcaacattaattcaacatcagcaaattcacactggtgagaaaccctatgattgtaaggaatgtgggaannnnnnnnnnnnnnnnnnnnnnnnnnnnnnnnnnnnnnnnnnnnncctatgattgttaagaaatgtggaaaatcttttgcttctggttcagcactacttcaacatcagcgaattcacacgggtgagaaaccctatcattgtaaggaatgtgaaaaatcttttacttttcgctcagggctaattggacatcaggcagttcacactggtgagaaaccctatgattgtaaagaatgtggaaaatcttttacttctcgctcagcactaattcaacatcagcgaattcacactggtgagaaaccctatcactgtaaggaatgtggaaaatcttttgctgttggctcaacattaattcaacatcagcaaattcacactggtgagaaaccctatgattgtaaggaatgtgggaaggcctttagacttcgtttacgacttactcaacatcagagaattcatactggtgagaaaccttatgaatgtaaagaatgtgggaaatcttttactttctgctcaggactaattcaacatcagcaaaatcacactggtgagaaaccctgtgattgtaaggaaagtgggaaatcttttacttctcactcaacactaattcaacatcagcaaattcacactggtgagaaaccctgtgattgtaaggaatgtggaaaatcttttacttctcactcaacactaattcaacatcagcaaatacacactggtgagaagctctatgattgtaaggaatgtgggaaatcttttgcttctcattcaacactaattcaacatcagcgaattcacactggtgagaaaccctatcattgtaaggaatgtgggaaatcttttactctccgctcagcactaattcaacatcggccaattcacactggtgagaaacnnnnnnnnnnnnnnnnnnnnnnnnnnnnnnnnnnnnnnnaattcacactggtgagaaaccctatgaatgtccggaatgtggaaaggcctttagacagcgtacgtaccttaatcaacatcagagaattcatactggtgagaaaccttatgaatgtaaagaatgtgggaaannnnnnnnnnnnnnnnnnnnnnnnnnnnnnnnnnnnnnnnnnnnnnnntaagaaatgtggaaaatcttttgcttctggttcagcactacttcaacatcagcgaattcacacgggtgagaaaccctatcattgtaaggaatgtgaaaaatcttttacttttcgctcagggctaattggacatcaggcagttcacactggtgagaaaccctatgattgtaaagaatgtggaaaatcttttacttctcgctcagcactaattcaacatcagcgaattcacactggtgagaaaccctatcactgtaaggaatgtggaaaatcttttgctgttggctcaacattaattcaacatcagcaaattcacactggtgagaaaccctatgattgtaaggaatgtgggaaggcctttagacttcgtttacgacttactcaacatcaacaaatccatactggtgagaaaccgtatcaatgtcaggaatgtgggaaagcctttatcagtgtctcaggactcacccaacatcacagaattcacactggtgagaaaccctatgaatgtccggaatgtggaaaggcctttagacagcgtacgtaccttaatcaacatcagagaattcatactggtgagaaaccttatgaatgtaaagaatgtgggaaatcttttactttctgctcaggactaattcaacatcagcaaaatcacactggtgagaaaccctgtgattgtaaggaaagtgggaaatcttttacttctcactcaacactaattcaacatcagcaaattcacactggtgagaaaccctgtgattgtaaggaatgtggaaaatcttttacttctcactcaacactaattcaacatcagcaaatacacactggtgagaagctctatgattgtaaggaatgtgggaaatcttttgcttctcattcaacactaattcaacatcagcgaattcacactggtgagaaaccctatcattgtaaggaatgtgggaaatcttttactctccgctcagcactaattcaacatcggccaattcacactggtgagaaacgctacagtgtaaagaatgtgnnnnnnnnnnnnnnnnnnnnnnnnnnnnnnnnnnnnnnnnnnnnnnnnnnnnnnnnnnnnnnnnnnnnnnnnnnnnnnnnnnnnnnnnnnnnnnnnnnnnnnnnnnnnnnnnnnnnnnnnnnnnnnnnnnnnnnnnnnnnnnnnnnnnnnnnnnnnnnnnnnnnnnnnnnnnnnnnnnnnnnnnnnnnnnnnnnnnnnnnnntatgattgtaaggaatgtgggaaatcttttgcttctcattcaacactaattcaacatcagcgaattcacactggtgagaaaccctatcattgtaaggaatgtgggaaatcttttactctccgctcagcactaattcaacatcagcaaattcacactggtgagaaaccctgtgattgt

SEQ ID NO: 23918 - DNA, 483 bp, Macaca Mulatta
  misc_feature (1)...(483): n = A,T,C or G
gtgcactagatctatctgatgtacatcctccaccaaagtcaccagagggaaaaacaagtgcacagacaacaccaagtaagnnnnnnnnnnnnnnnnnnnnnnnnnnnnnnnnnnnnnnnnnnnnnnnnnnnnnnnnnnnnnnnnnnnnnnnnnnnnnnnnnnnnnnnnnnnnnnnnnnnnnnnnnnnnnnnnnnnnnnnnnnnnnnnnnnnnnnnnnnnnnnnnnnnnnnnnnnnnnnnnnnnnnnnnnnnnnnnnnnnnnnnnnnnnnnnnnnnnnnnnnnnnnnnnnnnnnnnnnnnnnnnnnnnnnnnnnnnnnnnnnnnnnnnnnnnnnnnnnnnnnnnnnnnnnnnnnnnnnnnnnnnnnnnnnnnnnnaacctaggaagcaaccaggaagcctggcctcgctctcggatgcaccccccttaaaaagtggactcagctccctggcgggggccccttccttaaaagactctgagagtaa

SEQ ID NO: 23919 - DNA, 716 bp, Macaca Mulatta
aggggagggaagaagaggaataaaaactatgtattgggtacaatgtacactactcagatgaagagtgcactaaagtctcagacttcaccattatataattcatccatgtaaccaaaaaccacttgtaccccaaaagctattgaaataaaaacaaactaaaaagaaaaatacatttaatattttcaaaaatttagtgcctattaaacattcattcagcaatggagtataaggtgtgggccaggtatctgtcctaggtcctgggaactcagcagtgagaaagacagacacaaatccctacactagtggaacttgcattctaactgatatacctataattactaaacaaaatgaggacttgaaaaagagaaatagaaggaagtattgtgagtctgggggagaagaaagatacacacaagagaagagagaattatggagaaattacaagataactcctgaaagggtaggggctgggaacatgagaagggagctcactaaaccattcacaaatctgtttggtccaatggcaacctcacctgggcatggcatcaaagagaagctccaagtggtggataaggtgactggaaggatagacgactcaacctggaactcaaaggtcatgatgagcatccaaaaggcaagaactgaatgtgcccagaagtccagatcaaaaggaaaacccaaaagtgaacctgtggatttcactgttctaagctccc

SEQ ID NO: 23920 - DNA, 129 bp, Macaca Mulatta
gcagttctcccagcaggaggagaagaggcagaagtcggagcggctgcagcaacagcagaaacacgagaaccagatgcgggacatgctggcgcagtgcgagagcaatatgagcgagctgcagcagctgca

SEQ ID NO: 23921 - DNA, 129 bp, Macaca Mulatta
agggacaggtgacattcagggatgtggctatagaattctctcaggaggagtggacatgcctggaccccggtcagaggactttgtacagggatgtgatgttggagaattataggaacctggcctccctgg

SEQ ID NO: 23922 - DNA, 727 bp, Macaca Mulatta
gcaagagaatctgatcaatttgaagtccctgtttgggaatgaggcacttatcagcttgaagaattttttttcattctgtgccattttaagaatagaatacattttgtatattaactttataattgggttgtggtttttttgctcagctttttatatttttataagaagctaaatagaagaataattgtatctctgacaagtttttggaagttttaatgttaattgggaaaatcccctggagtttataaaaatctactctaaatatttctgtaatgttgtcaagtagaaagatagcaaatggagaaactacagtcctagaggaaatcactgtttctccaggctttaaagttttccacttgcctttcccatctgtccttcagagttgaattgaaaataaagttgagatgggagggggtaattggaagggttaaagatcattacacaaatgagacagtgctctcttatccctgaaggttttggttggattataggttgacactgaaggaaaattttcagcatcatatgaaaggaagtacttcttatatcattaatatttttaaacttcaaaatagcctcagttttaatatatattttttgaagtgtgggctaaagcttccttaacatatatttaaaactagtccgctgaacgctgcataagatactaaatctgcaaggtctgtgacacgtactctctgcaaagaaatgggcagatgcatggaaagagaac

SEQ ID NO: 23923 - DNA, 807 bp, Macaca Mulatta
ggggaggatgtggcggcctcacctccatacctaccctccccagagctccgtgcgccaggaaaacgtgacggtgtttggatgcttgacccacgaggtgcccttgagcctgggggatgcagcagtgacctgttccaaagagtccctggccggcttcctcctctccgtcagtgccactaccagggttgccaggctgcgaatcccattcccgcagacggggacctggttcctggcccttcgctccctgtgcggggtggggcctcggttcgtgcggtgccgcaacgcgacggccgaggtgcggatgcgcaccttcctgtccccatgcgtggacgactgcgggccctatggccagtgcaagctgctgcgcacacacaactatctgtatgcagcctgcgagtgcaaggccgggtggagaggctggggctgcaccgacagtgcagatgcgctcacctatggattccagctgctgtccacactcctgctctgcctgagcaacctcatgtttctgccacctgtggtcctggccattcggagtcgatatgtgctggaagctgctgtctacaccttcaccatgttcttctccacggtatgcggctgtgtctgcatcttatcactggggtgcttgtgaatgggtggtggggtcacagttctgtattttccacccacgtttctccaaaagttttggggaatgttacgtcccttcactgtggtctttctacagaacagagaacgccagtggcttccccaacctatccatggcattagaaaaagggtccctttttttggaaaggccaaatttggaaaggaaac

SEQ ID NO: 23924 - DNA, 2156 bp, Macaca Mulatta
  misc_feature (1)...(2156): n = A,T,C or G
ggcatacataatcttgctgctatgcnnnnnnnnnnnnnnnnnnnnnnnnnnnnnnnnnnnnnnnnnnnnnnnnnnnnnagatagaaaatcaagtatattttaaaagaagggatgtgggatcaaggaggacagccttggcagcagtggcccttgaaccagcaacaatggatgcagtcattccagcaccaacaggatccaagnnnnnnnnnnnnnnnnnnnnnnnnnnnnnnnnnnnnnnnnnnnnnnnnnnnnnnnnnnnnnnnnnnnnnnnnnnnnnnnnnnnnnnnnnnnnnnnnnnnnnnnnnnnnnnnnnnnnnnnnnnnnnnnnnnnnnnnnnnnnnnnnnnnnnnnnnnnnnnnnnnnnnnnnnnnnnnnnnnnnnnnnnnnnnnnnnnnnnnnnnnnnnnnnnnnnnnnnnnnnnnnnnnnnnnnnnnnnnnnnnnnnnnnnnnnnnnnnnnnnnnnnnnnnnnnnnnnnnnnnnnnnnnnnnnnnnnnnnnnnnnnnnnnnnnnnnnnnnnnnnnnnnnnnnnnnnnnnnnnnnnnnnnnnnnnnnnnnnnnnnnnnnnnnnnnnnnnnnnnnnnnnnnnnnnnnnnnnnnnnnnnnnnnnnnnnnnnnnnnnnnnnnnnnnnnnnnnnnnnnnnnnnnnnnnnnnnnnnnnnnnnnnnnnnnnnnnnnnnnnnnnnnnnnnnnnnnnnnnnnnnnnnnnnnnnnnnnnnnnnnnnnnnnnnnnnnnnnnnnnnnnnnnnnnnnnnnnnnnnnnnnnnnnnnnnnnnnnnnnnnnnnnnnnnnnnnnnnnnnnnnnnnnnnnnnnnnnnnnnnnnnnnnnnnnnnnnnnnnnnnnngtgaaaagcagaagaaattggagaaagaaagaatggaacaacaacgttcacaattgtccnnnnnnnnnnnnnnnnnnnnnnnnnnnnnnnnnnnnnnnnnnnnnnnnnnnnnnnnnnnnnnnnnnnnnnnngatagtgatgaggaagaagaagacactgaaaatgttgaggctgcaagtagtgggaaagtcaccagaagtccatccccagttcctcaagaagatcatagtgaccctgagatgactgaagaggagaaagagtatcaaatgnnnnnnnnnnnnnnnnnnnnnnnnnnnnnnnnnnnnnnnnnnnnnnnnnnnnnnnnnnnnnnnnnnnnnnnnnnnnnnnnnnnnnnnnnnnnnnnnnnnnnnnnnnnnnnnnnnnnnnnnnnnnnnnnnnnnnnnnnnnnnnnnnnnnnnnnnnnnnnnnnnnnnnnnnnnnnnnnnnnnnnnnnnnnnnnnnnnnnnnnnnnnnnnnnnnnnnnnnnnnnnnnnnnnnnnnnnnnnnnnnnnnnnnnnnnnnnnnnnnnnnnnnnnnnnnnnnnnnnnnnnnnnnnnnnnnacatgagtacaaattagcagtcatgctgttgtcctctaaaatgtattgtggaaaattcctgatgttcagtttatttcacctgattttttttatagataacatggcattgtatgacttctgatacagtttattttgactaatgaattttgaattatcaaccttcagtttttagtttaccagttatctcttacagaagcaagtgattccctacccctatattttagtaacaccttaaaaaatgtattgaaaacaaaaattaagttacatgtcataatctcagaaatagacatacagatatacttgtcaacattttttctcattataaaccaatttcagctcacatcagagttataatttcaaagccagacatgatactggtttaaaatgaatgttatgtttttaatgtttcttctctccccaaaaagcagcaatagtagtagatttaacaataccatagactcatgactatgaaatcgtggctatttgtgttaacatgttgttcctgttgttgatgtgatacaaagctcctgcaaaacagctggcacagtccagtgcactggcttccctcactggactcggnnggtggactgggtggttatggatcaggagacagcgaagatgagaggagtgacagaggctctgagtcatctgacactgatgatgaagaattacggcatcgaatccggcaaaaacaggaagctttttggagaaaagaaaaagaacagcagctattacatgataaacagatggaa

SEQ ID NO: 23925 - DNA, 407 bp, Macaca Mulatta
tcagcagcctgtcacaggaactcgatcctacctatgttaattaccttatagaactactaaagttccagtagttaggccattcatttaatgtacattgggcacttttctatttatttaagagtcaattgctttctaatgctttatggaccgactatcaagatattagtaagaacggatcatgttttgaagcagcaggtccaggtcactttgtatatagaattttgctatattcaataaatctgtttggaggaaaatggatcttttctagattctttaaacttaaccaaatgttctttttgttcagttatcaaattgtaattgttttaaaaggtctttgttctaaattacttgcttttgtttaagaagcttcctgaaatacctacattctcaccaggtacatccatgga

SEQ ID NO: 23926 - DNA, 1559 bp, Macaca Mulatta
  misc_feature (1)...(1559): n = A,T,C or G
gaaggaacccagtgcggcagccccaacaggggctgggggcgtggccccaggctcagggaacaactcagggggacccagcctcctggtgccactgcctgtgaatcctcccagctccccaacgcccagcttcagtgatgccaaggcagccggtgccctactcaatgggcctccacagttcagcaccgccccggaaatcaaggnnnnnnnnnnnnnnnnnnnnnnnnnnnnnnnnnnnnnnnnnnnnnnnnnnnnnnnnnnnnnnnnnnnnnnnnnnnnnnnnnnnnnnnnnnnnnnnnnnnnnnnnnnnnnnnnnnnnnnnnnnnnnnnnnnnnnnnnnnnnnnnnnnnnnnnnnnnnnnnnnnnnnnnnnnnnnnnnnnnnnnnnnnnnnnnnnnnnnnnnnnnnnnnnnnnnnnnnnnnnnnnnnnnnnnnnnnnnnnnnnnnnnnnnnnnnnnnnnnnnnnnnnnnnnnnnnnnnnnnnnnnnnnnnnnnnnnnnnnnnnnnnnnnnnnnnnnnnnnnnnnnnnnnnnnnnnnnnnnnnnnnnnnnnnnnnnnnnnnnnnnnnnnnnnnnnnnnnnnnnnnnnnnnnnnnnnnnnnnnnnnnnnnnnnnnnnnnnnnnnnnnnnnnnnnnnnnnnnnnnnnnnnnnnnnnnnnnnnnnnnnnnnnnnnnnnnnnnnnnnnnnnnnnnnnnnnnnnnnnnnnnnnnnnnnnnnnnnnnnnnnnnnnnnnnnnnnnnnnnnnnnnnnnnnnnnnnnnnnnnnnnnnnnnnnnnnnnnnnnnnnnnnnnnnnnnnnnnnnnnnnnnnnnnnnnnnnnnnnnnnnnnnnnnnnnnnnnnnnnnnnnnnnnnnnnnnnnnnnnnnnnnnnnnnnnnnnnnnnnnnnnnnnnnnnnnnnnnnnnnnnnnnnnnnnnnnnnnnnnnnnnnnnnnnnnnnnnnnnnnnnnnnnnnnnnnnnnnnnnnnnnnnnnnnnnnnnnnnnnnnnnnnnnnnnnnnnnnnnnnnnnnnnnnnnnnnnnnnnnnnnnnnnnnnnnnnnnnnnnnnnnnnnnnnnnnnnnnnnnnnnnnnnnnnnnnnnnnnnnnnnnnnnnnnnnnnnnnnnnnnnnnnnnnnnnnnnnnnnnnnnnnnnnnnnnnnnnnnnnnnnnnnnnnnnnnnnnnnnnnnnnnnnnnnnnnnnnnnnnnnnnnnnnngggcacctacatctactttgactacgagaagtggggccagcggaagaaggaaggcttcacctttgagtaccgctacctggaggaccgggacctccagtgacaccggnnnnnnnnnnnnnnnnnnnnnnnnnnnnnnnnnnnnnnnnnnnnnnnnnnnngagggccctgccctggaagactggagggaggccccaggccaggggcaccccctctcccaggaagcagggaggggccgggaggttttcctctcagccccaccctgggggcccgggggcgagggctgccccctcctcccctccccagtgagggacattttttggtaaacctattttcattttggaaaatatttatgaataaatagttttatatga

SEQ ID NO: 23927 - DNA, 2135 bp, Macaca Mulatta
  misc_feature (1)...(2135): n = A,T,C or G
aggtgtcctgatggcaaatttccagggccatgcgctcccagggagtttcttcctgatcattggactgtgttggtcagtgaagtacccactgaagtacttcagccacacacggaagaacagcccactgcattactatcggcgtcttgagatcatcgaagccgcagtcaggactttgttttctgtcnngggatcctggcagagcagttcgttccggatgggccccacctgcacctctaccatgagaaccactggataaagttaatgaattggcagcacagcaccatgtacctattctttgcagtctcaggaattgctgacatgctcacctatctggtcagccacgttcccttgggggtggacagactggttatggctgtggcagtattcatgtaaggnnaggtttcctcttctactaccacgtccacaaccggcctccgctggaccaacacatccactcgctcctgctgtatgctctgttcgtggcgtgtgttagtatctccctagaggtgatcttgcgggaccacattgtgctggagcttttccgaaccagtctcgtcattcttcagggaacctggttctggcannnnnnnnnnnnnnnnnnnnnnnnnnnnnnnnnnnnnnnnnnnnnnnnnnnnnnnnnnnnnnnnnnnnnnnnnnnnnnnnnnnnnnnnnnnnnnnnnnnnnnnnnnnnnnnnnnnnnnnnnnnnnnnnnnnnnnnnnnnnnnnnnnnnnnnnnnnnnnnnnnnnnnnnnnnnnnnnnnnnnnnnnnnnnnnnnnnnnnnnnnnnnnnnnnnnnnnnnnnnnnnnnnnnnnnnnnnnnnnnnnnnnnnnnnnnnnnnnnnnnnnnnnnnnnnnnnnnnnnnnnnnnnnnnnnnnnnnnnnnnnnnnnnnnnnnnnnnnnnnnnnnnnnnnnnnnnnnnnnnnnnnnnnnnnnnnnnnnnnnnnnnnnnnnnnnnnnnnnnnnnnnnnnnnnnnnnnnnnnnnnnnnnnnnnnnnnnnnnnnnnnnnnnnnnnnnnnnnnnnnnnnnnnnnnnnnnnnnnnnnnnnnnnnnnnnnnnnnnnnnnnnnnnnnnnnnnnnnnnnnnnnnnnnnnnnnnnnnnnnnnnnnnnnnnnnnnnnnnnnnnnnnnnnnnnnnnnnnnnnnnnnnnnnnnnnnnnnnnnnnnnnnnnnnnnnnnnnnnnnnnnnnnnnnnnnnnnnnnnnnnnnnnnnnnnnnnnnnnnnnnnnnnnnnnnnnnnnnnnnnnnnnnnnnnnnnnnnnnnnnnnnnnnnnnnnnnnnnnnnnnnnnnnnnnnnnnnnnnnnnnnnnnnnnnnnnnnnnnnnnnnnnnnnnnnnnnnnnnnnnnnnnnnnnnnnnnnnnnnnnnnnnnnnnnnnnnnnnnnnnnnnnnnnnnnnnnnnnnnnnnnnnnnnnnnnnnnnnnnnnnnnnnnnnnnnnnnnnnnnnnnnnnnnnnnnnnnnnnnnnnnnnnnnnnnnnnnnnnnnnnnnnnnnnnnnnnnnnnnnnnnnnnnnnnnnnnnnnnnnnnnnnnnnnnnnnnnnnnnnnnnnnnnnnnnnnnnnnnnnnnnnnnnnnnnnnnnnnnnnnnnnnnnnnnnnnnnnnnnnnnnnnnnnnnnnnnnnnnnnnnnnnnnnnnnnnnnnnnnnnnnnnnnnnnnnnnnnnnnnnnnnnnnnnnnnnnnnnnnnnnnnnnnnnnnnnnnnnnnnnnnnnnnnnnnnnnnnnnnnnnnnnnnnnnnnnnnnnnnnnnnnnnnnnnnnnnnnnnnnnnnnnnnnnnnnnnnnnnnnnnnnnnnnnnnnnnnnnnnnnnnnnnnnnnnnnnnnnnnnnnnnnnnnnnnnnnnnnnnnnnnnnnnnnnnnnnnnnnnnnnnnnnnnnnnnnnnnnnnnnnnnnnnnnnnnnnnnnnnnnnnnnnnnnnnnnnnnnnnnnnnnnnnnnnnnnnnnnnnnnnnnnnnnnnnnnnnnnnnnnnnnnnnnnnnnnnnnnnnnnnnnnnngacttccttcaacaactatttattaaatatctactttgcaacagcactgaaatggctgtaaggactcctgagacaggcgtccagcaaggagtttatagtcacacaggagagacctgccagtagttacaccgagtgtgatgggtgc

SEQ ID NO: 23928 - DNA, 1903 bp, Macaca Mulatta
  misc_feature (1)...(1903): n = A,T,C or G
agagagcagccctgagtctccagtgaccattacggagccctaccgcaccctctcagggcatacggccaagattaccagtgtggcgtggagcccacatcatgatggaaggctggtgtctgcttcctatgatggtacagcccaggtnnnnnnnnnnnnnnnnnnnnnnnnnnnnnnnnnnnnnnnnnnnnnnnnnnnnnnnnnnnnnnnnnnnnnnnnnnnnnnnnnnnnnnnnnnnnnnnnnnnnnnnnnnnnnnnnnnnnnnnnnnnnnnnnnnnnnnnnnnnnnnnnnnnnnnnnnnnnnnnnnnnnnnnnnnnnnnnnnnnnnnnnnnnnnnnnnnnnnnnnnnnnnnnnnnnnnnnnnnnnnnnnnnnnnnnnnnnnnnnnnnnnnnnnnnnnnnnnnnnnnnnnnnnnnnnnnnnnnnnnnnnnnnnnnnnnnnnnnnnnnnnnnnnnnnnnnnnnnnnnnnnnnnnnnnnnnnnnnnnnnnnnnnnnnnnnnnnnnnnnnnnnnnnnnnnnnnnnnnnnnnnnnnnnnnnnnnnnnnnnnnnagagaaccagttatctgcactccggtttcctcaggctttgaaaagtcaaaagtcaccattaataacaaagtcattttactgaaaaaggagccaccaaaagagaagccannnnnnnnnnnnnnnnnnnnnnnnnnnnnnnnnnnnnnnnnnnnnnnnnnnnnnnnnnnnnnnnnnnnnnnnnnnnnnnnnnnnnnnnnnnnnnnnnnnnnnnnnnnnnnnnnnnnnnnnnnnnnnnaatgaagatgtgtctgctgatcttgaggaaagatttcatctggggcttttcacagacagggctacgctgtacagaatgattgatatagaaggnnnnnnnnnnnnnnnnnnnnnnnnnnnnnnnnnnnnnnnnnnnnnnnnnnnnnnnnnnnnnnnnnnnnnnnnnnnnnnnnnnnnnnnnnnnnnnnnnnnnnnnnnnnnnnnnnnnnnnnnnnnnnnnnnnnnnncagctggctaccatgtgtgactatgggctgtggaagcttttgccaaacagctgtgttttcaggatcagtatgtcaaggctgctnnnnnnnnnnnnnnnnnnnnnnnnnnnnnnnnnnnnnnnnnnnnnnnnnnnnnnnnnnnnnnnnnnnnnnnnnnnnnnnnnnnnnnnnnnnnnnnnnnnnnnnnnnnnnnnnnnnnnnnnnnnnnnnnnnnnnnnnnnnnnnnnnnnnnnnnnnnnnnnnnnnnnnnnnnnnnnnnnnnnnnnnnnctatttaggggccacttgtgcttatgatgcatccaaagttttggccaaannnnnnnnnnnnnnnnnnnnnnnnnnnnnnnnnnnnnnnnnnnnnnnnnnnnnnnnnnnnnnnnnnnnnnnnnnnnnnnnnnnnnnnnnnnnnnnnnnnnnnnnnnnnnnnnnnnnnnnnnnnnnnnnnnnnnnnnnnnnnnnnnnnnnnnnnnnnnnnnnnnnnnnnnnnnnnnnnnnnnnnnnnnnnnnnnnnnnnnnnnnnnnnnnnnnnnnnnnnnnnnnnnnnnnnnnnnnnnnnnnnnnnnnnnnnnnnnnnnnnnnnnnnnnnnnnnnnnnnnnnnnnnnnnnnnnnnnnnnnnnnnnnnnnnnnnnnnnnnnnnnnnnnnnnnnnnnnnnnnnnnnnnnnnnnnnnnnnnnnnnnnnnnnnnnnnnnnnnnnnnnnnnnnnnnnnnnnnnnnnnnnnnnnnnncagctcctgcttcacatttgccatgacttgaccctggcagtgctgagccagcagatggcctcctgggacgaggctgtgcaggcgctccttcaggcagtggtccggagctatgactcggggagcttcaccatcatgcaggaagtgtactcagcctttcttcctgacg

SEQ ID NO: 23929 - DNA, 965 bp, Macaca Mulatta
  misc_feature (1)...(965): n = A,T,C or G
ggggagggcaagagtatcagtttgttaaaagcaaaaaagccacagtgtctcttcactagtcatatttagaacagtggttaccatccaagactactctatcctgcaacattgaactctcaagagcaaatccacattcctctgcttctgtgtaaatagggcagctgttgtctatgccatagaatcacatgatctgaggaccattcatggaaagctgctaaatagcctagtctgggaagtcttgcataaagttttgcatgaagcaaacaggattaaatcaggtttggttccttcagccctctaaaggcatagggcttagcctgcaggcttccttgggctttctctgtgtgcgtagttttgtaaacactatagcatccgttacgatccactgtccctggaaaactttcccaaatgcccgggactctggaactctcaattttttgaaagcaggggttcgctctgccctgcctaacaggcccaacttgggaaccagtgctggaattggtcctttcccttttaaacccccacggcttctttaacattacgtccaaaaccttttaaaccaaaattcaaccccgtccaccataagcctttttccgggctcgccccccaatgccgtttcttgcatcccaaccctccctctattttgcgctatttgttattttatgcgcccttctcccatcatttttgccctctctctacacgccccgagttttcttccgtttacaccttcgctccgcgcctttctcctgttctcccttgtgttggaccaacattattttttccgccctcgcccctctttttacgcgacaatttctcctagacggcgcgcgantcccgccacgtccgccgagtccaacgggtagtgtttgtagcaccacctggagtagacggtggtgtagccggctgaacacccatatgtcanttcaccgcacatagggattgcgctacgcgcgcctacaccccgg

SEQ ID NO: 23930 - DNA, 642 bp, Macaca Mulatta
ttttccatctctgtcccagattgtgaccctagactttcaattgacaagtaaaaaattgactttactagacattttgactatgctctattaacatctatactttttcaaatctctggatttttaagtagattgttcagctttcatctggtggctgttgtatcaagttctcagctgcaaatattgaacttacctgtctctaagcagtgagtgttttgtagaaggaatccgtttaacaattaattggctaatgggagaagaggaaagactgatattcaagtcacatagattctctgaatcattagaataggagagaaatcatgattctaagccaggccacactttaaaccaagtgctctcaccctgaggttagtggaacctttaagaaggtaatgaacagacttcagggaagtcaaaacctcccaataccaaattccattttctgtgtgtgtttgagatttgagagggcatggggagcaggaaggaggagggtttagagcttttatcagcctctctaagtgggccctgcagtaaaaggctaacatgacattaaaagacatgatattttttaaaaagttatttaaaactaaatatcactggtttcttattaataaaggcaaaacttctttgtaaaacaaatctgtt

SEQ ID NO: 23931 - DNA, 3745 bp, Macaca Mulatta
  misc_feature (1)...(3745): n = A,T,C or G
gcggcgcgcgctggcggccccggcggcttaggagaaggaagaggcgcgggagaagatgctgggcgccnnnnnnnnnnnnnnnnnnnnnnnnnnnnnnnnnnnnnnnnnnngaccctgcagcggaacatcacgctgctcaacggcgtggccatcatcgtgggcaccatcatcggctcgggcatcttcgtgacgcccacgggcgtgctcaaggaagcgggctcgccggggctggcgctggtggtgtgggccgcgtgcggcgtcttctccatcgtgggcgcgctctgctacgccgagctgggtaccaccatctccaagtcgggcggcgactacgcctacatgctggaggtctacggctcgctgcccgccttcctcaagctctggatcgagctgctcatcatccggccctcctcgcagtacatcgtggccctggtcttcgccacctacctgctcaagccgctcttccccacctgcccggtgcccgaggagtcagccaagctcgtggcctgcctctgcgtgctgctgctcacggccgtgaactgctacagcgtgaaggccgcgacccgggtccaggatgcctttgccgctgccaagctcctggccctggccctgatcatcctgctgggcttcgtccagatcgggaagggtgnnnnnnnnnnnnnnnnnnnnnnnnnnnnnnnnnnnnnnnnnnnnnnnnnnnnnnnnnnnnnnnnnnnnnnnnnnnnnnnnnnnnnnnnnnnnnnnnnnnnnggaattacttgaatttcgtcacagaagaaatgatcaacccctacannnnnnnnnnnnnnnnnnnnnnnnnnnnnnnnnnnnnnnnnnnnnnnnnnnnnnnnnnnnnnnnnnnnnnnnnnnnnnnnnnnnnnnnnnnnnnnnnnnnnnnnnnnnnnnnnnnnnnnnnnnnnnnnnnnnnnnnnnnnnnnnnnnnnnnnnnnnnnnnnnnnnnnnnnnnnnnnnnnnnnnnnnnnnnnnnnnnnnnnnnnnnnnnnnnnnnnnnnnnnnnnnnnnnnnnnnnnnnnnnnnnnnnnnnnnnnnnnnnnnnnnnnnnnnnnnnnnnnnnnnnnnnnnnnnnnnnnnnnnnnnnnnnnnnnnnnnnnnnnnnnnnnnntgatgacgctgctctatgccttctccaaggacatcttctccgtcatcaacttcttcagcttcttcaactggctctgcgtggccctggccatcatcggcatgatctggctgcgctatagaaagcccgagctggagcggcccatcaaggtgannnnnnnnnnnnnnnnnnnnnnnnnnnnnnnnnnnnnnnnnnnnnnnnnnnnnnnnnnnnnnnnnnnnnnnnnnnnnnnnnnnnnnnnnnnnnnnnnnnnnnnnnnnnnnnnnnnnnnnnnnnnnnnnnnnnnnnnnnnnnnnnnnnnnnnnnnnnnnnnnnnnnnnnnnnnnnctccacgaccgtcctgtgtcagaagctcatgcaggtggttcctcaggagacatagccaggaggccaagaggctgccagaggagcgtgcacagaggccagttaacgcagctcaccccctcgaacccactccggttccccacagtccacagctcagctgcgcatcccagtccctcgctgtccctcccaggtcaggcggcggagctgctgtgaaaactctggtacgaatctcgtccctcagctgaggtcgagtccgggacccaggtgtggctgtgctcctgcccaggagcagcgtttggtctcgtcgggccccttttctcttccctcctttgtttacttnnnnnnnnnnnnnnnnnnnnnnnnnnnnnnnnnnnnnnnnnnnnnnnnnnnnnnnnnnnnnnnnnnnnnnnnnnnnnnnnnnnnnnnnnnnnnnnnnnnnnnnnnnnnnnnnnnnnnnnnnnnnnnnnnnnnnnnnnnnnnnnnnnnnnnnnnnnnnnnnnnnnnnnnnnnnnnnnnnnnnnnnnnnnnnnnnnnnnnnnnnnnnnnnnnnnnnnnnnnnnnnnnnnnnnnnnnnnnnnnnnnnnnnnnnnnnnnnnnnnnnnnnnnnnnnnnnnnnnnnnnnnnnnnnnnnnnnnnnnnnnnnnnnnnnnnnnnnnnnnnnnnnnnnnnnnnnnnnnnnnnnnnnnnnnnnnnnnnnnnnnnnnnnnnnnnnnnnnnnnnnnnnnnnnnnnnnnnnnnnnnnnnnnnnnnnnnnnnnnnnnnnnnnnnnnnnnnnnnnnnnnnnnnnnnnnnnnnnnnnnnnnnnnnnnnnnnnnnnnnnnnnnnnnnnnnnnnnnnnnnnnnnnnnnnnnnnnnnnnnnnnnnnnnnnnnnnnnnnnnnnnnnnnnnnnnnnnnnnnnnnnnnnnnnnnnnnnnnnnnnnnnnnnnnnnnnnnnnnnnnnnnnnnnnnnnnnnnnnnnnnnnnnnnnnnnnnnnnnnnnnnnnnnnnnnnnnnnnnnnnnnnnnnnnnnnnnnnnnnnnnnnnnnnnnnnnnnnnnnnnnnnnnnnnnnnnnnnnnnnnnnnnnnnnnnnnnnnnnnnnnnnnnnnnnnnnnnnnnnnnnnnnnnnnnnnnnnnnnnnnnnnnnnnnnnnnnnnnnnnnnnnnnnnnnnnnnnnnnnnnnnnnnnnnnnnnnnnnnnnnnnnnnnnnnnnnnnnnnnnnnnnnnnnnnnnnnnnnnnnnnnnnnnnnnnnnnnnnnnnnnnnnnnnnnnnnnnnnnnnnnnnnnnnnnnnnnnnnnnnnnnnnnnnnnnnnnnnnnnnnnnnnnnnnnnnnnnnnnnnnnnnnnnnnnnnnnnnnnnnnnnnnnnnnnnnnnnnnnnnnnnnnnnnnnnnnnnnnnnnnnnnnnnnnnnnnnnnnnnnnnnnnnnnnnnnnnnnnnnnnnnnnnnnnnnnnnnnnnnnnnnnnnnnnnnnnnnnnnnnnnnnnnnnnnnnnnnnnnnnnnnnnnnnnnnnnnnnnnnnnnnnnnnnnnnnnnnnnnnnnnnnnnnnnnnnnnnnnnnnnnnnnnnnnnnnnnnnnnnnnnnnnnnnnnnnnnnnnnnnnnnnnnnnnnnnnnnnnnnnnnnnnnnnnnnnnnnnnnnnnnnnnnnnnnnnnnnnnnnnnnnnnnnnnnnnnnnnnnnnnnnnnnnnnnnnnnnnnnnnnnnnnnnnnnnnnnnnnnnnnnnnnnnnnnnnnnnnnnnnnnnnnnnnnnacccccgccccgttgcttcctgctgcacatggaccgacttccacagcgtctgctcatgggtactgcatccttcctggggccgaatcccactcgtccaagggacagcccacagtccggacgccgaggacccccagtgggcagatggactgactgttgggcaagacctcttccctccgggcctgttctctgggcggcagataaggacagtagctggtgccctacctgcctggcgcattgctgtgcgaatccaggaggcaggggacattgtaggcggccacagccccggctctgggagaggtgctgcctggacgcatgtgtcccactggagctggcagggcccatgcacgacgtcggcctcttcccttcccgcctcgggtaggggtcctcgggatgccgttctgttccagcctcctgctctgggaggtgggcatgcctcaaggatgcggggagccagcggactctcgatgacacgtgcttgcctgttggctgctgcggctgtgggcgagcatgggggctgttctgtgtctgttgtgggaagtagctgctgagtgaaatggcgggggccgctggggtcc

SEQ ID NO: 23932 - DNA, 845 bp, Macaca Mulatta
gggaaatgataccaaagatgatcttggtaatttaaatgtgcctgattcatctctccctgctgaaaatgaagcaactggacctggctttgttcctccacctcttgctccaatcagaggtccattgtttccagtggatacaaggggcccattcttgagaagaggacctcctttccctgcacctcctccaggagccatgtttggaacttctcgagattattttccaccaagggatttcccaggtccaccacatgctccatttgcaatgagaaatgtctatccaccgaggggttttcctccttaccttcccccaagacctggatttttccccccacccccacattctgaaggtagaagtgagttcccttcagggttgattccgccttcaaatgagcctgctactgaacatccagaaccacagcaagaaacctgacaatatttttgctctcttcaaaagtaattttgactgatctaatttccagtttaagtaactgctgttacttaagtgattacacttttgctcaaattgaagcttaatggaattacagttctcaggataatattttgtaaataaaaatgattttaatatgaatcttatgagtaaaatatttccattttattttattctagatggtataactattttaatttgattgatccactatttacataaacaatagtgggggatttttatatatgtaaatctctccaggtgggggaggcctttaaattcctaaagggctaatgtctttattggccaacaacctgggattttaccgggggggtttgaggacaacattggtgaaaagcaaacctttttttgccttaaactaaaaatttttcagttt

SEQ ID NO: 23933 - DNA, 307 bp, Macaca Mulatta
gtccctgcccgaccgtccccagctggctccatcgccccacctggtctccgcacgcaggcactggtcagtctggacccggagggcgtcactgccccttcccccccaccaccggagaatctgtgagtccctgtgtcctccacatccagacgccagcccaggaataaaggcattctgtgcacaggaccaatgcgtgccgtctggttgctgggcttcccctgtggggagggaagggggtggcccagaaaaggaagcactcacacccctccccacctgccccacagcacaacaaatcaaccatcaggataaa

SEQ ID NO: 23934 - DNA, 478 bp, Macaca Mulatta
ctcatcttcttctcctatgtctgcatcatcagagctgtcctgagaatatcatccacacagggaaagtggaaagccttctccacttgtggctctcacctgacagttgtattactgttctacggaaccattgtaggtgtgtactttttcccctcctccactcaccctgaggacactgataagattggtgctgtcctattcactgtggtgacacccatgatgaaccccttcatctacagcttgaggaataaggatatgaaaggtgccctgagaaagctcatcaatagaaaactttcttccctttgatgccctggacatctacattcttctagtccacacaatcagataaatgattcaacccagagtgtatggcacagttatgatggttcaacttttgatgaacttgcagatatctgtctcctattccaactgctgagggagttggagcttttccacttagctcttgtcttggaaacaaaac

SEQ ID NO: 23935 - DNA, 121 bp, Macaca Mulatta
aggattcagcaccatggcggaagaagacattgagaccaaaatcaagaactacaagactgccccttttgacagccgcttccccaaccagaaccagaccaggaactgctggcagaactacctg

SEQ ID NO: 23936 - DNA, 654 bp, Macaca Mulatta
  misc_feature (1)...(654): n = A,T,C or G
ccccatccgctaggatggttagtaccacagtaaggnnnnnnnnnnnnnnnnnnnnnnnnnnnnnnnnnnnnnnnnnnnnnnnnnnnnnnnnnnnnnnnnnnnnnnnnnnnnnncagctttctgtcttctaggttccctccccatatggtcccaccacatcatacgctacacacgacgggcattccgcatccggccatagtcacaccaacagtcaaacaggaatcgtcccagagtgacgtcggctcactccatagnnnaaagcatcaggactccaaaaaggaagaagaaaagaagaagccccacataaagaaacctcttaatgcattcatgttgtatatgaaggaaatgagagcaaaggtcgtagctgagtgcacgttgaaagaaagcgcggccatcaaccagatccttgggcggaggngtggcacgcactgtccagagaagagcaagcgaaatactatgagctggcccggaaggagcgacagcttcatatgcagctgtaccccggctggtccgcgcgggataactatgnggaaagaagaagaagaggaaaagggacaagcagccgggagagaccaatgngacctgagcgctcctaagaaatgccgagcgcgctttggccttgatcaacagaataactggtgcggcccttgcagg

SEQ ID NO: 23937 - DNA, 758 bp, Macaca Mulatta
  misc_feature (1)...(758): n = A,T,C or G
gggatttggctctccagaaggacctggaagaattggaagtcactttaggagactaaccacatgtcactggccttcatgacgatgctactatttaagcggggagcggggggggaaggcttttttccttagaccttgctgagatcaggaaaccacacaaatctgactcctgggtctgactgctacccagtaccattccccattagttaatttattctaacctctaacctaatctagaattggggcagtacttgtggcttgggtttctgttattctctcccttgagtaatctcttgaaaaaaatcaagattcacacctgccccaggattacacatgggtggagcctgctggtgacgtggatgaacttcaaagctataggaacaaagcacagaacttgtcactttaatctttctcactggcgaataggcctcaatacatatagtcctaagatcataccttacctaccaaggtaaaagggatcagagtagcccataggcattgctttcttatcacctatcatgtgaattctacctgcattcctgggctggaccacttgatgacttccagagtcctgttagcttttggaatgacagcagtggtatagggtttatgatgctataaaacaaacaatgtctgaaaagttgcctagaatatattttgttacagacttgaaaataaaaccaaattttgatgtttccnnnnnnnnaannnnnnnaannnaaaaacttgttggggcggccctcgggcccctcgaaaaagct

SEQ ID NO: 23938 - DNA, 752 bp, Macaca Mulatta
cacttttgggtgctagaggccccatgaccaggaggagaagaaaggcatcagtcacacctcaactctacttcatcccaacatctccaacagtgaacacactttggaaagaggcagaaacctttctatcagccctggcttccaggggtcagctctaacctcccactgtattccctggcttgattcttcagcataaggctgcaaaatctgtcttctgagtcacatagagagacctacagcaggatcaagatcaagtaatatctatcatcataaagacgcatttgcataacatgttatacttgaacaaaacttatctaaatgcaatttagggaaaattcaattaattgtgacaaaactgatgggcatgctatgaaacagaacataattggaataaatcttccttgtcactcttggtctttggagacgcaatagaaatcctttgttaacctcctaataaactctttttcaaaagttataattgtctgtttcactcattaattccaaaattggttgtcttgtataaatttaaaaaataaccagtgtttttccatcagatgaaggggttattcgccccatatatggtctgtgatttccttcaatggaaagtctccctgaaagaccattaacctgcatttagtgtttgggaagaaggtggtgggaaagagaacagcaaattcatatgaaggtgtctttacagatacaggaactatttattttgaaacattaagtggagggatctgaaaacatttggagta

SEQ ID NO: 23939 - DNA, 2281 bp, Macaca Mulatta
  misc_feature (1)...(2281): n = A,T,C or G
cagtggctggtgaaacgagctatagaaacgaaagaagagatgggtgactatatccgctcctactctgtatcccagttccagaagacttacagtctccctgagnnnnnnnnnnnnnnnnnnnnnnnnnnnnnnnnnnnnnnnnnnnnnnnnnnnnnnnnnnnnnnnnnnnnnnnnnnnnnnnnnnnnnnnnnnnnnnnnnnnnnnnnnnnnnnnnnnnnnnnnnnnnnnnnnnnnnnnnnnnnnnnnnnnnnnnnnnnnnnnnnnnnnnnnnnnnnnnnnnnnnnnnnnnnnnnnnnnnnnnnnnnnnnnnnnnnnnnnnnnnnnnnnnnnnnnnnnnnnnnnnnnnnnnnnnnnnnnnnnnnnnnnnnnnnnnnnnnnnnnnnnnnnnnnnnnnnnnnnnnnnnnnnnnnnnnnnnnnnnnnnnnnnnnnnnnnnnnnnnnnnnnnnnnnnnnnnnnnnnnnnnnnnnnnnnnnnnnnnnnnnnnnnnnnnnnnnnnnnnnnnnnnnnnnnnnnnnnnnnnnnnnnnnnnnnnnnnnnnnnnnnnnnnnnnnnnnnnnnnnnnnnnnnnnnnnnnnnnnnnnnnnnnnnnnnnnnnnnnnnnnnnnnnnnnnnnnnnnnnnnnnnnnnnnnnnnnnnnnnnnnnnnnnnnnnnnnnnnnnnnnnnnnnnnnnnnnnnnnnnnnnnnnnnnnnnnnnnnnnnnnnnnnnnnnnnnnnnnnnnnnnnnnnnnnnnnnnnnnnnnnnnnnnnnnnnnnnnnnnnnnnnnnnnnnnnnnnnnnnnnnnnnnnnnnnnnnnnnnnnnnnnnnnnnnnnnnnnnnnnnnnnnnnnnnnnnnnnnnnnnnnnnnnnnnnnnnnnnnnnnnnnnnnnnnnnnnnnnnnnnnnnnnnnnnnnnnnnnnnnnnnnnnnnnnnnnnnnnnnnnnnnnnnnnnnnnnnnnnnnnnnnnnnnnnnnnnnnnnnnnnnnnnnnnnnnnnnnnnnnnnnnnnnnnnnacctagacagacggtacaatatggagaaagagaaactttacaagatacgtttactacaggnnggctcgaagaaatcgagaaatagcaattttgcaccgcaagattgatgaagtccctagccgtgccgagctaatacagtatcagaagagatttattgaactctaccgccagannnnnnnnnnnnnnnnnnnnnnnnnnnnnnnnnnnnnnnnnnnnnnnnnnnnnnnnnnnnnnnnnnnnnnnnnnnnnnnnngattagtctgctgaactcaattcatgagaacttctcacagnnnnnnnnnnnnnnnnnnnnnnnnnnnnnnnnnnnnnnnnnnnnnnnnnnnnnnnnnnnnnnnnnnnnnnnnnnnnnnnnnnagatggaaaagaaaaagcaagagaacaaaatgagaagagaccagttgaatgaccagtacttggagctgttagaaaagcagaggctatactttaagactgtgaaagagttcaaggagnnnnnnnnnnnnnnnnnnnnnnnnnnnnnnnnnnnnnnnnnnnnnnnnnnnnnnnnnnnnnnnnnnnnnnnnnnnnnnnnnnnnnnnnnnnnnnnnnnnnnnnnnnnnnnnnnnnnnnnnnnnnnnnnnnnnaaagcgacagtagagagatgcaggtgtaatggtttcaacaacctgtatgttttctttctcctctttgcttccattcatctctgttggctgctgttgatggaatcagaccgtaaacatgtggcttggataacacccgtcatcctgtgaagaatgtcggcagtacttttctctgttgatcaacttttatgtctccagtaacattgcacttacaaaggtacctgtatttgtgtggactctgaataaagaagaattcatttgtttagcaagtattaattgagcacccactgagaaataagcactgaggaagattcagagacatgtaaaacagagttcctactgcacaggcacccagcaggtggcccagggaggcagatacacagcacacttgaccacagaactggaccatctgagatgtttttcagcaaacagaaggcatgtagctgaaatgatcagcccatgtagtgttggtcacttgggcctttcacctgccatggtaccttttgttcccagctcctccaggtgccaaccagcaggcttggtgacagcaactggaatgaaaattcagtatcattttcatttttatacgttactcaggtttatttctcagaaaattgaaaacagaccttgtgctgaggacacttcaataaaaattacaccttcccctgc

SEQ ID NO: 23940 - DNA, 2346 bp, Macaca Mulatta
  misc_feature (1)...(2346): n = A,T,C or G
aggaaatgtgacacctgctcattatgatgagcagcagaacttttttgctcaaataaaaggttacaaacgatgcatcttatttcctccggatcagtttgagtgcctctacccataccctgttcatcacccatgtgacagacagagccaggtgnnnnnnnnnnnnnnnnnnnnnnnnnnnnnnnnnnnnnnnnnnnnnnnnnnnnnnnnnnnnnnnnnnnnnnnnnnnnnnnnnnnnnnnnnnnnnnnnnnnnnnnnnnnnnnnnnnnnnnnnnnnnnnnnnnnnnnnnnnnnnnnnnnnnnnnnnnnnnnnnnnnnnnagggggctcccacccctaagagaattgaatatcctctcaaagcccatcagaaagtggccataatgagaaacattgagaagatgcttggagaggccttggggaacccacaagaggtnnnnnnnnnnnnnnnnnnnnnnnnnnnnnnnnnnnnnnnnnnnnnnnnnnnnnnnnnnnnnnnnnnnnnnnnnnnnnnnnnnnnnnnnnnnnnnnnnnnnnnnnnnnnnnnnnnnnnnnnnnnnnnnnnnnnnnnnnnnnnnnnnnnnnnnnnnnnnnnnnnnnnnnnnnnnnnnnnnnnnnnnnnnnnnnnnnnnnnnnnnnnnnnnnnnnnnnnnnnnnnnnnnnnnnnnnnnnnnnnnnnnnnnnnnnnnnnnnnnnnnnnnnnnnnnnnnnnnnnnnnnnnnnnnnnnnnnnnnnnnnnnnnnnnnnnnnnnnnnnnnnnnnnnnnnnnnnnnnnnnnnnnnnnnnnnnnnnnnnnnnnnnnnnnnnnnnnnnnnnnnnnnnnnnnnnnnnnnnnnnnnnnnnnnnnnnnnnnnnnnnnnnnnnnnnnnnnnnnnnnnnnnnnnnnnnnnnnnnnnnnnnnnnnnnnnnnnnnnnnnnnnnnnnnnnnnnnnnnnnnnnnnnnnnnnnnnnnnnnnnnnnnnnnnnnnnnnnnnnnnnnnnnnnnnnnnnnnnnnnnnnnnnnnnnnnnnnnnnnnnnnnnnnnnnnnnnnnnnnnnnnnnnnnnnnnnnnnnnnnnnnnnnnnnnnnnnnnnnnnnnnnnnnnnnnnnnnnnnnnnnnnnnnnnnnnnnnnnnnnnnnnnnnnnnnnnnnnnnnnnnnnnnnnnnnnnnnnnnnnnnnnnnnnnnnnnnnnnnnnnnnnnnnnnnnnnnnnnnnnnnnnnnnnnnnnnnnnnnnnnnnnnnnnnnnnnnnnnnnnnnnnnnnnnnnnnnnnnnnnnnnnnnnnnnnnnnnnnnnnnnnnnnnnnnnnnnnnnnnnnnnnnnnnnnnnnnnnnnnnnnnnnnnnnnnnnnnnnnnnnnnnnnnnnnnnnnnnnnnnnnnnnnnnnnnnnnnnnnnnnnnnnnnnnnnnnnnnnnnnnnnnnnnnnnnnnnnnnnnnnnnnnnnnnnnnnnnnnnnnnnnnnnnnnccacactgcccagcctccctactacccaaggtcttccactgctacctttttccagtgggacagtacagtgtgagcccccgggaagtactgcctgacctatcctaagcttttatacttggattttagccatcatatgttagccaggtctcactgcagcctgcccgaggctaactggctagagcctccaggccctacagtgctccctgcccaggccatatcctttactcctgttgagcttcctggctgaatagatgaaatggggtcaagcccaggcagctcactcactacctgtgatccacctcagggcacgggcaaacacataggcttgcctcttaaagccagctcctctgccagaccccattgtaatgtgccacaacaccctcagtagtcagggcaactggtagagcatggaagttgaatttccttttctgttaggagctactcatgggaacccctctcagagctgcagcttacaggtgggcagctgtgattgcacaacttgaagggcgatcattctcatctattcagtgggagtggggcctctgggattgggcagtgtggtggccctgtgtctcctcacctctgctcctgtcttccttttctctctggaagggaagaggagttggaaggtctctggttttcttttcnnnnnnnnnnnnnnngccaaaggtttacttccagcatctgagctctggctctcacccccgaagctcagtttatagtgcactgatgaactaactgagaggatgtgtgtgtatgcgtgtgcatgcctgagtgtgttttttggggaggggtgtttatttttagtaccccattctggggttctctgatgccgtgtggatgtgaagacatggtatcttctgaagtgtagctctttcaaatatagtcaatgctgggaaatgtga

SEQ ID NO: 23941 - DNA, 990 bp, Macaca Mulatta
  misc_feature (1)...(990): n = A,T,C or G
cagctgatcttctcccagcgctgcaccgaggcagagggacagcactggcatgagaaccacttctgttgccaggactgcgccgggcctctgggcgggggacgttatgccctgcctgggggaagcccctgctgccccagctgcttcgagaaccgctactcggatgcaggctcgagctgggccggggcactggaagggcagacattccttggnnnnnnnnnnnnnnnnnnnnnnnnnnnnnnnnnnnnnnnnnnnnnnnnnnnnnnnnnnnnnnnnnnnnnnnnnnnnnnnnnnnnnnnnnnnnnnnnnnnnnnnnnnnnnnnnnnnnnnnnnnnnnnnnnnnnnnnnnnnnnnnnnnnnnnnnnnnnnnnnnnnnnnnnnnnnnnnnnnnnnnnnnnnnnnnnnnnnnnnnnnnnnnnnnnnnnnnnnnnnnnnnnnnnnnnnnnnngaggctgggcttcacccccgctagctgcggtggaggtccagctccgcatctctgagaccagcgtatccgacccggcccggaacaggggagactggaccagaccgaactggaggaagggaccaaacctcggtgaactctgcgaccctctcccgaacactccttctcgctgccgccggcggttcctgcctgcaaactcagacggggctgcctggatccagtccccagcaggagaaccgacctggggaaaaagcggaggcacccaaagggcaggagcagtgccgcttggagactctaagtgattccaaggacacccctttctccacctgctcctcctcctctgactcggaacctgaaggctttttcttaggcgagcgccttcccctgtcctggaaaatcctcggaagcctccaagcagaggacagcaacgcctctaagaagcactgcaccatgtgctagtggcgcagctcagagagggggtgtgagtgggaggaaaggggtctgtaaagcgggagaacaaggctagcctcccctaacaatcctagact

SEQ ID NO: 23942 - DNA, 613 bp, Macaca Mulatta
  misc_feature (1)...(613): n = A,T,C or G
ggttggcactgactgggaccccaaagagcgtcttttccggaactttggggggttattggggccgctggacgagcctgtggccgtgcagcgctgggtccggggccccaacctcacagccacagtggtctggatcgacccaacctatgtggtggccacatcttatgacatcacagtagatacggagaccgaggtcacgcaatacaagcccccactgagccggcccctgcggccagggccctggactgttcgactccttcagttctgggaaccgctgggtgagacccgcttccttgtgctgcccttgaccttcaaccgcnnnnnnnnnnnnnnnnnagatgatgccagctggctgcatgcgggacccccccacaatgagtacatggagcagagtttccagggcctgagtagcatcctgaacctgcctcagccggagctcgcagaggaggctgcccagcggcacacacagctcacaggccctgcactcgaggcctggacagacagggaactgggcagcttctggtctgtggccggactgtgtgccataggcccctctgcttgcccctccctggagccctgcagaagggccagctggagctctctgtcccccgncccc

SEQ ID NO: 23943 - DNA, 667 bp, Macaca Mulatta
  misc_feature (1)...(667): n = A,T,C or G
gagccctgggatgcgccggccagaggccatgctgctgctgctcacgcttgccctcctggggggccccacctgggcaggganagatgtacggccctggaggaggcaagtatttcaccaccactgaagattacgaccatgaaattacagggctgcgggtgtctgtgggtcttctcctggtgaaaagnnnnnnnnnnnnnnnnnnnnnnnnnnnnnnnnnnnnnnnnnnnnnnnnnnnnnnnnnnnnnnnnnnnnnnnnnnnnnnnnnnnnnnnnnnnntcacaaaagtctttgtcgctttccaaactttcctccggggtatggtcctgtacaccagcaaggaccgcactttctattttgggaagctcgatggccagatcttctctgcctaccccagccaagaggggcaggtgctggtgggcatctatggccaatatggactcctcggcatcaagagcattggctttgaatggaattacccactagaggagccgaccactgaaccgccagttactgtaacatgaccatcaaaggcaccctcgggtctctagggtggggtacggggccatctgagctgaggccatctgggtggtggtggctgatggtactggagtaactgagtcgtgacgctgaacctgaatccaccaataaataaagcttctgcaaaatc

SEQ ID NO: 23944 - DNA, 240 bp, Macaca Mulatta
gcttctcgggaacactggccctgctaccagagccacaggatcccccatgagtgcctgtgaagggagtcctggatagcgaggccctggctggtccaggggtgggtactccgccatgccacccatcctccagcgcctgcagcaggccaccaagatgatgagccgccggaaaatcctgctgctggtgctagggtgcagcaccgtaagccttctcatccaccagggggcgcagctcagctggta

SEQ ID NO: 23945 - DNA, 696 bp, Macaca Mulatta
  misc_feature (1)...(696): n = A,T,C or G
atgcacgctgtactagcatctcctgggagctgaggcagaccctgtcagttgtatttgatgccttcatcacggggcaggggaagaaagnagactggtccctcttccggatgttctcccgaaccctcacggagccctgccccctggcttcagagagccgagtctatgtggacatcaccaactacaaccaggnccaggacaacgagacattagaggtgaacccacccccgaccactacctatcaggacgtcatcctaggcactcggaagatctatgccatctatgacttgtttgacaccgccatgatcaacaactctcgaaacctcaacatccagctcaagtggaagagacccccatagaatgnnnnnnnnnnnnnnnnnnnnnnnnnnnnnnnnnnnnnnnnnnnnnnnnnnnnnnnnnnnnnnnnnnnnnnnnnnnnnnnnnnnnnnnnnnnnnnnnnnnnnnnnnnnnnnnnnnnnnnnnnnnnnnnnnnnnnnnnnnnnnnnnnnnnnnnnnnnnnnnnnnnnnnnnnnnnnnnnnnnnnnnnnnnnnnnnnnnnnnnnngttacatccactaccagcctgcccaggaccggctgcaaccccacctcctggagatgctgattcagctgccagccaactcagtcaccaaggtttccatacggtttgagcgggcgctgctgaagtggaccgaataca

SEQ ID NO: 23946 - DNA, 708 bp, Macaca Mulatta
gcagctggactgagaccttgccgctagctgccggcccttggaccgggtctggccagtggagggcgctcccggcggggcctggctggcctttgccccagcgtagcttgtttcacagtaactgagtgccaggcctggccagcgaagcaggtgtccacggggcagggccacccctcgcgtttccgcgccgcgcctgctctgaggctcggcacccccagggccaaccccttagcatttggcgagctccaagagcccaagaggctggggaggaaggagaacagaggcacgccgcggagggccaggaattaggctggggcgggtcgaggtcaccactggatttcgggccacagaccctgctaatcgactcccactgtgaatcagtcctcagaggaggatggatacccacctctcggttcctcctaacccccgcctgggagcttctgtcctctgcttctcggctcctccctcccagaggcaggtgggtggaaaagtgacatctggtgttgttccagaggcgcccaggtccccagcaccctcccctccgcccccgccaccaaggcctcggagaagctccggtctcagagccggagcgggggagggacgggggggctccgcctccatgagtcaatatttgccccgagcaaacgggcgcctggacaggtgtgagtgtgtgtgtctgggggcggggactgaacaggcagtataagagca

SEQ ID NO: 23947 - DNA, 722 bp, Macaca Mulatta
  misc_feature (1)...(722): n = A,T,C or G
gagacccttcgagaagtgctccatttactgagaagcacaggtaacacccaagtagaatacatgatccggatcatgaagaaatgggccaaagaaaacagagtgcccatctaaaatagctccagcatcctaggaaccagcttctactttggcataaaactggaaatcattttcactccagtttaatctgtgatacagggctctgttttattgacattttccatccttgctctttaagcctcaaggtcagagactgacttgctgagacctagtctcctggctgaacagagtgccatagtctgtgaccctgtatgatcctactagcaataagactttggacttatctggtgcctttcttccaaaaatgctcagagtacttttatataatttactgactttaaggaaaacagtataacttttttttgttagtgttttatggcattgtcccctggctgcaataacaaacatctttgatgttcaagaatcagcatcattctatcatttaactttaagggatctctgtacattatcccattttattggggaattccataaggggttttataactgcacctctgaatcttgggagaataactagctatgtgattctaagaatagcagtaagttcctttatcanactgtccagtcattaataggatagatttgtgggattactctttcagtaattaaattgttgataataatgacacgttacagtgcagtaa

SEQ ID NO: 23948 - DNA, 853 bp, Macaca Mulatta
  misc_feature (1)...(853): n = A,T,C or G
gggctagtgcaagcaggtgctgatgtggatgcagcagataaccggaaaatcacaccccttatgtcagcatttcgcaagggtcatgtaaaagttgttcaatatttggtaaaggaagtgaatcagttcccttctgatatagaatgcatgagatacatagcaacaattacatataaggaactgttgaaaaaatgtcatcaatgtgttgaaaccattgtgaaggtgaaagaccagcaagctgcagaaagcaaataagaatgcaagtattcttttaaaggaacttgatctggaaaagtcaagagaagagagcagaaagcatgctcttgccgctnnnnnnnnnnnnnnnnnnnnntannnnnnnnnnnnnnnngatgaacagaaaaggaaaccagaggaagatgaagaaaaacaacctaaagaaaattatgaactaccagaggaatgaaaatgaacaggaaaatggatgaagatgtgggaccaagaaattccccattgaaacctcctggtggcaacccaccaaccaccaacaattgtgaaatctccgtcaaacaccctggcataaatttcacctaaattgtgnnnnnnnnnnnnnnnnnnnnnggccccaccctggggtggtaacaactccctcatagcgccccatttcccggtaaaaatttacgaagttaactgttaagcataaaagaaaaaccctccgtccttttcgagcacccaatttaaaatttttgtcccaggaaaaacaacacataatggatctttttttggccacataacaatattgggccggtatcacactatttgaaaacagcacaatggggaaggaaacccctaagctagggagggcggggaggtctag

SEQ ID NO: 23949 - DNA, 616 bp, Macaca Mulatta
  misc_feature (1)...(616): n = A,T,C or G
ggggggcaccggggntgctgctgaatgtggaccgtgtggctgagcagctgngaggagctgggctaccccgccatccaggtgcgaggcctggctgactccggctggttcctggacaacaagcagtatcgccacacagactgcgttgacaccatcacgtgtgcgcccacagaggccatccgccgtggcatcaggtactggaacggggtggtcccggagcgctgccgacgccagttccaggagggcgaggagtggaactgcttctttggctataagatctacccgacgctgcgctgccccgtgttcgtggtgcagtggctgtttgatgaggcacagctgacggtggataacgtgcacctgacggggcagccggtacaggagagccaacgactgtacatccagaacctcggccgcgagctgcgccacacgctcaaggacgtgccagccagctttgcccctgcctccctctcccatgagatcatcatccggagccactggaccgatgtccaggtgaaggggacatcgctgccccgagcactgcactgctgggacaggagcctccatgacagccacaagaacagcaaganccccctcaagggctgccccgtccacctggtgg

SEQ ID NO: 23950 - DNA, 222 bp, Macaca Mulatta
gccgctccgaggtgaaagcgcgcgcccctccccgcctgcctcccgggccgcagcgatgaattccgcggagcagaccgttacgtggctcatcaccctgggggtgctggagtcgcccaaaaaaaccatctcggacccggagggctttctgcaggcgtcgctgaaggatggggtggttctctgctggctgctggagcgcctgctccccgggaccatcgagaaagt

SEQ ID NO: 23951 - DNA, 1313 bp, Macaca Mulatta
  misc_feature (1)...(1313): n = A,T,C or G
gggctacacttctaaacaacctcaaagttcgagaaaggcagaacagagtttgtaccactgtagcaatagctattgttgcggaaacatgttcacccttcacagtactccctgccttaatgaatgaatacagagttcctgaactgaatgttcaaaatggagtgttaaagtcactttccttcttgtttgaatatattggtgaaatgggaaaagactacatttatgctgtaacaccgttacttgaagatgctttaatggatagagaccttgtacacagacagacggctagtgcagtggtacagcacatgtcacttggggtttatggatttggttgtgaagattcgctgaatcacttgttgaactatgtatggcccaatgtgtttgagacatctcctcatgtaattcaggcagttatgggagccctagagggtctgagagttgctattggaccatgtagaatgttgcagtattgtttacagggtctgtttcacccagcccggaaagtcagagatgtatattggaaaatttacaactctatctacattggttcccaggatgctctcatagcacattacccaagaatctacaacgatgataagaacacctatattcgttatgaacttgactatatcttataattttattgtttattttgtgtttaatgcacagctacttcacaccttaaacttgctttgatttggtgatgtaaacttttaaacattgcagatcagtgtagaactggtcatagaggaagagctagaaatccagtagcatgatttttaaataacctgtctttgtttttgatgttaagcagtaaatgccagtagtgaccaagaacacagtgattacatacactatactggagggatttcatttttaattcatctttatgaagatttagaactcattccttgtgtttaaagggaatgtttaattgagaaataaacatttgtgtacaaaatgctnnnnnnnnnnnnnnnnnnnnnnnnnnnnnnnnnnnnnnnnnnnnnnnnnnnnnnnnnnnnnnnnnnnnnnnnnnnnnnnnnatatggtcggccccctcggccctcaaaaacctttcaaaaccattctttgggcccgcgggcccattaggaaagtgaacagggccaaaacctgttccctaggaaaatcccggccaggacaaagggcttgggatnnnnnnnnnnnnnnnnnnnnnnggggggaaaccgaagcgtttctgaaaaaaattccaaaatggaagtttcggaaaggcctttaccggggaatcttccccaaccgggaatccccaaggcgaagccctcaaaaattcaaaa

SEQ ID NO: 23952 - DNA, 6366 bp, Macaca Mulatta
  misc_feature (1)...(6366): n = A,T,C or G
tccagaaggagcttaattccgtcgcttctgagctgtctgcacggcaggaggagagtgaacattctcataaacatttaattgaactccgccgggaatttaagaaaaatgtacatgagnnnnnnnnnnnnnnnnnnnnnnnnnnnnnnnnnnnnnnnnnnnnnnnnnnnnnnnnnnnnnnnnnnnnnnnnnnnnnnnnnnnnnnnnnnnnnnnnnnnnnnnnnnnnnnnnnnnnnnnnnnnnnnnnnnnnnnnnnnnnnnnnnnnnnnnnnnnnnnnnnnnnnnnnnnnnnnnnnnnnnnnnnnnnnnnnnnnnnnnnnnnnnnnnnnnnnnnnnnnnnnnnnnnnnnnnnnnnnnnnnnnnnnnnnnnnnnnnnnnnnnnnnnnnnnnnnnnnnnnnnnnnnnnnnnnnnnnnnnnnnnnnnnnnnnnnnnnnnnnnnnnnnnnnnnnnnnnnnnnnnnnnnnnnnnnnnnnnnnnnnnnnnnnnnnnnnnnnnnnnnnnnnnnnnnnnnnnnnnnnnnnnnnnnnnnnnnnnnnnnnnnnnnnnnnnnnnnnnnnnnnnnnnnnnnnnnnnnnnnnnnnnnnnnnnnnnnnnnnnnnnnnnnnnnnnnnnnnnnnnnnnnnnnnnnnnnnnnnnnnnnnnnnnnnnnnnnnnnnnnnnnnnnnnnnnnnnnnnnnnnnnnnnnnnnnnnnnnnnnnnnnnnnnnnnnnnnnnnnnnnnnnnnnnnnnnnnnnnnnnnnnnnnnnnnnnnnnnnnnnnnnnnnnnnnnnnnnnnnnnnnnnnnnnnnnnnnnnnnnnnnnnnnnnnnnnnnnnnnnnnnnnnnnnnnnnnnnnnnnnnnnnnnnnnnnnnnnnnnnnnnnnnnnnnnnnnnnnnnnnnnnnnnnnnnnnnnnnnnnnnnnnnnnnnnnnnnnnnnnnnnnnnnnnnnnnnnnnnnnnnnnnnnnnnnnnnnnnnnnnnnnnnnnnnnnnnnnnnnnnnnnnnnnnnnnnnnnnnnnnnnnnnnnnnnnnnnnnnnnnnnnnnnnnnnnnnnnnnnnnnnnnnnnnnnnnnnnnnnnnnnnnnnnnnnnnnnnnnnnnnnnnnnnnnnnnnnnnnnnnnnnnnnnnnnnnnnnnnnnnnnnnnnnnnnnnnnnnnnnnnnnnnnnnnnnnnnnnnnnnnnnnnnnnnnnnnnnnnnnnnnnnnnnnnnnnnnnnnnnnnnnnnnnnnnnnnnnnnnnnnnnnnnnnnnnnnnnnnnnnnnnnnnnnnnnnnnnnnnnnnnnnnnnnnnnnnnnnnnnnnnnnnnnnnnnnnnnnnnnnnnnnnnnnnnnnnnnnnnnnnnnnnnnnnnnnnnnnnnnnnnnnnnnnnnnnnnnnnnnnnnnnnnnnnnnnnnnnnnnnnnnnnnnnnnnnnnnnnnnnnnnnnnnnnnnnnnnnnnnnnnnnnnnnnnnnnnnnnnnnnnnnnnnnnnnnnnnnnnnnnnnnnnnnnnnnnnnnnnnnnnnnnnnnnnnnnnnnnnnnnnnnnnnnnnnnnnnnnnnnnnnnnnnnnnnnnnnnnnnnnnnnnnnnnnnnnnnnnnnnnnnnnnnnnnnnnnnnnnnnnnnnnnnnnnnnnnnnnnnnnnnnnnnnnnnnnnnnnnnnnnnnnnnnnnnnnnnnnnnnnnnnnnnnnnnnnnnnnnnnnnnnnnnnnnnnnnnnnnnnnnnnnnnnnnnnnnnnnnnnnnnnnnnnnnnnnnnnnnnnnnnnnnnnnnnnnnnnnnnnnnnnnnnnnnnnnnnnnnnnnnnnnnnnnnnnnnnnnnnnnnnnnnnnnnnnnnnnnnnnnnnnnnnnnnnnnnnnnnnnnnnnnnnnnnnnnnnnnnnnnnnnnnnnnnnnnnnnnnnnnnnnnnnnnnnnnnnnnnnnnnnnnnnnnnnnnnnnnnnnnnnnnnnnnnnnnnnnnnnnnnnnnnnnnnnnnnnnnnnnnnnnnnnnnnnnnnnnnnnnnnnnnnnnnnnnnnnnnnnnnnnnnnnnnnnnnnnnnnnnnnnnnnnnnnnnnnnnnnnnnnnnnnnnnnnnnnnnnnnnnnnnnnnnnnnnnnnnnnnnnnnnnnnnnnnnnnnnnnnnnnnnnnnnnnnnnnnnnnnnnnnnnnnnnnnnnnnnnnnnnnnnnnnnnnnnnnnnnnnnnnnnnnnnnnnnnnnnnnnnnnnnnnnnnnnnnnnnnnnnnnnnnnnnnnnnnnnnnnnnnnnnnnnnnnnnnnnnnnnnnnnnnnnnnnnnnnnnnnnnnnnnnnnnnnnnnnnnnnnnnnnnnnnnnnnnnnnnnnnnnnnnnnnnnnnnnnnnnnnnnnnnnnnnnnnnnnnnnnnnnnnnnnnnnnnnnnnnnnnnnnnnnnnnnnnnnnnnnnnnnnnnnnnnnnnnnnnnnnnnnnnnnnnnnnnnnnnnnnnnnnnnnnnnnnnnnnnnnnnnnnnnnnnnnnnnnnnnnnnnnnnnnnnnnnnnnnnnnnnnnnnnnnnnnnnnnnnnnnnnnnnnnnnnnnnnnnnnnnnnnnnnnnnnnnnnnnnnnnnnnnnnnnnnnnnnnnnnnnnnnnnnnnnnnnnnnnnnnnnnnnnnnnnnnnnnnnnnnnnnnnnnnnnnnnnnnnnnnnnnnnnnnnnnnnnnnnnnnnnnnnnnnnnnnnnnnnnnnnnnnnnnnnnnnnnnnnnnnnnnnnnnnnnnnnnnnnnnnnnnnnnnnnnnnnnnnnnnnnnnnnnnnnnnnnnnnnnnnnnnnnnnnnnnnnnnnnnnnnnnnnnnnnnnnnnnnnnnnnnnnnnnnnnnnnnnnnnnnnnnnnnnnnnnnnnnnnnnnnnnnnnnnnnnnnnnnnnnnnnnnnnnnnnnnnnnnnnnnnnnnnnnnnnnnnnnnnnnnnnnnnnnnnnnnnnnnnnnnnnnnnnnnnnnnnnnnnnnnnnnnnnnnnnnnnnnnnnnnnnnnnnnnnnnnnnnnnnnnnnnnnnnnnnnnnnnnnnnnnnnnnnnnnnnnnnnnnnnnnnnnnnnnnnnnnnnnnnnnnnnnnnnnnnnnnnnnnnnnnnnnnnnnnnnnnnnnnnnnnnnnnnnnnnnnnnnnnnnnnnnnnnnnnnnnnnnnnnnnnnnnnnnnnnnnnnnnnnnnnnnnnnnnnnnnnnnnnnnnnnnnnnnnnnnnnnnnnnnnnnnnnnnnnnnnnnnnnnnnnnnnnnnnnnnnnnnnnnnnnnnnnnnnnnnnnnnnnnnnnnnnnnnnnnnnnnnnnnnnnnnnnnnnnnnnnnnnnnnnnnnnnnnnnnnnnnnnnnnnnnnnnnnnnnnnnnnnnnnnnnnnnnnnnnnnnnnnnnnnnnnnnnnnnnnnnnnnnnnnnnnnnnnnnnnnnnnnnnnnnnnnnnnnnnnnnnnnnnnnnnnnnnnnnnnnnnnnnnnnnnnnnnnnnnnnnnnnnnnnnnnnnnnnnnnnnnnnnnnnnnnnnnnnnnnnnnnnnnnnnnnnnnnnnnnnnnnnnnnnnnnnnnnnnnnnnnnnnnnnnnnnnnnnnnnnnnnnnnnnnnnnnnnnnnnnnnnnnnnnnnnnnnnnnnnnnnnnnnnnnnnnnnnnnnnnnnnnnnnnnnnnnnnnnnnnnnnnnnnnnnnnnnnnnnnnnnnnnnnnnnnnnnnnnnnnnnnnnnnnnnnnnnnnnnnnnnnnnnnnnnnnnnnnnnnnnnnnnnnnnnnnnnnnnnnnnnnnnnnnnnnnnnnnnnnnnnnnnnnnnnnnnnnnnnnnnnnnnnnnnnnnnnnnnnnnnnnnnnnnnnnnnnnnnnnnnnnnnnnnnnnnnnnnnnnnnnnnnnnnnnnnnnnnnnnnnnnnnnnnnnnnnnnnnnnnnnnnnnnnnnnnnnnnnnnnnnnnnnnnnnnnnnnnnnnnnnnnnnnnnnnnnnnnnnnnnnnnnnnnnnnnnnnnnnnnnnnnnnnnnnnnnnnnnnnnnnnnnnnnnnnnnnnnnnnnnnnnnnnnnnnnnnnnnnnnnnnnnnnnnnnnnnnnnnnnnnnnnnnnnnnnnnnnnnnnnnnnnnnnnnnnnnnnnnnnnnnnnnnnnnnnnnnnnnnnnnnnnnnnnnnnnnnnnnnnnnnnnnnnnnnnnnnnnnnnnnnnnnnnnnnnnnnnnnnnnnnnnnnnnnnnnnnnnnnnnnnnnnnnnnnnnnnnnnnnnnnnnnnnnnnnnnnnnnnnnnnnnnnnnnnnnnnnnnnnnnnnnnnnnnnnnnnnnnnnnnnnnnnnnnnnnnnnnnnnnnnnnnnnnnnnnnnnnnnnnnnnnnnnnnnnnnnnnnnnnnnnnnnnnnnnnnnnnnnnnnnnnnnnnnnnnnnnnnnnnnnnnnnnnnnnnnnnnnnnnnnnnnnnnnnnnnnnnnnnnnnnnnnnnnnnnnnnnnnnnnnnnnnnnnnnnnnnnnnnnnnnnnnnnnnnnnnnnnnnnnnnnnnnnnnnnnnnnnnnnnnnnnnnnnnnnnnnnnnnnnnnnnnnnnnnnnnnnnnnnnnnnnnnnnnnnnnnnnnnnnnnnnnnnnnnnnnnnnnnnnnnnnnnnnnnnnnnnnnnnnnnnnnnnnnnnnnnnnnnnnnnnnnnnnnnnnnnnnnnnnnnnnnnnnnnnnnnnnnnnnnnnnnnnnnnnnnnnnnnnnnnnnnnnnnnnnnnnnnnnnnnnnnnnnnnnnnnnnnnnnnnnnnnnnnnnnnnnnnnnnnnnnnnnnnnnnnnnnnnnnnnnnnnnnnnnnnnnnnnnnnnnnnnnnnnnnnnnnnnnnnnnnnnnnnnnnnnnnnnnnnnnnnnnnnnnnnnnnnnnnnnnnnnnnnnnnnnnnnnnnnnnnnnnnnnnnnnnnnnnnnnnnnnnnnnnnnnnnnnnnnnnnnnnnnnnnnnnnnnnnnnnnnnnnnnnnnnnnnnnnnnnnnnnnnnnnnnnnnnnnnnnnnnnnnnnnnnnnnnnnnnnnnnnnnnnnnnnnnnnnnnnnnnnnnnnnnnnnnnnnnnnnnnnnnnnnnnnnnnnnnnnnnnnnnnnnnnnnnnnnnnnnnnnnnnnnnnnnnnnnnnnnnnnnnnnnnnnnnnnnnnnnnnnnnnnnnnnnnnnnnnnnnnnnnnnnnnnnnnnnnnnnnnnnnnnnnnnnnnnnnnnnnnnnnnnnnnnnnnnnnnnnnnnnnnnnnnnnnnnnnnnnnnnnnnnnnnnnnnnnnnnnnnnnnnnnnnnnnnnnnnnnnnnnnnnnnnnnnnnnnnnnnnnnnnnnnnnnnnnnnnnnnnnnnnnnnnnnnnnnnnnnnnnnnnnnnnnnnnnnnnnnnnnnnnnnnnnnnnnnnnnnnnnnnnnnnnnnnnnnnnnnnnnnnnnnnnnnnnnnnnnnnnnnnnnnnnnnnnnnnnnnnnnnnnnnnnnnnnnnnnnnnnnnnnnnnnnnnnnnnnnnnnnnnnnnnnnnnnnnnnnnnnnnnnnnnnnnnnnnnnnnnnnnnnnnnnnnnnnnnnnnnnnnnnnnnnnnnnnnnnnnnnnnnnnnnnnnnnnnnnnnnnnnnnnnnnnnnnnnnnnnnnnnnnnnnnnnnnnnnnnnnnnnnnnnnnnnnnnnnnnnnnnnnnnnnnnnnnnnnnnnnnnnnnnnnnnnnnnnnnnnnnnnnnnnnnnnnnnnnnnnnnnnnnnnnnnnnnnnnnnnnnnnnnnnnnnnnnnnnnnnnnnnnnnnnnnnnnnnnnnnnnnnnnnnnnnnnnnnnnnnnnnnnnnnnnnnnnnnnnnnnnnnnnnnnnnnnnnnnnnnnnnnnnnnnnnnnnnnnnnnnnnnnnnnnnnnnnnnnnnnnnnnnnnnnnnnctccagcgtctttggcatggtttctagggtgacatttcccaatttggatggaacggccaccatattggttattgaatctctctcccttgtttttattacgtttcctttttcaaactgtccgtgggaaggctgaattgggtgactccccagaatgaagatgaaaaggtgactataatcaatgccgatgcaatgccagtgggtgagatggccgatggaggtttcaaagatgtagctagcattttgaaaccatataggcaaaacccagcaaccagaaggggacagataaggaccgttccagaaatttcaactctcacatccagcccaggctgcagtctccacaccaaacagtcaacaaaacacaaaccctgaaggaaaaccttttccatacacccaggctatgcattgaagagttttccactgtatacatttttatccagatgaaggtatttttatattttgacaataggaaacagtgaccaattttcagagtaatcaaatctggaacaaatgaaacatctccttttagccaccaccaccctgttgcaattaagacaaccgtgngggaacacaccactttttactgttgaaaccaacacaacgttgaaatccaggcttacacgcag

SEQ ID NO: 23953 - DNA, 608 bp, Macaca Mulatta
tgggccgctacgaggaggcctcttccaagtaccaggaggccatcatctgcctaaggaacctgcagaccaaggagaagccgtgggaggtgcagtggctgaagctggagaagatgatcaacaccctgaccctcaactactgccagtgcctgctgaagaaggaggagtattacgaggtgctggagcacaccagtgacattctccggcaccacccaggcatcgtgaaggcctactatgtgcgtgcccgggctcacgcggaggtgtggaacgaggccgaggccaaggcggacctccagaaagtgctggagctggagccatccatgcagaaggcggtgcgcagggagctgaggctgctggagaaccgcatggcggagaagcaggaggaggagaggctgcgctgccggaacatgctgagccagggagccacgcagcctcccgcagagccaccggcacagccccccacagcaccacctgcagagctgtccacagggccacctgcggacccaccggcggagccccccacagcaccacctgcggagctgtccacagggccacctgcagagccacccgcagagctccccctgtccccagggcactcactgcagcactga

SEQ ID NO: 23954 - DNA, 3757 bp, Macaca Mulatta
  misc_feature (1)...(3757): n = A,T,C or G
gatcaaatgtttcctagatttcaagcggggaggctccttgtgccacattcttgcagctgcctacaaattcaagagtgaccagggatgnnnnnnnnnnnnnnnnnnnnnnnnnnnnnnnnnnnnnnnnnnnnnnnnnnnnnnnnnnnnnnnnnnnnnnnnnnnnnnnnnnnnnnnnnnnnnnnnnnnnnnnnnnnnnnnnnnnnnnnnnnnnnnnnnnnnnnnnnnnnnnnnnnnnnnnnnnnnnnnnnnnnnnnnnnnnnnnnnnnnnnnnnnnnnnnnnnnnnnnnnnnnnnnnnnnnnnnnnnnnnnnnnnnnnnnnnnnnnnnnnnnnnnnnnnnnnnnnnnnnnnnnnnnnnnnnnnnnnnnnnnnnnnnnnnnnnnnnnnnnnnnnnnnnnnnnnnnnnnnnnnnnnnnnnnnnnnnnnnnnnnnnnnnnnnnnnnnnnnnnnnnnnnnnnnnnnnnnnnnnnnnnnnnnnnnnnnnnnnnnnnnnnnnnnnnnnnnnnnnnnnnnnnnnnnnnnnnnnnnnnnnnnnnnnnnnnnnnnnnnnnnnnnnnnnnnnnnnnnnnnnnnnnnnnnnnnnnnnnnnnnnnnnnnnnnnnnnnnnnnnnnnnnnnnnnnnnnnnnnnnnnnnnnnnnnnnnnnnnnnnnnnnnnnnnnnnnnnnnnnnnnnnnnnnnnnnnnnnnnnnnnnnnnnnnnnnnnnnnnnnnnnnnnnnnnnnnnnngtccctcaacaccttatactaagtcaaagcgtggccacagagaagaggagcaagaagacctcacaaaggacatggacgagccctcaccagtccccaatgtagaagaggtgacacttcccaaaacannnnnnnnnnnnnnnnnnnnnnnnnnnnnnnnnnnnnnnnnnnnnnnnnnnnnnnnnnnnnnnnnnnnnnnnnnnnnnnnnnnnnnnnnnnnnnnnnnnnnnnnnnnnnnnnnnnnnnnnnnnnnnnnnnnnnnnnnnnnnnnnnnnnnnnnnnnnnnnnnnnnnnnnnnnnnnnnnnnnnnnnnnnnnnnnnnnnnnnnnnnnnnnnnnnnnnnnnnnnnnnnnnnnnnnnnnnnnnnnnnnnnnnnnnnnnnnnnnnnnnnnnnnnnnnnnnnnnnnnnnnnnnnnnnnnnnnnnnnnntacctgggctatcgaaactttatgattgagacttacggactgagcccccatgagtatcttacctctaccgcctgtcgccgaaacctagagagtgatgtctgtgccatcatgagggnnnnnnnnnnnnnnnnnnnnnnnnnnnnnnnnnnnnnnnnnnnnnnnnnnnnnnnnnnnnnnnnnnnnnnnnnnnnnnnnnnnnnnnnnnnnnnnnnnnnnnnnnnnnnnnnnnnnnnnnnnnnnnnnnnnnnnnnnnnnnnnnnnnnnnnnnnnnnnnnnnnnnnnnnnnnnnnnnnnnnnnnnnnnnnnnnnnnnnnnnnnnnnnnnnnnnnnnnnnnnnnnnnnnnnnnnnnnnnnnnnnnnnnnnnnnnnnnnnnnnnnnnnnnnnnnnnnnnnnnnnnnnnnnnnnnnnnnnnnnnnnnnnnnnnnnnnnnnnnnnnnnnnnnnnnnnggcactggaaatgtacaaagatgactggaacaaagtgtccgagcatgtgggaagccgcacacaggacgagtgcatcttgcattttcttcgtcttcccattgaagacccatacctggaggactcagaggcctccctaggccccctggcctaccaacccatccccttcagtcagtcgggcaaccctgttatgagcactgttgccttcttggcctctgtcgtcgatccccgagtcgcctcagctgctgcaaagtcagccctagnnnnnnnnnnnnnnnnnnnnnnnnnnnnnnnnnnnnnnnnnnnnnnnnnnnnnnnnnnnnnnnnnnnnnnnnnnnnnnnnnnnnnnnnnnnnnnnnnnnnnnnnnnnnnnnnnnnnnnnnnnnnnnnnnnnnnnnnnnnnnnnnnnnnnnnnnnnnnnnnngaggagagcgggaatgacgaggctcgggtggaaggccaggccacagatgagaagaaggagcccaagnnnnnnnnnnnnnnnnnnnnnnnnnnnnnnnnnnnnnnnnnnnnnnnnnnnnnnnnnnnnnnnnnnnnnnnnnnnnnnnnnnnnnnnnnnnnnnnnnnnnnnnnnnnnnnnnnnnnnnnnnnnnnnnnnnnnnnnnnnnnnnnnnnnnnnnnnnnnnnnnnnnnnnnnnnnnnnnnnnnnnnnnnnnnnnnnnnnnnnnnnnnnnnnnnnnnnnnnnnnnnnnnnnnnnnnnnnnnnnnnnnnnnnnnnnnnnnnnnnnnnnnnnnnnnnnnnnnnnnnnnnnnnnnnnnnnnnnnnnnnnnnnnnnnnnnnnnnnnnnnnnnnnnnnnnnnnnnnnnnnnnnnnnnnnnnnnnnnnnnnnnnnnnnnnnnnnnnnnnnnnnnnnnnnnnnnnnnnnnnnnnnnnnnnnnnnnnnnnnnnnnnnnnnnnnnnnnnnnnnnnnnnnnnnnnnnnnnnnnnnnnnnnnnnnnnnnnnnnnnnnnnnnnnnnnnnnnnnnnnnnnnnnnnnnnnnnnnnnnnnnnnnnnnnnnnnnnnnnnnnnnnnnnnnnnnnnnnnnnnnnnnnnnnnnnnnnnnnnnnnnnnnnnnnnnnnnnnnnnnnnnnnnnnnnnnnnnnnnnnnnnnnnnnnnnnnnnnnnnnnnnnnnnnnnnnnnnnnnnnnnnnnnnnnnnnnnnnnnnnnnnnnnnnnnnnnnnnnnnnnnnnnnnnnnnnnnnnnnnnnnnnnnnnnnnnnnnnnnnnnnnnnnnnnnnnnnnnnnnnnnnnnnnnnnnnnnnnnnnnnnnnnnnnnnnnnnnnnnnnnnnnnnnnnnnnnnnnnnngcccctcaccgttccccaaccaacaaactcctccctcaatgatgccaggggcagtgccaggcagcgggcacccaggcgtggcgggtaatgctcctttgggtttgccttttggcatgccgnnnnnnnnnnnnnnnnnnctccatccatcatcccatttggtagtctagctgactccatcagtattaacctcccccctcctcctaacctgcatgggcatcaccaccatctcccgttcgccccgggcactctccccccacctaacctgcctgtgtccatggcgaaccctctacatcctaacctgccggcgaccaccaccatgccatcttccttgcctctcgggccggggctcggatccgccgcagcccanagccctgccattgtggcagctgttcagggcaacctcctgcccagtgccagcccactgccagncagacccaggcacccccctgcctccagaccccacagccccgagcccaggcacggtcacccctgtgccacctccacagtgaggagccagccagacatctctccccctcaccccctctggagatcacggttccaggaacagcccttcccccaccactgggaccctccccagcctggagagttcatcactacgtaaggaaagctccttccgcccctccaaagccctcaccatgcctaacagaggcgtgcatttttatatcagattattcaaggacttctgtttaaaagatgtttctaatgtctgggagagaggataggatgggaatgctgccctaaaggaagggctggtgaaaggtgtttatacaaggttctattaaccacttctaagggtacacctccctccaaactactgcattttctatggatta

SEQ ID NO: 23955 - DNA, 378 bp, Macaca Mulatta
atatatttgaatctgattctgcatttcttcctcaatttatgtaatgaaatttaaactaatatatcatctaacagtagcacaaaatttgtaatgtgaagtataaagataatgaagaagttgttttctttgttgaagcagttatatgggtcttagtatatttctctaaaatttaaacttattaaaagaatgttatttttaatctttcacacaaatgtcctttgaagtgcttattttggtactccattttaaaactaaaatacattgttttccaaggaaaataattgcccctcacccattcagcagaggtaaggtaacctcaatgtattcaaagataaccccaatgaattcaaccctcacacattaaaaattacatgtttg

SEQ ID NO: 23956 - DNA, 258 bp, Macaca Mulatta
caagccagtgtggggtctcccacagctgtgccgtgcagggggcctgccccaccaccccgacgccgccctcttctttcctcctctacgccgcctcatcctcttcaagggtgcccgctactacgtgctggcccaagggggactgcaagtggagccctactacccccgaagtctgcaggactggggcggcatccctgaggaggttagcggcgccctgccgaggcctgacggctccatcatcttcttccgagatgaccgcta

SEQ ID NO: 23957 - DNA, 648 bp, Macaca Mulatta
actctgggatggaaaacaggatggtcagctaatcccatgcaggattaaccaaagggaaaggaagaaggaagcctgtaggcaaggagtgccagggggaattcagccataccccttaatcctttccccttagtccagagccacaggagcatcgggaaggtgatactggggctggtagcagaggggcgatcctcaaacctctgcctcatcaactgcccctgtggcagctccagttctgaggagggcatggtcctatccgccactctgctcctgggtcctagaggtcacccagcaaggtgggctctggagaggggcctagtctctggccctagggcacctgactcagaggttccagctgctgtgggggctggctctggacaacctcagcccacagtgatgctgaagccacaatggaatctgttgcgccagtgattgaggaaggctccaagggctagggtgacaggcagagggggcatcttcttctccagcacagcacctacacaccagttactatccaccaagcctgttgggggagagaatacccactaggttatttaacagggattggaggaaatagtcaccagaaataaggtaaagtttccctccctctgcattccccattcctcagcatagccaaatgtctcccaataa

SEQ ID NO: 23958 - DNA, 647 bp, Macaca Mulatta
ggggcagacctactgactcaatttggagatgagcggccctaccctcttcatggcgggagagaggtggagatgctttctggccccgtcgaggtcatccctgttccgggtcttacataattcctgctgtcggaaaaaatccactacacctaagaaaattactcccaatgttactttttgtgatgaaaatgcaaaggagcctgaaaatgcacttgacaagctcttctcttcagaacagcaggcttccatcttgcatgtgttgaatacagcatctactaaagaacttgaagctttcagattgcttcgtggaagaaggtccatcaatatcgtaaagcacagagaaaactttgggcgatttcagaatttagagagtttaatgaatgtgcccttgtttaagtataaaagtacagttcaagtttgtaactccatactttgtccaaagactggaggggaaaaaagaaagttactggaaaaccgtttctgagaaagctcctcaaccccgacctagaagagaaagactttaagccgtaaaagaatcaaaccatggttttgggacccgaaaattcccgggctccctcattctaaattgacggggtgaatggcacaaaggtccgttgagtttatgagggaaactcttcctctcgctcctt

SEQ ID NO: 23959 - DNA, 670 bp, Macaca Mulatta
ttgattcacagatggatgtgacctacaggagaaataaaccattacttatgtgctgatgtcttgacattcactcattagaagaccttactccttcaagagaatgtctggggtcaaatttaccatatcttctggctaaagatgttcaaggttcttctggaaacttggaagatgtaaagaatccatttgatttggtcagcctggcttttgtggctggctctgataaattttcccaacaattaaatcttgcctttatacaccgaaactttgtaattttagtcttggtgaaatataatgacattcttgtcaagcaagaatgtcatcttcccttatggactcaattgctattattttgaacctccatgattgtaccatgcaacaatattcattaaatacctgaatctaaccctgtggctgctttgtcatactctgtcccttccatacctgccaggatgctagctgtccattttctttttaatctgacaggcttccttactcatttctaatttgttttcaactgctgccctgaagccaaacatttgtgttaagaattgtttgtaaaatcagagtcagaaatgctttgagtaatggcctaaggcttcattcccagcatgtcacactgaagatgttccacagaatattaataggtatcatataccaagaagaatcaagc

SEQ ID NO: 23960 - DNA, 4816 bp, Macaca Mulatta
  misc_feature (1)...(4816): n = A,T,C or G
atttagacatatgtcgccaacattctgattgcagtgaatccatactttgacatacctaaaatatattcttcagaaacaataaagtcatatcaaggaaaatctcttgggacaagaccacctcatgtctttgcaattnnnnnnnnnnnnnnnnnnnnnnnnnnnnnnnnnnnnnnnnnnnnnnnnnnnnnnnnnnnnnnnnnnnnnnnnnnnnnnnnnnnnnnnnnnnnnnnnnnnnnnnnnnnnnnnnnnnnnnnnnnnnnnnnnnnnnnnnnnnnnnnnnnnnnnnnnnnnnnnnnnnnnnnnnnnnnnnnnnnnnnnnnnnnnnnnnnnnnnnnnnnnnnnnnnnnnnnnnnnnnnnnnnnnnnnnnnnnnnnnnnnnnnnnnnnnnnnnnnnnnnnnnnnnnnnnnnnnnnnnnnnnnnnnnnnnnnnnnnnnnnnnnnnnnnnnnnnnnnnnnnnnnnnnnnnnnnnnnnnnnnnnnnnnnnnnnnnnnnnnnnnnnnnnnnnnnnnnnnnnnnnnnnnnnnnnnnnnnnnnnnnnnnnnnnnnnnnnnnnnnnnnnnnnnnnnnnnnnnnnnnnnnnnnnnnnnnnnnnnnnnnnnnnnnnnnnnnnnnnnnnnnnnnnnnnnnnnnnnnnnnnnnnnnnnnnnnnnnnnnnnnnnnnnnnnnnnnnnnnnnnnnnnnnnnnnnnnnnnnnnnnnnnnnnnnnnnnnnnnnnnnnnnnnnnnnnnnnnnnnnnnnnnnnnnnnnnnnnnnnnnnnnnnnnnnnnnnnnnnnnnnnnnnnnnnnnnnnnnnnnnnnnnnnnnnnnnnnnnnnnnnnnnnnnnnnnnnnnnnnnnnnnnnnnnnnnnnnnnnnnnnnnnnnnnnnnnnnnnnnnnnnnnnnnnnnnnnnnnnnnnnnnnnnnnnnnnnnnnnnnnnnnnnnnnnnnnnnnnnnnnnnnnnnnnnnnnnnnnnnnnnnnnnnnnnnnnnnnnnnnnnnnnnnnnnnnnnnnnnnnnnnnnnnnnnnnnnnnnnnnnnnnnnnnnnnnnnnnnnnnnnnnnnnnnnnnnnnnnnnnnnnnnnnnnnnnnnnnnnnnnnnnnnnnnnnnnnnnnnnnnnnnnnnnnnnnnnnnnnnnnnnnnnnnnnnnnnnnnnnnnnnnnnnnnnnnnnnnnnnnnnnnnnnnnnnnnnnnnnnnnnnnnnnnnnnnnnnnnnnnnnnnnnnnnnnnnnnnnnnnnnnnnnnnnnnnnnnnnnnnnnnnnnnnnnnnnnnnnnnnnnnnnnnnnnnnnnnnnnnnnnnnnnnnnnnnnnnnnnnnnnnnnnnnnnnnnnnnnnnnnnnnnnnnnnnnnnnnnnnnnnnnnnnnnnnnnnnnnnnnnnnnnnnnnnnnnnnnnnnnnnnnnnnnnnnnnnnnnnnnnnnnnnnnnnnnnnnnnnnnnnnnnnnnnnnnnnnnnnnnnnnnnnnnnnnnnnnnnnnnnnnnnnnnnnnnnnnnnnnnnnnnnnnnnnnnnnnnnnnnnnnnnnnnnnnnnnnnnnnnnnnnnnnnnnnnnnnnnnnnnnnnnnnnnnnnnnnnnnnnnnnnnnnnnnnnnnnnnnnnnnnnnnnnnnnnnnnnnnnnnnnnnnnnnnnnnnnnnnnnnnnaatagcaacaaagatactaaacaaaaagcaggaaaacttagcttcatcagcgtgggaaacaagtttaannnnnnnnnnnnnnnnnnnnnnnnnnnnnnnnnnnnnnnnnnnnnnnnnnnnnnnnnnnnnnnnnnnnnnnnnnnnnnnnnnnnnnnnnnnnnnnnnnnnnnnnnnnnnnnnnnnnnnnnnnnnnnnnnnnnnnnnnnnnnnnnnnnnnnnnnnnnnnnnnnnnnnnnnnnnnnnnnnnnnnnnnnnnnnnnnnnnnnnnnnnnnnnnnnnnnnnnnnnnnnnnnnnnnnnnnnnnnnnnnnnnnnnnnnnnnnnnnnnnnnnnnnnnnnnnnnnnnnnnnnnnnnnnnnnnnnnnnnnnnnnnnnnnnnnnnnnnnnnnnnnnnnnnnnnnnnnnnnnnagtttgcagaatttgatcagatcatgaagtctgaccctgaccacttagcagagttggttaaaagagtcaatcactggctcacatgcagtcgctggaagaaagttcagtggtgctcactctcagtcatcaaannnnnnnnnnnnnnnnnnnnnnnnnnnnnnnnnnnnnnnnnnnnnnnnnnnnnnnnnnnnnnnnnnnnnnnnnnnnnnnnnnnnnnnnnnnnnnnnnnnnnnnnnnnnnnnnnnnnnnnnnnnnnnnnnnnnnnnnnnnnnnnnnnnnnnnnnnnnnnnnnnnnnnnnnnnnnnnnnnnnnnnnnnnnnnnnnnnnnnnnnnnnnnnnnnnnnnnnnnnnnnnnnnnnnnnnnnnnnnnnnnnnnnnnnnnnnnnnnnnnnnnnnnnnnnnnnnnnnnnnnnnnnnnnnnnnnnnnnnnnnnnnnnnnnnnnnnnnnnnnnnnnnnnnnnnnnnnnnnnnnnnnnnnnnnnnnnnnnnnnnnnnnnnnnnnnnnnnnnnnnnnnnnnnnnnnnnnnnnnnnnnnnnnnnnnnnnnnnnnnnnnnnnnnnnnnnnnnnnnnnnnnnnnnnnnnnnnnnnnnnnnnnnnnnnnnnnnnnnnnnnnnnnnnnnnnnnnnnnnnnnnnnnnnnnnnnnnnnnnnnnnnnnnnnnctgaagtggaggcacagctggcccgacagaaggaggaggaatcccagcagcaagcggttctggagcaggagcgcagggaccgggagctggctctgaggattgcccagagtgaagccgagctcatcagtgatgaggcccaggccgacctggcnnnnnnnnnnnnnnnnnnnnnnnnnnnnnnnnnnnnnnngaacaaatggccaaagaaatgtcagaatttttgagtagnnnnnnnnnnnnnnnnnnnnnnnnnnnnnnnnnnnnnnnnnnnnnnnnnnnnnnnnnnnnnnnnnnnnnnnnnnnnnnnnnnnnnnnnnnnnnnnnnnnnnnnnnnnnnnnnnnnnnnnnnnnnnnnnnnnnnnnnnnnnnnnnnnnnnnnnnnnnnnnnnnnnnnnnnnnnnnnnnnnnnnnnnnnnnnnnnnnnnnnnnnnnnnnnnnnnnnnnnnnnnnnnnnnnnnnnnnnnnnnnnnnnnnnnnnnnnnnnnnnnnnnnnnnnnnnnnnnnnnnnnnnnnnnnnnnnnnnnnnnnnnnnnnnnnnnnnnnnnnnnnnnnnnnnnnnnnnnnnnnnnnnnnnnnnnnnnnnnnnnnnnnnnnnnnnnnnnnnnnnnnnnnnnnnnnnnnnnnnnnnnnnnnnnnnnnnnnnnnnnnnnnnnnnnnnnnnnnnnnnnnnnnnnnnnnnnnnnnnnnnnnnnnnnnnnnnnnnnnnnnnnnnnnnnnnnnnnnnnnnnnnnnnnnnnnnnnnnnnnnnnnnnnnnnnnnnnnnnnnnnnnnnnnnnnnnnnnnnnnnnnnnnnnnnnnnnnnnnnnnnnnnnnnnnnnnnnnnnnnnnnnnnnnnnnnnnnnnnnnnnnnnnnnnnnnnnnnnnnnnnnnnnnnnnnnnnnnnnnnnnnnnnnnnnnnnnnnnnnnnnnnnnnnnnnnnnnnnnnnnnnnnnnnnnnnnnnnnnnnnnnnnnnnnnnnnnnnnnnnnnnnnnnnnnnnnnnnnnnnnnnnnnnnnnnnnnnnnnnnnnnnnnnnnnnnnnnnnnnnnnnnnnnnnnnnnnnnnnnnnnnnnnnnnnnnnnnnnnnnnnnnnnnnnnnnnnnnnnnnnnnnnnnnnnnnnnnnnnnnnnnnnnnnnnnnnnnnnnnnnnnnnnnnnnnnnnnnnnnnnnnnnnnnnnnnnnnnnnnnnnnnnnnnnnnnnnnnnnnnnnnnnnnnnnnnnnnnnnnnnnnnnnnnnnnnnnnnnnnnnnnnnnnnnnnnnnnnnnnnnnnnnnnnnnnnnnnnnnnnnnnnnnnnnnnnnnnnnnnnnnnnnnnnnnnnnnnnnnnnnnnnnnnnnnnnnnnnnnnnnnnnnnntaaaatgatccaggcactaatgttttggtctgaaaagctgtgtactttcgttatggacattttcagaaatttttggaaatttccattaaaggtggaaaatctattattttcctcctttgcaatgtcttagtttgagtgaaacacttctaagttctacaattctagaaagagccttaatgtatttgatgtattctgtgataagaggtactaaatagtatccagcacagatttgcttttctttgctagcaaaatgtgtgttgctgtcagaatattctttttatattccatggaaaaataaaggaaattcagattgtttaaatgcctaaaagttttgagataagttttgtttcaattaggaaaggaaatagattttgggtggcataatggcttaactggactgaattcaaatactctttcaatttcatctcaatagcgatttttgtgtaagaatcttgtccaagttgttcattgatttagcaagtgttctgcttcctacatctttctttttaagaaattcctagtgtcttttttggcctttgaggttttggtaactgtagacctgtttcataagctttgtaattcagaagtccttgtatttagtaagtgcttgttttacataactgataattttaaaatgttttatttgtgtgctgttagtattgattcaaatgtcagcagctttaagcctaatatttatgactttcatattaggaatttaaagacaaaaatacataaaggagttatgctgacataattctaaggagttttgttgtattttagaataaaattataaag

SEQ ID NO: 23961 - DNA, 1294 bp, Macaca Mulatta
  misc_feature (1)...(1294): n = A,T,C or G
tgcccgtgcctagtggcatgctgcccgccagccacccggaccctgccttctccatcttcccacctgatgcccttaagctacctgagaaccagacatcgccaggcgagccacctgagcatggaggtccagcagaggttgtccatgacagcccagtcccagaggtaacctgggggcctgaggatgaggaactttggaggaaattgtccttccgccactggccgacgctcttcagctattacaacatcacgctggccaagaggnnnggtacatcagcctgctgcctgtcatcccagtcacactccgcctgaacccgagggaggccctggagggccggcaccctcaggatggccgcagtgcctggcccccaccggggcccatacctgctgggcactgggaagcgggacccaagggcccaggtggggtgcaggcccatggagacgtcacactgtacaagnnnnnnnnnnnnnnnnnnnnnnnnnnnnnnnnnnnnnnnnnnnnnnnnnnnnnnnnnnnnnnnnnnnnnnnnnnnnnnnnnnnnnnnnnnnnnnnnnnnnnnnnnnnnnnnnnnnnnnnnnnnnnnnnnnnnnnnnnnnnnnnnnnnnnnnnnnnnnnnnnnnnnnnnnnnnnnnnnnnnnnnnnnnnnnnnnnnnnnnnnnnnnnnnnnnnnnnnnnnnnnnnnnnnnnnnnnnnnnnnnnnnnnnnnnnnnnnnnnnnnnnnnnnnnnnnnnnnnnnnnnnnnnnnnnnnnnnnnnnnnnnnnnnnnnnnnnnnnggcagcgccgggacagtggcgtgggcagcgggcttgaggctcaggagagctgggaacgactttcagatggtgggaaggctggcccagaggagcctggggacagccctcccctgagacaccgcccccgggaccctccaccgccttccctcttcggggaccagcctgacctcacctgcttaattgacaccaacttttcggcgcagccacagccctcacagcccactcagcctgagccccggcaccgggcggtctgtggccgcgctcgggactccctaggctatgacttcagccgcctggtgcagcgcgtgtaccaggaggaggggctggcggccgtctgcacaccagccctgcgcccaccctcgcctgggccggtgctgccccaggcccctgaggacgagggtggctcccctgagaaaggctccccttcccttgcctgggcccccagtgcggagggttccatctggagcttggagctgcagggccacctcatcgtggtggggcggagcagcggccggctggaggt

SEQ ID NO: 23962 - DNA, 1753 bp, Macaca Mulatta
  misc_feature (1)...(1753): n = A,T,C or G
gcatgtcacactaagtgtgttcacctgttgcagttgggctcataataatagctggcatgtacctggctctggccacgtgctaggcactcctcacagcttgacctgggtttgcttccacaccctcagaagaggtgagccagcacagcagaggcactggcggtgaagtggcggagccccagtcggaatccagcggcttctgaaagtgccttggtgtgagaaggaggaaggggctgcttggagagctgggctctggcatgtcatgtttagcccactgagaatataccctcaggtgactccttcccaatcctgaaagggaaagcagctgtcacctgacctctggcgggtccaacatagccttcagcttacctctgcaggaggccaagtgacagccagccctggaaccaccacacccccagcagctgctgcagccagtgtgctttcgacaaatgaaaaagcaggttggggccagggagtcagcaagtcaccccagctctgtgatgtgacttcgggggagtctcagtgccactttggtccccagccacggactttatacagtgagggccactccccgacctgagtcagtgtccttcgtctcacagtgcccccctcccttctgttcagtaaacaaactgaagccaaaagcgaagcagtggccaagtgtgacccagagatggggtgtcctggcccttagtgacacagctcctctctgggcaccctgtctgcttgtctcctccaggaagcgttagggctgatgggtgactcagcaaggcaatgtcagaactggggctgggcataggcctttgtcctcgtccccagcactcgcctccctgtggaagatgaacacatcagccacctgtgtacagccgctcgcttcgtgtgctccttgttgcctgagaggaaaccttggggtgcccagggtggggacagnnnnnnnnnnnnnnnnnnnnnnnnnnnnnnnnnnnnnnnnnnnnnnnnnnnnnnnnnnnnnnnnnnnnnnnnnnnnnnnnnnnnnnnnnnnnnnnnnnnnnnnnnnnnnnnnnnnnnnnnnnnnnnnnnnnnnnnnnnnnnnnnnnnnnnnnnnnnnnnnnnnnnnnnnnnnnnnnnnnnnnnnnnnnnnnnnnnnnnnnnnnnnnnnnnnnnnnnnnnnnnnnnnnnnnnnnnnnnnnnnnnnnnnnnnnnnnnnnnnnnnnnnnnnnnnnnnnnnnnnnnnnnnnnnnnnnnnnnnnnnnnnnnnnnnnnnnnnnnnnnnnnnnnnnnnnnnnnnnnnnnnnnnnnnnnnnnnnnnnnnnnnnnnnnnnnnnnnnnnnnnnnnnnnnnnnnnnnnnnnnnnnnnnnnnnnnnnnnnnnnnnnnnnnnnnnnnnnnnnnnnnnnnnnnnnnnnnnnnnnnnnnnnnnnnnnnnnnnnnnnnnnnnnnnnnnnnnnnnnnnnnnnnnnnnnnnnnnnnnnnnnnnnnnnnnnnnnnnnnnnnnnnnnnnnnnnnnnnnnnnnnnnnnnnnnnnnnnnnnnnnnnnnnnnnnnnnnnnnnnnnnnnnnnnnnnnnnnnnnnnnnnnnnnnnnnnnnnnnnnnnnnnnnnnnnnnnnnnnnctgcctccctctgcgtttgtgtctgccacatcccaggccaccacctccaaggatgaaaaggtggctgcctgcagcttccacagaatccctccctcactgcctcactgccagagcagcaccttctctgtagcacctctgctgtctcagatgcctccagcaaataaaca

SEQ ID NO: 23963 - DNA, 3374 bp, Macaca Mulatta
  misc_feature (1)...(3374): n = A,T,C or G
tgtgtatttgttggttctcctttgagctgctagtacgcctcctggcctgtccaagcaaggcgatcttcttcaagaacgtgatgaacctcatcgattttgtggctatcctgccctactttgtggcactaggcaccgagctggcccggcagcgaggggtgggccaacaggccatgtcactggccatcctgagagtcatccgattggtgcgtgtcttccgcatcttcaagctgtcccggcactcaaagggcctgcaaatcttgggccagacgcttcgggcctccatgcgtgagctgggcctcctcatctttttcctcttcatcggtgtggtcctcttttccagcgcggtctactttgccgaagtcgaccgggtggactcccatttcactagcatccctgagtccttctggtgggcggtggtcaccatgactacagttggctatggagacatggcacctgtcactgtaggtggcaagatagtgggctctctgtgtgccattgccggcgtgctgaccatttccctgcctgtgcccgtcattgtctccaatttcagctacttttatcaccgggagacagagggcgaagaggctgggatgttcagccatgtggacacgcagccttgtggcccactggagggcaaggccaatggggggctggtggatggggaggtacctgagctaccacctccactctgggcacccccagggaaacatctggtcaccgaagtgtgagggacagttgaggtctgcaggacctcacacctccctagagggagggagggagggcagggtggannnnnnnnnnnnnnnnnnnnnnnnnnnnnnnnnnnnnnnnnnnnnnnnnnnnnnnnnnnnnnnnnnnnnnnnnnnnnnnnnnnnnnnnnnnnnnnnnnnnnnnnnnnnnnnnnnnnnnnnnnnnnnnnnnnnnnnnnnnnnnnnnnnnnnnnnnnnnnnnnnnnnnnnnnnnnnnnnnnnnnnnnnnnnnnnnnnnnnnnnnnnnnnnnnnnnnnnnnnnnnnnnnnnnnnnnnnnnnnnnnnnnnnnnnnnnnnnnnnnnnnnnnnnnnnnnnnnnnnnnnnnnnnnnnnnnnnnnnnnnnnnnnnnnnnnnnnnnnnnnnnnnnnnnnnnnnnnnnnnnnnnnnnnnnnnnnnnnnnnnnnnnnnnnnnnnnnnnnnnnnnnnnnnnnnnnnnnnnnnnnnnnnnnnnnnnnnnnnnnnnnnnnnnnnnnnnnnnnnnnnnnnnnnnnnnnnnnnnnnnnnnnnnnnnnnnnnnnnnnnnnnnnnnnnnnnnnnnnnnnnnnnnnnnnnnnnnnnnnnnnnnnnnnnnnnnnnnnnnnnnnnnnnnnnnnnnnnnnnnnnnnnnnnnnnnnnnnnnnnnnnnnnnnnnnnnnnnnnnnnnnnnnnnnnnnnnnnnnnnnnnnnnnnnnnnnnnnnnnnnnnnnnnnnnnnnnnnnnnnnnnnnnnnnnnnnnnnnnnnnnnnnnnnnnnnnnnnnnnnnnnnnnnnnnnnnnnnnnnnnnnnnnnnnnnnnnnnnnnnnnnnnnnnnnnnnnnnnnnnnnnnnnnnnnnnnnnnnnnnnnnnnnnnnnnnnnnnnnnnnnnnnnnnnnnnnnnnnnnnnnnnnnnnnnnnnnnnnnnnnnnnnnnnnnnnnnnnnnnnnnnnnnnnnnnnnnnnnnnnnnnnnnnnnnnnnnnnnnnnnnnnnnnnnnnnnnnnnnnnnnnnnnnnnnnnnnnnnnnnnnnnnnnnnnnnnnnnnnnnnnnnnnnnnnnnnnnnnnnnnnnnnnnnnnnnnnnnnnnnnnnnnnnnnnnnnnnnnnnnnnnnnnnnnnnnnnnnnnnnnnnnnnnnnnnnnnnnnnnnnnnnnnnnnnnnnnnnnnnnnnnnnnnnnnnnnnnnnnnnnnnnnnnnnnnnnnnnnnnnnnnnnnnnnnnnnnnnnnnnnnnnnnnnnnnnnnnnnnnnnnnnnnnnnnnnnnnnnnnnnnnnnnnnnnnnnnnnnnnnnnnnnnnnnnnnnnnnnnnnnnnnnnnnnnnnnnnnnnnnnnnnnnnnnnnnnnnnnnnnnnnnnnnnnnnnnnnnnnnnnnnnnnnnnnnnnnnnnnnnnnnnnnnnnnnnnnnnnnnnnnnnnnnnnnnnnnnnnnnnnnnnnnnnnnnnnnnnnnnnnnnnnnnnnnnnnnnnnnnnnnnnnnnnnnnnnnnnnnnnnnnnnnnnnnnnnnnnnnnnnnnnnnnnnnnnnnnnnnnnnnnnnnnnnnnnnnnnnnnnnnnnnnnnnnnnnnnnnnnnnnnnnnnnnnnnnnnnnnnnnnnnnnnnnnnnnnnnnnnnnnnnnnnnnnnnnnnnnnnnnnnnnnnnnnnnnnnnnnnnnnnnnnnnnnnnnnnnnnnnnnnnnnnnnnnnnnnnnnnnnnnnnnnnnnnnnnnnnnnnnnnnnnnnnnnnnnnnnnnnnnnnnnnnnnnnnnnnnnnnnnnnnnnnnnnnnnnnnnnnnnnnnnnnnnnnnnnnnnnnnnnnnnnnnnnnnnnnnnnnnnnnnnnnnnnnnnnnnnnnnnnnnnnnnnnnnnnnnnnnnnnnnnnnnnnnnnnnnnnnnnnnnnnnnnnnnnnnnnnnnnnnnnnnnnnnnnnnnnnnnnnnnnnnnnnnnnnnnnnnnnnnnnnnnnnnnnnnnnnnnnnnnnnnnnnnnnnnnnnnnnnnnnnnnnnnnnnnnnnnnnnnnnnnnnnnnnnnnnnnnnnnnnnnnnnnnnnnnnnnnnnnnnnnnnnnnnnnnnnnnnnnnnnnnnnnnnnnnnnnnnnnnnnnnnnnnnnnnnnnnnnnnnnnnnnnnnnnnnnnnnnnnnnnnnnnnnnnnnnnnnnnnnnnnnnnnnnnnnnnnnnnnnnnnnnnnnnnnnnnnnnnnnnnnnnnnnnnnnnnnnnnnnnnnnnnnnnnnnnnnnnnnnnnnnnnnnnnnnnnnnnnnnnnnnnnnnnnnnnnnnnnnnnnnnnnnnnnnnnnnnnnnnngcctgtccctaccctccccgaagctcaggaaggctgtcagacaggctgggggcctcactctgttttccaggggagaaacctgagtctcagagcaggggagtggcttcccaaggtctcgcagcttgtccccaggggccaggcaggctgtctgtctgcttcacatggtcccgtcagcctgctgggacacacaggtcctcctgagttccatagcctcatttcttacagacagggaaactgaggctcagagcggcggaggttacccaaggtcacaaggccgaacattttcagaattctttcagaactcaaagggcatttagaggagaaggaaggctgaaatcactaacacatatagggcttcctttggtatcaaagtactttacttggattaatttatta

SEQ ID NO: 23964 - DNA, 121 bp, Macaca Mulatta
acctgggcttccagaccatccaggtagaccatcagcaagccgaagtcttcatcgtggagcagactgtccactcagaggagggcatccccatgtcctgccagtactacctgctctccgatgg

SEQ ID NO: 23965 - DNA, 611 bp, Macaca Mulatta
ggcttttggaggagaaccaaaacgacaagttccaagaagaagatgaagctccgcctccgccactcagtcccagccctgcccaggaagaagggcctgtggggctttgcctgtgcccgtccaccaaaggctgtcacctgtctcgaaatcagcagccctccccatcccaatcccaggcagcttgtgtgtacaatcagcttctctagcaactctgtatctgttggcttcaagagagtattttgcctccacatatgtacccttctcctttttttaaagatggatttaaaccaagatgcctccaggaaagagggcgaaatgagtatattcacagaggaatccaaaaaatacagttgggggaaaatgcaataatttttgatgagatgggtgaaggacaagaagtgagttctgtcaattattgtagatacaatattctgattaaatctggaaaataaaaggcagcctgttttttctgcttttattgtattaacagctgaggtaggctaaagttatttaaaataaaattaaatttatgatccaagtagcttatttttccctttaaatctcattgtaaatatatttgatttcttgtagaaattgatttccttctgtttaat

SEQ ID NO: 23966 - DNA, 499 bp, Macaca Mulatta
taaaatctggtggtaatgcactacgcgcctgtttcttttgtccaaaacctccattgtttcaagtgaatctgttggataaagtgactaaactccaaaatttggagttggtcaaaagaactactaatgactgttgaattttgctgcatatttgaccttacgaatgctgtttacaggatactgtcatcatgttcattattaatattacttacgccattcttgtcacttaaggcagtcttccatgtccaaaatgaccccctcttgatgggctcacatggaaagactcacaattgccacgttttccataatctttgagttctgtgtctgctcctaatcagacatctcaggggaaatgacacacaaggagatgaggactagacagatccaatgctccctaacaggtctacctggtttatgtggggctccccaaaacctctcacttctcctgcagcctctctgatttttctgaagcacaaataaatcgtcatcccagttgtcccca

SEQ ID NO: 23967 - DNA, 93 bp, Macaca Mulatta
ctattgtggaaaacatggctgagttccggcctgagatgtgtacagacggtgcccagcagggtcttctacagtggctgttgaagaggctgaagg

SEQ ID NO: 23968 - DNA, 631 bp, Macaca Mulatta
  misc_feature (1)...(631): n = A,T,C or G
nnnnnnnnnnnnnnnnnnnnnnnacgtnnnnnnnnnnnnnnnnnnnnnnnnnnnnnnnnntnnnnnnnnnnnnnnnnnnnnnnnnnnnnnnnnnnnnnnnnnnnnnnnnnnttacagaattttattgttaaatcacagaaactttagtgcattactttactcacaaagtccatttaatagcaactgcgtatcctgctggctttgcttgctgtttcctggcaaccagaagtagacagaagcatgggtgcccaagtgggctgcagacagcatccaacccacaccccagcgtccaacccacacccagcagacccctcagcatgccgccctctaacaggagccacaggcctaggaactcgccatccacatttatttgaaaagaaaggtcaaaaggagcctctatgagacgggcgagggctgcaggctgcagcagcacctcagcagccagggacacgtaggcaacacgagcaggcacagcgcggccaccactgtccacacgctcacacaagccaggcccgcggggcctttggagagctagcaggttacattcaggcagatggcccccttcccacccaaacccacagaaccccaaacaaggcatcaccaggtaagacacgggaaagccaaatcacag

SEQ ID NO: 23969 - DNA, 631 bp, Macaca Mulatta
ctgtgaaacagcaggagatattctctgctccttggggtcccatatctgggtccaacatacatgataacggctgtgccataaaagagtccaacgtacacagaggtgggagaagcaggtggagaaggctttcctctgaccttcccttgattggatctgaaggatagcacagaggatgcacatatatgaaactacaatagtggacaagggtcccaccagcccagaaattgctccggccaagaccatgttctcattgatgtgggtatcggcacaggcaagtttgagaacagccaagatttcacaaaaaaagtgattaattttctggggcctacagaagggtaaaggtagaagtaacacaagatgaatcaaggataaaacaactccaggggcccaggaagttgccgctagggtgatacagactctccaggtcatgatggccaaatatcggagggggtggcagatggccacgtaccgatcataggacataaccaccaggaggagacattctgtgacagcaaaagtggaaaagagaaaggtctgggtcatgcagcctgcaaaggagatgggcttggctggatgcaggcaggttcaccagcatctggggcactgtgttgcaggcgtaagcgatgttgac

SEQ ID NO: 23970 - DNA, 717 bp, Macaca Mulatta
ccacttcctgggcagcacagaggccatgctgttggccgtgatggcatttgaccgccttgtggctctcagcaagccacttcgctacactgtcaccatgaaccctcagctctgtacccagatggccatcacaatctggaccattggtttcttccatgccctgctgcactccgtaatgacttctcgcttgaacttctgtggttccaactgtatccatcacttcttctgtgatgtgaagccattgctaaagctggcctgtgggaacacggagctcaatcagtggttgctcagtactgtcacagggacaattgccatgggccccttctttctgacacttctctcctatttctacattatcacctatctctccttcaagacccattcttgtagcatgctccacaaagcactgtccacgtgtgcctcccacttcatggtagttattcttttgtatgcacctgttctcttcacctacattcatcctgcctcagggacctccatggaccaggaccggatcattgccatcatgtccactgtggtcactccagtactaaacccactgatctacactttgaggaacaaggaagtgaagggggccttggttagagtgatcagaaggctttgatttgaataaaccagagaactcttcagaggcataaataaccagcaatgaaaatgtagagatgtgtaattttactgcttcccagatgatttataagtgta

SEQ ID NO: 23971 - DNA, 2336 bp, Macaca Mulatta
  misc_feature (1)...(2336): n = A,T,C or G
agggagccagctctccgtggaccggcggcacctggtcctgtcgtcgggaacacttagaatctccggggttgccctccacgaccagggccagtacgaatgccaggctgtcaacatcatcggctcccagaaggtcgtggcccacttgactgtgcagcccagannnnnnnnnnnnnnnnnnnnnnnnnnnnnnnnnnnnnnnnnnnnnnnnnnnnnnnnnnnnnnnnnnnnnnnnnnnnnnnnnnnnnnnnnnnnnnnnnnnnnnnnnnnnnnnnnnnnnnnnnnnnnnnnnnnnnnnnnnnnnnnnnnnnnnnnnnnnnnnnnnnnnnnnnnnnnnnnnnnnnnnnnnnnnnnnnnnnnnnnnnnnnnnnnnnnnnnnnnnnnnnnnnnnnnnnnnnnnnnnnnnnnnnnnnnnnnnnnnnnnnnnnnnnnnnnnnnnnnnnnnnnnnnnnnnnnnnnnnnnnnnnnnnnnnnnnnnnnnnnnnnnnnnnnnnnnnnnnnnnnnnnnnnnnnnnnnnnnnnnnnnnnnnnnnnnnnnnngccgtcctcgttctccaaatgatttgctggccttgttccggtatccgagggatccttacacggttgaacaggcccgggcaggagaaatctttgaacggacattgcagctcattcaggagcacgtgcagcacggcttgatggtcgacctcaacgggacaagtnnnnnnnnnnnnnnnnnnnnnnnnnnnnnnnnnnnnnnnnnnnnnnnnnnnnnnnnnnnnnnnnnnnnnnnnnnnnnnnnnnnnnnnnnnnnnnnnnnnnnnnnnnnnnnnnnnnnnnnnnnnnnnnnnnnnnnnnnnnnnnnnnnnnnnnnnnnnnnnnnnnnnnnnnnnnnnnnnnnnnnnnnnnnnnnnnnnnnnnnnnnnnnnnnnnnnnnnnnnnnnnnnnnnnnnnnnnnnnnnnnnnnnnnnnnnnnnnnnnnnnnnnnnnnnnnnnnnnnnnnnnnnnnnnnnnnnnnnnnnnnnnnnnnnnnnnnnnnnnnnnnnnnnnnnnnnnnnnnnnnnnnnnnnnnnnnnnnnnnnnnnnnnnnnnnnnnnnnnnnnnnnnnnnnnnnnnnnnnnnnnnnnnnnnnnnnnnnnnnnnnnnnnnnnnnnnnnnnnnnnnnnnnnnnnnnnnnnnnnnnnnnnnnnnnnnnnnnnnnnnnnnnnnnnnnnnnnnnnnnnnnnnnnnnnnnnnnnnnnnnnnnnnnnnnnnnnnnnnnnnnnnnnnnnnnnnnnnnnnnnnnnnnnnnnnnnnnnnnnnnnnnnnnnnnnnnnnnnnnnnnnnnnnnnnnnnnnnnnnnnnnnnnnnnnnnnnnnnnnnnnnnnnnnnnnnnnnnnnnnnnnnnnnnnnnnnnnnnnnnnnnnnnnnnnnnnnnnnnnnnnnnnnnnnnnnnnnnnnnnnnnnnnnnnnnnnnnnnnnnnnnnnnnnnnnnnnnnnnnnnnnnnnnnnnnnnnnnnnnnnnnnnnnnnnnnnnnnnnnnnnnnnnnnnnnnnnnnnnnnnnnnnnnnnnnnnnnnnnnnnnnnnnnnnnnnnnnnnnnnnnnnnnnnnnnnnnnnnnnnnnnnnnnnnnnnnnnnnnnnnnnnnnnnnnnnnnnnnnnnnnnnnnnnnnnnnnnnnnnnnnnnnnnnnnnnnnnnnnnnnnnnnnnnnnnnnnnnnnnnnnnnnnnnnnnnnnnnnnnnnnnnnnnnnnnnnnnnnnnnnnnnnnnnnnnnnnnnnnnnnnnnnnnnnnnnnnnnnnnnnnnnnnnnnnnnnnnnnnnnnnnnnnnnnnnnnnnnnnnnnnnnnnnnnnnnnnnnnnnnnnnnnnnnnnnnnnnnnnnnnnnnnnnnnnnnnnnnnnnnnnnnnnnnnnnnnnnnnnnnnnnnnnnnnnnnnnnnnnnnnnnnnnnnnnnnnnnnnnnnnnnnnnnnnnnnnnnnnnnnnnnnnnnnnnnnnnnnnnnnnnnnnnnnnnnnnnnnnnnnnnnnnnnnnnnnnnnnnnnnnnnnnnnnnnnnnnnnnnnnnnnnnnnnnnnnnnnnnnnnnnnnnnnnnnnnnnnnnnnnnnnnnnnnnnnnnnnnnnnnnnnnnnnnnnnnnnnnnnnnnnnnnnnnnnnnnnnnnnnnnnnnnnnnnnnnnnnnnnnnnnnnnnnnnnnnnnnnnnnnnnnnnnnnnnnnnnnnnnnnnnnnnnnnnnnnnnnnnnnnggttgtatggctcgacactcaacatcgacctgtttccagcactcatggtggaggacctggtgcctggcagccggctgggccccaccctgatgtgtcttctcagcacacagttcaagcgcctgcgagatggggacaggt

SEQ ID NO: 23972 - DNA, 3361 bp, Macaca Mulatta
  misc_feature (1)...(3361): n = A,T,C or G
atctgcccccctttctgtctcacaaacaaccttaccacagtcatcttctaccctagtcctgcccagggtaacggagactcctgtgacttcagttcagacatcaactatgacatcatttatgacaatgctccatagtagtcaaactgcagaccttaagaactggagcaccccacaccaagagaaagtcataacagaatcaaagtcaccaagcctggtgtctctgcccacagagtcnnnnnnnnnnnnnnnnnnnnnnnnnnnnnnnnnnnnnnnnnnnnnnnnnnnnnnnnnnnnnnnnnnnnnnnnnnnnnnnnnnnnnnnnnnnnnnnnnnnnnnnnnnnnnnnnnnnnnnnnnnnnnnnnnnnnnnnnnnnnnnnnnnnnnnnnnnnnnnnnnnnnnnnnnnnnnnnnnnnnnnnnnnnnnnnnnnnnnnnnnnnnnnnnnnnnnnnnnnnnnnnnnnnnnnnnnnnnnnnnnnnnnnnnnnnnnnnnnnnnnnnnnnnnnnnnnnnnnnnnnnnnnnnnnnnnnnnnnnnnnnnnnnnnnnnnnnnnnnnnnnnnnnnnnnnnnnnnnnnnnnnnnnnnnnnnnnnnnnnnnnnnnnnnnnnnnnnnnnnnnnnnnnnnnnnnnnnnnnnnnnnnnnnnnnnnnnnnnnnnnnnnnnnnnnnnnnnnnnnnnnnnnnnnnnnnnnnnnnnnnnnnnnnnnnnnnnnnnnnnnnnnnnnnnnnnnnnnnnnnnnnnnnnnnnnnnnnnnnnnnnnnnnnnnnnnnnnnnncagtcaacagctgtgccacgaacccttgtcttcatgatggcgaatgcatcgcagacaacaccagccgtggctaccactgcaggtgcccgccttcctggcaaggggatgattgcagtgnnnnnnnnnnnnnnnnnnnnnnnnnnnnnnnnnnnnnnnnnnnnnnnnnnnnnnnnnnnnnnnnnnnnnnnnnnnnnnnnnnnnnnnnnnnnnnnnnnnnnnnnnnnnnnnnnnnnnnnnnnnnnnnnnnnnnnnnnnnnnnnnnnnnnnnnnnnnnnnnnnnnnnnnnnnnnnnnnnnnnnnnnnnnnnnnnnnnnnnnnnnnnnnnnnnnnnnnnnnnnnnnnttaaatatgtgtttttcagcgttacctagttacatccgatctacagttcacgcctctaggnnnnnnnnnnnnnnnnnnnnnnnnnnnnnnnnnnnnnnnnnnnnnnnnnnnnnnnnnnnnnnnnnnnnnnnnnnnnnnnnnnnnnnnnnnnnnnnnnnnnnnnnnnnnnnnnnnnnnnnnnnnnnnnnnnnnnnnnnnnnnnnnnnnnnnnnnnnnnnnnnnnnnnnnnnnnnnnnnnnnnnnnnnnnnnnnnnnnnnnnnnnnnnnnnnnnnnnnnnnnnnnnnnnnnnnnnnnnnnnnnnnnnnnnnnnnnnnnnnnnnnnnnnnnnnnnnnnnnnnnnnnnnnnnnnnnnnnnnnnnnnnnnnnnnnnnnnnnnnnnnnnnnnnnnnnnnnnnnnnnnnnnnnnnnnnnnnnnnnnnnnnnnnnnnnnnnnnnctatcagcttatcactgtggtgatcgcagctgccggaggtgggctcctgctcatcctaggcatcgcactgattgttacctgttgcagnnnnnnnnnnnnnnnnnnnnnnnnnnnnnnnnnnnnnnnnnnnnnnnnnnnnnnnnnnnnnnnnnnnnnnnnnnnnnnnnnnnnnnnnnnnnnnnnnnnnnnnnnnnnnnnnnnnnnnnnnnnnnnnnnnnnnnnnnnnnnnnnnnnnnnnnnnnnnnnnnnnnnnnnnnnnnnnnnnnnnnnnnnnnnnnnnnnnnnnnnnnnnnnnnnnnnnnnnnnnnnnnnnnnnnnnnnnnnnnnnnnnnnnnnnnnnnnnnnnnnnnnnnnnnnnnnnnnnnnnnnnnnnnnnnnnnnnnnnnnnnnnnnnnnnnnnnnnnnnnnnnnnnnnnnnnnnnnnnnnnnnnnnnnnnnnnnnnnnnnnnnnnnnnnnnnnnnnnnnnnnnnnnnnnnnnnnnnnnnnnnnnnnnnnnnnnnnnnnnnnnnnnnnnnnnnnnnnnnnnnnnnnnnnnnnnnnnnnnnnnnnnnnnnnnnnnnnnnnnnnnnnnnnnnnnnnnnnnnnnnnnnnnnnnnnnnnnnnnnnnnnnnnnnnnnnnnnnnnnnnnnnnnnnnnnnnnnnnnnnnnnnnnnnnnnnnnnnnnnnnnnnnnnnnnnnnnnnnnnnnnnnnnnnnnnnnnnnnnnnagacctctagacatcagtgcagggacctggttttcccttcatttgcactttagtaaattggatgggaggtttccttttggatctgtttcaagactgttccagaaagaaggcttcctttcctgagacacttccataggcagcaatttggtgattcatttgcagcaaaatactggcttgttaattattttcctgccagcgcctgtgtgctaaacaacagatgaggatgagcgcaccactagagtctgaagacgtcgccgctgaacggacagtgttttcatatgtttctaggttgtcgtatgctacagtttccaagccaacccccacaatgaggaaatgtgtgaggcacagcacacaattgcaatgtgtttttttttaagtcaaggtgacacatttatttaagattttttttttaatctctttgcagttaaatctcactttttcaaacaagcctggatcaaggcaaaacaaattacatttggtttcagctggaggctctgcaggccgattgcaggcaggggggcatttttcatccatgagggtccagcctgggacctgggactctgaccaccatcgtggaggccagaggcagctgcgtaaggaggagaaatggcaaactgaatgcaggtttcaccactctgggaaagtagcttaatgagcccctgcagctggatgtgtttagagggacgggctgaataggcaggttagatttcctgcatcgacagtgctttgggaagctgcgtggattcctgaggaagaacagggagccgagatggagccacatgtgagtttgctcacctgctactgcagcactttgtacccagaatctcgtccacaaaccccatgtaaactttcaaccactgaaagctgtttattcggctgaagaaataactatttttttttctcacccagtcatttgtacctctttatatggctgtgtcgcaccctccagaaatgtggttctgcttccagtcagtgtgggagaactgaagacttccggttggtcgaggaagtgagggttgaccttcgggaaggaagttccactcgtcttatttattatgcctgtgacgtgggtcctgccagggagacatccagtactcggtgtct

SEQ ID NO: 23973 - DNA, 769 bp, Macaca Mulatta
  misc_feature (1)...(769): n = A,T,C or G
attctttaaatcttctttaatgtgcacgttttcctttttaatataaaataaacatttaaaaggaaaagcaaagaccaaattgaaacatttaatcctctctcaagtcctggattctgtgccaaaaaagtgtttctatactaaaaagcttaattacctcttttgtgatatattctaaataatgaaaacaaaaaatgcatggcacagttttgaacctaattctgtgttttgcattttcagttgcaatacctaccccagctaactggcagcagcatccttccagctttggacaataagaagtactactgtaataccaagaaacttaactaccattttccagacatttaaaggagctaggagacatgattttttaaaaaggaatcaatagatactttgaagaaaataaaacttatacagttgatcaaaaacaattacaatgttgaaaacacaccaggagaaaacataagcaagaaactgggaggccaattggcaagatatgaagggaaattccagatccagtcttccatgcttgatgatggtgtccagaaaagaaagaaaaaacctgtttggagttgcacttgtatttcagttcatgtaagcagccgagcttatggactgaatatgaactgtcccatacctctggcaaaattagatgataccaaaaagatttatgcttcagttgtaccacatgccacacaagaaaaatggactancaaatgcccatatatatttccttggatctgttgccttgagtcctatctcctgcctctca

SEQ ID NO: 23974 - DNA, 7229 bp, Macaca Mulatta
  misc_feature (1)...(7229): n = A,T,C or G
aggagaatgcaagcctacagttcctgactaccaaatagacaagctactattggcaaactggggtcttcctaaagcagttctggaaaaataccacagttttggtgtaaaaaagatgttcgaatggcaggcagagtgccttttgctgggacaagtcctggaaggaaagaatttagtttattcagnnnnnnnnnnnnnnnnnnnnnnnnnnnnnnnnnnnnnnnnnnnnnnnnnnnnnnnnnnnnnnnnnnnnnnnnnnnnnnnnnnnnnnnnnnnnnnnnnnnnnnnnnnnnnnnnnnnnnnnnnnnnnnnnnnnnnnnnnnnnnnnnnnnnnnnnnnnnnnnnnnnnnnnnnnnnnnnnnnnnnnnnnnnnnnnnnnnnnnnnnnnnnnnnnnnnnnnnnnnnnnnnnnnnnnnnnnnnnnnnnnnnnnnnnnnnnnnnnnnnnnnnnnnnnnnnnnnnnnnnnnnnnnnnnnnnnnnnnnnnnnnnnnnnnnnnnnnnnnnnnnnnnnnnnnnnnnnnnnnnnnnnnnnnnnnnnnnnnnnnnnnnnnnnnnnnnnnnnnnnnnnnnnnnnnnnnnnnnnnnnnnnnnnnnnnnnnnnnnnnnnnnnnnnnnnnnnnnnnnnnnnnnnnnnnnnnnnnnnnnnnnnnnnnnnnnnnnnnnnnnnnnnnnnnnnnnnnnnnnnnnnnnnnnnnnnnnnnnnnnnnnnnnnnnnnnnnnnnnnnnnnnnnnnnnnnnnnnnnnnnnnnnnnnnnnnnnnnnnnnnnnnnnnnnnnnnnnnnnnnnnnnnnnnnnnnnnnnnnnnnnnnnnnnnnnnnnnnnnnnnnnnnnnnnnnnnnnnnnnnnnnnnnnnnnnnnnnnnnnnnnnnnnnnnnnnnnnnnnnnnnnnnnnnnnnnnnnnnnnnnnnnnnnnnnnnnnnnnnnnnnnnnnnnnnnnnnnnnnnnnnnnnnnnnnnnnnnnnnnnnnnnnnnnnnnnnnnnnnnnnnnnnnnnnnnnnnnnnnnnnnnnnnnnnnnnnnnnnnnnnnnnnnnnnnnnnnnnnnnnnnnnnnnnnnnnnnnnnnnnnnnnnnnnnnnnnnnnnnnnnnnnnnnnnnnnnnnnnnnnnnnnnnnnnnnnnnnnnnnnnnnnnnnnnnnnnnnnnnnnnnnnnnnnnnnnnnnnnnnnnnnnnnnnnnnnnnnnnnnnnnnnnnnnnnnnnnnnnnnnnnnnnnnnnnnnnnnnnnnnnnnnnnnnnnnnnnnnnnnnnnnnnnnnnnnnnnnnnnnnnnnnnnnnnnnnnnnnnnnnnnnnnnnnnnnnnnnnnnnnnnnnnnnnnnnnnnnnnnnnnnnnnnnnnnnnnnnnnnnnnnnnnnnnnnnnnnnnnnnnnnnnnnnnnnnnnnnnnnnnnnnnnnnnnnnnnnnnnnnnnnnnnnnnnnnnnnnnnnnnnnnnnnnnnnnnnnnnnnnnnnnnnnnnnnnnnnnnnnnnnnnnnnnnnnnnnnnnnnnnnnnnnnnnnnnnnnnnnnnnnnnnnnnnnnnnnnnnnnnnnnnnnnnnnnnnnnnnnnnnnnnnnnnnnnnnnnnnnnnnnnnnnnnnnnnnnnnnnnnnnnnnnnnnnnnnnnnnnnnnnnnnnnnnnnnnnnnnnnnnnnnnnnnnnnnnnnnnnnnnnnnnnnnnnnnnnnnnnnnnnnnnnnnnnnnnnnnnnnnnnnnnnnnnnnnnnnnnnnnnnnnnnnnnnnnnnnnnnnnnnnnnnnnnnnnnnnnnnnnnnnnnnnnnnnnnnnnnnnnnnnnnnnnnnnnnnnnnnnnnnnnnnnnnnnnnnnnnnnnnnnnnnnnnnnnnnnnnnnnnnnnnnnnnnnnnnnnnnnnnnnnnnnnnnnnnnnnnnnnnnnnnnnnnnnnnnnnnnnnnnnnnnnnnnnnnnnnnnnnnnnnnnnnnnnnnnnnnnnnnnnnnnnnnnnnnnnnnnnnnnnnnnnnnnnnnnnnnnnnnnnnnnnnnnnnnnnnnnnnnnnnnnnnnnnnnnnnnnnnnnnnnnnnnnnnnnnnnnnnnnnnnnnnnnnnnnnnnnnnnnnnnnnnnnnnnnnnnnnnnnnnnnnnnnnnnnnnnnnnnnnnnnnnnnnnnnnnnnnnnnnnnnnnnnnnnnnnnnnnnnnnnnnnnnnnnnnnnnnnnnnnnnnnnnnnnnnnnnnnnnnnnnnnnnnnnnnnnnnnnnnnnnnnnnnnnnnnnnnnnnnnnnnnnnnnnnnnnnnnnnnnnnnnnnnnnnnnnnnnnnnnnnnnnnnnnnnnnnnnnnnnnnnnnnnnnnnnnnnnnnnnnnnnnnnnnnnnnnnnnnnnnnnnnnnnnnnnnnnnnnnnnnnnnnnnnnnnnnnnnnnnnnnnnnnnnnnnnnnnnnnnnnnnnnnnnnnnnnnnnnnnnnnnnnnnnnnnnnnnnnnnnnnnnnnnnnnnnnnnnnnnnnnnnnnnnnnnnnnnnnnnnnnnnnnnnnnnnnnnnnnnnnnnnnnnnnnnnnnnnnnnnnnnnnnnnnnnnnnnnnnnnnnnnnnnnnnnnnnnnnnnnnnnnnnnnnnnnnnnnnnnnnnnnnnnnnnnnnnnnnnnnnnnnnnnnnnnnnnnnnnnnnnnnnnnnnnnnnnnnnnnnnnnnnnnnnnnnnnnnnnnnnnnnnnnnnnnnnnnnnnnnnnnnnnnnnnnnnnnnnnnnnnnnnnnnnnnnnnnnnnnnnnnnnnnnnnnnnnnnnnnnnnnnnnnnnnnnnnnnnnnnnnnnnnnnnnnnnnnnnnnnnnnnnnnnnnnnnnnnnnnnnnnnnnnnnnnnnnnnnnnnnnnnnnnnnnnnnnnnnnnnnnnnnnnnnnnnnnnnnnnnnnnnnnnnnnnnnnnnnnnnnnnnnnnnnnnnnnnnnnnnnnnnnnnnnnnnnnnnnnnnnnnnnnnnnnnnnnnnnnnnnnnnnnnnnnnnnnnnnnnnnnnnnnnnnnnnnnnnnnnnnnnnnnnnnnnnnnnnnnnnnnnnnnnnnnnnnnnnnnnnnnnnnnnnnnnnnnnnnnnnnnnnnnnnnnnnnnnnnnnnnnnnnnnnnnnnnnnnnnnnnnnnnnnnnnnnnnnnnnnnnnnnnnnnnnnnnnnnnnnnnnnnnnnnnnnnnnnnnnnnnnnnnnnnnnnnnnnnnnnnnnnnnnnnnnnnnnnnnnnnnnnnnnnnnnnnnnnnnnnnnnnnnnnnnnnnnnnnnnnnnnnnnnnnnnnnnnnnnnnnnnnnnnnnnnnnnnnnnnnnnnnnnnnnnnnnnnnnnnnnnnnnnnnnnnnnnnnnnnnnnnnnnnnnnnnnnnnnnnnnnnnnnnnnnnnnnnnnnnnnnnnnnnnnnnnnnnnnnnnnnnnnnnnnnnnnnnnnnnnnnnnnnnnnnnnnnnnnnnnnnnnnnnnnnnnnnnnnnnnnnnnnnnnnnnnnnnnnnnnnnnnnnnnnnnnnnnnnnnnnnnnnnnnnnnnnnnnnnnnnnnnnnnnnnnnnnnnnnnnnnnnnnnnnnnnnnnnnnnnnnnnnnnnnnnnnnnnnnnnnnnnnnnnnnnnnnnnnnnnnnnnnnnnnnnnnnnnnnnnnnnnnnnnnnnnnnnnnnnnnnnnnnnnnnnnnnnnnnnnnnnnnnnnnnnnnnnnnnnnnnnnnnnnnnnnnnnnnnnnnnnnnnnnnnnnnnnnnnnnnnnnnnnnnnnnnnnnnnnnnnnnnnnnnnnnnnnnnnnnnnnnnnnnnnnnnnnnnnnnnnnnnnnnnnnnnnnnnnnnnnnnnnnnnnnnnnnnnnnnnnnnnnnnnnnnnnnnnnnnnnnnnnnnnnnnnnnnnnnnnnnnnnnnnnnnnnnnnnnnnnnnnnnnnnnnnnnnnnnnnnnnnnnnnnnnnnnnnnnnnnnnnnnnnnnnnnnnnnnnnnnnnnnnnnnnnnnnnnnnnnnnnnnnnnnnnnnnnnnnnnnnnnnnnnnnnnnnnnnnnnnnnnnnnnnnnnnnnnnnnnnnnnnnnnnnnnnnnnnnnnnnnnnnnnnnnnnnnnnnnnnnnnnnnnnnnnnnnnnnnnnnnnnnnnnnnnnnnnnnnnnnnnnnnnnnnnnnnnnnnnnnnnnnnnnnnnnnnnnnnnnnnnnnnnnnnnnnnnnnnnnnnnnnnnnnnnnnnnnnnnnnnnnnnnnnnnnnnnnnnnnnnnnnnnnnnnnnnnnnnnnnnnnnnnnnnnnnnnnnnnnnnnnnnnnnnnnnnnnnnnnnnnnnnnnnnnnnnnnnnnnnnnnnnnnnnnnnnnnnnnnnnnnnnnnnnnnnnnnnnnnnnnnnnnnnnnnnnnnnnnnnnnnnnnnnnnnnnnnnnnnnnnnnnnnnnnnnnnnnnnnnnnnnnnnnnnnnnnnnnnnnnnnnnnnnnnnnnnnnnnnnnnnnnnnnnnnnnnnnnnnnnnnnnnnnnnnnnnnnnnnnnnnnnnnnnnnnnnnnnnnnnnnnnnnnnnnnnnnnnnnnnnnnnnnnnnnnnnnnnnnnnnnnnnnnnnnnnnnnnnnnnnnnnnnnnnnnnnnnnnnnnnnnnnnnnnnnnnnnnnnnnnnnnnnnnnnnnnnnnnnnnnnnnnnnnnnnnnnnnnnnnnnnnnnnnnnnnnnnnnnnnnnnnnnnnnnnnnnnnnnnnnnnnnnnnnnnnnnnnnnnnnnnnnnnnnnnnnnnnnnnnnnnnnnnnnnnnnnnnnnnnnnnnnnnnnnnnnnnnnnnnnnnnnnnnnnnnnnnnnnnnnnnnnnnnnnnnnnnnnnnnnnnnnnnnnnnnnnnnnnnnnnnnnnnnnnnnnnnnnnnnnnnnnnnnnnnnnnnnnnnnnnnnnnnnnnnnnnnnnnnnnnnnnnnnnnnnnnnnnnnnnnnnnnnnnnnnnnnnnnnnnnnnnnnnnnnnnnnnnnnnnnnnnnnnnnnnnnnnnnnnnnnnnnnnnnnnnnnnnnnnnnnnnnnnnnnnnnnnnnnnnnnnnnnnnnnnnnnnnnnnnnnnnnnnnnnnnnnnnnnnnnnnnnnnnnnnnnnnnnnnnnnnnnnnnnnnnnnnnnnnnnnnnnnnnnnnnnnnnnnnnnnnnnnnnnnnnnnnnnnnnnnnnnnnnnnnnnnnnnnnnnnnnnnnnnnnnnnnnnnnnnnnnnnnnnnnnnnnnnnnnnnnnnnnnnnnnnnnnnnnnnnnnnnnnnnnnnnnnnnnnnnnnnnnnnnnnnnnnnnnnnnnnnnnnnnnnnnnnnnnnnnnnnnnnnnnnnnnnnnnnnnnnnnnnnnnnnnnnnnnnnnnnnnnnnnnnnnnnnnnnnnnnnnnnnnnnnnnnnnnnnnnnnnnnnnnnnnnnnnnnnnnnnnnnnnnnnnnnnnnnnnnnnnnnnnnnnnnnnnnnnnnnnnnnnnnnnnnnnnnnnnnnnnnnnnnnnnnnnnnnnnnnnnnnnnnnnnnnnnnnnnnnnnnnnnnnnnnnnnnnnnnnnnnnnnnnnnnnnnnnnnnnnnnnnnnnnnnnnnnnnnnnnnnnnnnnnnnnnnnnnnnnnnnnnnnnnnnnnnnnnnnnnnnnnnnnnnnnnnnnnnnnnnnnnnnnnnnnnnnnnnnnnnnnnnnnnnnnnnnnnnnnnnnnnnnnnnnnnnnnnnnnnnnnnnnnnnnnnnnnnnnnnnnnnnnnnnnnnnnnnnnnnnnnnnnnnnnnnnnnnnnnnnnnnnnnnnnnnnnnnnnnnnnnnnnnnnnnnnnnnnnnnnnnnnnnnnnnnnnnnnnnnnnnnnnnnnnnnnnnnnnnnnnnnnnnnnnnnnnnnnnnnnnnnnnnnnnnnnnnnnnnnnnnnnnnnnnnnnnnnnnnnnnnnnnnnnnnnnnnnnnnnnnnnnnnnnnnnnnnnnnnnnnnnnnnnnnnnnnnnnnnnnnnnnnnnnnnnnnnnnnnnnnnnnnnnnnnnnnnnnnnnnnnnnnnnnnnnnnnnnnnnnnnnnnnnnnnnnnnnnnnnnnnnnnnnnnnnnnnnnnnnnnnnnnnnnnnnnnnnnnnnnnnnnnnnnnnnnnnnnnnnnnnnnnnnnnnnnnnnnnnnnnnnnnnnnnnnnnnnnnnnnnnnnnnnnnnnnnnnnnnnnnnnnnnnnnnnnnnnnnnnnnnnnnncttccagatgttttccgtaaggtggaaatgccctctcagtactgcttggccttgctcgaactaaatggaattggctttagtactgcagaatgtgaaggtcagaaacacataatgcaagccaagctggatgcaattgagacccaggcctatcaactagctggccacagtttttctttcaccagttcagatgacatcgctgaggttnnnnnnnnnnnnnnnnnnnnnnnnnnnnnnnnnnnnnnnnnnnnnnnnnnnnnnnnnnnnnnnnnnnnnnnnnnnnnnnnnnnnnnnnnnnnnnnnnnnnnnnnnnnnnnnnnnnnnnnnnnnnnnnnnnnnnnnnnnnnnnnnnnnnnnnnnnnnnnnnnnnnnnnnnnnnnnnnnnnnnnnnnnnnnnnnnnnnnnnnnnnnnnnnnnnnnnnnnnnnnnnnnnnnnnnnnnnnnnnnnnnnnnnnnnnnnnnnnnnnnnnnnnnnnnnnnnnnnnnnnnnnnnnnnnnnnnnnnnnnnnnnnnnnaggacgaataacctttacagaaccaaatattcagaatgtgccaagagattttgaaatcaaaatgccaacactagtaggagaaagcccaccttctcaagctataggcaaaggcctacttcccatgggcagnnnnnnnnnnnnnnnnnnnnnnnnnnnnnnnnnnnnnnnnnnnnnnnnnnnnnnnnnnnnnnnnnnnnnnnnnnnnnnnnnnnnnnnnnnnnnnnnnnnnnnnnnnnnnnnnnnnnnnnnnnnnnnnnnnnnnnnnnnnnnnnnnnnnnnnnnnnnnnnnnnnnnnnnnnnnnnnnnnnnnnnnnnnnnnnnnnnnnnnnnnnnnnnnnnnnnnnnnnnnnnnnnnnnnnnnnnnnnnnnnnnnnnnnnnnnnnnnnnnnnnnnnnnnnnnnnnnnnnnnnnnnnnnnnnnnnnnnnnnnnnnnnnnnnnnnnnnnnnnnnnnnnnnnnnnnnnnnnnnnnnnnnnnnnnnnnnnnnnnnnnnnnnnnnnnnnnnnnnnnnnnnnnnnnnnnnnnnnnnnnnnnnnnnnnnnnnnnnagggattaatcaattcatgagagagacagtgaaaaattgtaaaagagatgggtttgttcagaccattttgggaaggcgtagatatttaccaggaatcaaagacaacaacccttatcataaagctcacg

SEQ ID NO: 23975 - DNA, 2032 bp, Macaca Mulatta
  misc_feature (1)...(2032): n = A,T,C or G
agcaggtggggtcatgatcaaacaggagctacagtatacacaggaaggccctgcggatcttcctggagagttctcatgcattgctgaagagcaggctttcctgagcccggagcagactgagctctggggtggtcagggcagttctgtcctcctggaaacaggtcccggggactcgactctacaggagcctgttggtagtagagatcctagcagcagcagannnnnnnnnnnnnnnnnnnnnnnnnnnnnnnnnnnnnnnnnnnnnnnnnnnnnnnnnnnnnnnnnnnnnnnnnnnnnnnnnnnnnnnnnnnnnnnnnnnnnnnnnnnnnnnnnnnnnnnnnnnnnnnnnnnnnnnnnnnnnnnnnnnnnnnnnnnnnnnnnnnnnnnnnnnnnnnnnnnnnnnnnnnnnnnnnnnnnnnnnnnnnnnnnnnnnnnnnnnnnnnnnnnnnnnnnnnnnnnnnnnnnnnnnnnnnnnnnnnnnnnnnnnnnnnnnnnnnnnnnnnnnnnnnnnnnnnnnnnnnnnnnnnnnnnnnnnnnnnnnnnnnnnnnnnnnnnnnnnnnnnnnnnnnnnnnnnnnnnnnnnnnnnnnnnnnnnnnnnnnnnnnnnnnnnnnnnnnnnnnnnnnnnnnnnnnnnnnnnnnnnnnnnnnnnnnnnnnnnnnnnnnnnnnnnnnnnnnnnnnnnnnnnnnnnnnnnnnnnnnnnnnnnnnnnnnnnnnnnnnnnnnnnnnnnnnnnnnnnnnnnnnnnnnnnnnnnnnnnnnnnnnnnnnnnnnnnnnnnnnnnnnnnnnnnnnnnnnnnnnnnnnnnnnnnnnnnnnnnnnnnnnnnnnnnnnnnnnnnnnnnnnnnnnnnnnnnnnnnnnnnnnnnnnnnnnnnnnnnnnnnnnnnnnnnnnnnnnnnnnnnnnnnnnnnnnnnnnnnnnnnnnnnnnnnnnnnnnnnnnnnnnnnnnnnnnnnnnnnnnnnnnnnnnnnnnnnnnnnnnnnnnnnnnnnnnnnnnnnnnnnnnnnnnnnnnnnnnnnnnnnnnnnnnnnnnnnnnnnnnnnnnnnnnnnnnnnnnnnnnnnnnnnnnnnnnnnnnnnnnnnnnnnnnnnnnnnnnnnnnnnnnnnnnnnnnnnnnnnnnnnnnnnnnnnnnnnnnnnnnnnnnnnnnnnnnnnnnnnnnnnnnnnnnnnnnnnnnnnnnnnnnnnnnnnnnnnnnnnnnnnnnnnnnnnnnnnnnnnnnnnnnnnnnnnnnnnnnnnnnnnnnnnnnnnnnnnnnnnnnnnnnnnnnncttgttttgtaatctctttgtttaataacaagtagaacaaataatttaaatgaactgcttaaccctactctgaagaaccttttttggaattagattttagttaattttttaaagaatacagcccaacgctttttttttacattttaagagttgtagaagttgttcctcacttggggactggacctgccctctaggagggaattgttaatggggctcttttagcccactgacgcttacttaggccagagagcaggggacacggtgctaggttccctcgtgtggtgcttggtgctctcaaattgtctgaaaaggaccaagaggaaaagagtcggaggggtagaccctgcagcccctgttgagaagaaagattccagtgaagttgctgatggtatggctgtggtctgggacttacggtgtctcagcataccccatcctcttcccacctcctcctggctgtgttctgcagcctcccagagtagaaaacaactttgttacttaaggttgttcaccttgtactagtggttatttgagtttgttcctattacatcaatccttacttgaggtggttcagattacagtttccaaatgcattctgagattgcctattccagagagggtagagaaaaagcacacagatgcttgtctcaggagtgttgaatgtgtgccccgctgctgtctggggggatgggagtgggctctggggtcatatgtgaacatccccttggatgatttgcagttacctagaataaaacttgctactag

SEQ ID NO: 23976 - DNA, 1151 bp, Macaca Mulatta
  misc_feature (1)...(1151): n = A,T,C or G
atgacagtcatagggaaccctcgaagttggagctgccagtggttgccaatcctgatactgttgctgggcacaggccatgggccaggggtggaaggcgtgacacactacaaggccggcgaccctgttattctatatgtcaacaaagtgggaccctaccataaccctcaggaaacttaccactactatcagcttccagtttgctgccctgagaagatacgtcacaaaagccttagcctgggtgaagtgctggatggggaccgaatggctgagtctttgtatgagatccgctttcgggaaaacgtggagaagagaattctgtgccacatgcagctcagttctgcacaggnnnnnnnnnnnnnnnnnnnnnnnnnnnnnnnnnnnnnnnnnnnnnnnnnnnnnnnnnnnnnnnnnnnnnnnnnnnnnnnnnnnnnnnnnnnnnnnnnnnnnnnnnnnnnnnnnnnnnnnnnnnnnnnnnnnnnnnnnnnnnnnnnnnnnnnnnnnnnnnnnnnnnnnnnnnnnnnnnnnnnnnnnnnnnnnnnnnnnnnnnnnnnnnnnnnnnnnnnnnnnnnnnnnnnnnnnnnnnnnnnnnnnnnnnnnnnnnnnnnnnnnnnnnnnnnnnnnnnnnnnnnnnnnnnnnnnnnnnnnnnnnnnnnnnnnnnnnnnnnnnnnnnnnnnnnnnnnnnnnnnnnnnnnnnnnnnnnnnnnnnnnnnnnnnnnnnnnnnnnnnnnnnnnnnnnnnnnnnnnnnnnnnnnnnnnnnnnnnnnnnnnnnnnnnnnnnnnnnnnnnnnnnnnnnnnnnnnnnnnnnnnnnnnnnnnnnnnnnnnnnnnnnnnnnnnnnnnnnnnnnnnnnnnnnnnnnnnnnnnnnnnnnnnnnnnnnnnnnnnnnnnnnnnnnnnnnnnnnnnnnnnnnnnnnnnnnnnnnnnnnnnnnnnnnnnnnnnnnnnnnnnnnnnnnnnnnnnnnnnggcattattgtcatggcactgctgggcatgttcaatgtgcaccgtcatggggccattaactcggcagccatcttgttgtatgccctgacctgctgcatctctggctacgtgtccagccacttctaccggcagattggaggcgagcgttgggtgtggaacatcattctcaccaccagtctcttctct

SEQ ID NO: 23977 - DNA, 699 bp, Macaca Mulatta
gaggtggagacgggtgcagaactgagcccaggccacactactgtgttcacgctctgtgcttgtgccaagggggcaatggcggcttcctgtgttctcctgcacactgggcagaagatgcctctgattggtctgggtacctggaagagtgagcctggtcaggtaaaagcagctgttaagtatgcccttagtgtaggctaccgccacattgattgtgctgctatctacggcaatgagcctgagattggggaggccctgaaggaggacgtgggaccaggcaaggcggtgcctcgggaggagctgttcgtgacatccaaactgtggaacaccaagcaccaccccgaggatgtggagcctgccctccggaagactctggctgacctccagctggagtatctggacctgtacctgatgcactggccttatgcctttgagcggggagacaaccccttcccgaagaatgctgatgggaccatatgctacgactccacccactataaggagacttggaaggctctggaggcactggtggctaaggggctggtgcgggcactgggcctgtccaacttcaatagtcggcagatcgatgacatacttagtgtggcctccgtgcgtccagctgtcttgcaggtggaatgccacccatacttggctcagaacggagctaattgccccactgccaagcacgtggcctggaggtaa

SEQ ID NO: 23978 - DNA, 1380 bp, Macaca Mulatta
  misc_feature (1)...(1380): n = A,T,C or G
atggctgctgacatgcaaaggaagagaagcagtgaatgccctgatggcacattgactccttctgatggacacagtgtggagagagctgagagccccacaccaggactggcccagggaatggagccaggnnnnnnnnnnnnnnnnnnnnnnnnnnnnnnnnnnnnnnnnnnnnnnnnnnnnnnnnnnnnnnnnnnnnnnnnnnnnnnnnnnnnnnnnnnnnnnnnnnnnnnnnnnnnnnnnnnnnnnnnnnnnnnnnnnnnnnnnnnnnnnnnnnnnnnnnnnnnnnnnnnnnnnnnnnnnnnnnnnnnnnnnnnnnnnnnnnnnnnnnnnnnnnnnnnnnnnnnnnnnnnnnnnnnnnnnnnnnnnnnnnnnnnnnnnnnnnnnnnnnnnnnnnnnnnnnnnnnnnnnnnnnnnnnnnnnnnnnnnnnnnnnnnnnnnnnnngaggcatggcgcctgcaccagaagcatgtctttgtgctgagtgaggcagggaagcctgtgtactcccgctatgggtctgaggaggcactttccagcactatgggtgttatggtggccctggtgtccttcctggaggcagacaagaacgccatccgctccatccatgcagncagatggctacaaggtagtattcgtgcgccggagcccgctggtgctagtggcagtggctcgcacacggcagtcggcacaagagctgnnnnnnnnnnnnnnnnnnnnnnnnnnnnnnnnnnnnnnnnnnnnnnnnnnnnnnnnnnnnnnnnnnnnnnnnnnnnnnnnnnnnnnnnnnnnnnnnnnnnnnnnnnnnnnnnnnnnnnnnnnnnnnnnnnnnnnnnnnnnnnnnnnnnnnnnnnnnnnnnnnnnnnnnnnnnnnnnnnnnnnnnnnnnnnnnnnnnnnnnnnnnnnnnnnnnnnnnnnnnnnnnnnnnnnnnnnnnnnnnnnnnnnnnnnnnnnnnnnnnnnnnnnnnnnnnnnnnnnnnnnnnnnnnnnnnnnnnnnnnnnnnnnnnnnnnnnnnnnnnnnnnnnnnnnnnnnnnnnnnnnnnnnnnnnnnnnnnnnnnnnnnnnnnnnnnnnnnnnnnnnnnnnnnnnnnnnnnnnnnnnnnnnnnnnnnnnnnnnnnnnnnnnnnnnnnnnnnnnnnnnnnnnnnnnnnnnacctagagcctgacaccgacctctgcctgctgtttgtctccactgaccgtgaggacttctctgcagtctctgactgccgccgccgcttccaggagcgccttcgcaagcgtggagcccacctggccctgcgagaggcgctgcgcacaccctactacagcgttgcccaagtgggcatccctgacctgcgtcacttcctctataagtcaaagagctcgggactcttcacca

SEQ ID NO: 23979 - DNA, 98 bp, Macaca Mulatta
cttggaactacagcttctcccagctgcctcgatttctcagtggttcctggtcagagtttagcacccaacctgagaacttcttgaaaggctgtaagtgg

SEQ ID NO: 23980 - DNA, 770 bp, Macaca Mulatta
  misc_feature (1)...(770): n = A,T,C or G
gggttcttgctgcctgctgctgcgggaggagaccttatgggggaagctatcattcttctctacagaagagctgtttctcatcaatcgggggtgattacagttcttcctaaaaaggatggctgctctttttctaaagagattaacactacaaactgtaaagtctgaaaatagttgcgtcagatgttttggtaaacacatcgtgcaaaagacagcaccagcacagtcgttccctattgcttctgccctgagactctccttcctaattcatgcagaagcctttagtaccgttgaagacacccagaatgnnnnnnnnnnnnnnnnnnnnngtcaaacagcttttggtaacattggaagaaaaattagtcagcgaattgttcacttatttgatgagaagggcaatgatatgggaaacatgcaccgagcagatgtgattagacttatggatgagcgagacctgcgactggttcaaaggaacgccagcacagagcctgcagagtaccagctcatgacaggaatgcagatcctccaggagcggcagaggctgagggagatgaagaaggctagccccaaaactggaacaaccctgacaaaggaactgactttttcttcaaatattggacaacatgatttggacacaaagactaaacagattcaacagtggattaaggaaagaacgccaagtccggatttactatnnnnnnnnnnnnnnnnnngttagacggtgtcagaaaaataaaaatgggagggagatattttcattccaaatacta

SEQ ID NO: 23981 - DNA, 246 bp, Macaca Mulatta
aaccaggtggagatagctgcctgctagatggcaggcttcgccgtccaggcacatggccacactgcccaccaccgacgatgtgggtatggaaccccctctggatacagaaccccttcttttccaaattaaaaaaaaaccatccagagcttagtgctttgcttcctaacttgtattcatttgaaaagcaacaagaggaaatcggccaatattcagcactggggaccgaggctttcctgtaaatgcaag

SEQ ID NO: 23982 - DNA, 175 bp, Macaca Mulatta
tttctaggtcaactgctacctatgctgcaaagtcttgaagtacttgatctttccattaacagagacattggtggcagtctgaacagtattgctcagggattaaaaagcacgtcaaatctgaaagtactgaagttacattcatgtggattatcacaaaagagtgtcaaaatattgg

SEQ ID NO: 23983 - DNA, 11459 bp, Macaca Mulatta
  misc_feature (1)...(11459): n = A,T,C or G
ggtgtgtttggtgcagacactgtggagcaacatctgcaggtctaagatgtgaatggcagaacaattacacacagtgcgctccttgtgcaagcttatcttcctgtccagtctgctatcgaaactatagagaagaagatcttattctgcaatgtagacaatgtgatannnnnnnnnnnnnnnnnnnnnnnnnnnnnnnnnnnnnnnnnnnnnnnnnnnnnnnnnnnnnnnnnnnnnnnnnnnnnnnnnnnnnnnnnnnnnnnnnnnnnnnnnnnnnnnnnnnnnnnnnnnnnnnnnnnnnnnnnnnnnnnnnnnnnnnnnnnnnnnnnnnnnnnnnnnnnnnnnnnnnnnnnnnnnnnnnnnnnnnnnnnnnnnnnnnnnnnnnnnnnnnnnnnnnnnnnnnnnnnnnnnnnnnnnnnnnnnnnnnnnnnnnnnnnnnnnnnnnnnnnnnnnnnnnnnnnnnnnnnnnnnnnnnnnnnnnnnnnnnnnnnnnnnnnnnnnnnnnnnnnnnnnnnnnnnnnnnnnnnnnnnnnnnnnnnnnnnnnnnnnnnnnnnnnnnnnnnnnnnnnnnnnnnnnnnnnnnnnnnnnnnnnnnnnnnnnnnnnnnnnnnnnnnnnnnnnnnnnnnnnnnnnnnnnnnnnnnnnnnnnnnnnnnnnnnnnnnnnnnnnnnnnnnnnnnnnnnnnnnnnnnnnnnnnnnnnnnnnnnnnnnnnnnnnnnnnnnnnnnnnnnnnnnnnnnnnnnnnnnnnnnnnnnnnnnnnnnnnnnnnnnnnnnnnnnnnnnnnnnnnnnnnnnnnnnnnnnnnnnnnnnnnnnnnnnnnnnnnnnnnnnnnnnnnnnnnnnnnnnnnnnnnnnnnnnnnnnnnnnnnnnnnnnnnnnnnnnnnnnnnnnnnnnnnnnnnnnnnnnnnnnnnnnnnnnnnnnnnnnnnnnnnnnnnaagctttctttggaaaagatcttctagatacaagtagacaaagcaagataagtttagataatctatcagaagatgcagctcagctttcatataaaacaaacatgaacgcaggtttcttggatccttcgttggatccactaagttcatcctcggctccagcaaaatctggaactcacggtnnnnnnnnnnnnnnnnnnnnnnnnnnnnnnnnnnnnnnnnnnnnnnnnnnnnnnnnnnnnnnnnnnnnnnnnnnnnnnnnnnnnnnnnnnnnnnnnnnnnnnnnnnnnnnnnnnnnnnnnnnnnnnnnnnnnnnnnnnnnnnnnnnnnnnnnnnnnnnnnnnnnnnnnnnnnnnnnnnnnnnnnnnnnnnnnnnnnnnnnnnnnnnnnnnnnnnnnnnnnnnnnnnnnnnnnnnnnnnnnnnnnnnnnnnnnnnnnnnnnnnnnnnnnnnnnnnnnnnnnnnnnnnnnnnnnnnnnnnnnnnnnnnnnnnnnnnnnnnnnnnnnnnnnnnnnnnnnnnnnnnnnnnnnnnnnnnnnnnnnnnnnnnnnnnnnnnnnnnnnnnnnngatgttttttcacggatgccactcatgaatggccttattggacccagtcctcatctcccacataattctttgccacctggaagcggactgggaactttctctgcaattgcacaatccccttatcctgatgccagnnnnnnnnnnnnnnnnnnnnnnnnnnnnnnnnnnnnnnnnnnnnnnnnnnnnnnnnnnnnnnnnnnnnnnnnnnnnnnnnnnnnnnnnnnnnnnnnnnnnnnnnnnnnnnnnnnnnnnnnnnnnnnnnnnnnnnnnnnnnnnnnnnnnnnnnnnnnnnnnnnnnnnnnnnnnnnnnnnnnnnnnnnnnnnnnnnnnnnnnnnnnnnnnnnnnnnnnnnnnnnnnnnnnnnnnnnnnnnnnnnnnnnnnnnnnnnnnnnnnnnnnnnnnnnnnnnnnnnnnnnnnnnnnnnnnnnnnnnnnnnnnnnnnnnnnnnnnnnnnnnnnnnnnnnnnnnnnnnnnnnnnnnnnnnnnnnnnnnnnnnnnnnnnnnnnnnnnnnnnnnnnnnnnnnnnnnnnnnnnnnnnnnnnnnnnnnnnnnnnnnnnnnnnnnnnnnnnnnnnnnnnnnnnnnnnnnnnnnnnnnnnnnnnnnnnnnnnnnnnnnnnnnnnnnnnnnnnnnnnnnnnnnnnnnnnnnnnnnnnnnnnnnnnnnnnnnnnnnnnnnnnnnnnnnnnnnnnnnnnnnnnnnnnnnnnnnnnnnnnnnnnnnnnnnnnnnnnnnnnnnnnnnnnnnnnnnnnnnnnnnnnnnnnnnnnnnnnnnnnnnnnnnnnnnnnnnnnnnnnnnnnnnnnnnnnnnnnnnnnnnnnnnnnnnnnnnnnnnnnnnnnnnnnnnnnnnnnnnnnnnnnnnnnnnnnnnnnnnnnnnnnnnnnnnnnnnnnnnnnnnnnnnnnnnnnnnnnnnnnnnnnnnnnnnnnnnnnnnnnnnnnnnnnnnnnnnnnnnnnnnnnnnnnnnnnnnnnnnnnnnnnnnnnnnnnnnnnnnnnnnnnnnnnnnnnnnnnnnnnnnnnnnnnnnnnnnnnnnnnnnnnnnnnnnnnnnnnnnnnnnnnnnnnnnnnnnnnnnnnnnnnnnnnnnnnnnnnnnnnnnnnnnnnnnnnnnnnnnnnnnnnnnnnnnnnnnnnnnnnnnnnnnnnnnnnnnnnnnnnnnnnnnnnnnnnnnnnnnnnnnnnnnnnnnnnnnnnnnnnnnnnnnnnnnnnnnnnnnnnnnnnnnnnnnnnnnnnnnnnnnnnnnnnnnnnnnnnnnnnnnnnnnnnnnnnnnnnnnnnnnnnnnnnnnnnnnnnnnnnnnnnnnnnnnnnnnnnnnnnnnnnnnnnnnnnnnnnnnnnnnnnnnnnnnnnnnnnnnnnnnnnnnnnnnnnnnnnnnnnnnnnnnnnnnnnnnnnnnnnnnnnnnnnnnnnnnnnnnnnnnnnnnnnnnnnnnnnnnnnnnnnnnnnnnnnnnnnnnnnnnnnnnnnnnnnnnnnnnnnnnnnnnnnnnnnnnnnnnnnnnnnnnnnnnnnnnnnnnnnnnnnnnnnnnnnnnnnnnnnnnnnnnnnnnnnnnnnnnnnnnnnnnnnnnnnnnnnnnnnnnnnnnnnnnnnnnnnnnnnnnnnnnnnnnnnnnnnnnnnnnnnnnnnnnnnnnnnnnnnnnnnnnnnnnnnnnnnnnnnnnnnnnnnnnnnnnnnnnnnnnnnnnnnnnnnnnnnnnnnnnnnnnnnnnnnnnnnnnnnnnnnnnnnnnnnnnnnnnnnnnnnnnnnnnnnnnnnnnnnnnnnnnnnnnnnnnnnnnnnnnnnnnnnnnnnnnnnnnnnnnnnnnnnnnnnnnnnnnnnnnnnnnnnnnnnnnnnnnnnnnnnnnnnnnnnnnnnnnnnnnnnnnnnnnnnnnnnnnnnnnnnnnnnnnnnnnnnnnnnnnnnnnnnnnnnnnnnnnnnnnnnnnnnnnnnnnnnnnnnnnnnnnnnnnnnnnnnnnnnnnnnnnnnnnnnnnnnnnnnnnnnnnnnnnnnnnnnnnnnnnnnnnnnnnnnnnnnnnnnnnnnnnnnnnnnnnnnnnnnnnnnnnnnnnnnnnnnnnnnnnnnnnnnnnnnnnnnnnnnnnnnnnnnnnnnnnnnnnnnnnnnnnnnnnnnnnnnnnnnnnnnnnnnnnnnnnnnnnnnnnnnnnnnnnnnnnnnnnnnnnnnnnnnnnnnnnnnnnnnnnnnnnnnnnnnnnnnnnnnnnnnnnnnnnnnnnnnnnnnnnnnnnnnnnnnnnnnnnnnnnnnnnnnnnnnnnnnnnnnnnnnnnnnnnnnnnnnnnnnnnnnnnnnnnnnnnnnnnnnnnnnnnnnnnnnnnnnnnnnnnnnnnnnnnnnnnnnnnnnnnnnnnnnnnnnnnnnnnnnnnnnnnnnnnnnnnnnnnnnnnnnnnnnnnnnnnnnnnnnnnnnnnnnnnnnnnnnnnnnnnnnnnnnnnnnnnnnnnnnnnnnnnnnnnnnnnnnnnnnnnnnnnnnnnnnnnnnnnnnnnnnnnnnnnnnnnnnnnnnnnnnnnnnnnnnnnnnnnnnnnnnnnnnnnnnnnnnnnnnnnnnnnnnnnnnnnnnnnnnnnnnnnnnnnnnnnnnnnnnnnnnnnnnnnnnnnnnnnnnnnnnnnnnnnnnnnnnnnnnnnnnnnnnnnnnnnnnnnnnnnnnnnnnnnnnnnnnnnnnnnnnnnnnnnnnnnnnnnnnnnnnnnnnnnnnnnnnnnnnnnnnnnnnnnnnnnnnnnnnnnnnnnnnnnnnnnnnnnnnnnnnnnnnnnnnnnnnnnnnnnnnnnnnnnnnnnnnnnnnnnnnnnnnnnnnnnnnnnnnnnnnnnnnnnnnnnnnnnnnnnnnnnnnnnnnnnnnnnnnnnnnnnnnnnnnnnnnnnnnnnnnnnnnnnnnnnnnnnnnnnnnnnnnnnnnnnnnnnnnnnnnnnnnnnnnnnnnnnnnnnnnnnnnnnnnnnnnnnnnnnnnnnnnnnnnnnnnnnnnnnnnnnnnnnnnnnnnnnnnnnnnnnnnnnnnnnnnnnnnnnnnnnnnnnnnnnnnnnnnnnnnnnnnnnnnnnnnnnnnnnnnnnnnnnnnnnnnnnnnnnnnnnnnnnnnnnnnnnnnnnnnnnnnnnnnnnnnnnnnnnnnnnnnnnnnnnnnnnnnnnnnnnnnnnnnnnnnnnnnnnnnnnnnnnnnnnnnnnnnnnnnnnnnnnnnnnnnnnnnnnnnnnnnnnnnnnnnnnnnnnnnnnnnnnnnnnnnnnnnnnnnnnnnnnnnnnnnnnnnnnnnnnnnnnnnnnnnnnnnnnnnnnnnnnnnnnnnnnnnnnnnnnnnnnnnnnnnnnnnnnnnnnnnnnnnnnnnnnnnnnnnnnnnnnnnnnnnnnnnnnnnnnnnnnnnnnnnnnnnnnnnnnnnnnnnnnnnnnnnnnnnnnnnnnnnnnnnnnnnnnnnnnnnnnnnnnnnnnnnnnnnnnnnnnnnnnnnnnnnnnnnnnnnnnnnnnnnnnnnnnnnnnnnnnnnnnnnnnnnnnnnnnnnnnnnnnnnnnnnnnnnnnnnnnnnnnnnnnnnnnnnnnnnnnnnnnnnnnnnnnnnnnnnnnnnnnnnnnnnnnnnnnnnnnnnnnnnnnnnnnnnnnnnnnnnnnnnnnnnnnnnnnnnnnnnnnnnnnnnnnnnnnnnnnnnnnnnnnnnnnnnnnnnnnnnnnnnnnnnnnnnnnnnnnnnnnnnnnnnnnnnnnnnnnnnnnnnnnnnnnnnnnnnnnnnnnnnnnnnnnnnnnnnnnnnnnnnnnnnnnnnnnnnnnnnnnnnnnnnnnnnnnnnnnnnnnnnnnnnnnnnnnnnnnnnnnnnnnnnnnnnnnnnnnnnnnnnnnnnnnnnnnnnnnnnnnnnnnnnnnnnnnnnnnnnnnnnnnnnnnnnnnnnnnnnnnnnnnnnnnnnnnnnnnnnnnnnnnnnnnnnnnnnnnnnnnnnnnnnnnnnnnnnnnnnnnnnnnnnnnnnnnnnnnnnnnnnnnnnnnnnnnnnnnnnnnnnnnnnnnnnnnnnnnnnnnnnnnnnnnnnnnnnnnnnnnnnnnnnnnnnnnnnnnnnnnnnnnnnnnnnnnnnnnnnnnnnnnnnnnnnnnnnnnnnnnnnnnnnnnnnnnnnnnnnnnnnnnnnnnnnnnnnnnnnnnnnnnnnnnnnnnnnnnnnnnnnnnnnnnnnnnnnnnnnnnnnnnnnnnnnnnnnnnnnnnnnnnnnnnnnnnnnnnnnnnnnnnnnnnnnnnnnnnnnnnnnnnnnnnnnnnnnnnnnnnnnnnnnnnnnnnnnnnnnnnnnnnnnnnnnnnnnnnnnnnnnnnnnnnnnnnnnnnnnnnnnnnnnnnnnnnnnnnnnnnnnnnnnnnnnnnnnnnnnnnnnnnnnnnnnnnnnnnnnnnnnnnnnnnnnnnnnnnnnnnnnnnnnnnnnnnnnnnnnnnnnnnnnnnnnnnnnnnnnnnnnnnnnnnnnnnnnnnnnnnnnnnnnnnnnnnnnnnnnnnnnnnnnnnnnnnnnnnnnnnnnnnnnnnnnnnnnnnnnnnnnnnnnnnnnnnnnnnnnnnnnnnnnnnnnnnnnnnnnnnnnnnnnnnnnnnnnnnnnnnnnnnnnnnnnnnnnnnnnnnnnnnnnnnnnnnnnnnnnnnnnnnnnnnnnnnnnnnnnnnnnnnnnnnnnnnnnnnnnnnnnnnnnnnnnnnnnnnnnnnnnnnnnnnnnnnnnnnnnnnnnnnnnnnnnnnnnnnnnnnnnnnnnnnnnnnnnnnnnnnnnnnnnnnnnnnnnnnnnnnnnnnnnnnnnnnnnnnnnnnnnnnnnnnnnnnnnnnnnnnnnnnnnnnnnnnnnnnnnnnnnnnnnnnnnnnnnnnnnnnnnnnnnnnnnnnnnnnnnnnnnnnnnnnnnnnnnnnnnnnnnnnnnnnnnnnnnnnnnnnnnnnnnnnnnnnnnnnnnnnnnnnnnnnnnnnnnnnnnnnnnnnnnnnnnnnnnnnnnnnnnnnnnnnnnnnnnnnnnnnnnnnnnnnnnnnnnnnnnnnnnnnnnnnnnnnnnnnnnnnnnnnnnnnnnnnnnnnnnnnnnnnnnnnnnnnnnnnnnnnnnnnnnnnnnnnnnnnnnnnnnnnnnnnnnnnnnnnnnnnnnnnnnnnnnnnnnnnnnnnnnnnnnnnnnnnnnnnnnnnnnnnnnnnnnnnnnnnnnnnnnnnnnnnnnnnnnnnnnnnnnnnnnnnnnnnnnnnnnnnnnnnnnnnnnnnnnnnnnnnnnnnnnnnnnnnnnnnnnnnnnnnnnnnnnnnnnnnnnnnnnnnnnnnnnnnnnnnnnnnnnnnnnnnnnnnnnnnnnnnnnnnnnnnnnnnnnnnnnnnnnnnnnnnnnnnnnnnnnnnnnnnnnnnnnnnnnnnnnnnnnnnnnnnnnnnnnnnnnnnnnnnnnnnnnnnnnnnnnnnnnnnnnnnnnnnnnnnnnnnnnnnnnnnnnnnnnnnnnnnnnnnnnnnnnnnnnnnnnnnnnnnnnnnnnnnnnnnnnnnnnnnnnnnnnnnnnnnnnnnnnnnnnnnnnnnnnnnnnnnnnnnnnnnnnnnnnnnnnnnnnnnnnnnnnnnnnnnnnnnnnnnnnnnnnnnnnnnnnnnnnnnnnnnnnnnnnnnnnnnnnnnnnnnnnnnnnnnnnnnnnnnnnnnnnnnnnnnnnnnnnnnnnnnnnnnnnnnnnnnnnnnnnnnnnnnnnnnnnnnnnnnnnnnnnnnnnnnnnnnnnnnnnnnnnnnnnnnnnnnnnnnnnnnnnnnnnnnnnnnnnnnnnnnnnnnnnnnnnnnnnnnnnnnnnnnnnnnnnnnnnnnnnnnnnnnnnnnnnnnnnnnnnnnnnnnnnnnnnnnnnnnnnnnnnnnnnnnnnnnnnnnnnnnnnnnnnnnnnnnnnnnnnnnnnnnnnnnnnnnnnnnnnnnnnnnnnnnnnnnnnnnnnnnnnnnnnnnnnnnnnnnnnnnnnnnnnnnnnnnnnnnnnnnnnnnnnnnnnnnnnnnnnnnnnnnnnnnnnnnnnnnnnnnnnnnnnnnnnnnnnnnnnnnnnnnnnnnnnnnnnnnnnnnnnnnnnnnnnnnnnnnnnnnnnnnnnnnnnnnnnnnnnnnnnnnnnnnnnnnnnnnnnnnnnnnnnnnnnnnnnnnnnnnnnnnnnnnnnnnnnnnnnnnnnnnnnnnnnnnnnnnnnnnnnnnnnnnnnnnnnnnnnnnnnnnnnnnnnnnnnnnnnnnnnnnnnnnnnnnnnnnnnnnnnnnnnnnnnnnnnnnnnnnnnnnnnnnnnnnnnnnnnnnnnnnnnnnnnnnnnnnnnnnnnnnnnnnnnnnnnnnnnnnnnnnnnnnnnnnnnnnnnnnnnnnnnnnnnnnnnnnnnnnnnnnnnnnnnnnnnnnnnnnnnnnnnnnnnnnnnnnnnnnnnnnnnnnnnnnnnnnnnnnnnnnnnnnnnnnnnnnnnnnnnnnnnnnnnnnnnnnnnnnnnnnnnnnnnnnnnnnnnnnnnnnnnnnnnnnnnnnnnnnnnnnnnnnnnnnnnnnnnnnnnnnnnnnnnnnnnnnnnnnnnnnnnnnnnnnnnnnnnnnnnnnnnnnnnnnnnnnnnnnnnnnnnnnnnnnnnnnnnnnnnnnnnnnnnnnnnnnnnnnnnnnnnnnnnnnnnnnnnnnnnnnnnnnnnnnnnnnnnnnnnnnnnnnnnnnnnnnnnnnnnnnnnnnnnnnnnnnnnnnnnnnnnnnnnnnnnnnnnnnnnnnnnnnnnnnnnnnnnnnnnnnnnnnnnnnnnnnnnnnnnnnnnnnnnnnnnnnnnnnnnnnnnnnnnnnnnnnnnnnnnnnnnnnnnnnnnnnnnnnnnnnnnnnnnnnnnnnnnnnnnnnnnnnnnnnnnnnnnnnnnnnnnnnnnnnnnnnnnnnnnnnnnnnnnnnnnnnnnnnnnnnnnnnnnnnnnnnnnnnnnnnnnnnnnnnnnnnnnnnnnnnnnnnnnnnnnnnnnnnnnnnnnnnnnnnnnnnnnnnnnnnnnnnnnnnnnnnnnnnnnnnnnnnnnnnnnnnnnnnnnnnnnnnnnnnnnnnnnnnnnnnnnnnnnnnnnnnnnnnnnnnnnnnnnnnnnnnnnnnnnnnnnnnnnnnnnnnnnnnnnnnnnnnnnnnnnnnnnnnnnnnnnnnnnnnnnnnnnnnnnnnnnnnnnnnnnnnnnnnnnnnnnnnnnnnnnnnnnnnnnnnnnnnnnnnnnnnnnnnnnnnnnnnnnnnnnnnnnnnnnnnnnnnnnnnnnnnnnnnnnngcagaataatttaagtaatcctccaacaccccctgcctctcttcctcctacaccacctcctatggcttgtcagaagatggccaatggttttgcaacacactgaagaacttgctggaaaagccggagtgttagtgagccacgaagnagttaccaaaactctaggacctaaaccatttcagctgcccttcagaccccaggatgacttgttggcccgagcgcttgctcagggccccaagacagttgatgtgccagcctccctcccaacaccacctcacaacaatcaggaagaattaaggtnnnnnnnnnnnnnnnnnnnnnnnnnnnnnnnnnnnnnnnnnnnnnnnnnnnnnnnnnnnnnnnnnnnnnnnnnnnnnnnnnnnnnnnnnnnnnnnnnnnnnnnnnnnnnnnnnnnnnnnnnnnnnnnnnnnnnnnnnnnnnnnnnnnnnnnnnnnnnnnnnnnnnnnnnnnnnnnnnnnnnnnnnnnnnnnnnnnnnnnnnnnnnnnnnnnnnnnnnnnnnnnnnnnnnnnnnnnnnnnnnnnnnnnnnnnnnnnnnnnnnnnnnnnnnnnnnnnnnnnnnnnnnnnnnnnnnnnnnnnnnnnnnnnnnnnnnnnnnnnnnnnnnnnnnnnnnnnnnnnnnnnnnnnnnnnnnnnnnnnnnnnnnnnnnnnnnnnnnnnnnnnnnnnnnnnnnnnnnnnnnnnnnnnnnnnnnnnnnnnnnnnnnnnnnnnnnnnnnnnnnnnnnnnnnnnnnnnnnnnnnnnnnnnnnnnnnnnnnnnnnnnnnnnnnnnnnnnnnnnnnnnnnnnnnnnnnnnnnnnnnnnnnnnnnnnnnnnnnnnnnnnnnnnnnnnnnnnnnnnnnnnnggtctttctggatataaggattctagtcatggtattgcagaaagcacagcactcagaccacagtggtgttgtcattgtaaagtggttattcttggaagtggtgtgcggaaatctttcaaagatctgacccttttgaacaagnnnnnnnnnnnnnnnnnnnnnnnnnnnnnnnnnnnnnnnnnnnnnnnnnnnnnnnnnnnnnnnnnnnnnnnnnnnnnnnnnnnnnnnnnnnnnnnnnnnnnnnnnnnnnnnnnnnnnnnnnnnnnnnnnnnnnnnnnnnnnnnnnnnnnnnnnnnnnnnnnnnnnnnnnnnnnnnnnnnnnnnnnnnnnnnnnnnnnnnnnnnnnnnnnnnnnnnnnnnnnnnnnnnnnnnnnnnnnnnnnnnnnnnnnnnnnnnnnnnnnnnnnnnnnnnnnnnnnnnnnnnnnnnnnnnnnnnnnnnnnnnnnnnnnnnnnnnnnnnnnnnnnnnnnnnnnnnnnnnnnnnnnnnnnnnnnnnnnnnnnnnnnnnnnnnnnnnnnnnnnnnnnnnnnnnnnnnnnnnnnnnnnnnnnnnnnnnnnnnnnnnnnnnnnnnnnnnnnnnnnnnnnnnnnnnnnnnnnnnnnnnnnnnnnnnnnnnnnnnnnnnnnnnnnnnnnnnnnnnnnnnnnnnnnnnnnnnnnnnnnnnnnnnnnnnnnnnnnnnnnnnnnnnnnnnnnnnnnnnnnnnnnnnnnnnnnnnnnnnnnnnnnnnnnnnnnnnnnnnnnnnnnnnnnnnnnnnnnnnnnnnnnnnnnnnnnnnnnnnnnnnnnnnnnnnnnnnnnnnnnnnnnnnnnnnnnnnnnnnnnnnnnnnnnnnnnnnnnnnnnnnnnnnnnnnnnnnnnnnnnnnnnnnnnnnnnnnnnnnnnnnnnnnnnnnnnnnnnnnnnnnnnnnnnnnnnnnnnnnnnnnnnnnnnnnnnnnnnnnnnnnnnnnnnnnnnnnnnnnnnnnnnnnnnnnnnnnnnnnnnnnnnnnnnnnnnnnnnnnnnnnnnnnnnnnnnnnnnnnnnnnnnnnnnnnnnnnnnnnnnnnnnnnnnnnnnnnnnnnnnnnnnnnnnnnnnnnnnnnnnnnnnnnnnnnnnnnnnnnnnnnnnnnnnnnnnnnnnnnnnnnnnnnnnnnnnnnnnnnnnnnnnnnnnnnnnnnnnnnnnnnnnnnnnnnnnnnnnnnnnnnnnnnnnnnnnnnnnnnnnnnnnnnnnnnnnnnnnnnnnnnnnnnnnnnnnnnnnnnnnnnnnnnnnnnnnnnnnnnnnnnnnnnnnnnnnnnnnnnnnnnnnnnnnnnnnnnnnnnnnnnnnnnnnnnnnnnnnnnnnnnnnnnnnnnnnnnnnnnnnnnnnnnnnnnnnnnnnnnnnnnnnnnnnnnnnnnnnnnnnnnnnnnnnnnnnnnnnnnnnnnnnnnnnnnnnnnnnnnnnnnnnnnnnnnnnnnnnnnnnnnnnnnnnnnnnnnnnnnnnnnnnnnnnnnnnnnnnnnnnnnnnnnnnnnnnnnnnnnnnnnnnnnnnnnnnnnnnnnnnnnnnnnnnnnnnnnnnnnnnnnnnnnnnnnnnnnnnnnnnnnnnnnnnnnnnnnnnnnnnnnnnnnnnnnnnnnnnnnnnnnnnnnnnnnnnnnnnnnnnnnnnnnnnnnnnnnnnnnnnnnnnnnnnnnnnnnnnnnnnnnnnnnnnnnnnnnnnnnnnnnnnnnnnnnnnnnnnnnnnnnnnnnnnnnnnnnnnnnnnnnnnnnnnnnnnnnnnnnnnnnnnnnnnnnnnnnnnnnnnnnnnnnnnnnnnnnnnnnnnnnnnnnnnnnnnnnnnnnnnnggggctgggcctgtatgctgctagagacattgagaagcacaccatggtcattgagtatatcgggactatcattcgaaatgaagtagcaaacagaaaagagaaactttatgagtctcag

SEQ ID NO: 23984 - DNA, 137 bp, Macaca Mulatta
gatttggcctctgagtgattttggatttttacgtgccagccctaatggccacagattttctgatgattagtaatcatttattcttttgacttgattattgtctccttttcatgtgaatttattactcccgttgaaac

SEQ ID NO: 23985 - DNA, 726 bp, Macaca Mulatta
  misc_feature (1)...(726): n = A,T,C or G
gggaccttcagaatggtcctatcagaaagaattggaattccagtgtacccaggtcaagttttgaagactcagcacatctcatgcaaccagtccacaccatgaataagcctgttaaacgaggacctaggtataatctacatcagatccagggtcactcaactcgacatttccacacccagacccaaaatttgcaacaatcagtcagaaaattttcacagaatccacatgtttaccagagaggccatctccctcctcctggtcctcctggagaggactgttcacgcaggaggtactcttggaatgtgaagcccaatgccagtctggcagcccaggatagaagaaggtggtatcctgacaattactctggactctcctatccagcctattgggaatggacccagtgatacaaacctgtcctggaattctacctagagaccagagctggcctgaatattactggtgtgactttaattagttcaggtctaatcaggtttctttagtgttcccttatgtggtcaagcttaaagaaaacttgcattgctgtttacctctttgctgataaatttgcagtaattaccgcattgccgggaaaaaaaaaagtctgtttattccaggcctttaaattttttcctaagagggaagaacattttaggtttggaaacttaaagccgtttaagaaaactttctcccttggcnnnnnnnnnnnnnnnnnnnnnnnnnnccggg

SEQ ID NO: 23986 - DNA, 667 bp, Macaca Mulatta
aattatttttgtttctctttgcagaagagccgaatacagggctgatggggactgcaaagtcattaaggcaaaaatggagtgggctggggcgtgcagaagttgggcagaaagggaggaggagggcaacagggagtgaagctggttgagtgtggggcaggaggatgggtcagtcacaagagcttcaacctgccctctgagccctctctgcacctgctcaagagaaaccctgagaaactccagtaggtgtgagctcctgggtgttcactcgttttgtttgacatcagggctcttcagctattgatgtttgtggtgtgtggggactcacaagaggccctttatattgatcagatgtgcatttcttcccaggcctaagtatctttcctagaaagaaacgaaaatcacacggggaagcggagtgagcctctgtgctttgagctccctggaatgatgcatgggaggcctcagaggcttgaagcccagagaaggtcatgcatagcccaggtgaagtgacaagcacatccgggagctcctgcatgtccccagcgccccccacctgctgggtccaccctgtccctgcaccctaaggtcactcggcctgtctactggagaaccctttggcccttccctctttgcctccacccctgtccctgcctcccttcattttccc

SEQ ID NO: 23987 - DNA, 1077 bp, Macaca Mulatta
gaggctggtctcacggctgccagactatgctgagtcggagcacgcggcaggctcgcctcagcgctgcggggaactagcgcagcgcggtccgcggtcgcctgtaggtgtctgcacgcgtcgggctcgcggcctttggccgaccggagcaacgagacggaggagccgccccgcgccttggatccggcgctgctggagttcctggtgtgcccgctctccaagaagccgctcagatatgaagcatcaacaaatgaattgattaatgaagagttgggaatagcttatccaatcattgatgggattcctaatatgataccacaggcagctaggatgatgcatcaaagtaagaagcaggaagaagtggagcagcgctagttcataattaaaaaaacataaaacgcaacagccaacttttcttagtaccacataccttttaaaacacagtggcaggtaataagtggaagagaagaatgtttctgtctcttcctacattgactgttcttattccactggtttctttaacaggactgttctactcagcctctgtggaagaaaacttcccacagggctgcactagcacagccagcctttgcttttacagcctgctcttgcctattaccataccagtgtatgtattcttccacctttggacttggatgggtattaaactctttaggcataattgatgcaactagagtcaatatgctgtatacattaatggtagttcttgggcatctatctctgaaagctcaaatggatggaattgagtttgtgggaaagaggctttgctttgcgcatatcaggcttaggactgtgggaggcttaagttgcaggtgcttcttttattgtgctcttgttctgcccttgttttttgaaggctctgacttataactgctgtatcagaagaaacattttgacagtgtcttgttggagataaacatccctaattgacatgtgatgactatttcttattccattcatctaaaagtcattgaaattttgttttgcctgtttgtttagcttcaaagtcttttggtaaaagtcacatgggttagggatgaactgaaaataaatcccaaa

SEQ ID NO: 23988 - DNA, 2344 bp, Macaca Mulatta
  misc_feature (1)...(2344): n = A,T,C or G
nagggtgctggtcaagataaactaggaatctatgtgaagtcggttgtgaaaggaggtgctgcagatgtgnnnnnnnnnnnnnnnnnnnnnnnnnnnnnnnnnnnnnnnnnnnnnnnnnnnnnnnnnnnnnnnnnnnnnnnnnnnnnnnnnnnnnnnnnnnnnnnnnnnnnnnnnnnnnnnnnnnnnnnnnnnnnnnnnnnnnnnnnnnnnnnnnnnnnnnnnnnnnnnnnnnnnnnnnnnnnnnnnnnnnnnnnnnnnnnnnnnnnnnnnnnnnnnnnnnnnnnnnnnnnnnnnnnnnnnnnnnnnnnnnnnnnnnnnnnnnnnnnnnnnnnnnnnnnnnnnnnnnnnnnnnnnnnnnnnnnnnnnnnnnnnnnnnnnnnnnnnnnnnnnnnnnnnnnnnnnnnnnnnnnnnnnnnnnnnnnnnnnnnnnnnnnnnnnnnnnnnnnnnnnnnnnnnnnnnnnnnnnnnnnnnnnnnnnnnnnnnnnnnnnnnnnnnnnnnnnnnnnnnnnnnnnnnnnnnnnnnnnnnnnnnnnnnnnnnnnnnnnnnnnnnnnnnnnnnnnnnnnnnnnnnnnnnnnnnnnnnnnnnnnnnnnnnnnnnnnnnnnnnnnnnnnnnnnnnnnnnnnnnnnnnnnnnnnnnnnnnnnnnnnnnnnnnnnnnnnnnnnnnnnnnnnnnnnnnnnnnnnnnnnnnnnnnnnnnnnnnnnnnnnnnnnnnnnnnnnnnnnnnnnnnnnnnnnnnnnnnnnnnnnnnnnnnnnnnnnnnnnnnnnnnnnnnnnnnnnnnnnnnnnnnnnnnnnnnnnnnnnnnnnnnnnnnnnnnnnnnnnnnnnnnnnnnnnnnnnnnnnnnnnnnnnnnnnnnnnnnnnnnnnnnnnnnnnnnnnnnnnnnnnnnnnnnnnnnnnnnnnnnnnnnnnnnnnnnnnnnnnnnnnnnnnnnnnnnnnnnnnnnnnnnnnnnnnnnnnnnnnnnnnnnnnnnnnnnnnnnnnnnnnnnnnnnnnnnnnnnnnnnnnnnnnnnnnnnnnnnnnnnnnnnnnnnnnnnnnnnnnnnnnnnnnnnnnnnnnnnnnnnnnnnnnnnnnnnnnnnnnnnnnnnnnnnnnnnnnnnnnnnnnnnnnnnnnnnnnnnnnnnnnnnnnnnnnnnnnnnnnnnnnnnnnnnnnnnnnnnnnnnnnnnnnnnnnnnnnnnnnnnnnnnnnnnnnnnnnnnnnnnnnnnnnnnnnnnnnnnnnnnnnnnnnnnnnnnnnnnnnnnnnnnnnnnnnnnnnnnnnnnnnnnnnnnnnnnnnnnnnnnnnnnnnnnnnnnnnnnnnnnnnnnnnnnnnnnnnnnnnnnnnnnnnnnnnnnnnnnnnnnnnnnnnnnnnnnnnnnnnnnnnnnnnnnnnnnnnnnnnnnnnnnnnnnnnnnnnnnnnnnnnnnnnnnnnnnnnnnnnnnnnnnnnnnnnnnnnnnnnnnnnnnnnnnnnnnnnnnnnnnnnnnnnnnnnnnnnnnnnnnnnnnnnnnnnnnnnnnnnnnnnnnnnnnnnnnnnnnnnnnnnnnnnnnnnnnnnnnnnnnnnnnnnnnnnnnnnnnnnnnnnnnnnnnnnnnnnnnnnnnnnnnnnnnnnnnnnnnnnnnnnnnnnnnnnnnnnnnnnnnnnnnnnnnnnnnnnnnnnnnnnnnnnnnnnnnnnnnnnnnnnnnnnnnnnnnnnnnnnnnnnnnnnnnnnnnnnnnnnnnnnnnnnnnnnnnnnnnnnnnnnnnnnnnnnnnnnnnnnnnnnnnnnnnnnnnnnnnnnnnnnnnnnnnnnnnnnnnnnnnnnnnnnnnnnnnnnnnnnnnnnnnnnnnnnnnnnnnnnnnnnnnnnnnnnnnnnnnnnnnnnnnnnnnnnnnnnnnnnnnngaggcgacaggaagaagggtattacagccgcctggaagctgagaggcgcagacagcacgacgaggcggcgcgcaggttgctggagcccgaggcacctggtctgtgccgccctccgcttccgcgggactacgannnnnnnnnnnnnnnnnnnnnnnnnnnnnnnnnnnnnnnnnncctcagcgaaacgcctcctacctcaaaacccaggtcctctcccccgactcgctgttcactgccaagtttgttgcatacaatnnnnnnnnnnnnnnnnnnnntgcagcctagcaggtcaggataagtactccagcacgagaatgtctcatggggaccttcttcctgcccctcttaaaccacggccacccccctgccagccacgcccggcatccgatggcatctttctctcgaactcattccagccatccccagccaaagccaacagtactgctcacaaaaaaggccagcccccgccccctcc

SEQ ID NO: 23989 - DNA, 1283 bp, Macaca Mulatta
  misc_feature (1)...(1283): n = A,T,C or G
gggcagtacccaaaggaaacgctacaaaagaatacatggagagcttgcagttgaagcccggggaagtgatctacaagtgcccgaagtgctgctgtattaaacccgagcgcgcccaccactgcagnnnnnnnnnnnnnnnnnnnnnnnnnnnnnnnnnnnnnnnnnnnnnnnnnnnnnnnnnnnnnnnnnnnnnnnnnnnnnnnnnnnnnnnnnnnnnnnnnnnnnnnnnnnnnnnnnnnnnnnnnnnnnnnnnnnnnnnnnnnnnnnnnnnnnnnnnnnnnnnnnnnnnnnnnnnnnnnnnnnnnnnnnnnnnnnnnnnnnnnnnnnnnnnnnnnnnnnnnnnnnnnnnnnnnnnnnnnnnnnnnnnnnnnnnnnnnnnnnnnnnnnnnnnnnnnnnnnnnnnnnnnnnnnnnnnnnnnnnnnnnnnnnnnnnnnnnnnnnnnnnnnnnnnnnnnnnnnnnnnnnnnnnnnnnnnnnnnnnnnnnnnnnnnnnnnnnnnnnnnnnnnnnnnnnnnnnnnnnnnnnnnnnnnnnnnnnnnnnnnnnnnnnnnnnnnnnnnnnnnnnnnnnnnnnnnnnnnnnnnnnnnnnnnnnnnnnagttctcagtgtgaggcccggctcatcagcctggaactggctcacagacgtccacttacttgtttggggtctgaagggtatcaacagctcatctgtgaccaacagggcaactggaacctacacaaaccaattgcttgcagcaagcagagttttatatatttatagtcacagatggcagaggaagaggctctcagtccccacctgtacaatgacggaaaggtatgtggccatgcaaagaagccaaccaccatggcctcctgcagagttgggacttctgtggagaagactgggttattacatgggttattcaaatcctgtgtactgagctgctgtttccaatcatgaaaaacagtcaatccagtgaacagggattctccgagcagtcatttcagggggctcctgctgaccccgccgctcagcagtgcactccccggatcncngccgggcgttnnnnnnnnnnnncgttttggtctcgnttngctccggtgctttgccctgnngttgcnntngttctgtgctctgtnccgtgnnggtggcttccggccctctccccgctgccccgnnnnnnnnnnnnnnnnnnnnnnnnnnnnnnnnnnnnnnnnnnnnnnnnnnnnnnnnnnnnnnnnnnnnnnnnnnnnnnnnnnnnnnnnnnnnnnnnnnaggcagtgtaacatttaccggctgtg

SEQ ID NO: 23990 - DNA, 768 bp, Macaca Mulatta
  misc_feature (1)...(768): n = A,T,C or G
gggatcgttggcggaaacgcggtttgcctagttatgcgaaaacatggctgcggcaggtttggcccttctttgtaggagagtctcagctgccctgaaagcttccaggtcgttaataactcctcaggtccctgcctgcacagggttttttcttggtttgttgcctaagagtacaccaaatgtgacatcctttcaccaatatagattacttcataccacattgtcaagaaaaggactagaagaattttttgatgacccaaaaaactgggggcaagaaaaagtaaaatctggagcagcatggacctgtcagcaactaaggaacaaaagtaatgaagatttacacaaactttggtatgtcttactgaaagaaagaaacatgcttttaaccctagagcaggaggccaagcggcagagattgccaatgccaagtccagagcggttagataaggtagtagattccatggatgcattagataaagttgtccaggaaagagaagatgccctaaggcttcttcagactggccaagaaagagccagacctggtgcttggagaagagacatctttggaagaatcatctggcacaagttcaagcagtgggttataccttggcacctaaataaaagatacaataggnaaacgattcttttgccatgcccttatgtggaccatttttctcagactggaaacgttgagaaacgagcccccgcatcaaagcaccggaaaggaaaaatttnggagaggaaagaaagccaaaaaattctttcttaaac

SEQ ID NO: 23991 - DNA, 654 bp, Macaca Mulatta
ctcacatttcaaatttataaattcttcgtgttatactattctatttagatttgcccagaattaattgaaataatgctaaacctgtcaatagtttccagtaacattaagcaccatactgcatgggagagacacagtattaaaaagagttgttagtgctttatgtgatatatttcttttgtaatgctataaagaactacagttaaaacaaaatctttcaaagatgtcctaaaagcatctgatcccagtaataactaatggatgtcatctagagcagtgggtgttaatgaataggtatatgtcatttaagaatttttcaaatttctgttcgatatcctgcatagaatttgacaaaaaaacacctccaagtgtgagcattttttatttcatttcccaagagtaagtaaggaaactgttagcccagccatctgccttgaagtataccttaagtgacccataaatccattcaagaggcaggtactctatgccatttggcagctatggccaaacttaccatggccagatttcagcgaaaatgatgaagtaatcaaattaaggtataatatggtgtccctttatctgctttatgttccttttagagctgtttataaagttctttatatctcaagtgtcaggataaatctatattttaacttt

SEQ ID NO: 23992 - DNA, 862 bp, Macaca Mulatta
  misc_feature (1)...(862): n = A,T,C or G
tctcgcattgccgctcccattcccacgcccggcacgacatgaagtcccccgacgaggtgctacgcgagggcgagctggagaagcgcagcgacagcctcttccagctatggaagaagaagcgcggcgtgctcacctccgaccgcctgagcctgttccccgccagcccccgcgcgcgccccaaggagctgcgcttccactccatcctcaaggtggactgcgtggagcgcaccggcaagtacgtgtacttcaccatcgtcaccaccgaccacaaggagatcgacttccgctgcgcgggcgagagctgctggaacgcggccatcgcgctggcgctcatcgatttccagaaccgccgcgccctgcaggactttcgcagccgccaggaacgcaccgcacccgccgcgctcgccgcacccgccgaggccgccgaggccgccgtggccgccgcagcctccgagccctccgggccatccccgcaacccaagccccgcacgccatgagcccgccgctggccgtacgctggacgagtcagaccgaggctaggacgtggccggcgctctccagccccgcagcagcagaacttcccgtgctcgcggatccttgctccgttgcacgggcgccttaagttattggactatctaatatctatgtatttatttcgctggttctttgtagtcacatattttatagtcttaatatcttgtttttgcatcactgtgcccattgcaaataaatcacttggccagtttgctttnnnnnnnnnnnnnnnnnnnnnnnnnnnnnnnnnnnnnnnnnnnnnnnnnnnnnnnnnnnnnnnnnnnnnnnnnnnnnnnnnnnnnnnnnnnnnnnnnnnnnnnnnnnnncc

SEQ ID NO: 23993 - DNA, 101 bp, Macaca Mulatta
gcactggaaatactgtaattgaagctgtaaaggttcttatagaacatggagttcaacccagtgttatcatcctactcagtctgttctccactcctcatggt

SEQ ID NO: 23994 - DNA, 464 bp, Macaca Mulatta
  misc_feature (1)...(464): n = A,T,C or G
atgctcctggtgttcatcccactgctggggatacattttgtcctgagaactgccagagcccagtcagtgacccagcctgatacccatatcactgtctctgaaggagcctcactggagttgagatgtaactattcctatggggcaacaccttctctcttctggtatgtccagtcccccggccaaggcctccagctgctcctgaagtacttttcaggagacactgtggttcaaggcattaaaggctttgaggctgaatttaagaggagtcaatattccttcaacctgaggaaaccctctgtgcattggagtgatgctgctgagtacttctgtgctgcggtgtattcaggaggaagtgctaacagactcacctttggcaaagggactcatctaatcgtccagccctnnnnnnnnnnnnnnnnnnnnnnnnnnnnccagctgagaggctctaaatccaatgacacgtc

SEQ ID NO: 23995 - DNA, 819 bp, Macaca Mulatta
  misc_feature (1)...(819): n = A,T,C or G
gggtttacaaggtttgtagatactttttttgttcctgttcatagatgggaagcttccttataactgatgcagagaaaaattagtccttcaaatactgctgtattttnnnnnnnnnnnnnnnnnnntgtttctattgaaactgtactaaatttttgcctacaatttaccttgttaaatattgtagataaattgctaatactaatagccaaatagataacactaatgcttnnnnnnnnnnnnnnnnnnnnnnnnnnnnnnnnnnnnnnnnntgagcagtggtgttctaaatgaagttatgacatctgtcctaattagtttcttaaatacatttactacttaatggttttgaagcaactgtnnnnnnnnnnnnnnnnnngaaaacttgctaataaccttttgttcagaatttagtagattgtttaatgcaggacatcaactacataatgaaagatgcttgaaatgcttttgttatttcaggcaaatcaaattaaatcaaactatcaaactacaagagaaccttagtcctttttgtttttgtctaaacatgttagttcagtgatgtcttggtgaactgtgagtgaactgtattgatttttctaatctttagagaaccttcacacagcatgaagggctgttgggcatttttgaaaaagggtaaataaggtaggaaagcatacanggtttttcctttttggttttttgaaaactttggtttggtaaaacataaaattaaaataatgccccccttttttattttaaattnnnnnnnnnnnnnnnnnnnnnnnnnnnnnnnnnnnnnnnnnnnnnnnnnnnnnnnnc

SEQ ID NO: 23996 - DNA, 151 bp, Macaca Mulatta
atgatttatgcaggagcagaggcagcacgcaatcgagctgtcaagagagcgtcagcttattaggcaaatgctgcgtggtttttgaagagggtcgacactataaaatcccactccaggctctggagtggagaaactcggagaccaagtccat

SEQ ID NO: 23997 - DNA, 203 bp, Macaca Mulatta
  misc_feature (1)...(203): n = A,T,C or G
ggattggcatctcctgtctttttcctgcttcttggcattttagcatatctccagtagggtgtcctcgaattctgaataccaatttacgccagattattgtcattagtgtcctggctgctgctgtttcacttttatatttttctgttgtcataatccgaaataagtatgggcgactaaccagagacaagaaatttcaaaggtan

SEQ ID NO: 23998 - DNA, 757 bp, Macaca Mulatta
  misc_feature (1)...(757): n = A,T,C or G
gaaataacagttaattatagacatggccttcccttggtaacacttaccttgccatctagaaaagaacgttgtcaatttgtagtgaaaccaatgttgtcaacagttggttcattccttcaggacctacaaaatgaagataagggcatcaaaactgcagccatcttcagagcannnnnnnnnnnnnnnnnnnnnnnnnnnnnnnnnnnnnnnnnnnnnnnnnnnnnnnnnnnnnnnnnnnnnnnnnnnnnnnnnnnnnnnnnnnnnnnnnnnnnnngaaaaaccaagtaatgagcacactgctgagatggaacacatgaaatccttggctcatagactatttacaatcttgcatttagaagagtctcagaaaaagagagagtaccatttactggagaaaattgaccacctgaaggaacagctgcagccccttgaagaggtnnnnnnnnnnnnnnnnnnnnnnnnnnnnnnnnnnnnnnnnnnnnnnnnnnnnnnnnnnnnnnnnnnnnnnnnnnnnnnnnnnnnnnnnnnnnnnnnnnnnnnnnnnnnnnnnnnnnnnnnnnnnnnnnnnnnnnnnnnnnnnnnnnnnnnnnnnnnnnnnnnnnnnnnnnnnnnnnnnnnnnnnnnnnnnnnnnnnnnnnaggattatacttactcagctgttaagagtaggcaatttcttcagttcttccacaagaaatcaaagcaacagcattttgatgtggagcaatacaacaagttaaaagaagaccttgctaag

SEQ ID NO: 23999 - DNA, 105 bp, Macaca Mulatta
ggtgaaacaaatagagaaaagagactcggttctaacatcgaaaaatcagattgaaagactgacccgtcctggttcctcttacttcaatttgaacccatttgaggt

SEQ ID NO: 24000 - DNA, 185 bp, Macaca Mulatta
gctgacacccgcccggtggaagttggcgtcccttcccttgcgggttcagagctgcaagaagcaccaggcttggccacttaagccccagccttgatctagcccaccctctcaaggccacagtgcagaagcctgcaccacctgccaagtctccccggctccttgcagctgctgtgaacatggcccag

SEQ ID NO: 24001 - DNA, 733 bp, Macaca Mulatta
  misc_feature (1)...(733): n = A,T,C or G
aggaaccagtaatcctctcctgtggttggatgggaggcttgggagaggggtggaatggagaggaaacaggctactgttggccagcctggggtggaggtgggtgcaagcaggacagatagtgccnnnnnnnnnnncggaggctttgcctctagaaaggggctagaagggatgaggaaagagctcatagcttcatgcaggtgatccctgttcttctgcatgtgtgtgtttgcacatgagtgtatgtagaccacagaccattaaaaaatacggaattcaaaagnnnnnnnnnnnnnnnnnnnnnnnnnnnnnnnnnnnnnnnnnnnnnttgctatgtttcccaggctggacccaaactcctgggctggagcagttctccccctcagcctctggagtagctgggcctacaggtgtgcgctgccacacccagctaataaaatctctttctactcccactgtctattccccagtttcgtgcccagaggcaacccctgccagtctgtttatccctccagatacagtctctgatagtaagcttttctttctcatacactaatgatagtagtcacatacactacacacactgtgccannnnnnnnnnnnnnnnnnnnnntctcggctgggcgcagtggctcacacctgtaatcccagcactttgggaggccgaggtgggtggatcacctgaggtcaggagttcaagatcagcatggccaacatggtgaaaccccgtctctac

SEQ ID NO: 24002 - DNA, 221 bp, Macaca Mulatta
ccatttgcttccttggtgagcattcccctctggtgaaggtagtcaaccttcccgtacagaaaatagagatccactacccaatccatgggctccacagacttcccagagttcatcagcttccagcggcactaccagcactgtgggtggcactactggtagtgctgccagtggcactgctgggcagagtactactgcgccaaatttggtgcctggagtaggag

SEQ ID NO: 24003 - DNA, 76 bp, Macaca Mulatta
aattgacaaaacacagagaaagcgttgtccttactgtcgttttcaaaatgtctaagtgttggaatgaagctagaag

SEQ ID NO: 24004 - DNA, 706 bp, Macaca Mulatta
ggggagtgagtctcatgagatctgatggttttataagtgtctggcatttcccctgcttgcactcattctctctcctactgccctatgaagaggtgccttctgccatgattgtaagtttcttgaggcctccccagccatgtggaactgtgagtcaattaaacctcttttctttataaattatctagcctcaggtattcatagcaatgtaagaatggactaatacagacgctaatccgccatgttgacttctgattagccccagtcctgtgaaagcctcctgattctcactttatttactgtccttagcataagaacatgtcagccttgatgttattgcacaaattataggttatgacgcatgtagcattcttgcctgttctggagggctgcctttaattgtcttgcacagagcatgtatactctttccctatgatatataagccctgggtctggggattaacagtgtggagatctacctgttttgctgctgtccaagactacgcttccatccttaagttccccaaataagtcactctgtactgaaaaattagatttgtctgcctcacattgtgagttcttggctacttctgcatttgggggttggcttgcatatatggcccttttaaagaacaatgggggtataaaaatttcctggaaatcctttgaagggtcaaacaccaggcccactggttttcccaagactcct

SEQ ID NO: 24005 - DNA, 248 bp, Macaca Mulatta
agaacaataagtaacagagcacccagaagagagcctggcagagcccaggtaaatgccatttgctctaactcacctccggaaatacacctccttcaatggttccttgggactgcttccatcttctctacctggccaagtttcttctcatctttttctatgctgatcagcagtaactttcagacccccaagtcacatcagaaacctcagaactcctgcattcttcctcaacacctggttcaagcaacacc

SEQ ID NO: 24006 - DNA, 799 bp, Macaca Mulatta
ggagagtggtcgccgctggaacaccgtgaactatgagtgagtcggagctgccgtgctgcccaggccaatggactgtgaggtcagcaatggttccggcctcagggatgagtgcgtcacaaacctgctggtgttcggcttcctccaaagctgctctgacaacagcttccgcagagagctggacgcgctgggccgcgagctgccagtgccagctgcccagtgggaggcctacgacgagcttcacgacggacggtagccgcagcagccactcccgcatgggaagaatagaggcagattctgaaagtcaagaagacgtcatccggaacattgccaggcacctcgcccaggtcggggacagcatggaccgtagcatccctccgggcctggtgaacggcctgtgcctgcagctccggaacaccagccggtcggaggaggaccggaacagggacctggccactgccctggatcagctgctgcagggctaacctacagacattgagaaggagaagacaatgctggttgctggccctgctgctggccaagaaggtggccagtcacacgccgtccttgctgcgtgatgtctttcaaacaacggtgaattttattaaccagaacctacgcgcctatgtgaggagcttagccagaaacgtaagaacccatgaggggatggactgaaccgacagttccaaaagtatgactggctaaagctcgatatggtcacagccatgtagctgcttccagtgtagacagagccctggcacgtcaacagcgttcctagagaagacgggctggaagatagctg

SEQ ID NO: 24007 - DNA, 1935 bp, Macaca Mulatta
  misc_feature (1)...(1935): n = A,T,C or G
atgtttaaatcgctgacaaaagtcaacaaggtaaagcctataggagagaacaatgagaatgaacaaagttctcatcagaatgaacaagactctcatccaagtaatcagtctcagcaaaccacagcacagnnnnnnnnnnnnnnnnnnnnnnnnnnnnnnnnnnnnnnnnnnnnnnnnnnnnnnnnnnnnnnnnnnnnnnnnnnnnnnnnnnnnnnnnnnnnnnnnnnnnnnnnnnnnnnnnnnnnnnnnnnnnnnnnnnnnnnnnnnnnnnnnnnnnnnnnnnnnnnnnnnnnnnnnnnnnnnnnnnnnnnnnnnnnnnnnnnnnnnnnnnnnnnnnnnnnnnnnnnnnnnnnnnnnnnnnnnnnnnnnnnnnnnnnnnnnnnnnnnnnnnnnnnnnnnnnnnnnnnnnnnnnnnnnnnnnnnnnnnnnnnnnnnnnnnnnnnnnnnnnnnnnnnnnnnnnnnnnnnnnnnnnnnnnnnnnnnnnnnnnnnnnnnnnnnnnnnnnnnnnnnnnnnnnnnnnnnnnnnnnnnnnnnnnnnnnnnnnnnnnnnnnnnnnnnnnnnnnnnnnnnnnnnnnnnnnnnnnnnnnnnnnnnnnnnnnnnnnnnnnnnnnnnnnnnnnnnnnnnnnnnnnnnnnnnnnnnnnnnnnnnnnnnnnnnnnnnnnnnnnnnnnnnnnnnnnnnnnnnnnnnnnnnnnnnnnnnnnnnnnnnnnnnnnnnnnnnnnnnnnnnnnnnnnnnnnnnnnnnnnnnnnnnnnnnnnnnnnnnnnnnnnnnnnnnnnnnnnnnnnnnnnnnnnnnnnnnnnnnnnnnnnnnnnnnnnnnnnnnnnnnnnnnnnnnnnnnnnnnnnnnnnnnnnnnnnnnnnnnnnnnnnnnnnnnnnnnnnnnnnnnnnnnnnnnnnnnnnnnnnnnnnnnnnnnnnnnnnnnnnnnnnnnnnnnnnnnnnnnnnnnnnnnnnnnnnnnnnnnnnnnnnnnnnnnnnnnnnnnnnnnnnnnnnnnnnnnnnnnnnnnnnnnnnnnnnnnnnnnnnnnnnnnnnnnnnnnnnnnnnnnnnnnnnnnnnnnnnnnnnnnnnnnnnnnnnnnnnnnnnnnnnnnnnnnnnnnnnnnnnnnnnnnnnnnnnnnnnnnnnnnnnnnnnnnnnnnnnnnnnnnnnnnnnnnnnnnnnnnnnnnnnnnnnnnnnnnnnnnnnnnnnnnnnnnnnnnnnnnnnnnnnnnnnnnnnnnnnnnnnnnnnnnnnnnnnnnnnnnnnnnnnnnnnnnnnnnnnnnnnnnnnnnnnnnnnnnnnnnnnnnnnnnnnnnnnnnnnnnnnnnnnnnnnnnnnnnnnnnnnnnnnnnnnnnnnnnnnnnnnnnnnnnnnnnnnnnnnnnnnnnnnnnnnnnnnnnnnnnnnnnnnnnnnnnnnnnnnnnnnnnnnnnnnnnnnnnnnnnnnnnnnnnnnnnnnnnnnnnnnnnnnnnnnnnnnnnnnnnnnnnnnnnnnnnnnnnnnnnnnnnnnnnnnnnnnnnnnnnnnnnnnnnnnnnnnnnnnnnnnnnnnnnnnnnnnnnnnnnnnnnnnnnnnnnnnnnnnnnnnnnnnnnnnnnnnnnnnnnnnnnnnnnnnnnnnnnnnnnnnnnnnnnnnnnnnnnnnnnnnnnnnnnnnnnnnnnnnnnnnnnnnnnnnnnnnnnagggagaaattggcaaggaaatgtatatcatcaagcatggagaagtccaagttctcggaggccctgatggtactaaagttctggttactctgaaagctgggtcagtgtttggagaaatcagnnagccttctagcagcaggaggaggaaaccgtcgaactgccaatgtggtggcccatgggtttgccaatcttttaactctagacaaaaagacccttcaagaaattctagtgcattatccagattctgaaaggatcctcatgaacaaagccag

SEQ ID NO: 24008 - DNA, 370 bp, Macaca Mulatta
  misc_feature (1)...(370): n = A,T,C or G
ccttgctcctcatgctgtatcaganagtgaagacgctggaggtggagataatcaaggagaaggccgtttgcactaaggataaggaaagcgtgctgctgaacaaacgcatggtggaggaacagctggctgaatgtgtganaacccgggcgctgcagcatcaagagcgccagctggccgaggagcaactgcgaaaggttcaagccctctgcctgcccctcgacaaggacaagtttgagatggatcttcgtaacctgtgtagttactccattatcccacgcagcctggacaacctgggttacaacctctaccatcccctgggctcggaattggcctccatccgcagagcctgcgaccacatgcccagcctcat

SEQ ID NO: 24009 - DNA, 489 bp, Macaca Mulatta
ctaaattagagaactgctcttgctgaaattatgataattaagattcctaagaacttgacaatgctcccctggcttgcaggaaattatacttattatagcatcaccaagtttagaaatcatcactcatttcaccttttgttgtctcttcatattcttcttccttttcctaaatgaaattatttcagctactaaaacttcctgtcaccctgctatttctcttccaattactgttcaaacatttttggtgagtgctgcttttataagtatatgatgtcacatatttcagtgacagctgatgtcatcagaaaatcctgtgttatcctgtgtatttactagtcctcatgatctagacccttttctgtgttacagaataacttcacataaaagcagataccttgaagcttgtgtagacttttgaataccatgatagatgagaattttttttaaaaaaaaaggaatttaaaggaatcctgcgcaacttctgttgac

SEQ ID NO: 24010 - DNA, 657 bp, Macaca Mulatta
tagaaagctattaataaataccagctaagacacatgaaatcatctgggtacttcagataggtaatgctaggcattactctgggatcaattgattcctccacttcagggagtcaattaattgtaaaaatgtgtacattctaatagcaatgggtgcattctaatagcaagcccatagcttctgttgggttctcaaagggctaagaactagttgtcaaaaaggtaataagtaagtggcatctgactgagttgaactccaaaggctttctaacaggagatgtgcttcttgtcctaggtattacagtttgagcctggccacatcaagaggaagggcagagctaaggccatggctctggttgacatccagttggatcaccatgaacgatgcgattgtatctgcagctcaaggccacctcgataagagaatgtgcacatccttacattaagcctgaaagaacctttagtttaaggagggtgagataagagacccttttcctaccagcaaccaaacttactactagcctgcaatgtaatgaacacaagtggttgctgagtctcagccttgctttgttaatgccatggcaagtagaaaggtatatcatcaacttctatacctaagaatataggattgcatttaataatagtgtttgaagttatata

SEQ ID NO: 24011 - DNA, 98 bp, Macaca Mulatta
ggtcctcagagcacagatctcaaccagaactgagtggtggaaaaagcgccctcaactctgagtcggcttcagagttggaattagtggctccaactcag

SEQ ID NO: 24012 - DNA, 871 bp, Macaca Mulatta
  misc_feature (1)...(871): n = A,T,C or G
ggggattccagcggcggacagcacccgggccgagatgtctcgctcagtggccttagccgtgctggcgctactctctctttctggcctggaggctatccagcgtactccaaagattcaggtttactcacgccatccaccagagaatggaaagccaaatttcctgaattgctatgtgtctggatttcatccatctgatattgaagttgacttactgaagaatggagagaaaatgggaaaagtggagcattcagacttgtctttcagcaaagactggtctttctatctcttgtactacactgaattcacccccaatgaaaaagatgagtatgcctgccgtgtgaaccatgtgactttgtcagggcccaggacagttaagtgggatcgagacatgtaagcagcatcatggaggtttgaagatgccgcatttggattggatgaattccaaattctgcttccttgcttttttatattgatatgcttatacagtttatgcaaaaaatgcagagttataaataatgtttacacagggcatgatctttctttataaattctcacttttgagtgctatcctccacgttttggcgggtatcttggggcagcctagagcttttagggaggggcttgggcaaactttagaaggttgggggagagcacgagaaatttcctcaatatatcccaaaaattccaaaccattcttttgggttcacgaaatctcgtgaacacttctcttatcacaattcctctctctggccctttttttgcgaggggtctccccccaattaaaagaattacgattttatatggcctgcgaataaaagtcggcggcgcgagccttttctttaaacaagaggtagaattatatttncccgta

SEQ ID NO: 24013 - DNA, 79 bp, Macaca Mulatta
ggcatactctccagcactcctgtggacatcaactgccatcacgttttagagaatgccttcacctccagtttccctggaa

SEQ ID NO: 24014 - DNA, 194 bp, Macaca Mulatta
cagtcctctacaaattgacagtatagtttgtgaggtcatgcagttaagtgatgatgcagcatttggatgatcatgtaaaaccagtgccattatacaaaactttaaaaacaatcctaggcaataaaactgcctgtggtctgctatgtccctgactctttaaatgcatgaattaaagaatgatataataatctctg

SEQ ID NO: 24015 - DNA, 156 bp, Macaca Mulatta
tcaactccaagggtgtcacccccattttctacccattcccccaataaagtttttataaaggaactgccggtctccgcctctgtttctgcaagatagaacaagcccagggtaccaatcgtgacctcccgggttattcattccaaaagcgatttttga

SEQ ID NO: 24016 - DNA, 666 bp, Macaca Mulatta
  misc_feature (1)...(666): n = A,T,C or G
ccacatatatggtgcgtggttcataagattacaatactgtatttttactgtaccttctttatgtttagatatgcaagtatttaccgatggtgttacagtgtcctacagtgttcactacaataatatgctgtacaggtttgtagcctaggagcaataggtcatagcctaggtgtatagtagatcataccatctaagtttgtgtagtacactctgtgattgtacagttttaaaatctcctaatgatgatgcatttctcagaatgtatcccctttgctaagcaatgcatgactacaatcctaattctcacatannnnnnnnnnnnnnnnttnnnnnnnnnnnnntttaggaaagttcctaccaaatatacatatataaagtttattaagttaaaagtcataaggacccaggaatagctaatgacacggaagatcaaaatagaacacagtagagaacttcaaaataaaacaggtgtgggaattgtgtgtgtgaaaaaggtgggttcagataagttggtttgttagacattcatatgcctacccatcagccgtttcattctcccttccttgctgacaaagccccatgtttgtttgtctgtctgtacgtacgtttttttggtctaaaactctgtatggctgccttgtgctgtagaacaggctgcttccctag

SEQ ID NO: 24017 - DNA, 1088 bp, Macaca Mulatta
  misc_feature (1)...(1088): n = A,T,C or G
gtttcatcagaatgtttagcgtggggtacttgatccagtgctgcctccgaatcccctctgcatttaggcatctatttacacagccatctcggctactttctctcttctacaataaagaaaacttccagcttggagcttttcttggctcttttgttagtatatacaaggnnnnnnnnnnnnnnnnnnnnnnnnnnnnnnnnnnnnnnnnnnnnnnnnnnnnnnnnnnnnnnnnnnnnnnnnnnnnnnnnnnnnnnnnnnnnnnnnnnnnnnnnnnnnnnnnnnnnnnnnnnnnnnnnnnnnnnnnnnnnnnnnnnnnnnnnnnnnnnnnnnnnnnnnnnnnnnnnnnnnnnnnnnnnnnnnnnnnnnnnnnnnnnnnnnnnnnnnnnnnnnnnnnnnnnnnnnnnnnnnnnnnnnnnnnnnnnnnnnnnnnnnnnnnnnnnnnnnnnnnnnnnnnnnnnnnnnnnnnnnnnnnnnntttgctgtcatgaaccgaaaagtccttgatgtttttggtactggtgcatctaaacactttcaagatttcatccccaggttggatccgagatacacaactgtaacaccagagttgcccacagagttttcttgaagatgactgtaatttattaatgtgactaaatgtttcattttgaagagttaattatgttgaacacaaaggagggggcccaagctcgaacttcagtgttatttcagttagagatactcttttcatttgtgttgtttttcttatgaatcagaaattcagaagctttttaggaaggtgttgcttaataattaagcttcctccatagccagaataagattctggatcactgtagtgattgacattattatatattattgatcaaattatgtccataagcaatattatataatctatgtagaagtgtaatagcaaacaagagtacacttaaaattactttaaaagatgtctttagttcattccaatataattcttgattaaaattaggattatttctatgttttaggatttacaaaggatcacgggtacatggatttggtctnnnnnnnnnnnnnagtttggaattggtatctgtagtagtggaatg

SEQ ID NO: 24018 - DNA, 168 bp, Macaca Mulatta
ctgaggcaggctctctgtgttttggggtttatgttgagtgagggacaggattgtgacattttgtgtgtctatgtgacttttccagccctgaagtcatctgtgcgagcagctgaggcaggctgtgtgtggctggttgtgaaggctcttgtttggctgcagggctcgact

SEQ ID NO: 24019 - DNA, 812 bp, Macaca Mulatta
ggggatgggagcaggtacccactgactgtctaccttcccactggaaaagcacggacaggccagcgcttgggggggcaggcagagggcagagttggctttgcgtggtctctgcctgctgagcagctccaattcctctcatgggagaaacaaggaggcagtcgcttgtgcatattccagaagttttattggggaggaggaagcagacagaggaagctgtgtgtgcctgtgagggagtgggcggcgtgggagggatgcacgcgtatgtgagcataacctgtgcgggtactacacacacatctccatgcagaagcacacctgggcagccctggcttccagcattgggcttcagcacaacagaccccagcctgtggtctctctgaacccagggagaccgcattaggctcagggcgttttccccgaggtccagagttttatgcctctcccgggcattctccataaagaagggaaggtcagatgaccccttagatctgtgtcatctgggaatttccttgggctggtttagaaacgatgccctctctttttctcaggatagcagataacctgctgtgaaagagggcttaattctatgggtcctaaattttctcctttctctctctcgttctgtatgtgtgtgttaggaaaaatggtaagtttccaataccatctttgagggaatgattatgttttccctccatttcaagtccaaaagaccagagccctcattccaaagggcatccacccagatagattttatagtttcatttgtcatccctcccatgggagggccccatgtatcgtcagaaaccatcctg

SEQ ID NO: 24020 - DNA, 3682 bp, Macaca Mulatta
  misc_feature (1)...(3682): n = A,T,C or G
gtagtcgtggcgctctcgaggccctaccatgagcaagctcttaactcttcaggtgtgcaagtcctacgtccacagtccagtgctactgtcagcttggagttcagcttcgggctgccaagagccagcagcccggtgtcagaggctcggtcccacaacgctctgcgggccgcggcgcctgctgggaggtgtagtccccgctctgcgtactgcgttcgccgagggggagggcggagctgccggcggcccgggcgggctggcagctagagtgggtgcgatnnnnnnnnnnnnnnnnnnnnnnnnnnnnnnnnnnnnnnnnnnngggccgttcgctgctgcgcggggagagcgaggcggggccgccggggccgccatggagcccgactcggtgattgaggacaagaccatcgagctcatgnnnnnnnnnnnnnnnnnnnnnnnnnnnnnnnnnnnnnnnnnnnnnnnnnnnnnnnnnnnnnnnnnnnnnnnnnnnnnnnnnnnnnnnnnnnnnnnnnnnnnnnnnnnnnnnnnnnnnnnnnnnnnnnnnnnnnnnnnnnnnnnnnnnnnnnnnnnnnnnnnnnnnnnnnnnnnnnnnnnnnnnnnnnnnnnnnnnnnnnnnnnnnnnnnnnnnnnnnnnnnnnnnnnnnnnnnnnnnnnnnnnnnnnnnnnnnnnnnnnnnnnnnnnnnnnnnnnnnnnnnnnnnnnngagcaaggcttagatcacatagcagaaaacatcctttcgtacctggacgccaggtccctgtgtgcagcggagctggtgtgtaaagaatggcagcgggtgatctcagaaggaatgctgtggaagaagctgattgaacgaatggtgcgcactgatcccctgtggaaaggactttcagaaagaagagggtggnnnnnnnnnnnnnnnnnnnnnnnnnnnnnnnnnnnnnnnnnnnnnnnnnnnnnnnnnnnnnnnnnnnnnnnnnnnnnnnnnnnnnnnnnnnnnnnnnnnnnnnnnnnnnnnnnnnnnnnnnnnnnnnnnnnnnnnnnnnnnnnnnnnnnnnnnnnnnnnnnnnnnnnnnnnnnnnnnnnnncgatgatgaaaaattatcagtggcctacgagataattctattaagnnnnnnnnnnnnnnnnnnnnnnnnnnnnnnnnnnnnnnnnnnnnnnnnnnnnnnnnnnnnnnnnnnnnnnnnnnnnnnnnnnnnnnnnnnnnnnnnnnnnnnnnnnnnnnnnnnnnnnnnnnnnnnnnnnnnnnnnnnnnnnnnnnnnnnnnnnnnnnnnnnnnnnnnnnnnnnnnnnnnnnnnnnnnnnnnnnnnnnnnnnnnnnnnnnnnnnnnnnnnnnnnnnnnnnnnnnnnnnnnnnnnnnnnnnnnnnnnnnnnnnnnnnnnnnnnnnnnnnnnnnnnnnnnnnnnnnnnnnnnnnnnnnnnnnnnnnnnnnnnnnnnnnnnnnnnnnnnnnnnnnnnnnnnnnnnnnnnnnnnnnnnnnnnnnnnnnnnnnnnnnnnnnnnnnnnnnnnnnnnnnnnnnnnnnnnnnnnnnnnnnnnnnnnnnnnnnnnnnnnnnnnnnnnnnnnnnnnnnnnnnnnnnnnnnnnnnnnnnnnnnnnnnnnnnnnnnnnnnnnnnnnnnnnnnnnnnnnnnnnnnnnnnnnnnnnnnnnnnnnnnnnnnnnnnnnnnnnnnnnnnnnnnnnnnnnnnnnnnnnnnnnnnnnnnnnnnnnnnnnnnnnnnnnnnnnnnnnnnnnnnnnnnnnnnnnnnnnnnnnnnnnnnnnnnnnnnnnnnnnnnnnnnnnnnnnnnnnnnnnnnnnnnnnnnnnnnnnnnnnnnnnnnnnnnnnnnnnnnnnnnnnnnnnnnnnnnnnnnnnnnnnnnnnnnnnnnnnnnnnnnnnnnnnnnnnnnnnnnnnnnnnnnnnnnnnnnnnnnnnnnnnnnnnnnnnnnnnnnnnnnnnnnnnnnnnnnnnnnnnnnnnnnnnnnnnnnnnnnnnncagggttttctagtcttgaactactggctacatggctaccaatgcctaagggagttcgttcacagctgagttatgaagctggaattggttctagacgctgggtagatgcaaagcagcctaactcttcaagtaccgacatttctcacctctgattctggctctcctttgagaaggataccttagcttccctgacttcaagtagaacagaagcctgtttccttccctcatcagtgaaaatatctaatgtttcaaatgtaaattgttcgtagaaaaggaacatagaatctgttttacagaagtaaatcgaccgtcaagagaagacttggcctctaatttatattgctttgcactttggtttgatattaagaaacagcattcttcttcagtgaaattttgnnnnnnnnnnnnnnnnnnnnnnnnnnnnnnnnnnnnnnnnnnnnnnnnnnnnnnnnnnnnnnnnnnnnnnnnnnnnnnnnnnnnnnnnnnnnnnnnnnnnnnnnnnnnnnnnnnnnnnnnnnnnnnnnnnnnnnnnnnnnnnnnnnnnnnnnnnnnnnnnnnnnnnnnnnnnnnnnnnnnnnnnnnnnnnnnnnnnnnnnnnnnnnnnnnnnnnnnnnnnnnnnnnnnnnnnnnnnnnnnnnnnnnnnnnnnnnnnnnnnnnnnnnnnnnnnnnnnnnnnnnnnnnnnnnnnnnnnnnnnnnnnnnnnnnnnnnnnnnnnnnnnnnnnnnnnnnnnnnnnnnnnnnnnnnnnnnnnnnnnnnnnnnnnnnnnnnnnnnnnnnnnnnnnnnnnnnnnnnnnnnnnnnnnnnnnnnnnnnnnnnnnnnnnnnnnnnnnnnnnnnnnnnnnnnnnnnnnnnnnnnnnnnnnnnnnnnnnnnnnnnnnnnnnnnnnnnnnnnnnnnnnnnnnnnnnnnnnnnnnnnnnnnnnnnnnnnnnnnnnnnnnnnnnnnnnnnnnnnnnnnnnnnnnnnnnnnnnnnnnnnnnnnnnnnnnnnnnnnnnnnngtttaacacaaaatgttttatttgttgtggagtatgtattatacaatagagaggtaccttaaacattttttgttcttattctttntctcataagtactcctgagtactagtggtcacctcccatagtattcatttggcttcactgtcaaaaatcattattctgtgcagtcgtggccctgggaaggggaaataagaaggccctgttgacaggctgtcttggctctggaattcatgcatcctggccttgccaaggttctggcagggcccgctggtgtgttggagcctgctgggcaggtcaggtgggttcagaggcctatgctgaggggtgggcattcctaagtggagtaaaacctcaagcccatgaatcccaccccagacatctctggtgtcacctgctgctgtggccccagcaggttctgaaggctccgagtactcccgactacacagcacaaatgtgtaaatggcactgttgccctgacagtgcatggaaaggacgttggcatccaattggcactccttctccctcccttattcaacattaggtttgatttgccctttgccattgtttccaaagatcaaggaatgtcaataacattttaaaggaccaataaacagcctcctataaatgaaaggtcttcccgtggaagcacactctactactaaagggaaggcccctgggctctgatttgtcctttgcattgaga

SEQ ID NO: 24021 - DNA, 2430 bp, Macaca Mulatta
  misc_feature (1)...(2430): n = A,T,C or G
caggggaatatgggtcccgctgctttctggctcctgctcttccttctcaagaatcctgaagccctggctgctgtccgcggagagctcgagagtatcctttgggaagcagagcagcctgtctcgcagatgaccaccctcccacagaaggttctagacggcacgcctgtgcttnnnnnnnnnnnnnnnnnnnnnnnnnnnnnnnnnnnnnnnnnnnnnnnnnnnnnnnnnnnnnnnnnnnnnnnnnnnnnnnnnnnnnnnnnnnnnnnnnnnnnnnnnnnnnnnnnnnnnnnnnnnnnnnnnnnnnnnnnnnnnnnnnnnnnnnnnnnnnnnnnnnnnnnnnnnnnnnnnnnnnnnnnnnnnnnnnnnnnnnnnnnnnnnnnnnnnnnnnnnnnnnnnnnnnnnnnnnnnnnnnnnnnnnnnnnnnnnnnnnnnnnnnnnnnnnnnnnnnnnnnnnnnnnnnnnnnnnnnnnnnnnnnnnnnnnnnnnnnnnnnnnnnnnnnnnnnnnnnnnnnnnnnnnnnnnnnnnnnnnnnnnnnnnnnnnnnnnnnnnnnnnnnnnnnnnnnnnnnnnnnnnnnnnnnnnnnnnnnnnnnnnnnnnnnnnnnnnnnnnnnnnnnnnnnnnnnnnnnnnnnnnnnnnnnnnnnnnnnnnnnnnnnnnnnnnnnnnnnnnnnnnnnnnnnnnnnnnnnnnnnnnnnnnnnnnnnnnnnnnnnnnnnnnnnnnnnnnnnnnnnnnnnnnnnnnnnnnnnnnnnnnnnnnnnnnnnnnnnnnnnnnnnnnnnnnnnnnnnnnnnnnnnnnnnnnnnnnnnnnnnnnnnnnnnnnnnnnnnnnnnnnnnnnnnnnnnnnnnnnnnnnnnnnnnnnnnnnnnnnnnnnnnnnnnnnnnnnnnnnnnnnnnnnnnnnnnnnnnnnnnnnnnnnnnnnnnnnnnnnnnnnnnnnnnnnnnnnnnnnnnnnnnnnnnnnnnnnnnnnnnnnnnnnnnnnnnnnnnnnnnnnnnnnnnnnnnnnnnnnnnnnnnnnnnnnnnnnnnnnnnnnnnnnnnnnnnnnnnnnnnnnnnnnnnnnnnnnnnnnnnnnnnnnnnnnnnnnnnnnnnnnnnnnnnnnnnnnnnnnnnnnnnnnnnnnnnnnnnnnnnnnnnnnnnnnnnnnnnnnnnnnnnnnnnnnnnnnnnnnnnnnnnnnnnnnnnnnnnnnnnnnnnnnnnnnnnnnnnnnnnnnnnnnnnnnnnnnnnnnnnnnnnnnnnnnnnnnnnnnnnnnnnnnnnnnnnnnnnnnnnnnnnnnnnnnnnnnnnnnnnnnnnnnnnnnnnnnnnnnnnnnnnnnnnnnnnnnnnnnnnnnnnnnnnnnnnnnnnnnnnnnnnnnnnnnnnnnnnnnnnnnnnnnnnnnnnnnnnnnnnnnnnnnnnnnnnnnnnnnnnnnnnnnnnnnnnnnnnnnnnnnnnnnnnnnnnnnnnnnnnnnnnnnnnnnnnnnnnnnnnnnnnnnnnnnnnnnnnnnnnnnnnnnnnnnnnnnnnnnnnnnnnnnnnnnnnnnnnnnnnnnnnnnnnnnnnnnnnnnnnnnnnnnnnnnnnnnnnnnnnnnnnnnnnnnnnnnnnnnnnnnnnnnnnnnnnnnnnnnnnnnnnnnnnnnnnnnnnnnnnnnnnnnnnnnnnnnnnnnnnnnnnnnnnnnnnnnnnnnnnnnnnnnnnnnnnnnnnnnnnnnnnnnnnnnnnnnnnnnnnnnngggttctgaccgggtctgcttctgcgttcacagcgcctcctggcactgaaggcatctgagtgtgagaccctgttctaactcttagaagtgacattgtaagaggtggtggggaccagctaattggtccaacccagcctgagtgtaccaccctttgaacaaatgtatcagtgatgaaaatttgcctttgccccagcttntgcctataatcccagcactttgggaggccgaggtgggcggatcacttgaggttgggagttcaagaccagcctggccaacacggtgaaaccccgtctctactaaacatacagaaattagccgggtgtggtggtaggcgcctgtaatcccagctactcaggaggctgacgcaccagaattgcttgaacccaggaggtggaggttgcagtgagatgagactgcaccacgacagtccagcctgggcaactgagcaagactctgtctcannnnnnnnnnnnnnnnnnnnnnnnnnnnnagcttaaagagaaaaatggcctgcaaacattttttatgatcctagttttattaatataaggtcctgtctgttgaggccctttaaatgcctgcgataggccccatagacagtatttctactcctcacagcatctctgtgaagagaaggagggttgtgcccatttcatagatgagaaaaccgagaggtgaggtgacttgcctggggccacatagttcataagctgta

SEQ ID NO: 24022 - DNA, 205 bp, Macaca Mulatta
gtctgtggtcaacttgctcggcaaagaatatcttatgctggactcagatgccgagatggctgaagcccccgccagtgtcagggatgatccgagagacgtgtccagccagcaggcctcctctgtgaaccggatgcgtccatgggaaggccaggcccgccgaaagctgcagatcctgcccagggtccctgcaccgtccaggaggcag

SEQ ID NO: 24023 - DNA, 808 bp, Macaca Mulatta
tggagggggcttgtataataaattttctggcacagaggggaggaattttgatttttccgggtgataaaaaaggggttgctttttttgaccccttccccaaaatgttaattttcacagggttaggaagaatttcaattctttgccccaaggtttttttttataggtaaccccttggggttcacttccaaaaaaatttccggggggaaaaggttttggcaactaaaggatactttaaactttttcttccatagcccccaaaagtttatttttcaggaaaatttcctaattctacattgtttctggccctaccataggtagcattaacaaagttattttaataactaaagatttttcataggtatgacaaatggcctaataagatttggtgcagctggatttagagttgtcattattggactggtacaggaacacagtttgtaaatacctgcctgccaggaaatcacttttgtatagaaaagtaccatccctacttggggtacaggcacgaggctttagtccaggctcagggaagtgtacataaatcatttccaacttgattttagtaactcttgaaaacgtacaccttgaacttcacttagaatctccagagtaaaattacaaagtatcaacctttgatctgtgtcacagcatgaaaggttgctctactttttttatatatatataaacctaagttactgcaatcatttttagtcaacctgcctaatgaaaatggagtctaaacactttattgtgcacagtccttttacaggaattttgatatttaaaagaaaatactgtgcttgctgcc

SEQ ID NO: 24024 - DNA, 715 bp, Macaca Mulatta
cacattcaggagtgggaagcattactagactaggagaatgcagttagaccatatggattttctttgcgatttggctaagcaaatactattcatttgacttagaaatggcagataccatgtatttatttatttggatataggatgagttccccacccttggattttattttgttcaaaggaatgttaagttccgtgatggaacagagaacccttgatttatatagagaccatgaatgcaattttttcttacatcgtttgctcagggtagcacacctcgcatctgtggcattcttaacgactctctctgtcccccagaattcttcaacgacctggatctgctcatggggccggtcaccctgcacagcagcatggagcacctggtccagtactcccaacagggcctgcactggctgcggaacagcgcccacctgtcatagggacctcaccctggagccagatcgggctctggtctccacagatggctcaacacttttggacactgtgcttctgaaattcccagccacagcattcatcagactgcggtgaacattccctcagcattgaacaatggtcttttgcagggcatgtgtgtttgtatgtgtgggtatataagaagccgcctgtgtatgtgtgtaagaaacacagctcttcagaacacaccttctttgtctagtttccataatcccaggctagacaaagtgatcagaggtttcta

SEQ ID NO: 24025 - DNA, 296 bp, Macaca Mulatta
  misc_feature (1)...(296): n = A,T,C or G
ggggggcaccatttcagtgtaaaagctgtcctactcttccacactaggaaggctttgactttttttaactggtgcagtgggaaaataggacattacatactgaattgggtccttgtcatttctgtccaattgaatactttattgtaatgatgatggttactcttcatggacatcttaatcttccacacacatcctctttttttggaataaaatttggnnnnnnnnnnnnnnnnnnnnnnnnnnnnnnnnnnnnnnnnnnnnnnnnnnnnnnnnnnnnnnnnnnnnnnnnnnnnnnc

SEQ ID NO: 24026 - DNA, 421 bp, Macaca Mulatta
acaactaggggaatcaaatcgaacagttggattcagaaccaaggcctaactcctgcagagagagactctgaatgcatgacctttggtacatgcctgttaatattcatgttctgaaaatattttgttaaaagtgtaagtctaaacataaaagaacaattaaaatattctttaatacttcacgcagaaacctcaagtaatcactacatgataactttaatttaagtgccatgtgctgcagagaatgtagcaggcagacacatcttaaaagcaacctgtggcattgccttaagtctccatagttatgtattctggagaggcagtctgcttaccgctgagtagaagatgctgtactgtgatagccaacttggctttggattcagttgcttgttctatggaagaaatacatgtatttcttacatgg

SEQ ID NO: 24027 - DNA, 855 bp, Macaca Mulatta
cagtcagcccccaccgggcccccggtctctaccccggggccccctgatgacgatgaggaggaaggggcacccaccacaccccaggctgaaggtgctatggagtcctcttaaagagggacgagggccaggcggaagcagcacaaggccggggacacccatgccaagcagtgggagcacgcaggacagacacagcaggggtctggggcacggagccttgctggtgtcagcatcagcccttcctcccagagccctcattccaattccgagctaagaaggtattggggcagaggctccccaaattggggtgatcccccaaggagtgatacatatattgtgtatatatttacagctctattgtaaaagtggggtccctgtccccagctgctcctggggagtagaagcaataatgtatttctgatttgtgggtcccacttcggctatgcgggtttctagggggtgggggcttgggaccaaagccttgccccgcccctctgccccttgggggttttggctgtgtaagggggtgaaggactgcccctcccttccgagacccctccttcctggtttctgttcctttttcctggcagtgaattatgcaaagggggccggcaaaggaagggtaggtgggggaaagccaggtggaagcttgaaagactgggggactgggcctgtaaggaaggagccatcccagtccccctccgccctgctcccggcgctgagtcatggggtcgcggagaagaagggggcagggtggcctgattggctcgcccgcccctgggggcagtggagaggggccccgcccagctaggggagccgctccgttccactcccctccctgtccctccctccccgcgg

SEQ ID NO: 24028 - DNA, 1553 bp, Macaca Mulatta
  misc_feature (1)...(1553): n = A,T,C or G
ggcatgcagtatggtgaatatgttaataaccaagctagctccgcaccaactcccttgtcatcaacttccgatgatnnnnnnnnnnnnnnnnnnnnnnnnnnnnnnnnnnnnnnnnnnnnnnnnnnnnnnnnnnnnnnnnnnnnnnnnnnnnnnnnnnnnnnnnnnnnnnnnnnnnnnnnnnnnnnnnnnnnnnnnnnnnnnnnnnnnnnnnnnnnnnnnnnnnnnnnnnnnnnnnnnnnnnnnnnnnnnnnnnnnnnnnnnnnnnnnnnnnnnnnnnnnnnnnnnnnnnnnnnnnnnnnnnnnnnnnnnnnnnnnnnnnnnnnnnnnnnnnnnnnnnnnnnnnnnnnnnnnnnnnnnnnnnnnnnnnnnnnnnnnnnnnnnnnnnnnnnnnnnnnnnnnnnnnnnnnnnnnnnnnnnnnnnnnnnnnnnnnnnnnnnnnnnnnnnnnnnnnnnnnnnnnnnnnnnnnnnnnnnnnnnnnnnnnnnnnnnnnnnnnnnnnnnnnnnnnnnnnnnnnnnnnnnnnnnnnnnnnnnnnnnnnnnnnnnnnnnnnnnnnnnnnnnnnnnnnnnnnnnnnnnnnnnnnnnnnnnnnnnnnnnnnnnnnnnnnnnnnnnnnnnnnnnnnnnnnnnnnnnnnnnnnnnnnnnnnnnnnnnnnnnnnnnnnnnnnnnnnnnnnnnnnnnnnnnnnnnnnnnnnnnnnnnnnnnnnnnnnnnnnnnnnnnnnnnnnnnnnnnnnnnnnnnnnnnnnnnnnnnnnnnnnnnnnnnnnnnnnnnnnnnnnnnnnnnnnnnnnnnnnnnnnnnnnnnnnnnnnnnnnnnnnnnnnnnnnnnnnnnnnnnttcctgaagaatttatgtataacccccttacccgatcttatggagagcnnnnnnnnnnnnnnnnnnnnnnnnnnnnnnnnnnnnnnnnnnnnnnnnnnnnnnnnnnnnnnnnnnnnnnnnnnnnnnnnnnnnnnnnnnnnnnnnnnnnnnnnnnnnnnnnnnnnnnnnnnnnnnnnnnnnnnnnnnnnnnnnnnnnnnnnnnnnnnnnnnnnnnnnnnnnnnnnnnnnnnnnnnnnnnnnnnnnnnnnnnnnnnnnnnnnnnnnnnnnnnnnnnnnnnnnnnnnnnnnnnnnnnnnnnnnnnnnnnnnnnnnnnnnnnnnnnnnnnnnnnnnnnnnnnnnnnnnnnnnnnnnnnnnnnnnnnnnnnnnnnnnnnnnnnnnnnnnnnnnnnnnnnnnnnnnnnnnnnnnnnnnnnnnnnnnnnnnnnnnnnnnnnnnnnnnnnnnnnnnnnnnnnnnnnnnnnnnnnnnnnnnnnnnnnnnnnnnnnnnnnnnnnnnnnnnnnnnnnnnnnnnnnnnnnnnnnnnnnnnnnnnnnnnnnnnnnnnnnnnnnnnnnnnnnnnnnnnnnnnnnnnnnnnnnnnnnnnnnnnnnnnnnnnnnnnnnnaggtggtacaacatcttggccccgcaactgatttttataagaagcttgcattagattgctcaggacagcaaactgcagtggatttgttccttttaagttaacagtattctgat

SEQ ID NO: 24029 - DNA, 2128 bp, Macaca Mulatta
  misc_feature (1)...(2128): n = A,T,C or G
ggtgttgtgactgacactaatcccgcctcacgtttgcagcccacagccccttgcattcaggagttcctcacccttctggccgtgtgccacacggttgttcctgagaaggatggagataacatcatctaccaggcctcatccccannnnnnnnnnnnnnnnnnnnnnnnnnnnnnnnnnnnnnnnnnnnnnnnnnnnnnnnnnnnnnnnnnnnnnnnnnnnnnnnnnnnnnnnnnnnnnnnnnnnnnnnnnnnnnnnnnnnnnnnnnnnnnnnnnnnnnnnnnnnnnnnnnnnnnnnnnnnnnnnnnnnnnnnnnnnnnnnnnnnnnnnnnnnnnnnnngataatgtaatttttgagagactttcaaaagactcaaaatatatggaggaaacattatgccatctggaatactttgccacggaagnnaggcttgcggactctctgtgtggcttatgctgatctctctgagaatgagtatgaggagtggctgaaagtctatcaggaagccagcaccatattgaaggacagagctcaacggttggaagagtgttacgagatcattgagaagnagaatttactgctacttggagccacagccatagaagatcgccttcaagcaggagttccagaaaccatcgcaactctgttgaaggcagaaattaaaatatgggtgctgacaggagacaaacaagaaactgcgattaatataggnnnnnnnnnnnnnnnnnnnnnnnnnnnnnnnnnnnnnnnnnnnnnnnnnnnnnnnnnnnnnnnnccacaagggcagccattactcagcactgcactgaccttgggaatttgctggggaaggaaaatgatgtggccctcatcatcgatggccacaccctgaagtacgcgctctccttcgaagtccggaggagtttcctggatttggcactctcgtgcaaagcggtcatatgctgcagnncagagtgtctcctctgcagaagtctgagatagtggatgtggtgaagaagcgggtgaaggccatcaccctcgccattggagacggcgccaacgatgtcgggatgatccagacagcccacgtgggtgtgggaatcagtggcaatgaaggcatgcaggccaccaacaactcggaatacgccatcgcacannnnnnnnnnnnnnnnnnnnnnnnnnnnnnnnnnnnnnnnnnnnnnnnnnnnnnnnnnnnnnnnnnnnnnnnnnnnnnnnnnnnnnnnnnnnnnnnnnnnnnnnnnnnnnnnnnnnnnnnnnnnnnnnnnnnnnnnnnnnnnnnnnnnnnnnnnnnnnnnnnnnnnnnnnnnnnnnnnnnnnnnnnnnnnnnnnnnnnnnnnnnnnnnnnnnnnnnnnnnnnnnnnnnnnnnnnnnnnnnnnnnnnnnnnnnnnnnnnnnnnnnnnnnnnnnnnnnnnnnnnnnnnnnnnnnnnnnnnnnnnnnnnnnggttttctggggtcactgcatcaacgccttggtccactccctcatcctcttctggtttcccatgaaagctctggagcatggtaagggctnnnnnnnnnnnnnnnnnnnnnnnnnnnnnnnnnnnnnnnnnnnnnnnnnnnnnnnnnnnnnnnnnnnnnnnnnnnnnnnnnnnnnnnnnnnnnnnnnnnnnnnnnnntcatctggctgtctggggaagcatgctgacctggctggtgttttttggcatctactccaccatctggcccaccattcccattgctccagatatgagaggacagnggcaactatggtcctgagctccgcacacttctggttgggattatttctggtttataagggctctttgattgaagatgtggcgtggagagagccaagcacacctgcaaaaagacattgctggaggaggtgcaggagctggaaaccaagtctcgagtcctgggaaaagcggtgctgcgggatagcaatggaaagaggnnnnnnnnnnnnnnnnnnnnnnnnnnnnnnnnnnnnnnnnnnnnnnnnnnnnnnnnnnnnnnnnnnnnnnnnnnnnnnnnnnnnnnnnnnnatgggtatgctttttctcaagaagaacacggagcagtgagtcaggaagaagtcatccgtgcttatgacaccaccaaaaggaaatgcaggaagaagtaaga

SEQ ID NO: 24030 - DNA, 1442 bp, Macaca Mulatta
  misc_feature (1)...(1442): n = A,T,C or G
gtggtcttggaggcattgggatgggacttggtccgggtggacagcctattagtgccagccagttgaacataggtggagtaatgggaaatttaggtccaggtggnnnnnnnnnnnnnnnnnnnnnnnnnnnnnnnnnnnnnnnnnnnnnnnnnnnnnnnnnnnnnnnnnnnnnnnnnnnnnnnnnnnnnnnnnnnnnnnnnnnnnnnnnnnnnnnnnnnnagagttgtaccgtggtgccatgactagtagcatggagcgagattttggacgtggtgatattggaataaatcgaggctttggagattcctttggtagacttggnnnnnnnnnnnnnnnnnnnnnnnnnnnnnnnnnnnnnnnnnnnnnnnnnnnnnnnnnnnnnnnnnnnnnnnnnnnnnnnnnnnnnnnnnnnnnnnnnnnnnnnnnnnnnnnnnnnnnnnnnnnnnnnnnnnnnnnnnnnnnnnnnnnnnnnnnnnnnnnnnnnnnnnnnnnnnnnnnnnnnnnnnnnnnnnnnnnnnnnnnnnnnnnnnnnnnnnnnnnnnnnnnnnnnnnnnnnnnnnnnnnnnnnnnnnnnnnnnngtcatgtaatgtttgcagaaataaaaatggagaatggaaagtcaaaaggctgtggaacagtcagatttgactccccagaatcagctgaaaaagcctgcagaataatgaatggcataaaaatcagtggcagagaaattgatgtccgcttggatcgtaatgcataatttcaagccatggttggaacattcctacatctgttttgctgaatctcctagtaaaagtcatttttttttaagtaatattgtatgcttacaaaagctgtaaaaatgaacttttaaaactcccaccagcttttaacagtataatgttaaaaatatactgtaatttttgttaatctcaagtttgggtttttaaagacagcaagtctggtcattcagtttaaatgaatggttatactgtttttaatgaaataagccattttcttgttgttttcagtactacnatagttggatttgtttgttctagtttctccagtttttgtcaacttattgtatggtaaaacagattttttgccccccaaaacttctgttttataatatgtaattcttcatgaaaagaaagggctcagaaaaattaggatatgattttggttggttttaaattactgtaagtnttagattctaaggttcaggatttaaaaaatttgatttaaatgaagaaattgatttttctctctgcccctccctgccattcatattttctgcataacactgttaataatatcaacctccacagccccttattttattatttccaataattccaagttcatatagaactgataatgtagcaagccccaagtatgataataggcagactattcccaactttctgtctagtttccagccattgaagtgaactgc

SEQ ID NO: 24031 - DNA, 1092 bp, Macaca Mulatta
  misc_feature (1)...(1092): n = A,T,C or G
cccgtggccgcgtgctgggaggagactgttgccccgtcaggaagcatggagttggcgactcgctaccagnnnnnnnnnnnnnnnnnnnnnnnnnnnnnnnnnnnnnnnnnnnnnnnnnnnnnnnnnnnnnnnnnnnnnnnnnnnnnnnnnnnnnnnnnnnnnnnnnnnnnnnnnnnnnnnnnnnnnnnnnnnnnnnnnnnnnnnnnnnnnnnnnnnnnnnnnnnnnnnnnnnnnnnnnnnnnnnnnnnnnnnnnnnnnnnnnnnnnnnnnnnnnnnnnnnnnnnnnnnnnnnnnnnnnnnnnnnnnnnnnnnnnnnnnnnnnnnnnnnnnnnnnnnnnnnnnnnnnnnnnnnnnnnnnnnnnnnnnnnnnnnnnnnnnnnnnnnnnnnnnnnnnnnnnnnnnnnnnnnnnnnnnnnnnnnnnnnnnnnnnnnnnnnnnnnnnnnnnnnnnnnnnnnnnnnnnnnnnnnnnnnnnnnnnnnnnnnnnnnnnnnnnnnnnnnnnnnnnnnnnnnnnnnnnnnnnnnnnnnnnnnnnnnnnnnnnnnnnnnnnnnnnnnnnnnnnnnnnnnnnnnnnnnnnnnnnnnnnnnnnnnnnnnnnnnnnnnnnnnnnnnnnnnnnnnnnnnnnnnnnnnnnnnnnnnnnnnnnnnnnnnnnnnnnnnnnnnnnnnnnnnnnnnnnnnnnnnnnnnnnnnnnnnnnnnnnnnnnnnnnnnnnnnnnnnnnnnnnnnnnnnnnnnnnnnnnnnnnnnnnnnnnnnnnnnnnnnnnnnnnnnnnnnnnnnnnnnnnnnnnnnnnnnnnnnnnnnnnnnnnnnnnnnnnnnnnnnnnnnnnnnnnnnnnnnnnnnnnnnnnnnnnnnnnnnnnnnnnnnnnnnnnnnnnnnnnnnnnnnnnnnnnnnnnnnnnnnnnnnnnnnnnnnnnnnnnnnnnnnnnnnnnnnnnnnnnnnnnnnnnnnnnnnnnnnnnnnngggaaatgccgggagtatagacgacgtcaccgtatatcttcttttcggccagtggaggatatcaccgaagaagacttagaaaatgttgccataactgttcgagataaaatctatgataaagttctgg

SEQ ID NO: 24032 - DNA, 1839 bp, Macaca Mulatta
  misc_feature (1)...(1839): n = A,T,C or G
ggaaccttccctgtatactgtcaaagccatcctgattctggacaatgatggagatcgactttttgccaannnnnnnnnnnnnnnnnnnnnnnnnnnnnnnnnnnnnnnnnnnnnnnnnnnnnnnnnnnnnnnnnnnnnnnnnnnnnnnnnntgaaattgccctcttggaaggcctgacagtggtatacaaaagcagtatagatctctatttctatgtgattggcagctcctatgaaaatgagnnnnnnnnnnnnnnnnnnnnnnnnnnnnnnnnnnnnnnnnnnnnnnnnnnnnnnnaggaaaaatgtagaaaagcgagcactgctggagaacatggaggggctgttcttggctgtggatgaaattgtagatggaggnnnnnnnnnnnnnnnnnnnnnnnnnnnnnnnnnnnnnnnnnnnnnnnnnnnnnnnnnnnnnnnnnnnnnnnnnnnnnnnnnnnnnnncaggtgctgcagtcagccaaagaacagatcaagtggtcactccttcggtgaagatcccactgttcctggctcttcatcctcttcaaaaaattcgcatgtctgctgtgaattttcatctagttccccaatcgatgctctcagggtcatctcggggatcacagggatccttaaatctccattctgtttgtggttgtccccccaacctcccctacaccctccctattatttttcattcttcttgcagttctgggagtaaagctcccagcatattcagataatagggcaggggaagcaccctctttctttctcgactggattatgctcacatgctcccctgccctgacatttttgtaaattctgtgccctttgttgtagctacacttcagattaaagtaggagaaagaatgtgctgaatgttttcctgcctttgcctttacctggacctcatcccgacaccccagcaaggggagggaaaaagagaattctttactatagaacgagtgggggtggggatgggtagggatttatccaatctaagccctatccccacttactgacctcagtgttttcttccattccttcttactgccctgtcctctgccttggaaaaggtattgggaatagttcatagggaagggacaacatggaagaaacagtgatttaaattgtattgaatagggcacataaaatgcattctctaccccgatctggcatatagcttcaaaactgccgtggtgagtgccggtctcttaattagctgccttaactccacccttactacctgtgggatctttgcctggtttgtcttctctgtgtcctgaagcaaagccagttcctaaaactaaaactccattctagtcttgggaagaaaactttctactcagaactggggaaggagtagaacttatgacttgggcgtctaggctgtctctgtcccctcaactccccgacatgcatttactcctctgccttgggtctacattcgctgcagcccaccctctctctgcttcagccttacacccaagcagtgcgtctgtgctctccctgtctctaggtcgctgagagaggtgcttttcttcatgaaacctttgggatttggatttccccaggaagatggagaatggaatactcactcttgggtgtaatctttcccctagacccagaacttcctccccacaaaaatgtctttaaaaaccttcctgagacttaagcattctgccccacttactaactgccagttctccaacactgaagtggggcagataactgggcatatttgagggggcatctttgtgtaaaagatgcatggagtcaggagatagccaccttcataaactgctctgtgcaaagaggaataaaacattttttcaaaact

SEQ ID NO: 24033 - DNA, 346 bp, Macaca Mulatta
accaatttttcattactttgtaagaatgtagtgtattttaagataaaatgccaatgattataaaatcacctattttcaaaaatggttattatgtatacctttgtataacttctaacaatttagtggaagtatcaaaaggattgaagcaaatactgtaacagttatattcctttaaataatagagaatataaaatattgtaatagtaataatatttatcataaaacagttttgtgtgagcatttgatggtgcttgatgagttatttgtatttgatgggactgtttgtatttcatgggagtatctggagtatttaacgggatgtaaaccctggatgtacctgatttta

SEQ ID NO: 24034 - DNA, 689 bp, Macaca Mulatta
gggggtgccacagtggatctgtatattcttaatcatctaatgaacccacccaatggaaaacgctgtgaatttgtcatggaagtcacaaataaaacacgtgcagatgtaaagggcgggacactcactcaatatgaaggcaaactgagactggtggaaattgctcaagtgccaaaagcacatgttgacgagttcaagtctgtatcaaagttcaaaatatttaacacaaacaacctatggatttctcttgcagcagttaaaagactgcaggagcagaatgccattgacatggaaatcattgtgaatccaaagactttggatggaggcctgaatgtcattcagttagaaactgcagtaggggctgccatcaaaagtttcgagaattctctaggtattaatgtgccaaggagccgttttctgcctgtcaaaaccacatcagatctcttactggtgatgtcaaacctctatagtcttaatgcaggatctctgacaatgagtgaaaagcgggaatttcctacagtgcccttgggtaaaattaagcaggtctttttacaaaggtaatggtaactataaaagaatatgtgaggttcatattttccttaaaatggggtaatttaataaaaaaatatggaatattgcactggggaaaattggggaaaaacctaaaattttaccgagtgttcttctctaac

SEQ ID NO: 24035 - DNA, 1429 bp, Macaca Mulatta
  misc_feature (1)...(1429): n = A,T,C or G
ggaagtcggcgtgtcgagaggctcgtccaggccgctgaggcgggttaaggtctgagggtcgtgtggagccagggcgctggtcaccaggtgtttggcgtggtcggctcttatttctcacctggcaatggcgacgtacacctgcataacttgccgggtggcgttccgcgacgcggacatgcagcgggcccactataagacggactggcaccgctacaacctgcggcgtaaggtggccagcatggccccagtgaccgccgagggcttccaggagcgagtgcgggcgcagcgggccgtagcggaggaggagagcaagggctcggccacctactgtactgtttgcagtaagaagtttgcatctttcaacgcctacgagaaccacctcaagtctcggcggcacgttgagctggagaagaaggccgtgcaggccgtgaatcggaaagtggagatgatgaatgaaaagaacttggagaaaggactgggcttggacagtgtggacaaggatgccatgaacgccgccatccagcaggccatcaaggcccagccgtccatgtctcccaagaaggcgcccccagcgcctgcagaggaggccaggagtgccgtagccgtggggactggtggccgtgggacccacgaccgagacccgaacaagaaaccaccccggctccagtggtttgaacagcaggctaaaaggttggcaaagcagcaggaggannnnnnnnnnnnnnnnnnnnnnnnnnnnnnnnnnnnnnnnnnnnnnnnnnnnnnnnnnnnnnnnnnnnnnnnnnnnnnnnnnnnnnnnnnnnnnnnnnnnnnnnnnnnnnnnnnnnnnnnnnnnnnnnnnnnnnnnnnnnnnnnnnnnnnnnnnnnnnnnnnnnnnnnnnnnnnnnnnnnnnnnnnnnnnnnnnnnnnnnnnnnnnnnnnnnnnnnnnnnnnnnnnnnnnnnnnnnnnnnnnnnnnnnnnnnnnnnnnnnnnnnnnnnnnnnnnnnnnnnnnnnnnnnnnnnnnnnnnnnnnnnnnnnnnnnnnnnnnnnnnnnnnnnnnnnnnnnnnnnnnnnnnnnnnnnnnnnnnnnnnnnnnnnnnnnnnnnnnnnnnnnnnnnnnnnnnnnnnnnnnnnnnnnnnnnnnnnnnnnnnnnnnnnnnnnnnnnnnnnnnnnnnnnnnnnnnnnnnnnnnnnnnnnnnnnnnnnnnnnnnnnnnnnnnnnnnnnnnnnnnnnnnnnnnnnnnnnnnnnnnnnnnnnnnnnnnnnnnnnnnnnnnnnnnnnnnnnnnnnnnnnnnnnnnnnnggtgccagagtgggtcatcgctccttgatgagatactacaaacagcgatttggcttgtccagagctgtggcagttgccaaaaatcggaaggccgtgggccgagtacttcagcagtacagagccctgggatggactggcagcacag

SEQ ID NO: 24036 - DNA, 1179 bp, Macaca Mulatta
  misc_feature (1)...(1179): n = A,T,C or G
gggagtgtcattggcggatgaccgcgacccttgcggctgctggtgacatcgctaccatggtctccggcagcagcggcctcgcagccgcccgtctgctgtcgcgcagctttctcctggcacagaatggaattcggcattgttcctatacagcttctcggaaacatctgtatgttgataaaaatacaaagattatttgccagggtttcaccggcaaacagggcacctttcacagccagcaggcattggaatatggcaccaaactcgttggaggaaccactccggggaaaggaggccagacgcatctgggcttacctgtctttaatactgtgaaggaggccaaagaacagacaggagcaacggcttctgtcatttatgttcctccgccctttgctgccgctgccattaatgaagctgttgaggcggaaattcccttggttgtgtgtatcactgaaggaattccccagcaggacatggtacgagtcaagcacaaactgctgcgccagggaaagacaaggctaattgggcccaactgccctggagtcatcaatcctggagaatgtaaaattggcatcatgcctggccatattcacaaaaaaggaaggattggcattgtgtccagatctggcaccctgacttatgaagcagttcaccagacaacggaagttggattggggcagtctttgtgcgttggcattggaggtgatcccttttaatggaaacagattttatttgactgccctccgaaattctttttgaaatgattctgccacagaaagcatcatattgattggtgaaattggtggtaatgcagaagaaaatgctgcagaatttttgaagcaacataattcaggtccaaattccaagcctgtagtgtccttcattgctggtttaactgctcctcctgggaggagaatgggtcatgccggggcaattattgctggaggaaaaggtggagctaaagaaagatctctgctcttcaaagtgcaggagttgtggtcagtatgtccccctgcccagctggggaaccacgatctacaaaggaattttgaaaagaaggaaagatgccttnnnnnnnnnnnnnnnnnnnnnnccctaaaaccggtggggaaatgaaatccactttagaacattgttggaaccccggtcaagcccagttttggccttcccggggtgtggcca

SEQ ID NO: 24037 - DNA, 493 bp, Macaca Mulatta
gtacccaggttacagagaagaaaagcgtcgctgtgagtaccttcaccagaaattgtcccacattaaaggtctcatcctggagtttgaggaaaagaacaggggcagctgaagttatcaagggaattcttgagcctctgcttagtgaaacacgaaggaacaaagcagctgtaaactaaatagaatgcaactatctgcttttcttttgctgaccactggagtccgtggtggcaagtagagagttgctctagcttcctgaggtttggttttcattgttaatttttagggtgtgggcactgtgcaaagactccatagctatgcctaggagtttaggaaaagtgacagaggcttggcttttttacctttagttcagccaagtcattttcaagtcctgagaaatgacatcatcttcaggataagataatgaggacattagacaaaccaaactaagtgaatttagtctactagcctccctaaggaaacagtaataataact

SEQ ID NO: 24038 - DNA, 798 bp, Macaca Mulatta
  misc_feature (1)...(798): n = A,T,C or G
agtttgttgcccagcccaattgtcaacagctgctggcatctcgctggtacgatgagtttcaggctggaggagaaacactgggcagtgaagatggtgacatgtttcatcataggacttctttttcctgtcttctctgtgtgctacctgatagctccaaaagcccactcggactgttcatcaggaagccttttatcaaggttatctggcacccagcctcctatttgaacttttttgttccggctgcnnnnnnnnnnnnnnnnnnnnnnnnnnnnnnnnnnnnnnnnnnnnnnnnnnnnnnnnnnnnnnnnnnnnnnnnnnnnnnnnnnnnnnnnnnnnnnnnnnnnnnggggagaaattaaacagatggggggagggcgggctttcagggcttacctccaggattggggggaatctaatggacttgtaatgaactccttatatttagggccaatctccttaaaattgtcgcgtttgtaaagnagtacagtgcccttaatccacgagaatcatgggacatgtggcatcccactctggtggcagaggctttatttgctattgcaaacatcttcagttctctgcgtctgatctcactgtttactgcaaattctcatctgggacctctgcaaatatctctgggaagaatgctcctggacattttgaagtttctattcatatactgccttgtgttgctagcatttgcaaatggcctaaatcaattgtacttctattatgaagaaacgaaagggttgacctgcaaaggcatacgatgtgaaaagcagaataatgcattttcgacgt

SEQ ID NO: 24039 - DNA, 925 bp, Macaca Mulatta
cacaggagtctggcagggcagaacaaggatctcaaagaggggagaaaatgaaggggaagatggtgagccaggtcccattccaagggtcatttgtacacatggaggctggtgtgaactatccatctccgggcccaggagaaccctcaaactctaaggttctggtctcagacaagagaaaggacaaggcttcagccttatcctcagccaaaaaaggagagcaccctagaaaacccaaagcaggagaccatagaggagggactgcaaggttggggttatccacagtcacagggaagaaccaccccgcccaggccagaagcctagtagaggcccctgtaagcacatttcctcaaaggtatcaacacaggggccagagctctcaacacactgcttttccccagctgcttctccccaaagcttcgggtccccaggatcagccagaggcaggtctgagagcaagtgacatcctgactcctcaccactgtaagcactgtccttgggcccacatggagaagcatctctcctcccctaccctcaaggcttcccttgccaggggtttccaaaaggtgttagccaaatgcctgggtaaccatcgacccctacccaccaaatctagtcagtagagaaaaggctggtaatactggcacttggtatgccaagacctgaagccaaaccagggggatggtggggatgtggagacaagaaatggaaattctaataaactagctgaattagacaaatcccattcatgtcttctttggaatccagggtactgaaaatgtcacttcccaattctactgcagccatatcccctcaggttcaagtcccagaagtatagcactcaggattctgcaggcttaactctcttttatggatcttcacagatgatcacatctggagtccacacatccctactctacggggtgag

SEQ ID NO: 24040 - DNA, 263 bp, Macaca Mulatta
  misc_feature (1)...(263): n = A,T,C or G
aggctcctaatgtagatgtgaagatgacatggctaaaagaaataagaaatattttgttgaagcagcaggaacttttgacaggtaaannnnnnnnnnnnnnnnnnnnnnnnnnnnnnnnnnnnnnnnnnnnnnnnnnnnnnnnnnnnnnnnnnnnaaagcaacagggagcttttataagtactgaggaaactgaatcggaacacaccagcactgtggtggaggtctgtggggcaattgcatcagttcaggcagaagcaaataca

SEQ ID NO: 24041 - DNA, 185 bp, Macaca Mulatta
attgaaggaataattttctataggactctggagtgaagggattaatattgaccagagccaatgaggtcatctcatccttcaggggagcaggtgtgagcttcaaatgcttagggcccctggagggaagcttccctgttggagaaatcgccaaccggctcagcatgctctgaatgaggatgacaaaa

SEQ ID NO: 24042 - DNA, 89 bp, Macaca Mulatta
caggaatttgtaagtgtctgggttcgagatcctaggattcagaaggaggacttctggcattatgacattgactatgagatatgtattca

SEQ ID NO: 24043 - DNA, 505 bp, Macaca Mulatta
  misc_feature (1)...(505): n = A,T,C or G
caggtcttcctgacgtcgcccactgaggtggccaaagtccgcctgcagacgcaaacacaggcacagaagcagcagcggcggctctcggcctcggggccctcggctgtgccccccgtgtgtcctgcgcccccaacctgcccagagcccaagtaccgcgggccgcttcactgcctggccacagtagcccgcgaggaggggctgcgcggcctctacaagggcagctcggccctgctgttacgggacggccactcctttgccacctacttcctgacctacgccatcctctgtgagcggctcannnnnnnnnnnnnnnnnnnnnnnnnnnnnnnnnnnnnnnngtggcctggggctgtgcaggattcttggcttgggatgtggccacccccatggatgtgatcaagtcgagactgcaggcagatggacagggccagaggcgctaccggggcctcctgcactgtatggtgaccagcgtgcgggaggagggaccccgggtccttttcaaggg

SEQ ID NO: 24044 - DNA, 2526 bp, Macaca Mulatta
  misc_feature (1)...(2526): n = A,T,C or G
agcctggagatgacatagtcttaatggcagaannnnnnnnnnnnnnnnnnnnnnnnnnnnnnnnnnnnnnnnnnnnnnnnnnnnnnnnnnnnnnnnnnnnnnnnnnnnnnnnnnnnnnnnnnnnnnnnnnnnnnngggacagcaaaacctggcgtttccacggtaccaaacacaactcaagcatcaactcttccgcagacccagacccctcagccgaatcctcctcctgtgcaggccacgcctcaccccttccctgccgtcaccccagacctcatcgtccagacccctgtcatgacagtggtgcctccccagccactgcagacacccccgccggtgcccccccagccacaacccccacccgctccagctccccagcctgtacagagccacccacctatcatcgcagccaccccacagcctgtgaagnnnnnnnnnnnnnnnnnnnnnnnnnnnnnnnnnnnnnnnnnnnnnnnnnnnnnnnnnnnnnnnnnnnnnnnnnnnnnnnnnnnnnnnnnnnnnnnnnnnnnnnnnnnnnnnnnnnnnnnnnnnnnnnnnnnnnnnnnnnnnnnnnnnnnnnnnnnnnnnnnnnnnnnnnnnnnnnnnnnnnnnnnnnnnnnnnnnnnnnnnnnnnnnnnnnnnnnnnnnnnnnnnnnnnnnnnnnnnnnnnnnnnnnnnnnnnnnnnnnnnnnnnnnnnnnnnnnnnnnnnnnnnnnnnnnnnnnnnnnnnnnnnnnnnnnnnnnnnnnnnnnnnnnnnnnnnnnnnnnnnnnnnnnnnnnnnnnnnnnnnagtctaaaagggaggcccgtgagtaccgtgatgctcaggagtttggnnnnnnnnnnnnnnnnnnnnnnnnnnnnnnnnnnnnnnnnnnnnnnnnnnnnnnnnnnnnnnnnnnnnnnnnnnnnnnnnnnnnnnnnnnnnnnnnnnnnnnnnnnnnnnnnnnnnnnnnnnnnnnnnnnnnnagtggtggccgtgtcctccccggcagtgccccctcccaccaaggttgtggccccgccctcgtccagcgacagcagcagcgatagctcctcggacagtgacagttcgactgatgactctgaggaggagcgagcccagcggctagctgagctccaggagcagnnnnnnnnnnnnnnnnnnnnnnnnnnnnnnnnnnnnnnnnnnnnnnnnnnnnnnnnnnnnnnnnnnnnnnnnnnnnnnnnnnnnnnnnnnnnnnnnnnnnnnnnnnnnnnnnnnnnnnnnnnnnnnnnnnnnnnnnnnnnnnnnnnnnnnnnnnnnnnnnnnnnnnnnnnnnnnnnnnnnnnnnnnnnnnnnnnnnnnnnnnnnnnnnnnnnnnnnnnnnnnnnnnnnnnnnnnnnnnnnnnnnnnnnnnnnnnnnnnnnnnnnnnnnnnnnnnnnnnnnnnnnnnnnnnnnnnnnnnnnnnnnnnnnnnnnnnnnnnnnnnnnnnnnnnnnnnnnnnnnnnnnnnnnnnnnnnnnnnnnnnnnnnnnnnnnnnnnnnnnnnnnnnnnnnnnnnnnnnnnnnnnnnnnnnnnnnnnnnnnnnnnnnnnnnnnnnnnnnnnnnnnnnnnnnnnnnnnnnnnnnnnnnnnnnnnnnnnnnnnnnnnnnnnnnnnnnnnnnnnnnnnnnnnnnnnnnnnnnnnnnnnnnnnnnnnnnnnnnnnnnnnnnnnnnnnnnnnnnnnnnnnnnnnnnnnnnnnnnnnnnnnnnnnnnnnnnnnnnnnnnnnnnnnnnnnnnnnnnnnnnnnnnnnnnnnnnnnnnnnnnnnnnnnnnnnnnnnnnnnnnnnnnnnnnnnnnnnnnnnnnnnnnnnnnnnnnnnnnnnnnnnnnnnnnnnnnnnnnnnnnnnnnnnnnnnnnnnnnnnnnnnnnnnnnnnnnnnnnnnnnnnnnnnnnnnnnnnnnnnnnnnnnnnnnnnnnnnnnnnnnnnnnnnnnnnngctgtgttggctgctcttgaatctgccctaactccacacgcacctggacttggcgtgtctctcttgcaattctaactaacagtcccttctcttcaagccctgtgggcctgcacgtcggaccctgggttttgcgttagagcccaccttctgagcagcagcctcagtgggaggtggaggcaggtagcgattctgggtgccaggtgggagtggagagggtctgctctcctccaagtgtgcactttcctcattattctcaggggcacagatgctcaggctggcgcagaggagaggatagggagggagccatggtgcccaggaggcctggcgaccagcccctgctgagcgatggagctaacatcctgtgtttatggccaacggggttgccactaggctggtgcagctgcgtcagtgagctggcgtgctgcagaccacctgagagctggccctagggtctcaggcaggctggggaatgggcatccacagtgggaaacctgtgttttggcagtagactcctgcatgttttcccacgggcctgtcgcatccctgggattttattctaactagaaataaatgctaaccgtcaataa

SEQ ID NO: 24045 - DNA, 3187 bp, Macaca Mulatta
  misc_feature (1)...(3187): n = A,T,C or G
aggtgtggcaaaacatgttggagatgccctcaaagaacatgcttccagatcatctcgaaagatttgcactatcggaatagctccatggggagtgattgaaaacagaaatgatcttgttgggnnnnnnnnnnnnnnnnnnnnnnnnnnnnnnnnnnnnnnnnnnnnnnnnnnnnnnnnnnnnnnnnnnnnnnnnnnnnnnnnnnnnnnnnnnnnnnnnnnnnnnnnnnnnnnnnnnnnnnnnnnnnnnnnnnnnnnnnnnnnnnnnnnnnnnnnnnnnnnnnnnnnnnnnnnnnnnnnnnnnnnnnnnnnnnnnnnnnnnnnnnnnnnnnnnnnnnnnnnnnnnnnnnnnnnnnnnnnnnnnnnnnnnnnnnnnnnnnnnnnnnnnnnnnnnnnnnnnnnnnnnnnnnnnnnnnnnnnnnnnnnnnnnnnnnnnnnnnnnnnnnnnnnnnnnnnnnnnnnnnnnnnnnnnnnnnnnnnnnnnnnnnnnnnnnnnnnnnnnnnnnnnnnnnnnnnnnnnnnnnnnnnnnnnnnnnnnnnnnnnnnnnnnnnnnnnnnnnnnnnnnnnnnnnnnnnnnnnnnnnnnnnnnnnnnnnnnnnnnnnnnnnnnnnnnnnnnnnnnnnnnnnnnnnnnnnnnnnnnnnnnnnnnnnnnnnnnnnnnnnnnnnnnnnnnnnnnnnnnnnnnnnnnnnnnnnnnnnnnnnnnnnnnnnnnnnnnnnnnnnnnnnnnnnnnnnnnnnnnnnnnnnnnnnnnnnnnnnnnnnnnnnnnnnnnnnnnnnnnnnnnnnnnnnnnnnnnnnnnnnnnnnnnnnnnnnnnnnnnnnnnnnnnnnnnnnnnnnnnnnnnnnnnnnnnnnnnnnnnnnnnnnnnnnnnnnnnnnnnnnnnnnnnnnnnnnnnnnnnnnnnnnnnnnnnnnnnnnnnnnnnnnnnnnnnnnnnnnnnnnnnnnnnnnnnnnnnnnnnnnnnnnnnnnnnnnnnnnnnnnnnnnnnnnnnnnnnnnnnnnnnnnnnnnnnnnnnnnnnnnnnnnnnnnnnnnnnnnnnnnnnnnnnnnnnnnnnnnnnnnnnnnnnnnnnnnnnnnnnnnnnnnnnnnnnnnnnnnnnnnnnnnnnnnnnnnnnnnnnnnnnnnnnnnnnnnnnnnnnnnnnnnnnnnnnnnnnnnnnnnnnnnnnnnnnnnnnnnnnnnnnnnnnnnnnnnnnnnnnnnnnnnnnnnnnnnnnnnnnnnnnnnnnnnnnnnnagattgatacagttgtggaagaaggaaagaagaaaagaaccaaagatgaaattgtagacattgatgatccagaaactaagcgctttccttatccacttaatgaacttttaatttgggcttgccttatgaagaggcaggtcatggcccgttttttatggcaacatggtgaagaatcaatggctaaagcannnnnnnnnnnnnnnnnnnnnnnnnnnnnnnnnnnnnnnnnnnnnnnnnnnnnnnnnnnnnnnnnnnnnnnnnnnnnnnnnnnnnnnnnnnnnnnnnnnnnnnnnnnnnnnnnnnnnnnnnnnnnnnnnnnnnnnnnnnnnnnnnnnnnnnnnnnnnnnnnnnnnnnnnnnnnnnnnnnnnnnnnnnnnnnnnnnnnnnnnnnnnnnnnnnnnnnnnnnnnnnnnnnnnnnnnnnnnnnnnnnnnnnnnnnnnnnnnnnnnnnnnnnnnnnnnnnnnnnnnnnnnnnnnnnnnnnnnnnnnnnnnnnnnnnnnnnnnnnnnnnnnnnnnnnnnnnnnnnnnnnnnnnnnnnnnnnnnnnnnnnnnnnnnnnnnnnnnnnnnnnnnnnnnnnnnnnnnnnnnnnnnnnnnnnnnnnnnnnnnnnnnnnnnnnnnnnnnnnnnnnnnnnnnnnnnnnnnnnnnnnnnnnnnnnnnnnnnnnnnnnnnnnnnnnnnnnnnnnnnnnnnnnnnnnnnnnnnnnnnnnnnnnnnnnnnnnnnnnnnnnnnnnnnnnnnnnnnnnnnnnnnnnnnnnnnnnnnnnnnnnnnnnnnnnnnnnnnnnnnnnnnnnnnnnnnnnnnnnnnnnnnnnnnnnnnnnnnnnnnnnnnnnnnnnnnnnnnnnnnnnnnnnnnnnnnnnnnnnnnnnnnnnnnnnnnnnnnnnnnnnnnnnnnnnnnnnnnnnnnnnnnnnnnnnnnnnnnnnnnnnnnnnnnnnnnnnnnnnnnnnnnnnnnnnnnnnnnnnnnnnnnnnnnnnnnnnnnnnnnnnnnnnnnnnnnnnnnnnnnnnnnnnnnnnnnnnnnnnnnnnnnnnnnnnnnnnnnnnnnnnnnnnnnnnnnnnnnnnnnnnnnnnnnnnnnnnnnnnnnnnnnnnnnnnnnnnnnnnnnnnnnnnnnnnnnnnnnnnnnnnnnnnnnnnnnnnnnnnnnnnnnnnnnnnnnnnnnnnnnnnnnnnnnnnnnnnnnnnnnnnnnnnnnnnnnnnnnnnnnnnnnnnnnnnnnnnnnnnnnnnnnnnnnnnnnnnnnnnnnnnnnnnnnnnnnnnnnnnnnnnnnnnnnnnnnnnnnnnnnnnnnnnnnnnnnnnnnnnnnnnnnnnnnnnnnnnnnnnnnnnnnnnnnnnnnnnnnnnnnnnnnnnnnnnnnnnnnnnnnnnnnnnnnnnnnnnnnnnnnnnnnnnnnnnnnnnnnnnnnnnnnnnnnnnnnnnnnnnnnnnnnnnnnnnnnnnnnnnnnnnnnnnnnnnnnnnnnnnnnnnnnnnnnnnnnnnnnnnnnnnnnnnnnnnnnnnnnnnnnnnnnnnnnnnnnnaatgtgtatttacaagtgaaggcaatttccaatattgtatggaagtaccagcgttatcattttattatggcttatcatgagaaaccagttctgcctcctccacttatcattcttagccatatagtttctctgttttgctgcatatgtaagagaagaaagaaagataagacttccgatggaccaannnnnnnnnnnnnnnnnnnnnnnnnnnnnnnnnnnnnnnnnnnnnnnnnnnnnnnnnnnnnnnnnnnnnnnnnnnnnnnnnnnnnnnnnnnnnnnnnnnnnnnnnnnnnnnnnnnnnnnnnnnnnnnnnnnagagtggaacagatgtgcattcagattaaagaagttggagatcgtgtcaagaacataaaaagatcattacaatcattagattctcaaattggccatttgcaagatctttcagccct

SEQ ID NO: 24046 - DNA, 333 bp, Macaca Mulatta
aggccattgccagccacatgcacctcaagtgcaagtgccacgggctgtcgggcagctgcaaggtgaatacatgctggtggtcgcaacccgacttccgcgccatcggtgacttcctcaaggacaagtacgacagcgcctcggaaatggtggtggagaagcaccgggagtcccgcggatgggtggagaccctgcggccgcgttattcctacttcaaggtgcccacggagcgtgacctggtctactacaaggcctcgcccaacttctgcgagcccaaccccgagacaggttccttcggcacgcgcgaccggacctgcaacgtcagctcgcacggca

SEQ ID NO: 24047 - DNA, 1598 bp, Macaca Mulatta
  misc_feature (1)...(1598): n = A,T,C or G
gctattgtggatgctgatggaagaatttatattcggaactggcagggtggcatcttgtctgggggctttgagaagaacccgaaaccaattttcactgagggcaagaaccagctggagattcagaatctacaggaagactgggatcactttgngagcctctgttgagttcccttctgaggaggatgccagaattacagactctggagatcatgaagttggtgaattgcccacagaccttcacaccagacatgagatgcatcatgggcgagtctcctgcagcgcagggctactttgtcctggcaggaatgaactctgctggcctttcatttggtggaggagccagaaagtangtaccttgctgaatggatggtacatggttatccctcagaaaacgtttgggaattggacctgaaacgttttggagccctccagagcagccgtacctttctgcgccaccgggtcatggaagtcatgcnnnnnnnnnnnnnnnnnnnnnnnnnnnnnnnnnnnnnnnnnnnnnnnnnnnnnnnnnnnnnnnnnnnnnnnnnnnnnnnnnnnnnnnnnnnnnnnnnnnnnnnnnnnnnnnnnnnnnnnnnnnnnnnnnnnnnnnnnnnnnnnnnnnnnnnnnnnnnnnnnnnnnnnnnnnnnnnnnnnnnnnnnnnnnnnnnnnnnnnnnnnnnnnnnnnnnnnnnnnnnnnnnnnnnnnnnnnnnnnnnnnnnnnnnnnnnnnnnnnnnnnnnnnnnnnnnnnnnnnnnnnnnnnnnnnnnnnnnnnnnnnnnnnnnnnnnnnnnnnnnnnnnnnnnnnnnnnnnnnnnnnnnnnnnnnnnnnnnnnnnnnnnnnnnnnnnnnnnnnnnnnnnnnnnnnnnnnnnnnnnnnnnnnnnnnnnnnnnnnnnnnnnnnnnnnnnnnnnnnnnnnnnnnnnnnnnnnnnnnnnnnnnnnnnnnnnnnnnnnnnnnnnnnnnnnnnnnnnnnnnnnnnnnnnnnnnnnnnnnnnnnnnnnnnnnnnnnnnnnnnnnnnnnnnnnnnnnnnnnnnnnnnnnnnnnnnnnnnnnnnnnnnnnnnnnnnnnnnnnnnnnnnnnnnnnnnnnnnnnnnnnnnnnnnnnnnnnnnnnnnnnnnnnnnnnnnnnnnnnnnnnnnnnnnnnnnnnnnnnnnnnnnnnnnnnnnnnnnnnnnnnnnnnnnnnnnnnnnnnnnnnnnnnnnnnnnnnnnagggcatggatttcattggtcgtgatgccctcctgctgcagaagcagaatggagtgtataaacgcctcaccatgttcatcctggacgaccatgacacagacctagacctttggccttggtggggagagcccatttaccggaatgggcagtacgttggcaagaccaccagcagtgcctacagctacagcctagagcgccacgtttgcctgggctttgttcacaacttttccgaggacacgggggaagagcaggtggtgacagcggatttcatcaaccggggagagtatgagattgacatcgcgggataccgcttccaggccaaggccaagctctaccccgtcgcctccctcttcacccagaagcgccgaaaggatgacatggagctg

SEQ ID NO: 24048 - DNA, 627 bp, Macaca Mulatta
tctcgttggggtctatgatgctctttaccccacaaagtggggcgggaggaagacaaagatcagggaaagccctaatcagagatacctcagcaagctgcccccggcgggactgaccctctcagggcccctgttggtctcccctgccgggaccagggtcaactattgccccctcctcacagaccctgggcccgggcaggtctgaatcccggctggtctgtagctggaagctgtcagggctgcctgccttcccggaactgtgaggacccctgtggaggccctgcctatttggcccctctccccagaaaggcaaagcagggccaggggaggtggggggctgttcacagccaggcccagaagaagggggcctgggaatgtggcatgaggcttcccagctgcagggccggggccggtgggacacaaagtgatgtgattgcaggcccagccctggcagccgagagctccgtgcagttcctccagccgaggccaggcagcagaggccagtttgtgtttgctggctggaagatggtgctcatggccatcctctggccctgcagatgtcacttgtgttacttctggtgactccagattacagactggccctcaatctcacccccagcccaccagaga

SEQ ID NO: 24049 - DNA, 2368 bp, Macaca Mulatta
  misc_feature (1)...(2368): n = A,T,C or G
atgctgcccgatggccctgagtcctcgctgtggggcaatccgggcttgcaggcgagnnnnnnnnnnnnnnnnnnnnnnnnnnnnnnnnnnnnnnnnnnnnnnnnnnnnnnnnnnnnnnnnnnnnnnnnnnnnnnnnnnnnnnnnnnnnnnnnnnnnnnnnnnnnnnnnncaagatggaagaataggcgtagttggaggctgtcaggagtnnnnnnnnnnnnnnnnnnnnnnnnnnnnnnnnnnnnnnnnnnnnacagccccagtgctgttgatgaggtggagaagtggctcccccggctgcacgctcttgtcgtaggacctggcttgggtagagatgatgtgcttctcagaaatgtccaggnnnnnnnnnnnnnnnnnnnnnnnnnnnnnnnnnnnnnnnnnnnnnnnnnnnnnnnnnnnnnnnnnnnnnnnnnnnnnnnnnnnnnnnnnnnnnnnnnnnnnnnnnnnnnnnnnnnnnnnnnnnnnnnnnnnnnnnnnnnnnnnnnnnnnnnnnnctcacaggccctgtggacagcgatgaccgccatggatctgtgctgagactcagccaggccctgggtaatgtgacgnnnnnnnnnnnnnnnnnnnnnnnnnnnnnnnnnnnnnnnnnnnnnnnnnnnnnnnnnnnnnnnnnnnnnnnnnnnnnnnnnnnnnnnnnnnnnnnnnnnnnnnnnnnnnnnnnnnnnnnnnnnnnnnnnnnnnnnnnnnnnnnnnnnnnnnnnnnnnnnnnnnnnngtccagccctctcctggtggctgcattcggcgcctgctctctcaccaggcagtgcaaccaccaagccttccagaagcacggtcgctccaccaccacctccgacaggatcgccgaggtgggggccgccttccgcaagctcttcgaaacctgagcccacgcagaccagaaggaagcaggcacctcggacgggggagagcgtgtgtgtgatgggaaatccagagccacgtgtgtgctgaaggcgnnnnnnnnnnnnnnnnnnnnnnnnnnnnnnnnnnnnnnnnnnnnnnnnnnnnnnnnnnnnnnnnnnnnnnnnnnnnnnnnnnnnnnnnnnnnnnnnnnnnnnnnnnnnnnnnnnnnnnnnnnnnnnnnnnnnnnnnnnnnnnnnnnnnnnnnnnnnnnnnnnnnnnnnnnnnnnnnnnnnnnnnnnnnnnnnnnnnnnnnnnnnnnnnnnnnnnnnnnnnnnnnnnnnnnnnnnnnnnnnnnnnnnnnnnnnnnnnnnnnnnnnnnnnnnnnnnnnnnnnnnnnnnnnnnnnnnnnnnnnnnnnnnnnnnnnnnnnnnnnnnnnnnnnnnnnnnnnnnnnnnnnnnnnnnnnnnnnnnnnnnnnnnnnnnnnnnnnnnnnnnnnnnnnnnnnnnnnnnnnnnnnnnnnnnnnnnnnnnnnnnnnnnnnnnnnnnnnnnnnnnnnnnnnnnnnnnnnnnnnnnnnnnnnnnnnnnnnnnnnnnnnnnnnnnnnnnnnnnnnnnnnnnnnnnnnnnnnnnnnnnnnnnnnnnnnnnnnnnnnnnnnnnnnnnnnnnnnnnnnnnnnnnnnnnnnnnnnnnnnnnnnnnnnnnnnnnnnnnnnnnnnnnnnnnnnnnnnnnnnnnnnnnnnnnnnnnnnnnnnnnnnnnnnnnnnnnnnnnnnnnnnnnnnnnnnnnnnnnnnnnnnnnnnnnnnnnnnnnnnnnnnnnnnnnnnnnnnnnnnnnnnnnnnnnnnnnnnnnnnnnnnnnnnnnnnnnnnnnnnnnnnnnnnnnnnnnnctggtgcagcgatgacactaaggagacccggggagagacagtgtcgtggtcctgtgtgcttaggaagcagcgcggccgtgtcctcagggatgtttgcgtccagtaaagacagtagtaactgtacttcagctaatacgcttcatggcagtgtcgacctcgggttagcttctgttgtctgtatgggtggttttcctggcgcggcctgacattgacatgttctctggtcccatgtcttagtgaggcttggtacagttttgtgcctgacgcgtgcattagggtgttctcttatactttctggaacgcctttccactgcaagggccaaaccctcctggttcccttcagagtctttttggcctgatgatgactcttgagtgataccctgcgatgtaggcacgccccaaatggattctactttctttaaaactaggaactttgaagattaaaaaatagattgtcactactaatctgacacctaacttaagaagcttcacgtctaatgtgaacttttccagaaaaactgtgctatggacatttttcctttggggaattaacatccagattctggtaactattaaaagacagatctggttaattt

SEQ ID NO: 24050 - DNA, 299 bp, Macaca Mulatta
ccttaaactgttccgggccctccgtatataaacttagaagtcctatttttcttacaacaaatactgtaaaaacaacttgtataatagattagaacacctgcagttagttgagattctgtaaatgaaatgatagttccagctccgtttttgtgcatgggtgtgcctgtatgccagggccctgccgtatctgtcttatctacctactggttgccatccagcttgttttctaggccactggcagagaacaagggagaatgcacttcatttctcacggataccatgattggtgagagttgcca

SEQ ID NO: 24051 - DNA, 801 bp, Macaca Mulatta
  misc_feature (1)...(801): n = A,T,C or G
gggccttaaccgtttatatgcactttcatggagactgcaatacgttgctatgagcactttctttatccttggagtttaatcctttgcttaatctttctacagtatgacataatgatttgctatgttgtaaaatctttgtaaaaaatttctatannnnnnnnnnnnnnnnnncttaatttctttttcctgaattctgttccccaattatttaacaaggcttttgttannnnnnnnnnnnnnnnnnnnnnnnnnnnnnnnnnnnnnnnnnnnnnnnnnnnnnnnnnnnnnnnnnnnnnnnnnnnnnnnnnnnnnnnnnaggccgcctcggcccccgaaaaggtttcaaaaaaattctttttggcccccgggcccggaaggaaagtaaaaagggtaaaagttgttgccaagaaaatcttggaaagaaatagggcttggatnnnnnnnnnnnnnnnnnnnnnngggaaaaccgagggttcaaaacaaatctaaaggaatttccaaggtggtttcggggtttttcaacgggaatcaaaaagaggtgcttatcaaatttccccccgcccttgcccccccacgcgggactggttgaaaatttattgaggctttttccccaaattggaaagcccccaattaagggtcatttataaaccctggaaatcgcaaggggggtttcagcccccggggacccacttccaaaaataaacactttgccccaatggtgataaaacccgcggtggcaaaaaaaaatgttggcccaataatatgggccccgccctttaaataaccacaacccttgggtac

SEQ ID NO: 24052 - DNA, 666 bp, Macaca Mulatta
tttttttgttagtgagaagaggtatatcattattcatagttcttaatgcatacttaaaatgtattttttcatttataaagtataagttattttgaataaaacacatgtacaataaataattcatatgtgaaaatgctcatcagatagcttcatgctttgtcagtggaagaagccacagcaccagggaaatcagaaggtaatcttagtagctcttctacttcttcttgcagggcctctgctttttcatgcaacagcatctttgctgacgcaataatttgcttggcttgacgtcttgataaatgatcaattgtctttatgagcacttcaggatttgcattagctaagtgcattagacttttgtaacctgcactgtataactgtcttgctcgaccctctaaaactccagtaacttccatgagagggattagttctgcctttacacagtaagtcagcttcttggtaagttctaccaaaagggctctgtaaacccaaaactcctcaagctcctcacagaaatgtaacacacaagatgagaatgaggcagctccagtgagaagattttgtatatatcctcgaggcatattaaatttttcagatacagtccaaatgttggtctctttgagcaaggtataaagaacaaaagacagatatagcctgttgacaacg

SEQ ID NO: 24053 - DNA, 157 bp, Macaca Mulatta
  misc_feature (1)...(157): n = A,T,C or G
ncaggagcttcccggtcttcagcccgccagggcccccacggaagccccccgcgctctcccgagtgtccaggatgttttccgtggctcatccagccgccaaggtgccgcaacccgagcggctggacctggtgtatgcggcgctgaagcggggcctgac

SEQ ID NO: 24054 - DNA, 2148 bp, Macaca Mulatta
  misc_feature (1)...(2148): n = A,T,C or G
ggctctgctgggccccaaggtcctcctggtcccagtggtgaagaaggaaagagaggccctaatggggaagttggatctgctggccctccaggacctcctgggctgagannnnnnnnnnnnnnnnnnnnnnnnnnnnnnnnnnnnnnnnnnnnnnnnnnnnnnnnnnnnnnnnnnnnnnnnnnnnnnnnnnnnnnnnnnnnnnnnnnnnnnnnnnnnnnnnnnnnnnnnnnnnnnnnnnnnnnnnnnnnnnnnnnnnnnnnnnnnnnnnnnnnnnnnnnnnnnnnnnnnnnnnnnnnnnnnnnnnnnnnnnnnnngccttcctggcatcgacggcaggcctggcccaattggcccagctggagcaagaggagagcctggcaacattggattccctggnnnnnnnnnnnnnnnnnnnnnnnnnnnnnnnnnnnnnnnnnnnnnnnnnnnnnnnnnnnnnnnnnnnnnnnnnnnnnnnnnnnnnnnnnnnnnnnnnnnnnnnnnnnnnnnnnnnnnnnnnnnnnnnnnnnnnnnnnnnnnnnnnnnnnnnnnnnnnnnnnnnnnnnnnnnnnnnnnnnnnnnnnnnnnnnnnnnnnnnnnnnnnnnnnnnnnnnnnnnnnnnnnnnnnnnnnnnnnnnnnnnnnnnnnnnnnnnnnnnnnnnnnnnnnnnnnnnnnnnnnnnnnnnnnnnnnnnnnnnnnnnnnnnnnnnnnnnnnnnnnnnnnnnnnnnnnnnnnnnnnnnnnnnnnnnnnnnnnnnnnnnnnnnnnnnnnnnnnnnnnnnnnnnnnnnnnnnnnnnnnnnnnnnnnnnnnnnnnnnnnnnnnnnnnnnnnnnnnnnnnnnnnnnnnnnnnnnnnnnnnnnnnnnnnnnnnnnnnnnnnnnnnnnnnnnnnnnnnnnnnnnnnnnnnnnnnngtgctcctggtgctgtaggtgcccctggtcctgctggagccacaggtgaccgggnnnnnnnnnnnnnnnnnnnnnnnnnnnnnnnnnnnnnnnnnnnnnnnnnnnnnnnnnnnnnnnnnnnnnnnnnnnnnnnnnnnnnnnnnnnnnnnnnnnnnnnnnnnggtgctgctggtcaacctggtgctaaaggagaaagaggagccaaagggcctaagggtgaaaacggtgtcgttggtcccacaggccccgttggagctgctggcccnnnggtccaaatggtccccctggtcctgctggaagtcgtggtgatggaggcccccctnnnnnnnnnnnnnnnnnnnnnnnnnnnnnnnnnnnnnnnnnnnnnnnnnnnnnggtatttctggccctcctggtccccctggtccttctgggaaagaagggcttcgtggtcctcgtggtgaccaaggtccagttggccgaactggagaagtaggtgctgttggtccccctggctttgctggtgagaagggtccctctggagaggccggtactgctnnnnnnnnnnnnnnnnnnnnnnnnnnnnnnnnnnnnnnnnnnnnnnnnnnnnnnnnnnnnnnnnnnnnnnnnnnnnnnnnnnnnnnnnnnnnnnnnnnnnnnnnnnnnnnnnnnnnnnnnnnnnnnnnnnnnnnnnnnnnnnnnnnnnnnnnnnnnnnnnnnnnnnnnnnnnnnnnnnnnnnnnnnnnnnnnnnnnnnnnnnnnnnnnnnnnnnnnnnnnnnnnnnnnnnnnnnnnnnnnnnnnnnnnnnnnnnnnnnnnnnnnnnnnnnnnnnnnnnnnnnnnnnnnnnnnnnnnnnnnnnnnnnnnnnnnnnnnnnnnnnnnnnnnnnnnnnnnnnnnnnnnnnnnnnnnnnnnnnnnnnnnnnnnnnnnnnnnnnnnnnnnnnnnnnnnnnnnnnnnnnnnnnnnnnnnnnnnnnnnnnnnnnnnnnnnnnnnnnnnnnnnnnnnnnnnnnnnnnnnnnnnnnnnnnnnnnnnnnnnnnnnnnnnnnnnnnnnnnnnnnnnnnnnnnnnnnnnnnnnnnnnnnnnnnnnnnnnnnnnnnnnnnnnnnnnnnnnnnnnnnnnnnnnnnnnnnnnnnnnnnnnnnnnnnnnggccctgccggtccttctggccctgctggaaaagatggtcgcactggacatcctggtacagttggacctgctggcattcgaggccctcagggtcaccaaggtcctgctg

SEQ ID NO: 24055 - DNA, 604 bp, Macaca Mulatta
  misc_feature (1)...(604): n = A,T,C or G
agatcgaaagatggcggcgcccgccaatgcggacgctgttaggggtggcggggagctggcggcggttagagaggctctgggccggtagtctaagctttcgcagcctggctcttgcagccgcaccctcaaggaacggatccccatggcgcctgttgggcgcgttgtgcctgcagcggcccgctctagtctccaagccgttgaccccattgcaggaagagatggcgtctctactgcagcagncagattgagatagagagaagcgtgtattcagaccatgagcttcgtgctctggatgnnnnnnnnnnnnnnnnnnnnnnnnnnnnnnnnnnnnnnnnnnnnnnnnnnnnnnnnnnnnnnnnnnnnnnnnnnnnnnnnnnnnnnnnnnnnnnnnnnnnnnnnnnnnnnnnnnnnnnnnnnnnnnnnnnnnnagaagctgatgaaaagaatgaccgaacatccctgaaccggaagctagacaggaaccttgtcctgttagtcagagagaagcttggagaccaggatgtttggatactgccccaggcagagtggcagcctggggagacccttcgaggaacagctgaacgaaccctggcaaccctctcag

SEQ ID NO: 24056 - DNA, 660 bp, Macaca Mulatta
gatgctgcagtcccaaggggcaaatagggtcccagggtacagggaggggtgcctgctgagcacattcacccccttaccctgcccagcccctgccatgaactctggcctgggtctccacctccagggtcctgctcttccaggcaggccaggaagtggcgctgggccgcactggcttcttcctgccccagccctggctctgagtctctgtcttcctgtcctgggcaggcgcccctggctctcagtttccctcactcaggagctctgtttctgacgtctccagttaagtttgagtttatgactgagaggcctgtactgtcagacgtgaatgggcctgacgggcaaatccatccctctctccctcacagttccaggagcagtttccctcatctccccttactccacagggagcctcccttgccaggaccagggctgtgatggccatgcaggggcaggtgggtgccctgttggctgctctcagtgctgcccccaggctgcagttccggtccctggttgtcaggtaggaagagggtacgctcgaagcacgtgctcatctcgtttccttaacgtctgtagtctgacacctcatttagactttcctccggcaccccagtccaggggagaggcttgctcccgctcgtggtcatcactggtctgtctccc

SEQ ID NO: 24057 - DNA, 928 bp, Macaca Mulatta
  misc_feature (1)...(928): n = A,T,C or G
cgcagagaaaccttacaaatgggaggaatgtgacaacgtgttcagtcataagtcaaaccttgaaaaacataagaagatcacactgaagagaaaccatacagatataaaatttgtgacaaggtttttgcatataattcatacctggcaaaacatactagaatnnnnnnnnnnnnnnnnnnnnngaagtgtaatgagtgtggcaagaccttgggtcaaaattcacaccttgtaatnnnnnnnnnnnnnnnnnnnnnnaagtctaatgaatgtggcatggtttttaatcaataatcacaccttgcaagtcatcacagatttcatactgcagagaaatcttacaaacgtgaacaatgtgacaaagttcagtcgcaaatccagcttcaaatacgtaggagaattcatactggagaaaaaacatgcaaatataaggtttgtgacaaggctttcgggaatgattcacacctgacaatactagaattcacactggagagaaactttacaagtgcaatgagtgtggcaaagcctttagtgggcagtcaacacttaccatcaagcaatccatgggacagggaaacttgactaatgtaatgattgtcacaaagttttcagtaatgctgcaatcattgcaagtcattggagaatccacaatgaagagagatcttaaaagtgtcataagtgtggcaaatttttcagacatcgttcatgccttgcatttcattggtgaactcatgctggagtgaaaccttacaaatgtcatgattgtggcagggtcttcagtcaagtttcatcctacgcaaaacaggataattcatacaggagagaaagctcgcaagtctgatgattgtggcaaagcctttacttcacgttcacacctcattaggcatcagaaaatccatactggaccgaaatcttataaatgtcatcagtg

SEQ ID NO: 24058 - DNA, 165 bp, Macaca Mulatta
tttttagttttatagaagggtgcctggtgaagaattacacgcaacggccctctacagagcagcttttgaaacatccttttataagggatcagccaaatgaaaggcaagttacaatccagcttaaggatcatatagatcgtaccaggaagaagagaggcgagaaag

SEQ ID NO: 24059 - DNA, 727 bp, Macaca Mulatta
tatcctccacagatgctgaacaattgaagacattcctggacagagttcatcaaaacaaggttcagtcacctgtgagacctggtaagggtaggaatgtcttttctagcacaacaacacagaaggaaatcaacaaaacttcattccacaaagttgatgagaaatcaagtaggaaatcttttgagatagcaaaaggaagtgggacaggtgtccttcagaggatgcctttgcttacatcaaaatcgtcaacacttacttgcggagagttacctgaaaatcagcacaagaagaggaaaagaatgctctcatctagctcagagatgaatgaggaattcttgaaagaaaataattctgtagaatacaagaaatccaaggcagatcgcttgaggtgtgtaagctataatcgaaagaaacaattgaagttaaaagagttagaagagaataagaaattggaatgtgaatcttcgtgcatcatgaacgctactggaagtccttacctagatgacattggatttctccaagctctcactgagaaaatggttttggcatttctattacaaccagggtatagtgacggttacacaaagtgggataaattaaaactattttttgaattatttccagagaaaatatgccacggcctccccaatttgggaaacacctgttatatgaatgcagttttacagtctctactttcgattccagcaaatgctgatgatttacttaatca

SEQ ID NO: 24060 - DNA, 420 bp, Macaca Mulatta
  misc_feature (1)...(420): n = A,T,C or G
gctacacacaacccagctgtaccagcatgtgccagagacacgctggccaatcgtgtactcgccgcgctacaacatcaccttcatgggcctggagaagctgcatccctttgatgccggaaaatggggcaaagtgatcaatttcctaaaagnagaagagaagcttctgtctgacagcatgctggtggaggcgcaggaggcctcggaggaggacctgctggtggtgcacacgaggcgctatcttaatgagctcaagnagtggtcctttgctgttgctaccatcacagaaatcccccctgttatcttcctccccaacttccttgtgcagaggaaggtgctgaggccccttcggacccagacaggaggaaccataatggnggcggggaagctggccgtggagcgaggctgggccatcaacgtggg

SEQ ID NO: 24061 - DNA, 983 bp, Macaca Mulatta
  misc_feature (1)...(983): n = A,T,C or G
tctgggctgactcaactttgcaaagactattgaatctcacgaaatagaattttgctttattgagttaggccttaacgtatggtttaatgaattgtatggatcatgaaaaaatttgaaggtagattctgtttataatctgttaaaagcctgtgaaacttttttagatgtctaaagaagagtttgttgggtatatgctcaaaagggaaagtctggggcttgcctgggagattgtgtcagtaacctgaggggaaattggtcttttttgaacacatatccaagttacttatttcttctctgacccaggaaaaaggcaattgctgcctgtttttttttcacccacagacaactgtggaccccaaaaaaaggccacactttcaaactttggctctcaaagtattgctgcccacaacttccaaaccagtcaaatgggaagaagaagaatgaagaataaatgatgaaattaaaagggagaaaacaattgaaccaaatgctgattggcagactcttgttttaggctccggataaagcatggcaatgactgggcaacaataggggcggcgctaggaagaagtgcatcttctgtcaaagatcggtgccgactgatgaaggatacttgcaacacaggtactgtgactgctcctggtagcgttttcttatcaccacttaagcctcctcctgccccttaggatactgtcttttctttgttctgggggagcgatttagatcattcaccttcgttcagactttattttctagnnnctctttacttgagcttatagatacatcaaactaatctttttactttgnnttttgtaaaaaggtaacattgtcttcaggnacacaacatcaccttagtgtcaagatgattcggatcttgacatggtttcagttttgtagcatttncatacttcccagntgagaaagtattttgaagantatatgcagccagtattttaatttagcccatctactggtgaatttaa

SEQ ID NO: 24062 - DNA, 272 bp, Macaca Mulatta
aataaaaagttttcagtgaaatgtacaattctgctgtgtgttctgtgaaaggatcctggccatattcaagtccttggacctcaagccacttaaagcttcgatgggagtagctggtaacaaccctgtcatcctctgattggatgctagtatttcctggcagatccaagtccgagcttcatagcatccgttgcctgtgcttgccacaccttggttgatgcactgtggtgcagtagccccatttaggaggggagggtttggttgatgttggggta

SEQ ID NO: 24063 - DNA, 126 bp, Macaca Mulatta
aggcttgagggaagcatggaggtccatggcaagccccagggtagcgcgagttgcttgtcgcccacccgggactcctctagagtcccagtgtccaaggagctgctgacggcgggaagcgacggccgc

SEQ ID NO: 24064 - DNA, 678 bp, Macaca Mulatta
  misc_feature (1)...(678): n = A,T,C or G
nggacaaattcaggcttcatgcatttctcccgccagccacagagctatacaaatgatcacataaatgccatttgttatgttttcacagtagttaagacacagtagcatattaaccttgaatgctgacataagataaatttacaactaattttctctgcgtgtgagttttttttntggtgtaaatgtatagaatgttttccaagttcaaaactcgctttacaaagaatcttttttgaaagccttcctttaagtagcttgcatatagcagatggttaagtcatttagtaaacattagtgggaggatagttttgaggatttgttgggcaccaaacattctgctaggtagggtgtctgacttcgaagaggtttgaaagacgatatctcattcagtatactatgacccttgacatactcaggtttaatatttacgaaacctaaaagttcatgaagtgaaattatttgaattaaatactactgtgcagttgcaaattattgtgaattcaccctgcccaaatcatccaggactgggtcaatttaatgttgatttggtctataacaaaccagttggttacattgcattttcaggaaatggtcaccagtgcaacattttcttattaaaggagagagagcctaacttttagcatggaatcttaatggaaatatgattttgcagaaagg

SEQ ID NO: 24065 - DNA, 220 bp, Macaca Mulatta
gggcattcaagatttaaagccttcttgagccatggtggcttgaacagtatttttgaaactatgtatcatggtgtgcctgtagtgggaattccactctttggagaccattatgatactatgactagagtacaggcaaaaggaatgggaatattactagaatggaagacagttactgaaaaagagctgtatgaagcactggtgaaggttatcaataatccca

SEQ ID NO: 24066 - DNA, 2017 bp, Macaca Mulatta
  misc_feature (1)...(2017): n = A,T,C or G
cctggtgggggacgcgcttcttcccacaccctgagcctcagcagctccagccagcggacccgacggctgagagnnnnnnnnnnnnnnnnnnnnnnnnnnnnnnnnnnnnnnnnnnnnnnnnnnnnnnnnnnnnnnnnnnnnnnnnnnnnnnnnnnnnnnnnnnnnnnnnnnnnnnnnnnnnnnnnnnnnnnnnnnnnnnnnnnnnnnnnnnnnnnnnnnnnnnnnnnnnnnnnnnnnnnnnnnnnnnnnnnnnnnnnnnnnnnnnnnnnnnnnnnnnnnnnnnnnnnnnnnnnnnnnnnnnnnnnnnnnnnnnnnnnnnnnnnnnnnnnnnnnnnnnnnnnnnnnnnnnnnnnnnnnnnnnnnnnnnnnnnnnnnnnnnnnnnnnnnnnnnnnnnnnnnnnnnnnnnnnnnnnnnnnnnnnnnnnnnnnnnnnnnnnnnnnnnnnnnnnnnnnnnnnnnnnnnnnnnnnnnnnnnnnnnnnnnnnnnnnnnnnnnnnnnnnnnnnnnnnnnnnnnnnnnnnnnnnnnnnnnnnnnnnnnnnnnnnnnnnnnnnnnnnnnnnnnnnnnnnnnnnnnnnnnnnnnnnnnnnnnnnnnnnnnnnnnnnnnnnnnnnnnnnnnnnnnnnnnntgccactcccaccacctccaccaccgccacctcggcctgttgcccgccgcagccgcaagccccggaaagctttcctgcaaaccaagggggccagagcaaaccacctagtccctgaggtgcccgcagtacctgcccaaaacaagacctatgaggaggaggaggtggtgggtagagtgggcagcagtgggggcagtgggctgggggacagctacagccctcccacaggacccgcctcccctcctgaggggccccagagctacgaaccctatgagggtgaggaagaagaagaggagctggtatatcccccagcctatgggctggcgcagggtggcgggcgcccaaagtccccagaggagctgggctcagatgaggatgccatcgatcnnnnnnnnnnnnnnnnnnnnnnnnnnnnnnnnnnnnnnnnnnnnnnnnnnnnnnnnnnnnnnnnnnnnnnnnnnnnnnnnnnnnnnnnnnnnnnnnnnnnnnnnnnnnnnnnnnnnnnnnnnnnnnnnnnnnnnnnnnnnnnnnnnnnnnnnnnnnnnnnnnnnnnnnnnnnnnnnnnnnnnnnnnnnnnnnnnnnnnnnnnnnnnnnnnnnnnnnnnnnnnnnnnnnnnnnnnnnnnnnnnnnnnnnnnnnnnnnnnnnnnnnnnnnnnnnnnnnnnnnnnnnnnnnnnnnnnnnnnnnnnnnnnnnnnnnnnnnnnnnnnnnnnnnnnnnnnnnnnnnnnnnnnnnnnnnnnnnnnnnnnnnnnnnnnnnnnnnnnnnnnnnnnnnnnnnnnnnnnnnnnnnnnnnnnnnnnnnnnnnnnnnnnnnnnnnnnnnnnnnnnnnnnnnnnnnnnnnnnnnnnnnnnnnnnnnnnnnnnnnnnnnnnnnnnnnnnnnnnnnnnnnnnnnnnnnnnnnnnnnnnnnnnnnnnnnnnnnnnnnnnnnnnnnnnnnnnnnnnnnnnnnnnnnnnnnnncagtcagcccccaccgggcccccggtctctaccccggggccccctgatgacgatgaggaggaaggggcacccaccacaccccaggctgaaggtgctatggagtcctcttaaagagggacgagggccaggcggaagcagcacaaggccggggacacccatgccaagcagtgggagcacgcaggacagacacagcaggggtctggggcacggagccttgctggtgtcagcatcagcccttcctcccagagccctcattccaattccgagctaagaaggtattggggcagaggctccccaaattggggtgatcccccaaggagtgatacatatattgtgtatatatttacagctctattgtaaaagtggggtccctgtccccagctgctcctggggagtagaagcaataatgtatttctgatttgtgggtccca

SEQ ID NO: 24067 - DNA, 682 bp, Macaca Mulatta
cccatgcgatacccccaaagtcaagcagactgatggagatgtgccaccacccccagggtcggctggccccggggataatgacatggaggaattctacatctgaatgccctctgctcttgttctcaaaacacacaaactcagacacacagactcaggccacactgcccctctggctgctgagcgcaccgcattcttcatgatccatttcccaggagctgtagcacatttgcctaccacccacttttatctgggggggtggtgtatctctagggacacagcagaaaaatactggcatttttatgcaaataaattctcaacaaacttgtcataaaatatattttttgaatattcagcatttgagatatggtttagagggtttatacaatttaaatggcttatataattatttgaaatgaaaagaaaacctagtcagccagaaccaatttggccatttttccatggtaggaaggaaaatcaattaaggccaaaatattgaatgtgggagagatactaagtgacttgtatgaggcattactgcataataacgtaacgcacaccttactggattctccatatatatttacattaccagagaacagtggccctagggatgtttaagcactgcttatagtggaaaaagtcagcttgagaagtaaacatatcagactacaggtaattcctc

SEQ ID NO: 24068 - DNA, 279 bp, Macaca Mulatta
tgttaacagctctttaattaatgacctttgcttcttcagaacttgtatggtagactgtcctttctacatcatgatgcattctcctgtgctaattttaaaagctttctgtaactagattttttcctcattatgctcccaggagcgagtttgttttttcccccagtttcatttccaccaggtagctctactttaggccatactgggcccctgctgttgaataaatggatgcctctatgttggtgttggcaactgtgcggtaatagtactaccactggcgaa

SEQ ID NO: 24069 - DNA, 939 bp, Macaca Mulatta
aagttatagcagtcatttgcccgggcatttcttttgcccatcctccctggaattcaccaccagctgcgttaatacatttctctattgttttgttggaaacgggttccaacaagaagctcccgcagtgtgttaagggctccaattacttggctccaagggaaaagagagagtatgtcttgccggaaaagcagttctcttagagaaatggagacctttgtgtcttaaacctgagagcaaaatgcatgtaaccaacatggctacttgctttgaggcccaccagaattattttaagtggttttaattaaataatacattttcccctaatctaatcttttctgaatcttttgaaaccaaatgtaactatgttttatcgtccagtgactttcaggagttgcccattgtttttctgatatgtttgtacaagattgtcattggtgagacatatttacaacctagaagtaactggtgatatatctcaaattgtaattaataatagattgtgaataatgatttggggtttcaggtttctctttgaaacatgcttgtgtttcttagtggggttttatatccatttttatcaggatttcctcttgaaccaggaccagtctttcaactcattgcatcatttacaagacaacattgtaagagagatgagtacttctaagttgagtatattataatagattaatactggattattcaggctttaggcatgtacttctttaaaaaggctataaattatattcctcttgcatttcacttgagtggaaatttatagctaatctataattacatattgagtagggctagaaatatagattaaatcatactcctatgttttagcttatttttacagttatagaaagtaaaatgtactgtaacatagaattgcaatcaatgatatttgtgtgttcactaaactctgaataagcacttttt

SEQ ID NO: 24070 - DNA, 245 bp, Macaca Mulatta
  misc_feature (1)...(245): n = A,T,C or G
agagctgttacaatttgtaaaagcaaatgatgatgtagctcaagagattgctgaaaggnaggggaagccagtttattaggaaccacttgcagatggatgacatcacctgttactgggagaacctcttgagtgaatactctaaattcctgtcttacaatgtaacaagaaggaaaggttatgatcaaatattcccaaaatgttgaaaactgaactatagtagtcatcataggaccatagtcctcttt

SEQ ID NO: 24071 - DNA, 596 bp, Macaca Mulatta
  misc_feature (1)...(596): n = A,T,C or G
gctcccgcgtcacatgaccggctttgagcaacatggcggctgccgtggtgcagcgccggggctgagcgacagcaagtgcagcgggctcctatcccgggtgnggtgggatcgtcggtgggaccggagcgcgggcgggcgcggccccccgggaccatggccgggtccgacaccgcgcccttcctcagccaggcggatgacccggacgannnnnnnnnnnnnnnnnnnnnnnnnnnnnnnnnnnnnnnnnnnnnnnnnnnnnnnnnnnnnnnnnnnnnnnnnnnnnnnnnnnnnnnnnnnnnnnnnnnnnnnnnnnnnnnnnnnnnnnnnnnnnnnnnnnnnnnnnnnnnnnnnnnnnnnnnnnnnnnnnnnnnnnnnnnnnnnnnnnnnnnnnnnnnnnnnnnnnnnnnnnnnnnnnnnnnnnnnnnnnnnnnnnnnnnnnnnnnnnnnnnnnnnnnnnnngtgttcatctccagttacatggtgttggcacctgtgtttggctacctgggtgacaggtacaatcggaagtatctcatgtgcgggggcattgccttctggtccctggtgacactggggtcatccttcatccccggaga

SEQ ID NO: 24072 - DNA, 1382 bp, Macaca Mulatta
  misc_feature (1)...(1382): n = A,T,C or G
ggttttcaggggacaggccaacctggaggacaggattccctggaggccacagaggagcaccaaggagaagatctgnnntgggtcttcattgcccagctcctgtacactcctgcctgctgccctgaccagagtcatcatgtctcttgagcagaggagtctgcactacaagcctgaggaagcctttgagnnnnnnnnnnnnnnnnnnnnnnnnnnnnnnnnnnnnnnnnnnnnnnnnnnnnnnnnnnnnnnnnnnnnnnnnnnnnnnnnnnnnnnnnnnnnnnnnnnnnnnnnnnnnnnnnnnnnnnnnnnnnnnnnnnnnnnnnnnnnnnnnnnnnnnnnnnnnnnnnnnnnnnnnnnnnnnnnnnnnnnnnnnnnnnnnnnnnnnnnnnnnnnnnnnnnnnnnnnnnnnnnnnnnnnnnnnnnnnnnnnnnnnnnnnnnnnnnnnnnnnnnnnnnnnnnnnnnnnnnnnnnnnnnnnnnnnnnnnnnnnnnnnnnnnnnnnnnnnnnnnnnnnnnnnnnnnnnnnnnnnnnnnnnnnnnnnnnnnnnnnnnnnnnnnnnnnnnnnnnnnnnnnnnnnnnnnnnnnnnnnnnnnnnnnnnnnnnnnnnnnnnnnnnnnnnnnnnnnnnnnnnnnnnnnnnnnnnnnnnnnnnnnnnnnnnnnnnnnnnnnnnnnnnnnnnnnnnnnnnnnnnnnnnnnnnnnnnnnnnnnnnnnnnnnnnnnnnnnnnnnnnnnnnnnnnnnnnnnnnnnnnnnnnnnnnnnnnnnnnnnnnnnnnnnnnnnnnnnnntgatttggttcgttttctgctcctcaagtatcgagccagggagccggtcacaaaggcagaaatgctggagagagtcatcaaaaattacaagcactgctttcctgtgatcttcggcaaagcctctgagtccttgcaactggtctttggcattgacgtgaaggaagcagactccaccggccactcctatgtccttgtcacctgcctggggctctcctatgacggcctgctgggtgataatcagatcatgcccaagacaggcttcctgataatcatcctggttatgattgcaatggagggcggccgtgctcctgaggaggaaatctgggaagagctgaatgtgatggaggtatatgatgggagggagcacagtgcctatggggagcccaggaagctgctcacccaagatttggtgcaggaaaagtacctggagtaccggcaggtgccctacagtgatcctgcacgctatgagttcctgtggggtccaagggccctcactgaaaccagctatgtgaaagtccttgagtatgtgatcaaggtcagtgcaagagttcgctttttcttcccatccctgcgtgaagcagctttgagacaggag

SEQ ID NO: 24073 - DNA, 588 bp, Macaca Mulatta
actgtttagtttgtagtatactatgtaagcaacatcaattatcaacccttgcaagatgacaacatgagcctgtgggggaagcacttgaggggagggaggagaaacttctattttttaataatcagcccgaaacaatgtttaacaagaatctgatgaggtcactgcagtaaatatttttcctcttacagagccaatcatcacggagggatcccctgaatttaaagtcctggaggatgcatggactgtagtctccctagacaatcaaaggtgctttctgccccgttgcttttaaattgcatgggaagggaagattggtccgacggcgctcttgccacccggccggagcttgcgtgcgcgttctgacggctgggtgctgtgttacaggtcggcccagttcgagcacacggttctcatcacgtcgaggggcgcgcagatcctgaccaaactgccccatgaggcctgaggagccgcccgaaggtcgcggtgaccgggtgcctttttaaataaattgctgaaatctgactagagaacttttagaagaaacaggggaatgaccggtcatgcggtaacgtacgtggcacctaatag

SEQ ID NO: 24074 - DNA, 895 bp, Macaca Mulatta
ggccagccatatgcagaagaaggaaactgagcccctagctctccccatatatgttaaataactcaatatggatgaaagatttaatgtacgtactaaaactaaaaatcctggaacataacctaagaaataccaatgcagacatagcgcctggcaaagatttcatgaagaagacactaaaaacaattggaacaacaacaaaaatggacaagtgggacctcattaaactaaagaaatctgcacagaaaaagaaacaagcaacacactaaatagacagcctgtagaatgggggaaactatttgcaaagtatgcatctgacaaaggtccaatatccggaatctacaaggaacttaaacaattgaacaagcaagaagaaaaaaacccaattaaaattgggcaaagacatgaacagacacttttcaaaagaagacctacaaattggccaagaaacatgaaaaagtgctcaatatcactaatcatcagataagtgcaaatcacaactgcaatgagttaccgtctctaaccagtcacaaagtcggagatgttggtgaggctgcagagaaaaggaaatagacactgttggtgggaaagcaaacgtgttcagccactatggaaagcagtttggagattcctccaagaacttaaaatagaactaccattctacccagcaatcccactactcaggatatatccacaggaaaagaattcattttatcaaaaagacaaatgcaccaatatgttcactgcagtgctattctcactagcaaggacacagaatcagaatctaagtgcccaggaacagtgaattgaatgaaaaaaaatgtggtacatagacaccatggaaatctatgcagccacgaaacacagcaaaatcatgtccttttcagcaacatggatg

SEQ ID NO: 24075 - DNA, 632 bp, Macaca Mulatta
  misc_feature (1)...(632): n = A,T,C or G
gaggcgggagtgggatcgcagttcttgtttgtgtgtcggtgtcatcgccacttgacaatgcagatcttcgtgaagaccctgactggcaagaccatcactcttgaggttgagcccagtgacaccnnnnnnnnnnnnnnnnnnnnnnnnnnnnnnnnnnnnnnnnnnnnnnnnnnnnnnnnnnnnnnnnnnnnnnnnnnnnnnnnnnnnnnnnnnnnnnnnnnnnnnnnnnnnnnnnnnnnnnnnnnnnnnnnnnnnnnnnnnnnnnnnnnnnnnnnnnnnnnnnnnnnnnnnnnnnnnnnnnnnnnnnnnnnnnnnnnnnnnnnnnnnnnnnnnnnnnnnnnnnnnnnnnnnnnnnnnnnnnnnnnnnnnnnnnnnnnnnnnnnnnnnnnnnnnnnnnnnnnnnnnnnnnnnnnnnnnnnnnnnnnnnnnnnnnnnnnnnnnnnnnnnnnnnnnnnnnnnnnnnnnnnnnnnnnnnnnnnnnnnnnnnnnnnnnnnnnnnnnnnnnnnnnnnnnnnnnnnnnnnnnnnnnnnnnnnnnnnnnnnnnnnnnnnnnnnnnnnnnnnnnnnnnnnnnnnnnnnnnnnnnnnnnnnnnnnnnnnnnnnnnnnnnnnnnnnnnnnnnnnnnnnnnnca

SEQ ID NO: 24076 - DNA, 1514 bp, Macaca Mulatta
ctcaccgcctgcacctggacagctgtgtcaccatgtgggttctggttgtcttcctcaccctgtccgtgacgtggattggcgctgcacccctcatcctgtctcggattgtgggaggctgggagtgcgagaagcattcccaaccctggcaggtgcttgtggcctctcgtggcagggcagtctgcgggggtgttctggtgcacccccagtgggtcctcacagctgcccactgcatcaggagcaacagcgtgatcttgctgggtcggcacaacccgtattatcctgaagacacgggccaggtgtttcaggtcagccacagcttcccacacccgctctacaacatgagcctcctgaagaatcgatacctcgggccaggtgatgactccagccacgacctcatgctgctccgcctgtcagagcctgccgagatcacagatgctgtgcaggtcctggacctgcccacctgggagccagagctggggaccacgtgctacgcctcaggctggggcagcatcgaaccggaggaacacttgactccaaagaaacttcagtgtgtggacctccatattatttccaatgatgtgtgtgcgcaagttcactctcagaaggtgaccaagttcatgctgtgtgctggaagctggatgggcggcaaaagcacctgctcgggtgattctgggggcccactggtctgtgacggtgtgcttcaaggtatcacgtcatggggcagtcaaccatgtgccctaccccgaaggccttccctgtacaccaaggtggtgcgttaccggaagtggatccaggacaccatcatggcaaacccctgagcaccccatcaactccctaattgtagcgaaaaaaaaaagtccacctcaagttcttggcatcatttggctattctagacaccaggcacttggaaccttggaaatgaccgggccaaggctcaagcctccccagttctattgacctttgtcctaaggtgtggggtccagggttgctaggaaaagaaatcagcagacacaggtgtagaccagagtgtttcttaaatgggtgtaattttgtcctctctgtgtcctggggggacactggtcatgcctggagacatctcactcagtttctttgaggacccagataggatgggggtgtctgtgttgtttgtggggtacagagatgaaggaggggtggggtccacactgagagagtagacagtgacacgtgctggatgctgtccatgaagcactgagcagatgctggaggcgcaacgcaccagacactcacagcaaggatggagctgaaaacataatccactctgtcttggaggcactgggaagcctagagaaggctgcgaactgaggagggagggtcttcctgtggcatgggatggggatgaagtaaggagagggactggactccctggaagctgattcaccatggggagaggtgtgtcaaggtcccccagacaaccctcagatttgatgatttcctagtagaactcacagaaataaagagctgttatactgtg

SEQ ID NO: 24077 - DNA, 129 bp, Macaca Mulatta
aattcttgcccaaggacagacctgaatctctagttgcctggaggctgactcaactgaaatcatggcatttaatggcacttggaaggtagaccggagtgaaaactatgataagttcatggaaaaaatggg

SEQ ID NO: 24078 - DNA, 477 bp, Macaca Mulatta
gatgcaatagtggaaatcgcttatatgtccttgggttgctggttggattaatctttaataacaatatatagaattgtagactgatgttttagcatttttccaacacacacaacgtaaaaataaaaacagtcgaccgtacttatggtaatcagttttgtataacttaaaataattaaataaatgaataaacccaaaacaaacatgccgtagttttgttgtatgggattggtgggctgatttacatgtatggttactaaaaagtaccagcatgttaactttattacaataagtattactttctctgtagttcctaatggattcagttacggactctggatatttgcacttatgtacttgatactgaatgcataaataaatgttactaaatgtagaacgttctccctctcttctcatgcatggtcccaccagaaaacacagaagctcgaagtgacgaagtcactcaatgacattctggga

SEQ ID NO: 24079 - DNA, 465 bp, Macaca Mulatta
agaattaccatgaaattatgactcgtcatcctgagaattatcaatgggaaaactggagtctagaaaatgttgctacctttttagcccaccggttccccaatagttacatttgggtgataaaatgttcccgaatgcatttgcacaaattcagctgctatgacaattttgtgaaaagtaacatgtttggtgccccagaacacaatactgactttggagcttttaagcacctttatatgttattagttaatgcttttaatttaagtcagaatagtttatcaaagaaaagtttgaatgtttggaataaggactccatagcatctaactgtagatccagttcttctcatactacgaatggttgccagggagaaaaagtgaggacctgtgaaaagtctgatgaatctgccatgagtttttatccaccatcactaaatgatgcatcttttactttgattggattcagtaaag

SEQ ID NO: 24080 - DNA, 182 bp, Macaca Mulatta
agggttatttcatctataagaatgtctcggaggacctcccgctccccaccttctcgcccgcactgctgggggactcccgcatgctgtacttctggttctccgagcaagtcttccactccctggccaaggtagctttccaagatggccgcctcacgcacagcctgatgggagacgagttcaag

SEQ ID NO: 24081 - DNA, 2455 bp, Macaca Mulatta
  misc_feature (1)...(2455): n = A,T,C or G
gctgcagtacggagacagcaaggacaaccctctcaagtactggctttataaagaagaaggtgacaggagacacaggaagcccagagacccagatcgagacnnnnnnnnnnnnnnnnnnnnnnnnnnnnnnnnnnnnnnnnnnnnnnnnnnnnnnnnnnnnnnnnnnnnnnnnnnnnnnnnnnnnnnnnnnnnnnnnnnnnnnnnnnnnnnnnnnnnnnnnnnnnnnnnnnnnnnnnnnnnnnnnnnnnnnnnnnnnnnnnnnnnnnnnnnnnnnnnnnnnnnnnnnnnnnnnnnnnnnnnnnnnnnnnnnnnnnnnnnnnnnnnnnnnnnnnnnnnnnnnnnnnnnnnnnnnnnnnnnnnnnnnnnnnnnnnnnnnnnnnnnnnnnnnnnnnnnnnnnnnnnnnnnnnnnnnnnnnnnnnnnnnnnnnnnnnnnnnnnnnnnnnnnnnnnnnnnnnnnnnnnnnnnnnnnnnnnnnnnnnnnnnnnnnnnnnnnnnnnnnnnnnnnnnnnnnnnnnnnnnnnnnnnnnnnnnnnnnnnnnnnnnnnnnnnnnnnnnnnnnnnnnnnnnnnnnnnnnnnnnnnnnnnnnnnnnnnnnnnnnnnnnnnnnnnnnnnnnnnnnnnnnnnnnnnnnnnnnnnnnnnnnnnnnnnnnnnnnnnnnnnnnnnnnnnnnnnnnnnnnnnnnnnnnnnnnnnnnnnnnnnnnnnnnnnnnnnnnnnnnnnnnnnnnnnnnnnnnnnnnnnnnnnnnnnnnnnnnnnnnnnnnnnnnnnnnnnnnnnnnnacagatacaaacagttccccttccagagcctccgtttgtggaatttttgtggattttgcctcagcttcacaccgtcaaaagagtcggactcaggcccttaagcaaaannnnnnnnnnnnnnnnnnnnnnnnnnnnnnnnnnnnnnnnnnnnnnnnnnnnnnnnnnnnnnnnnnnnnnnnnnnnnnnnnnnnnnnnnnnnnnnnnnnnnnnnnnnnnnnnnnnnnnnnnnnnnnnnaggcatatgttcagtgtaacgaagataatgttgaaagagacattcaaacggaggaaatagagaccagggaagtgtggacccagcacccaggagaaagtaccattgtatctggagnnnnnnnnnnnnnnnnnnnnnnnnnnnnnnnnnnnnnnnnnnnnnnnnnnnnnnnnnnnnnnnnnnnnnnnnnnnnnnnnnnnnnnnnnnnnnnnnnnnnnnnnnnnnnnnnnnnnnnnnnnnnnnnnnnnnnnnnnnnnnnnnnnnnnnnnnnnnnnnnnnnnnnnnnnnnnnnnnnnnnnnnnnnnnnnnnnnnnnnnnnnnnnnnnnnnnnnnnnnnnnnnnnnnnnnnnnnnnnnnnnnnnnnnnnnnnnnnnnnnnnnnnnnnnnnnnnnnnnnnnnnnnnnnnnnnnnnnnnnnnnnnnnnnnnnnnnnnnnnnnnnnnnnnnnnnnnnnnnnnnnnnnnnnnnnnnnnnnnnnnnnnnnnnnnnnnnnnnnnnnnnnnnnnnnnnnnnnnnnnnnnnnnnnnnnnnnnnnnnnnnnnnnnnnnnnnnnnnnnnnnnnnnnnnnnnnnnnnnnnnnnnnnnnnnnnnnnnnnnnnnnnnnnnnnnnnnnnnnnnnnnnnnnnnnnnnnnnnnnnnnnnnnnnnnnnnnnnnnnnnnnnnnnnnnnnnngatggaatccttacctcagtaaaccaccaaagccctctgcaagcagtagaacctatctcgacttccgtccacaaaaagcagagctttgtgctttcgcccttttcgactcaggaannnnnnnnnnnnnnnnnnnnnnnnnnnnnnnnnnnnnnnnnnnnnnnnnnnnnnnnnnnnnnnnnnnnnnnnnnnnnnnnnnnnnnnnnnnnnnnnnnnnnnnnnnnnnnnnnnnnnnnnnnnnnnnnnnnnnnnnnnnnnnnnnnnnnnnnnnnnnnnnnnnnnnnnnnnnnnnnnnnnnnnnnnnnnnnnnnnnnnnnnnnnnnnnnnnnnnnnnnnnnnnnnnnnnnnnnnnnnnnnnnnnnnnnnnnnnnnnnnnnnnnnnnnnnnnnnnnnnnnnnnnnnnnnnnnnnnnnnnnnnnnnnnnnnnnnnnnnnnnnnnnnnnnnnnnnnnnnnnnnnnnnnnnnnnnnnnnnnnnnnnnnnnnnnnnnnnnnnnnnnnnnnnnnnnnnnnnnnnnnnnnnnnnnnnnnnnnnnnnnnnnnnnnnnnnnnnnnnnnnnnnnnnnnnnnnnnnnnnccgctcgtgcagtgggacagcagcacggacagccatgcagtcaccggcctgcagtggtccccgaccaggcctgccgtgttcctggtgcaggatgacacatccaacatctacatctaggacctcctccagagcgatctgggtcctgttgccaaacagcatctctcccccaacaggcaagtggggaagttctggaccagct

SEQ ID NO: 24082 - DNA, 620 bp, Macaca Mulatta
cactcggattgaaccttactacagcatctatataccagcccttcccaggaggagagcagcccatgtaacttacagccagtaaactcttttggatttgccaattcatatattgccatgcattatcacaccactaatgacttaatgcaggaatatgacagcacttcagccaagcagattccagttccctctgtttaaagtcactgaggctataggatcttatttttgtttctgatactaatggactttcttctaactttgagttcagtgacggatcaaaacctaaaagattcaactgaaaagttggcagttatggttttctttcgtctgatgtgtcagtatgtgttgatttgctttgtagtttgttgacatcttaagatttgatgtgaaagttttagatttttaccttgatctttgccccagtcttttgtaccaaacctttaaatagatgccaggaatgaagctactgtgttaaagtagaaagtcaaccgatttttatgatttgagtcagtgttatgtgtcttcaaaataagatattgactggacttttttaaagaatgtgaaggagtgatttttgctgaggtgctatttttattagatgaattgtcaatttgtgattttta

SEQ ID NO: 24083 - DNA, 470 bp, Macaca Mulatta
  misc_feature (1)...(470): n = A,T,C or G
ggtggatctaggatctggcttccaacatgtggcggctctgggcctccctctgctgcctgctggcgttgggcgatgcccggagcaggccatctttccatcccctgtcggatgagctggtcaactatgtcaacaaacagaacaccacgtggcagnnnnnnnnnnnnnnnnnnnnnnnnnnnnnnnnnnnnnnnnnnnnnnnnnnnnnnnnnnnnnnnnnnnnnnnnnnnnnnnnnnnnnnnnnnnnnnnnnnnnnnnnnnnnnnnnnnnnnnnnnnnnnnnnnnnnnnnnnnnnnnnnnnnnnnnnnnnnnnnnnnnnnnnnnnnnnnnnnnnnnnnnnnnnnnnnnnnnnnnnnnnnnnnnnnnnnnnnnnnnnnnnnnnnnnnnnnnnnnnnnnnnnnnnnnnnnnnnnnnnnnnnnnnaggtgtcggcggaggacctgctcacctgctgtggcatcatgtgtggagacg

SEQ ID NO: 24084 - DNA, 260 bp, Macaca Mulatta
  misc_feature (1)...(260): n = A,T,C or G
cagagcgcacccgttaggcgatgaaggnnnnnnnnnnnnnnnnnacaaaagaagaggaagaaaacctggaacagggcctcggtggcaaatggaggcgagaaggcctcaaagaaacccgccccagaggaagttcccgtaagcgctgaggctgaggcaggggcgggnnnnnnnnnnccccaaatccgtcacaggtacaagcagttggcccagggattggcttggtgcgtggagcgactgcagctgggtctcaagaggcagaa

SEQ ID NO: 24085 - DNA, 282 bp, Macaca Mulatta
  misc_feature (1)...(282): n = A,T,C or G
ncaggagtgtcaaagccagccacatcctgatctctctggatgggaaggtctacctgtctggtttgcgcagcaacctcagcatgataagccatgggcagcggcagcgagtggtccacgattttccaaagtacagtgtcaaggttctgccgtggctcagccccgaggtcctccagcanagaatctccagggttatgatgccaaatctgacatctacagtgtgggaatcacagcctgtgaactggcaaacggccacgtcccctttaaggatatgcctgccaccca

SEQ ID NO: 24086 - DNA, 101 bp, Macaca Mulatta
caggtaaagtctccagcagtgaactcactcgatcacacgaagccgtttctccagacatctgactcccagcatgaacagtcccaactcttctctaacaaaag

SEQ ID NO: 24087 - DNA, 132 bp, Macaca Mulatta
ggggcactatgaacgaagaggagcagtttgtaaacattgatttgaatgatgacaacatttgcagtgtttgtaaactgggaacagacaaagaaacactctccttctgccacatttgttttgagctaaatattg

SEQ ID NO: 24088 - DNA, 476 bp, Macaca Mulatta
tggttctcacctcaccggttgtctctttgtattatggtacagtcatgggcatgtacttccgccctttgaccaattatagcctaaaagatgcagtgatcactgtaatgtacatggcagtgaccccaatgttaaatcctttcatctacagtctgagaaatcgggacatgaaggcggccctgcggaaactcttcaacaagagaatctcctcgcaaccaatgtgagagcctacactggatagtgtagtcatcaataagggtatattggaaatccagttctgatgtcatcctcctacaagaggccgtctctgatctttccagcctgaaattccttttctcagaactcttataacattttaatgagttaataataagtgattattgaaattaccactttcaactcattgctgctctttttggcagagcggcagcacagggataccgggcatatgtcctgatgagtggagtcaagttgggaag

SEQ ID NO: 24089 - DNA, 911 bp, Macaca Mulatta
  misc_feature (1)...(911): n = A,T,C or G
gggctctctcctcccgccgcccaagatgccgaaaggaaagaaagccaagggaaagaaggtggctccggcccctgctgtcgtgaaaaagcgggaggccaagaaagtggtgaatcccctgtttgagaaaagacctaagaattttggcattggacaggacatccagcccaaaagagacctcacccgctttgtgaaatggcctcgctatatcaggttgcagcggcagagagctatcctctataagcggctgaaagtgcctcctgctattaaccagttcacccaggccctggaccgccaaacagctactcggctgcttaagctgggccacaaggacagaccggagcaccaaacaggagaagaaccagaggctgttggccccgggcacggaaaaaaaagctgctgggcaaaaggggaatgtcccccagtaaaaagaccaacctggtcccttccaaagcagagaaattaaacaccgcatccaccaccgataaggtgggaaaaaaacaaagaaaggcccccaaccctgggtgggacggaactgcccaccatcgaacgtaaaaaatccccaatccgaaaacctggagtatgggccttaccgtaggccggagcccacctaaaaaaccaaaaagagataggaaaggcacccccataaccagccaaaaaaaccanaagaagaaaaccggccaaacaaaagagagacaaaccctacaaacggacaacaaaaagaaacaaaggaaacaacaaagatcgccagtaacgaacacaaacgaaaccaccaggcaagaaaagagagaacccaaataaaacgaagaccgagagaagaagaacgaaggaaaagagaaaatcaaaaacaaaagaagaaacgngaaaacaaagaccccaacctaccacagagagagagaaaaaacaacgaagag

SEQ ID NO: 24090 - DNA, 114 bp, Macaca Mulatta
agatcaaatgatgctgtttggaaaagtttcccagcagttgtgtggcataaagaaactcacatagacatgtgattccagatacttctggggctggttgaatgcagtgtttaataa

SEQ ID NO: 24091 - DNA, 112 bp, Macaca Mulatta
ggtggaagtcattttgacagtccatttgaatttggcttcacattccgtaacccagatgatgtcttcagggaattttttggtggaagggacccattttcatttgaattctttg

SEQ ID NO: 24092 - DNA, 209 bp, Macaca Mulatta
ttgttagcctgcctctgtcttcccttaactattgtggcaagtctggtgtgtgataaaattaagccaaatcaactgcccattttgtgcaaaattagggtccagtctgtgaaagacttctcttggatttttaaaaggcttttctctacaaaagattttgtttttaattgtgctgagtgactcaaaatgggtttattctaagaaagcctgta

SEQ ID NO: 24093 - DNA, 154 bp, Macaca Mulatta
agatgatgtcattgagaagcagattgaggatggtctcctgcgaccagagctccgggagagggtcagttacgtcctcctgaggaggcaccgtcaccaaaccaagaagcccatccaccgctcgttagtcgacattgggaagtcagtctccaccaca

SEQ ID NO: 24094 - DNA, 315 bp, Macaca Mulatta
acatcgcagagagtcccaggccatgggcaggcggggggggggcgtcatttcaccaggggccgagttttatcatcgtcaccgcactggtgggctttgcactttttcacttctgccatgtacttggcccacgcatcacctttacttgttaacacctgtggaagggagatatgggtttggagggggggtgccaggaaccagggtcaggactgccctgagacaggtgacccattcccagtgtcacccagtggaagactctgggtttgagctaaagattgtaaagtcaagttatctggggaccctcctatcctgccaggt

SEQ ID NO: 24095 - DNA, 684 bp, Macaca Mulatta
ttcagcaataagtttgcattagcggcttcttctcacctccttcctcccaggcctgctggagctctggagacagagagaactgtgcgagcttgagatgggatcatctcgctctgggggtcccagcaagggagtcctgaagtgggggtagtctgtatctttggtctgccctcagggattctgttggagctcagtgccccaccagcctcacaggccccagccgcttgcactccccaggactgtggccagctgggcccctggttggcccaagccctgggccccttgggccgcctctttccccaccagtgtgcgtgctgcacacgcaggtgtgctcacctgctgagggagcctcgtggagaagtgagggagggacccttgaggagcctggaggagctgggctgggaggaggcctggctccccaggtgcctgcacaggctgactagatggaaaccccaacagaattgtaactgaggggccactgcaggagcccagggatctgctgacaggtgagggtggggcccacgggtaccttggaaggcttcctggaggaggcagacctcaacttggtgaagatggtgtccctggcaggggagtcagtggagaaaggcagagaatgtgaagaggccgcccatggaccagagcagtgggggacgcaggaagaggtgggcacttggctttccctccccc

SEQ ID NO: 24096 - DNA, 1480 bp, Macaca Mulatta
  misc_feature (1)...(1480): n = A,T,C or G
agagttcagacattactcgcctcgtcagtccacagtccgatccccagagaagatgacatagagaagggtnnnnnnnnnnnnnnnnnnnnnnnnnnnnnnnnnnnnnnnnnnnnnnnnnnnnnnnnnnnnnnnnnnnnnnnnnnnnnnnnnnnnnnnnnnnnnnnnnnnnnnnnnnnnnnnnnnnnnnnnnnnnnnnnnnnnnnnnnnnnnnnnnnnnnnnnnnnnnnnnnnnnnnnnnnnnnnnnnnnnnnnnnnnnnnnnnnnnnnnnnnnnnnnnnnnnnnnnnnnnnnnnnnnnnnnnnnnnnnnnnnnnnnnnnnnnnnnnnnnnnnnnnnnnnnnnnnnnnnnnnnnnnnnnnnnnnnnnnnnnnnnnnnnnnnnnnnnnnnnnnnnnnnnnnnnnnnnnnnnnnnnnnnnnnnnnnnnnnnnnnnnnnnnnnnnnnnnnnnnnnnnnnnnnnnnnnnnnnnnnnnnnnnnnnnnnnnnnnnnnnnnnnnnnnnnnnnnnnnnnnnnnnnnnnnnnnnnnnnnnnnnnnnnnnnnnnnnnnnnnnnnnnnnnnnnnnnnnnnnnnnnnnnnnnnnnnnnnnnnnnnnnnnnnnnnnnnnnnnnnnnnnnnnnnnnnnnnnnnnnnnnnnnnnnnnnnnnnnnnnnnnnnnnnnnnnnnnnnnnnnnnnnnnnnnnnnnnnnnnnnnnnnnnnnnnnnnnnnnnnnnnnnnnnnnnnnnnnnnnnnnnnnnnnnnnnnnnnnnnnnnnnnnnnnnnnnnnnnnnnnnnnnnnnnnnnnnnnnnnnnnnnnnnnnnnnnnnnnnnnnnnnnnnnnnnnnnnnnnnnnnnnnnnnnnnnnnnnnnnnnnnnnnnnnnnnnnnnnnnnnnnnnnnnnnnnnnnnnnnnnnnnnnnnnnnnnnnnnnnnnnnnnnnnnnnnnnnnnnnnnnnnnnnnnnnnnnnnnnnnnnnnnnnnnnnnnnnnnnnnnnnnnnnnnnnnnnnnnnnnnnnnnnnnnnnnnnnnnnnnnnnnnnnnnnnnnnnnnnnnnnnnnnnnnnnnnnnnnnnnnnnnnnnnnnnnnnnnnnnnnnnnnnnnnnnnnnnnnnnnnnnnnnnnnnnnnnnnnnnnnnnnnnnnnnnnnnnnnnnnnnnnnnnnnnnnnnnnnnnagatccctggtggtaactaatgagtatctgctgcagcagctgaataaggagccaaaaggttattctgggaaagcgctcctgcctcctgagaagggtcatcatctggggagatcatcgccctttgggaaaagcacattgtcttcctcctcaccagtggcacatgacactggtcagtatctaatacagagcgtctcggatgctgccccagagcctggcttatggagctagcatggaacccacaccacagcttccctggtccacagaggctctcaccgccattgccaccagtatggtggtatgtactcacaaagattaagaaagaaatgtattct

SEQ ID NO: 24097 - DNA, 174 bp, Macaca Mulatta
gctggatttttcaaaatcgttacatttgtcaccgatcagcgctggcccttaacctcttttgagtctcctaattcctggggtggttggggcaccagggaagggagatttctgaagttgggacctaaactaaagttttacgctctgtaattcacagctttcttttccttgcccccg

SEQ ID NO: 24098 - DNA, 143 bp, Macaca Mulatta
tccgtgtaccccgttgtttcactgtgtacgttaaatgtaactgaaaatagtgatcttggtcgcttgccttcacgccccactgactgcagagccttggagtggtagtatcaaagtgggccttgcattattgctccccttttcgg

SEQ ID NO: 24099 - DNA, 736 bp, Macaca Mulatta
  misc_feature (1)...(736): n = A,T,C or G
ggagggctggagcccaggcgtttggtgcggggcgtgaaaggcagaagcattagcatgaaggcacctaccgcttcccgagccaagcagggaccgttcaagaccatgcctctgcggtggtcctttggatccaaggagaaaccatcaggcgcctctgtcgagttggtggagtacttggaatccagacgaaggcctcggtccacgagccagtccattgtgtcgctgttgacgggcactgcgggtgaggatgagaagtcagcatcgccgaggtccaacctcgcccttcctgctaacagcgaagatggtgggcgggccatcgaaagaggtccagccggggtgccctgtccctcagctcaacccaaccactgtctggcccctggaaactcggatggtccaaacacagcaaggaaactcaaagaaaatgcagggcaggacatcaagcttcccagaaagtttgacctgcctctcactgtgatgccttcagcggagcatgagaaaccagctcgaccggagggccagaaggccatgaactggaaggagagcttccagatgggaagcannnnnnnnnnnnnnnnnnnnnnntgggattctctggaaacagcaaagacagtcgccgaggcacctctgagctagacagacccctgcaggggacactacacgcttctgaggtctgtgtttcggaagaaggagaacaggaagagtgagagggtagaggtctctccacaagtgccccccgtct

SEQ ID NO: 24100 - DNA, 916 bp, Macaca Mulatta
  misc_feature (1)...(916): n = A,T,C or G
gtaacgggagttgttggaagagcagaacttttgtcatctatcttttttctagcagcttttttatcatataccagatcaaaaggaccagacaattccatnnnnnnnnnnnnnnnnnnnnnnnnnnnnnnnnnnnnnnnnnnnnnnnnnnnnnnnnnnnnnnnnnnnnnnnnnnnnnnnnnnnnnnnnnnnnnnnnnnnnnnnnnnnnnnnnnnnnnnnnnnnnnnnnnnnnnnnnnnnnnnnnnnnnnnnnnnnnnnnnnnnnnnnnnnnnnnnnnnnnnnnnnnnnnnnnnnnnnnnnnnnnnnnnnnnnnnnnnnnnnnnnnnnnnnnnnnnnnnnnnnnnnnnnnnnnnnnnnnnnnnnnnnnnnnnnnnnnnnnnnnnnnnnnnnnnnnnnnnnnnnnnnnnnnnnnnnnnnnnnnnnnnnnnnnnnnnnnnnnnnnnnnnnnnnnnnnnnnnnnnnnnnnnnnnnnnnnnnnnnnnnnnnnnnnnnnnnnnnnnnnnnaccatgggatcaataccacttatagagtcgttactagatattcgaaatctggccacatttactttcttttgttttctggggactttgggagtattcagtctcagatactctggtgattcctccaagactgttttaatggngcgctttgtttaatggcattaccatttattcctgcatcgaaccttttttttccagttggatttgttgttgccgagcgagtattatatgttcccagcatgggattctgtattttggtagcccatggatggcagaaaatatcaacaaaaagnnnnnnnnnnnnnnnnnnnnnnnnnnnnnnnnnnnnnnnnnnnnnnnnnnnnnnnnnnnnnnnnnnnnnnnnnnnnnnnnnnnnnnnnnnnaatataccttgtttatgtcagccttgaaggtaaa

SEQ ID NO: 24101 - DNA, 632 bp, Macaca Mulatta
  misc_feature (1)...(632): n = A,T,C or G
ggagagctgcaaacatgattccggctcatgacagtcctttagcggcattggcctttgatgcaagcggaactaaacttgccacggcttcagagaagnnnnnnnnnnnnnnnnnnnnnnnnnnnnnnnnnnnnnnnnnnnnnnnnnnnnnnnnnnnnnnnnnnnnnnnnnnnnnnnnnnnnnnnnnnnnnnnnnnnnnnnnnnnnnnnnnnnnnnnnnnnnnnnnnnnnnnnnnnnnnnnnnnnnnnnnnnnnnnnnnnnnnnnnnnnnnnnnnnnnnnnnnnnnnnnnnnnnnnnnnnnnnnnnnnnnnnnnnnnnnnnnnnnnnnnnnnnnnnnnnnnnnnnnnnnnnnnnnnnnnnnnnnnnnnnnnnnnnnnnnnnnnnnnnnnnnnnnnnnnnnnnnnnnnnnnnnnnnnnnnnnnnnnnnnnnnnnnnnnnnnnnnnnnnnnnnnnnnnnnnnnnnnnnnnnnnnnnnnnnnnnnnnnnnnnnnnnnnnnnnnnnnnnnnnnnnnnnnnnnnnnnnnnnnnnnnnnnnnnnnnnnnnnnnnnnnnnnnnggcagcctggagacggccaatgagatcttggactctgcctctcacgactgccccttagtccctcagacatacggcgcag

SEQ ID NO: 24102 - DNA, 245 bp, Macaca Mulatta
  misc_feature (1)...(245): n = A,T,C or G
gnnnnnnnnnnnnnnnnnnnnnnnngnnnnnnnnnnnnnnnnnggaaaggaggagttcgtctagatttgtccgcttgctggtggacttgcgggagtcgcagtctctgaacttccagcctcagagaccgccgctcttgttcccaagggccagggggggggtctcangncttntggagggggctcctnanctcctnncncgggggtantcncatcnctttnttctnntcccnagaggncnncnttcn

SEQ ID NO: 24103 - DNA, 127 bp, Macaca Mulatta
  misc_feature (1)...(127): n = A,T,C or G
gagacagcaagtggttctgacggagtggtgggcccaagggcacccggccatccatttttcttccatgcatcctggctgggccgacaccncagagaggaatgagcaggggctgaggaagggagtggga

SEQ ID NO: 24104 - DNA, 128 bp, Macaca Mulatta
cagaacgtgaagcagctgtacgcgctggtgtgcgaaacgcagcgctactccgccgtgctggatgccgtaatcgccagcgccggcctcctccgtgcggagaagaagctgcggccgcacctggccaaggt

SEQ ID NO: 24105 - DNA, 99 bp, Macaca Mulatta
cagagcctgttgttttgtccaaaatcaaaactgcacatccacagagcagagatctcaaagattatgcgagaatgtcaggaagaaagtttctggaagaga

SEQ ID NO: 24106 - DNA, 113 bp, Macaca Mulatta
ctgcaaactcactgctcaagaagacacggagactcctgccctgttgtgtatcagatgcaagatatttatatatattttttggttgtcaatattaaatacagacactaagttat

SEQ ID NO: 24107 - DNA, 686 bp, Macaca Mulatta
cggagagcagccctcagaccagccactgtgagggtgccgaggacagaggagaccggagagggaggggtgagccacagccaccatggcgcccccctgttcaccagggtcccttagctgggctctggtggggtggcgtgtgcctgtgctgctaggcctgcaggactgtgcatttctagaaatggattaggagcctgctgcctcctggttctggttactaattcttactcttccctccccctgcattttttaaaattcaaggtgaaatctgtgcactgtcaagctggagacacagttggagaaggggatctgctcgtggagctggaatgaaggatttataacctttcagtcatcacccaatttaattagccatttgtgtgatgctttgacacacaattgattcaagcattttacaggaacacccctgtgcagctacgtttacgtcgtcatttattccagagtcaagaccaatattctgccaaaaaatcaccaatggaaattttcactgatataaatacttgtacatatgatttgtacttctgtgagatttcctagtatgaaaattaaatcaatcaaactgatcatttgtctaaatattagtttgccctttctttgaagacagtgtacacataggcgacagcctctgccagtagactaccagcatttctttgtgatccttttaaaagata

SEQ ID NO: 24108 - DNA, 1450 bp, Macaca Mulatta
  misc_feature (1)...(1450): n = A,T,C or G
tctcttcgatctcccttttctgccaaagaaaaatcataggtcaattttatttgcaatataagttttagccttgttgtgtttgacctgattatttatgtaaaaggcagcaggaatagtgattgtccatataggctcctttttttattacacattttagattannnnnnnnnnnnnnnnnnntggagtcgtgctccatcannnnnnnnnnnnnnnnnnnnnnnnnnnnnnnnnnnnnnnnnnnnnnnnnnnnnnnnnnnnnnnnnnnnnnnnnnnnnnnnnnnnnnnnnnnnnnnnnnnnnnnnngccgccaccactcccagctaattttttttgtagnnnnnnnnnnnnnnnnnnnnnnnnnnnnnagnnnnnnnnnnnnnatnnnnnnnnnnnnntgatccacccnnnnnnnnnnnnnnnnnnnnnannnnnnnnnnnnnnnnnnnnngcacccggcctagattaaacttttaaaagcttcttcaggatagaaagccaagtcaaggatttatcatcagatccgtgcctctactacttgtaataattgggtaaattcctcctttcttgaagtcctccaaatacctcaaagtttctgggcctgtcaggaagggacattacttaacacgaggtcaaaacacctacaagggattgcagtacattgagctccatagagacagtgctggggcaagtgagagctggacgggcactgggcgactctgtgccttgctgaggaaaaataactaaacatgggcaaaggagatcctaagaagctgggaggcgaaatgtcatcatatgcattttttgtgcaaacttgtcgggaggagcatgagaagaagaacccagatgcttcagtcaacttctcagagttttctaagaagtgctcagagaggtggaagaccatgtctgctaaagagaaaggaaaatttgaagatatggcaaaggcggacaaggcccgttacgaaagagaaatgaaaacctatatccctccccaaggggaaacaaaaaagaagttcaaggatcccaatgcaccccagagggccccttccggccttctttcctgttctgcctctgaatatcccccccaaaatnnnnnnnnnnnnntnnnnnnnnnnnnnnntgggggatgttggccaaaaaacctgggagcaaatggggcaaatacccgcttctgtcgcaaccccgactgatccccttatgaaagagaaaggcttgtcgcccctgtacgggaacaaatgcgcaagaggggatgtttggcggcgctttccgacgggccgagccgagaacgcttcggcggtggagaaccacccggagactctcccagcggccccgccggccgtggcccgcgaggtggcggctcaatgcgtcgagggtgcatctgttcgggctcaggccgataggcgtacggcggcccgcagcgccgtgcggcggtggcgacccgcgcgcggtgcga

SEQ ID NO: 24109 - DNA, 450 bp, Macaca Mulatta
tttatgtcaccatttaccaaagtgtgttgctatggtatggtattattccaacaggtctgccaaagactgacagaatatggagttcattttcaccgagtgcaccctgagaaaaagtcacaaacaggaatattgcttggagtctgttctaaaggtgtccttgtgtttgaagttcacaatggagtgcgcacattggtccttcgctttccatggagggaaaccaagaaaatatctttttctgtatgtccatttaacctcttttcattatattttcaaatgttattaccaacttccagtataacatattaacagactttccttagactctgccattcaatggggataatacatcttaatactatttaactcttcctttgtagttgtagaaagtattattgagattttatttatgtctgttttatcaacaggtgatttttaagattattacacatt

SEQ ID NO: 24110 - DNA, 108 bp, Macaca Mulatta
acagttgtgtgtataaatgtgtatgccagcagcactcggaacagatgtatagtgatctgattaaaaagataactaatcacttagagagagtctcgaaggagctgcagg

SEQ ID NO: 24111 - DNA, 7416 bp, Macaca Mulatta
  misc_feature (1)...(7416): n = A,T,C or G
ccttgggcgagcccggtcctctgcggagagcgccccgccctctgtgaaggcccgcccgggaattggcggcggcgctgcagccatttccggtttcggggaggtgggtggggtgcggagcgggacttggagccgccgccgctgctgccgctgccgccgcccacagagcctgccttgcgcctggtgctgccaggaagatgcggccggggcccggaggctgctgctgtcgccgcacggtgcgggcgaatggctgcgtggcgaacggggaagtacggaacgggtacgtgaggaccagcgccgcagccgcagccgcnnnnnnnnnnnnnnnnnnnnnnnnnnnnnnnnnnnnnnnnnnnnnnnnnnnnnnnnnnnnnnnnnnnnnnnnnnnnnnnnnnnnnnnnnnnnnnnnnnnnnnnnnnnnnnnnnnnnnnnnnnnnnnnnnnnnnnnnnnnnnnnnnnnnnnnnnnnnnnnnnnnnnnnnnnnnnnnnnnnnnnnnnnnnnnnnnnnnnnnnnnnnnnnnnnnnnnnnnnnnnnnnnnnnnnnnnnnnnnnnnnnnnnnnnnnnnnnnnnnnnnnnnnnnnnnnnnnnnnnnnnnnnnnnnnnnnnnnnnnnnnnnnnnnnnnnnnnnnnnnnnnnnnnnnnnnnnnnnnnnnnnnnnnnnnnnnnnnnnnnnnnnnnnnnnnnnnnnnnnnnnnnnnnnnnnnnnnnnnnnnnnnnnnnnnnnnnnnnnnnnnnnnnnnnnnnnnnnnnnnnnnnnnnnnnnnnnnnnnnnnnnnnnnnnnnnnnnnnnnnnnnnnnnnnnnnnnnnnnnnnnnnnnnnnnnnnnnnnnnnnnnnnnnnnnnnnnnnnnnnnnnnnnnnnnnnnnnnnnnnnnnnnnnnnnnnnnnnnnnnnnnnnnnnnnnnnnnnnnnnnnnnnnnnnnnnnnnnnnnnnnnnnnnnnnnnnnnnnnnnnnnnnnnnnnnnnnnnnnnnnnnnnnnnnnnnnnnnnnnnnnnnnnnnnnnnnnnnnnnnnnnnnnnnnnnnnnnnnnnnnnnnnnnnnnnnnnnnnnnnnnnnnnnnnnnnnnnnnnnnnnnnnnnnnnnnnnnnnnnnnnnnnnnnnnnnnnnnnnnnnnnnnnnnnnnnnnnnnnnnnnnnnnnnnnnnnnnnnnagcatggagggatctattgttcgtcttcctgaagtgattgccctcaagaagaagtacaaggcatacttgtatctggatgaggctcacagcattggcgccttgggccccacaggccggggtgtggtggactacttcggcctagatcctgaggatgtggatgttatgatgggaacattcacaaagagttttggtgcttctggaggatatattggaggcaagaaggnnnnnnnnnnnnnnnnnnnnnnnnnnnnnnnnnnnnnnnnnnnnnnnnnnnnnnnnnnnnnnnnnnnnnnnnnnnnnnnnnnnnnnnnnnnnnnnnnnnnnnnnnnnnnnnnnnnnnnnnnnnnnnnnnnnnnnnnnnnnnnnnnnnnnnnnnnnnnnnnnnnnnnnnnnnnnnnnnnnnnnnnnnnnnnnnnnnnnnnnnnnnnnnnnnnnnnnnnnnnnnnnnnnnnnnnnnnnnnnnnnnnnnnnnnnnnnnnnnnnnnnnnnnnnnnnnnnnnnnnnnnnnnnnnnnnnnnnnnnnnnnnnnnnnnnnnnnnnnnnnnnnnnnnnnnnnnnnnnnnnnnnnnnnnnnnnnnnnnnnnnnnnnnnnnnnnnnnnnnnnnnnnnnnnnnnnnnnnnnnnnnnnnnnnnnnnnnnnnnnnnnnnnnnnnnnnnnnnnnnnnnnnnnnnnnnnnnnnnnnnnnnnnnnnnnnnnnnnnnnnnnnnnnnnnnnnnnnnnnnnnnnnnnnnnnnnnnnnnnnnnnnnnnnnnnnnnnnnnnnnnnnnnnnnnnnnnnnnnnnnnnnnnnnnnnnnnnnnnnnnnnnnnnnnnnnnnnnnnnnnnnnnnnnnnnnnnnnnnnnnnnnnnnnnnnnnnnnnnnnnnnnnnnnnnnnnnnnnnnnnnnnnnnnnnnnnnnnnnnnnnnnnnnnnnnnnnnnnnnnnnnnnnnnnnnnnnnnnnnnnnnnnnnnnnnnnnnnnnnnnnnnnnnnnnnnnnnnnnnnnnnnnnnnnnnnnnnnnnnnnnnnnnnnnnnnnnnnnnnnnnnnnnnnnnnnnnnnnnnnnnnnnnnnnnnnnnnnnnnnnnnnnnnnnnnnnnnnnnnnnnnnnnnnnnnnnnnnnnnnnnnnnnnnnnnnnnnnnnnnnnnnnnnnnnnacttacctgggccctcctccctagggagcaagtgccttccacttacttcccatccaggtctcagaggtggccagccttgaaatccttatttaaccattcaagtaatcaatagaagtattcaccctttaatcttaagtttagccttttaagaaaaacagtaagcgatgactgctgaaagacttattgtgtaatctcccaagggtttggtcttaatccattttgttctggtcaccagatgatttcttcctttaccatcaaatatttcttcataatggtcacagtctgaggatgtgcgcaaattctggttcttgccaagctccagccataacacgtcccaccccgttttttttaaagcacttactgttttcaaagcacccacatgccccgctggttagaaggccactctcacatctgagtgttgggtacaaagccgctccgtagagtgatgtgcactcccggtgggtgaggggcaggggcagtgtggaaagaattgattactccttgcagagtctgtggcttgcatttcctactgatttctacgtttgaaaattatgacagtctctggctgggtctgggtccagattaggatttaaactgataaaggaaaatggtggtaaatcctctgctcagaaatcatttatcatgttcctatttaaggattagatttattaatttaggccttttggaagctaacccacttaaatattactcttctgaatgctagttctcttttattcttaatgtcctaagacaattgaatctggcatctggggctagggtctgcctgtctacatnnnnnnnnnnnnnnnctgagaaattctgaacacatagatctctttcctaaactgacattttctattttgactgttttcatattataaccaggtaaagggacttttttcagagagctttatactgcctgaccaaagaacaaatctgaaaatcaccattttaaagttcttttttagttgaaccaaagtgtaagtgaagcggacttttggcatggttatacccaggatccgcttgtccttttgtatccatcaagtgttacaggagaaggattgggaacagaatggaaaagcagtgtatgaaagtcatgttacatacaggcctgggtgcgggtggctcacgcctgtaatcctagcactttgggaggctgaggcaggtggctcacttgaggtcaggagaatcgagaccagcctggccaacatggtgaaaccccgtctctactaaaaatacaaaaaaattagccaggcatggtggcaggcgcctgtaatcccagctactcggtaggctgaggcacaggaatcgcttgaacccagtaggcggagattgcagtgagatgagatcatgccactgcactctagcctgggtgacagagtgaaactgtgtctcaaagtaaaagtcatgttacacattttagtttttgaaattgctccttttattggtaaagattatcaatccaaattctcctgggtgtcttgtcatcagctgtggtatgtttgtgtacattacatgtagcagaggatgtaagcaatattattgtttgtgaagttttgtttttaatgtcttgagtataaatttattcactgtcagcatccgcgagctttaataagcccctgagatattccaaagttttattttacttttttaaagaacagaaaaagatgaatgaaagaaccaaggagagatgcagagactatatttagcatgtataggttaaagtaagaaggaggtcgtggtaactaaataaggagtactataaaatcaaatacattgtcaaccgttcctgcacatctaatttcctagcatagaatccctctggaataccagatagcctttgcactgcagttactatttaataatgtaaatgtagggttttaaaagtcacannnnnnnnnnnnnnnnnnnnnnnnnnnnnnnnnnnnnnnnnnnnnnnnnnnnnnnnnnnnnnnnnnnnnnnnnnnnnnnnnnnnnnnnnnnnnnnnnnnnnnnnnnnnnnnnnnnnnnnnnnnnnnnnnnnnnnnnnnnnnnnnnnnnnnnnnnnnnnnnnnnnnnnnnnnnnnnnnnnnnnnnnnnnnnnnnnnnnnnnnnnnnnnnnnnnnnnnnnnnnnnnnnnnnnnnnnnnnnnnnnnnnnnnnnnnnnnnnnnnnnnnnnnnnnnnnnnnnnnnnnnnnnnnnnnnnnnnnnnnnnnnnnnnnnnnnnnnnnnnnnnnnnnnnnnnnnnnnnnnnnnnnnnnnnnnnnnnnnnnnnnnnnnnnnnnnnnnnnnnnnnnnnnnnnnnnnnnnnnnnnnnnnnnnnnnnnnnnnnnnnnnnnnnnnnnnnnnnnnnnnnnnnnnnnnnnnnnnnnnnnnnnnnnnnnnnnnnnnnnnnnnnnnnnnnnnnnnnnnnnnnnnnnnnnnnnnnnnnnnnnnnnnnnnnnnnnnnnnnnnnnnnnnnnnnnnnnnnnnnnnnnnnnnnnnnnnnnnnnnnnnnnnnnnnnnnnnnnnnnnnnnnnnnnnnnnnnnnnnnnnnnnnnnnnnnnnnnnnnnnnnnnnnnnnnnnnnnnnnnnnnnnnnnnnnnnnnnnnnnnnnnnnnnnnnnnnnnnnnnnnnnnnnnnnnnnnnnnnnnnnnnnnnnnnnnnnnnnnnnnnnnnnnnnnnnnnnnnnnnnnnnnnnnnnnnnnnnnnnnnnnnnnnnnnnnnnnnnnnnnnnnnnnnnnnnnnnnnnnnnnnnnnnnnnnnnnnnnnnnnnnnnnnnnnnnnnnnnnnnnnnnnnnnnnnnnnnnnnnnnnnnnnnnnnnnnnnnnnnnnnnnnnnnnnnnnnnnnnnnnnnnnnnnnnnnnnnnnnnnnnnnnnnnnnnnnnnnnnnnnnnnnnnnnnnnnnnnnnnnnnnnnnnnnnnnnnnnnnnnnnnnnnnnnnnnnnnnnnnnnnnnnnnnnnnnnnnnnnnnnnnnnnnnnnnnnnnnnnnnnnnnnnnnnnnnnnnnnnnnnnnnnnnnnnnnnnnnnnnnnnnnnnnnnnnnnnnnnnnnnnnnnnnnnnnnnnnnnnnnnnnnnnnnnnnnnnnnnnnnnnnnnnnnnnnnnnnnnnnnnnnnnnnnnnnnnnnnnnnnnnnnnnnnnnnnnnnnnnnnnnnnnnnnnnnnnnnnnnnnnnnnnnnnnnnnnnnnnnnnnnnnnnnnnnnnnnnnnnnnnnnnnnnnnnnnnnnnnnnnnnnnnnnnnnnnnnnnnnnnnnnnnnnnnnnnnnnnnnnnnnnnnnnnnnnnnnnnnnnnnnnnnnnnnnnnnnnnnnnnnnnnnnnnnnnnnnnnnnnnnnnnnnnnnnnnnnnnnnnnnnnnnnnnnnnnnnnnnnnnnnnnnnnnnnnnnnnnnnnnnnnnnnnnnnnnnnnnnnnnnnnnnnnnnnnnnnnnnnnnnnnnnnnnnnnnnnnnnnnnnnnnnnnnnnnnnnnnnnnnnnnnnnnnnnnnnnnnnnnnnnnnnnnnnnnnnnnnnnnnnnnnnnnnnnnnnnnnnnnnnnnnnnnnnnnnnnnnnnnnnnnnnnnnnnnnnnnnnnnnnnnnnnnnnnnnnnnnnnnnnnnnnnnnnnnnnnnnnnnnnnnnnnnnnnnnnnnnnnnnnnnnnnnnnnnnnnnnnnnnnnnnnnnnnnnnnnnnnnnnnnnnnnnnnnnnnnnnnnnnnnnnnnnnnnnnnnnnnnnnnnnnnnnnnnnnnnnnnnnnnnnnnnnnnnnnnaatttcttcattaccgtgagggagcctgcatctaaattcctcaactagttcagcctagctgaaagttctagtgtgtaataccctttgcttccttcttattggtgaaaaccagggggatgagtggcttccatggagagatttcctgatttctcagggaggaaaaagtgatgacatttaccactacttttctgtttttcccctttttccaaattgataaggatttccggttcctagtgatccaggattgggtaacagtgcagaactgccggtcatgccgtaggccatggagaaagaatatgggtaactgttgngtaactgttgttttgcaagaatttgtagggttatgggcagttgttgtcttgtttgaagcattgctatgacctaattcccaaggtgtctttcctctcttggtgttctcagtaagccaatgagttttaatctctacttgctataatctctacttgtgcttagaaaaagagatgagagtagtggttttccttcaaactgtccacattcatgaagattatgaatnnnnnnnnnnnnnnnnnnnngatagaccctgtctctacaaacatttttttctaaattaaccgggcacggtggtgcctgcctatagtcccacctatgtgggagaatcacttgagcctgggaaagtcaaggctgcagtgagccatgattgcaccgctgcattccagcctgggtgacagagtgagaccctggctcaataagagggggnnnnnnnnttgttaggagctgggtgcacatgcagcctgcaatcccagctactcgagaggctgaggcaggaggcttgcttaagcccaggaatttgagcctagcctgggcaacatagcaagaccccatctcaaaaaaaaaaatgtttttaaaatcagcttagcccaaaggggttgtgaatgggggaggtataaaaagcaaagattattttttggctactaagccaannnnnnnnnnnnnnnnnnnnnnncagtcccagaacctacagatagactgctatttgcttcatgtggatgctcagggcccagcagccatcttaatccattaagccagtttaaaaaataccttctacgtggagaaaagcatgtctttttcttgcctcgactttatccacatgaaatatgtgcccgtggctgggcgcagtggctcatgcctgtaatcccaacactttgggaggctgaggcaggtggctcacttgaggtcaggagaatcgagaccagcctggccaacatggtgaaaccccgtctctactaaaaatacaaaaaaattagccaggcatggtggcaggcgcctgtaatcccagctatgtcggcaggctgaggcacaggaattgcttgaacccaagaggcagaggatgcaatgagccaagatcgtgccactgcactccagccttggtgacagagggagaatctgtctc

SEQ ID NO: 24112 - DNA, 327 bp, Macaca Mulatta
ggcctgagggcccaagaccagagggagaggagccatgctggtggggtcacaaagtccttggaagtcacaaggcgtgtctgcagggggcatgttcgcgtttactgagcgcaagttctcctggggtggaacagggaccacccatgcctgctcctggccaggcggggatccccagcagggctggggccagcaagggagtagggtcctcaggccagggtggaggccaggagcaaagccaggacggtgagtacaggtccaggtcctaggaggcagggcgtccccgagagggcctctacggagagagcggtgactcagagtgcccaactccac

SEQ ID NO: 24113 - DNA, 1861 bp, Macaca Mulatta
  misc_feature (1)...(1861): n = A,T,C or G
ctcttcttcctggcatgtccctttcaagtgtaccaaaggacattttgttctgttgaaagccccaggaccaaaaggaaagtattgcaactatttgcaaacatacttccctacctatacgagcagccgtatactaaaaagcactaaacaagcatgaacaaacactaaatagccttataccagaaagcattcttgtaactgtcagggcatggtatgaattccttcctctttaagcagcaacttactacaggcttgttggctttaagtgatatagaattacgcaaatggtcagttattttttaatgttgaaaacttgaaagtgtgagtaatatggacatagtttactaccttttgcttttaatatacttggttatgtatttccgtttgaaataaaatgaaaggagacctcaaactaatgctgcgaagtagacaaaatcagcgctcagatttaaatccgcccaatttaaatagnnnnnnnnnnnnnnnnnnnnnnnnnnnnnnnagagacagggtcttgctctgttgcccaggctagagtgcagcagtgacatgatcatagctcactgcagcctggaactcctgggctcaggatcctcctgctttggcctcctgagtagctaagaccacaggtgtgtgccaccacacctggctaatttcttaaaatttttttgtagagatggggtcttgctttgttgcccagactagtctcgaactcctggcctcaagccaccnnnnnnnnnnnnnnnnnnnnnnnnnnnnnnnnnnnnnnnnnnnnnnnnnnnnnnnnnnnnnnnnnnnnnnnnnnnnnnnnnnnnnnnnnnnnnnnnnnnnnnnnnnnnnnnnnnnnnnnnnnnnnnnnnnnnnnnnnnnnnnnnnnnnnnnnnnnnnnnnnnnnnnnnnnnnnnnnnnnnnnnnnnnnnnnnnnnnnnnnnnnnnnnnnnnnnnnnnnnnnnnnnnnnnnnnnnnnnnnnnnnnnnnnnnnnnnnnnnnnnnnnnnnnnnnnnnnnnnnnnnnnnnnnnnnnnnnnnnnnnnnnnnnnnnnnnnnnnnnnnnnnnnnnnnnnnnnnnnnnnnnaatgtgttgttcatgcatgcctgtgatattcatcatcaaaatatacctgtaaaaaataaaccatcgcttcctctccacaccttaggcctccctcttactaaaaacaatagtagtttctgtagaagttttggtgagaaattatggttatataaataacagatacggcagaacaagttttgttgtagtatttttttccctagcatttcttaataatagctcagttttcaaaggaggggaacaataccccatgtgagttcaaattaattttctctactttgaggtataccttcctaattatactttacataggctaatttttttaagtttaaattctcgctgttaagttgcattgagaaacaattagaaatgttgtaattgtcatctctttacatgtggcttatgaacaaatgaaagtttgctgtgtgattgcagtttcaaattacaacatttcataaatatgtcagttttagaaactcagactctttcccatcttttgtatggataaagtttatggtttcatttctgagaatagagttggtctgctgtgctaacttcatgtttcttattccaaaggcttgattatattttttcctccggtgattaaaaatgcagcgaaaatccaatttacaagttcatatattgatatttctagatgtagtctagttctaaaagaatgtacttggtgtgcatttttaagtgtttcatgtagacagattaatatatttttgtacaacattgtatttctacatgtatttcaagactacttttcggtgactttttcaagtgcatg

SEQ ID NO: 24114 - DNA, 1370 bp, Macaca Mulatta
  misc_feature (1)...(1370): n = A,T,C or G
nggacttcctgtatgtcacacccacgcctctgcaggcagctcgcgctgggaatgccgtgcacgccctcctcctgtaccgccaccgcctgaaccgccaggagatacccccnnnnnnnnnnnnnnnnnnnnnnnnnnnnnnnnnnnnnnnnnnnnnnnnnnnnnnnnnnnnnnnnnnnnnnnnnnnnnnnnnnngactacatccgccacctccatgacagccaacacgtggctgtcttccaccggggccgattcttccgcgtggggacccactcccgaaacagcctgctttccccgagggccctggagcagcagtttcagcgaatcctggacgatccctcaccagcctgcccccacgaggaacatctggctgctctgaccgctgctcccaggnccaggggcacgtgggcccaggtgcgaaggtccctgaagacccaggcagcagaggccctggaggcagtggaaggggccgctttctttgtgtcactggacgctgagcccgcggggctcaccagggaggacccagcagcgtcgttggatgcctatgcccatgccctgctggctggccggggccatgannnnnnnnnnnnnnnnnnnnnnnnnnnnnnnnnnnnnnnnnnnnnnnnnnnnnnnnnnnnnnnnnnnnnnnnnnnnnnnnnnnnnnnnnnnnnnnnnnnnnnnnnnnnnnnnnnnnnnnnnnnnnnnnnnnnnnnnnnnnnnnnnnnnnnnnnnnnnnnnnnnnnnnnnnnnnnnnnnnnnnnnnnnnnnnnnnnnnnnnnnnnnnnnnnnnnnnnnnnnnnnagatccactcctccatctctctagccctgaggggagccaagatcttgtctgaaaatgtcgactgccatgtctttccattctccctatttggcaagagcttcatccgacgctgccacctgtcttcagacagcttcatccagatcgccttgcaactggcccacttccgggnggacaggggtcaattctgcctgacttatgagtcggccatgactcgcttattcctggaaggccggacggagacggtgcgatcttgcacgagggaggcctgcaactttgtgagggccatggaggacaaagagaagacggnnnnnnnnnnnnnnnnnnnnnnnnnnnnnnnnnnnnnnnnnnnnnnnnnnnnnnnnnnnnnnnnnnnnnnnnnnnnnnnnnnnnnnnnnnnnnnnnnnnnnnnnnnnnnnnnnnnnnnnnnnnnnnnnnnnnnnnnnnnnnnnnnnnnncaggtccattcggagcagtggcagctgtccaccagccagatccctgttcagcaaatgcatctgtttgacgtccacaattacccggactatgtttcttcgggcggtggattcgggcct

SEQ ID NO: 24115 - DNA, 804 bp, Macaca Mulatta
  misc_feature (1)...(804): n = A,T,C or G
ccatccatgtcgtggcgcatttcttcaacctggaacgctatcgctggagccagtccaaggaggcccagggacttctggctgcactttccaagttgggtaacacccctaatgagagctacctcaaccctatccggaccttccccnnnnnnnnnnnnnnnnnnnnnnnnnnnnnnnnnnnnnnnnnnnnnnnnnnnnnnnnnnnnnnnnnnnnnnnnnnnnnnnnnnnnnnnnnnnnnnnnnnnnnnnnnnnnnnnnnnnnnnnnnnnnnnnnnnnnnnnnnnnnnnnnnnnnnnnnnnnnnnnnnnnnnnnnnnnnnnnnnnnnnnnnnnnnnnnnnnnnnnnnnnnnnnnnnnnnnnnnnnnnnnnnnnnnnnnnnnnnnnnnnnnnnnnnnnnnnnnnnnnnnnnnnnnnnnnnnnnnnnnnnnnnnnnnnnnnnnnnnnnnnnnnnnnnnnnnnnnnnnnnnnnnnnnnnnnnnnnnnnnnnnnnnnnnnnnnnnnnnnnnnnnnnnnnnnnnnnnnnnnnnnnnnnnnnnnnnnnnnnnnnnnnnnnnnnnnnnnnnnnnnnnnnnnnnnnnnnnnnnnnnnnnnnnnnnnnnnnnnnnnnnnnnnnnnnnnnnnnnnnnnnnnnnnnnnnnnnnnnnnnnnnnnnnnnnnnnnnnnnnnnnnnnnnnnnnnnnnnnnnnnnnnnnnnnnnnnngacttcttcagcgtgcacatccgggcagcgggagactggacggcagcactactggaggcctttggggcagagggacgggccctccaggagccctggagactgccaag

SEQ ID NO: 24116 - DNA, 357 bp, Macaca Mulatta
  misc_feature (1)...(357): n = A,T,C or G
tttggctatctactgacagtatagtggtagaagacaaaaaggaaagtgaattccatttctctaaactgaagagaaggcaagacttggaaaagaaaagaaaacttagaaaaatagagtggatgaggcaaatgtannnnnnnnnnnnnnnnnnnnnnnnnnnnnnnnnnnnnnnnnnnnnnnnnnnnnnnnnnnnnnnnnnnnnnnnnnnnnnnnnnnnnnnnnnnnnnnnnnnnnnnnnnnnnnnnnnnnnnnnnnnnnnnnnnnnnnnnnnnnnnnnnnnnnnnnnnnnnnnnnnnnnnnnnncattgccagctggaaggaaattgctacaagcaactcttcggctaatttcaaagg

SEQ ID NO: 24117 - DNA, 584 bp, Macaca Mulatta
cttctttgtaacaaaggtaacctgtgaaaaaatatgatatatagaagtctcattctttttttgttttgtttaatgctttttccattggcagggaaacaaattccatggttgaagaatttatgttacttgccaatatttctgttgcaaaaaaaattcacgaggaattttctgaacatgctctgcttcgaaaacatcctgctccacctccgtcaaattatgaaattcttgttaaggcagctaggtcaaggaatttggaaatcaagactgatacagccaagtctttggctgagtctttggatcgggccgaatctcctacttttccatatctaaacactctgttaagaatattggccactcgctgtatgatgcaggctgtgtacttctgttctggaatggataatgattttcatcactatggcttagcatctccaatatacacacattttacttcacccatcagaagatacgcagatgtcatcgttcatcggcttttggctgtggctgttggggctgactctacttatccagagttgacagacaaacacaagcttgcagatatatgtaaaaatctaaatttccggcac

SEQ ID NO: 24118 - DNA, 330 bp, Macaca Mulatta
ttctggggtcagcggcttgttctgagtgtggacactccaaagaagacagatggctttgctgagactcaggagcagcctggcactggtgtccttctgggaatggggaaaacactgttcttggagggagataacgttgcctgagttgcctgtcacttgactgggatttgaatggatatttttaccatccaaggacttctctgttcctctattttgttctataataaagtttcattaattctttgatgtagatagtctttatcctcatttctttagtatattacatatacagtggaggtgaccagtgtgttgtgccacctggcatgcccttcc

SEQ ID NO: 24119 - DNA, 557 bp, Macaca Mulatta
  misc_feature (1)...(557): n = A,T,C or G
tacaggaaaaaatacacagttgtagaatcnnnnnnnnnnnnnnnnnnnnnnnnnnnnnnnnnnnnnnnnnnnnnnnnnnnnnnnnnnnnnnnnnnnnnnnnnnnnnnnnnnnnnnnnnnnnnnnnnnnnnnnnnnnnnnnnnnnnnnnnnnnnnnnnnnnnnnnnnnnnnnnnnnnnnnnnnnnnnnnnnnnnnnnnnnnnnnnnnnnnnnnnnnnnnnnnnnnnnnnnnnnnnnnnnnnnnnnnnnnnnnnnnnnnnnnnnnnnnnnnnnnnnnnnnnnnnnnnnnnnnnnnnnnnnnnnnnnnnnnnnnnnnnnnnnnnnnnnnnnnnnnnnnnnnnnnnnnnnnnnnnnnnnnnnnnnnnnnnnnnnnnnnnnnnnnnnnnnnnnnnnnnnnnnnnnnnnnnnnnnnnnnnnnnnnnnnnnnnnnnngtctgcactgtgctgcttaaccatcttagcttttcatacttacatctccctaatacttggtanggtacaggagaagtgaatgttgccgaagcagagcgtctcctggcacccttcctccagcagtttc

SEQ ID NO: 24120 - DNA, 864 bp, Macaca Mulatta
  misc_feature (1)...(864): n = A,T,C or G
agtcatcgctgactgggtgagcagggcaatttggaaatgacaaagttggtaaaatgcaatagcactttatttctaaaataaaaatggtcaaaagcattaaaaactaggactcttctattacactattacgatgtcaaaattactatatttgactgggaattagaaatatttcagtccctgtatcctttctcgaattagaacattgttntgctagccatgaagtttatcatcctcttctcataaaactgggtgtagctggaatagcagaggcgccattcagtcactcattagcctgttcagctcattcattcattccataggtgtgagcagcacctccaaggctgctcccaggggtcagggcagtggttgggaagggaggaggcaggtgggcggtagccagtgggacacagaaggtgatggggccacagagacaggtctgtgtgcagggccagggcagcttcgtgcccgtgcagggaggtgggcaggcccagcaggtgagggcgacaccactggagaggacggaagtgccaagaagccgcttcgctgtcgttctgcagctccctggtcagcaccaatgaacacctgctgcaggagctgagccaggtgcgggcgcagcacagagccgaggtggagcagatgcactggagctaccaggagctcaaaaagaccatggccctgtttccacacagcagcaccagccaaggaggctgccaggcctgctgactcctgccgagaagctgggccgccccttaagctccctgctaaagcgacatcgtctgcacctttgtccttctttacagagtgtactggctggtaagagttctctcttctgtttgtaaatagttaggagttttggaatgtatt

SEQ ID NO: 24121 - DNA, 297 bp, Macaca Mulatta
ccagcctcccagttccaatgggctgtctcaggggcccccatgctgggacctgcaccctagctgccgacgtcctggtacccgcagctctctgccctccctggatgaccaggagcaggccagttctggctgggggagtcgcatgcaagatggtagtggcttcagcctctgacaggcaggatgcatttttttgtcactccaaactgctgggacatggcagggacttctctgtgggggtttttagctggctcccagggctccctcagcctggggaacattaaaggtttttctacaaataca

SEQ ID NO: 24122 - DNA, 681 bp, Macaca Mulatta
ggggacccctggccgctgctgccctccccgccgaggttccactgctcttcttaagaagggtgtgaggcactgggtctctccccacatctctcgcctgaggccagacagccggtttgggggcgagcctgaggtcaaccaatcaatggctcagacagataagccaacatgcatcccgccggagctgccgaagatgctgaaggagtttgccaaagccgccattcgggcgcagccgcaggacctcatccagtggggggccgattattttgaggccctgtcccgtggagagacgcctccggtgagagagcagtctgagcgagttgctttgtgtaactgggcagagctaacacctgaggtgttaaagatcctgcattctcaggttgctgggagactgatcgtccatgcagaggagctggcccagatgtggaaagtggtgaatcttccagcagatctgtttaatagtgtgatgaatgtgggtcgcttcacggaggagatcgagtggctgaagtttttagcccttgcttgcagcgctctgggagttactattaccaaaactctcaagatagtgtgtgaggccttatcatgtgaccataatggtgggttgcctcggatcccgttcagcacctccaagttctctacacgtatattgccgaagtggattgagagatctctgcatcccacgtc

SEQ ID NO: 24123 - DNA, 151 bp, Macaca Mulatta
caggaagtaaagattctgaggagtcagctgggggagaagctccggatcgagctggacattgagcccaccattgacctgaacagggtgctgggggagatgcgggctcagtacgaggccatggtggagaccaaccgccaggatgtagaacagt

SEQ ID NO: 24124 - DNA, 199 bp, Macaca Mulatta
gaggcagcaccacatccagagcctgctcagctgctgcctggcctcggctgcgaggataggctggctgggcagcacgtctctccccacagggctccctgaggctgccagaaagagcccccaaccaatcttgggattctcccttcgtgcggttgtccaggacctttgtccagggtcaaagcagatcgtgaggaggaagctg

SEQ ID NO: 24125 - DNA, 228 bp, Macaca Mulatta
gaactgtgcaaattgcagccgtcgttgatattattcgggaattaggcatctgccctaatgatgctgctgtaacccccatcagtaaaaaccggttttatactattaaaaccctagtggtagcataatggaagtccagtctgtttgccacatccagatgatttcctctaaggaaacctggctggaatttctgttgtggtctataaaataaacttcttaacacgcttctcc

SEQ ID NO: 24126 - DNA, 1104 bp, Macaca Mulatta
  misc_feature (1)...(1104): n = A,T,C or G
nggtcctgtgaaggcgtccatccaggagtgcatcctccctgacagtcccctgtaccacaacaaggtccagttcacccctactgggggccttggcctgaacctggccctgnnnnnnnnnnnnnnnnnnnnnnnnnnnnnnnnnnnnnnnnnnnnnnnnnnnagccactccctgtgtccctccacgtccgtacttcaaagggtgcctatttcatcctggtggacaggtacctgnnnnnnnnnnnnnnnnnnnnnnnnnnnnnnnnnnnnnnnnnnnnnnnnnnnnnnnnnnnnnnnnnnnnnnnnnnnnnnnnnnnnnnnnnnnnnnnnnnnnnnnnnnnnnnnnnnnnnnnnnnnnnnnnnnnnnnnnnnnnnnnnnnnnnnnnnnnnnnnnnnnnnnnnnnnnnnnnnnnnnnnnnnnnnnnnnnnnnnnnnnnnnnnnnnnnnnnnnnnnnnnnnnnnnnnnnnnnnnnnnnnnnnnnnnnnnnnnnnnnnnnnnnnnnnnnnnnnnnnnnnnnnnnnnnnnnnnnnnnnnnnnnnnnnnnnnnnnnnnnnnnnnnnnnnnnnnnnnnnnnnnnnnnnnnnnnnnnnnnnnnnnnnnnnnnnnnnnnnnnnnnnnnnnnnnnnnnnnnnnnnnnnnnnnnnnnnnnnnnnnnnnnnnnnnnnnnnnnnnnnnnnnnnnnnnnnnnnnnnnnnnnnnnnnnnnnnnnnnnnnnnnnnnnnnnnnnnnnnnnnnnnnnnnnnnnnnnnnnnnnnnnnnnnnnnnnnnnnnnnnnnnnnnnnnnnnnnnnnnnnnnnnnnnnnnnnnnnnnnnnnnnnnnnnnnnnnnnnnnnnnnnnnnnnnnnnnnnnnnnnnnnnnnnnnnnnnnnnnnnnnnnnnnnnnnnnnnnnnnnnnnnnnnnnnnnnnnnnnnnnnnnnnnnnnnnnnnnnnnnnnnnnnnnnnnnnnnnccctttgtccaggagaacctgctgatgtacaccaagctgttcgtgggcttcctgaaccacgtgctccacacagacctggtcagccccaagcacgtgctcatggtgttctgaatggccagagtgtttgcccagtccaacctagccaagatgatccaga

SEQ ID NO: 24127 - DNA, 742 bp, Macaca Mulatta
tcttcccatcaggctctcagctcggcctgagtgttgaggccccagtggctgctctgggggcctcctgagtttctcatccgtgcccctccctccctggcccaggtgaaggtgtggttccagaaccggaggacaaagtacaaacggcagaagctggaggaggaagggcctgagtccgagcagaagaagaagggctcccatcacatcaaccggtggcgcatcgccacgaagcaggccaatggggaggacatcgatgtcacctccaatgactagggtgggccaccacaaacccacgagggcagagtgctgcttgctgctggccaggcccctgcgtgggcccaagctggactctggccactccctggccaggcttcggggaggcctggagtcatggccccacagggcttgaagtccggggctgccattgacagagggactagcaatgggctggctgaggcctgggaccacttggccttctcctcggagagcctgcctgcctgggcgggcccgcccgccaccgcagcctcccagctgctctccgtgtctccaatctcccttttgttttgatgcgtttctgttttaatttattttccaggcaccactgtagtttagtgatccccagtgtctcccttccctatgggaataataaaagtctctctcttaatgacacgggcatccagctccagccccagagcctggggtggtagaggccggctctgagggccagtgggggctggtagagcaa

SEQ ID NO: 24128 - DNA, 1978 bp, Macaca Mulatta
cttctctttctctttagctcagcttattccaggggtgtgtttcgtcgagacacacacaagagtgaggttgctcatcggtttaaagatttgggagaagaacatttcaaaggcttggtgctggttgctttttctcagtatcttcagcagtgtccatttgaagagcatgtaaaattagtgaatgaagtaactgaatttgcaaaaacatgtgttgctgatgagtcagctgaaaattgtgacaaatcacttcatactctttttggagacaaattatgcacagtcgcaactcttcgtgaaacctatggtgaaatggctgactgctgtgcaaaacaagaacctgagagaaatgaatgcttcctgcaacacaaagatgacaacccgaacctccccccattggtgagaccagaggttgatgtgatgtgcactgcttttcatgataatgaagcgacatttttgaaaaaatacttatatgaagttgccagaagacatccttacttttatgccccagaactccttttctttgctgcaaggtataaagctgcttttgcagaatgttgtcaagctgctgataaagctgcctgcctcttaccaaagcttgatgaacttcgggatgaagggaaggcttcatctgccaaacagagactcaagtgtgccagtctccaaaaattcggagacagagctttcaaagcatgggcagtagctcgcttgagccagaaatttcccaaagctgagtttgcagaagtttccaagttagtgacagatcttaccaaagtccacacggaatgctgccatggagatctgcttgaatgtgctgatgacagggcggaccttgccaagtatatgtgtgaaaatcaagattcaatctccagtaaactgaaggaatgctgtgataaacctctgttggaaaaatcccactgccttgccgaagtggaaaatgatgagatgcctgctgacttgccttcattagctgctgattatgttgagagtaaggatgtttgcaaaaactatgctgaggcaaaggatgtcttcctgggcatgtttttgtatgaatatgcaagaaggcatcctgattactctgtcatgctgctgctgagacttgccaaggcatacgaagccactctagagaagtgctgtgccgctgcagatcctcatgaatgctatgccaaagtgtttgatgaatttcaacctcttgtggaagagcctcagaatttagtcaaacaaaattgtgaactttttgagcagcttggagaatacaaattccagaatgcgctattagttcgttacaccaagaaagtaccccaagtgtcaactccaactcttgtagaggtctcaagaaacctaggaaaagtgggtgccaaatgttgtaaacttcctgaagcaaaaagaatgccctgtgcagaagactatctgtccgtggtcctgaaccggttatgtgtgttgcatgagaaaacgccagtaagcgagaaagtcaccaaatgctgcacggaatccttggtgaacaggcgaccatgcttttctgctctggaactcgatgaagcatatgttcccaaagcgtttaatgctgaaacattcaccttccatgcagatatgtgcacactttctgagaaggagaaacaagtcaagaaacaaactgcacttgttgagctcgtgaaacacaagcctaaggcaacaaaagagcaactgaaaggtgttatggataattttgcagcttttgtagagaagtgctgcaaggccgatgataaggaggcctgctttgccgaggagggtccaaaatttgttgctgcaagtcaagctgccttagcctaaaaacatcacaattaagaacatctcagcctaccatgagaacaagagaaataaaatgaagatcaaaagcttattcatctgtttttctttttcattggtataaagccaacaccctgtctaaaaaactataaatttctttaatcattttgcctcttttctctgtgcttcaattaataaa

SEQ ID NO: 24129 - DNA, 811 bp, Macaca Mulatta
  misc_feature (1)...(811): n = A,T,C or G
ggcctgaatgttgacatgccagtgggtgtgactccttcattcttccttctcccttccctttggacagtgttacagtgaacacttagcatcctgtttttggttgatagttaagcaaactgacattacggaaagtgccttagacactacagtactaagacaatgttgaatatatcattcgcctctataacaatttaatgtattcagttttgactgtgcttcatatcatgtacctctctagtcaaagtggtattacaaacattcagtgacaatgaatcagtgttaattctaaatccttgatcctctgcaatgtgcttgaaaacacaaaccttttgggttaaaagctttaacatctgttaggaagaatttgtcctgtgggtttggaatcttggatttccccctttatgaattgtactggctgttgaccaccagacacctgaccgcaaatatcttttcttgtattcccatatttctagacaatgatttttgtaagacaataaatttattcattatagannaaaannnnnnnnnnnnnnnnnnnnnnnnnnnnnnnnnnnnnnnnnnnnnnnnnnnnnnnnnnnnnnnnnnnnnnnnnnnnnnnnnnnnnnnnnnnnnnnnnnnnnnnnnnnnnnnnnnnnnnnnnnnnntttcnnnnnnnnnnnnnnnnnnnnnnnnnnnnnnnnnnnnnnnnnnnnnnnnnnnnnnnnnnnnnnnnnnnnnnnnnnnnnnnnnnntggtttttttccaaagaaaacctcgggaaaaaaaaaatggcgttggatttnnnnnnnnnnnnnnnnnnnnnnnnncccgg

SEQ ID NO: 24130 - DNA, 1860 bp, Macaca Mulatta
  misc_feature (1)...(1860): n = A,T,C or G
ggcagtgctgctctggccgggagctggtggatgggatcttggccctgggacttggggttcattcccggagccaagttgtgggaatctgccaggtgctgctggatgaaggtgccctctgccatnnnnnnnnnnnnnnnnnnnnnnnnnnnnnnnnnnnnnnnnnnnnnnnnnnnnnnnnnnnnnnnnnnnnnnnnnnnnnnnnnnnnnnnnnnnnnnnnnnnnnnnnnnnnnnnnnnnnnnnnnnnnnnnnnnnnnnnnnnnnnnnnnnnnnnnnnnnnnnnnnnnnnnnnnnnnnnnnnnnnnnnnnnnnnnnnnnnnnnnnnnnnnnnnnnnnnnnnnnnnnnnnnnnnnnnnnnnnnnnnnnnnnnnnnnnnnnnnnnnnnnnnnnnnnnnnnnnnnnnnnnnnnnnnnnnnnnnnnnnnnnnnnnnnnnnnnnnnnnnnnnnnnnnnnnnnnnnnnnnnnnnnnnnnnnnnnnnnnnnnnnnnnnnnnnnnnnnnnnnnnnnnnnnnnnnnnnnnnnnnnnnnnnnnnnnnnnnnnnnnnnnnnnnnnnnnnnnnnnnnnnnnnnnnnnnnnnnnnnnnnnnnnnnnnnnnnnnnnnnnnnnnnnnnnnnnnnnnnnnnnnnnnnnnnnnnnnnnnnnnnnnnnnnnnnnnnnnnnnnnnnnnnnnnnnnnnnnnnnnnnnnnnnnnnnnnnnnnnnnnnnnnnnnnnnnnnnnnnnnnnnnnnnnnnnnnnnnnnnnnnnnnnnnnnnnnnnnnnnnnnnnnnnnnnnnnnnnnnnnnnnnnnnnnnnnnnnnnnnnnnnnnnnnnnnnnnnnnnnnnnnnnnnnnnnnnnnnnnnnnnnnnnnnnnnnnnnnnnnnnnnnnnnnnnnnnnnnnnnnnnnnnnnnnnnnnnnnnnnnnnnnnnnnnnnnnnnnnnnnnnnnnnnnnnnnnnnnnnnnnnnnnnnnnnnnnnnnnnnnnnnnnnnnnnnnnnnnnnnnnnnnnnnnnnnnnnnnnnnnnnnnnnnnnnnnnnnnnnnnnnnnnnnnnnnnnnnnnnnnnnnnnnnnnnnnnnnnnnnnnnnnnnnnnnnnnnnnnnnnnnnnnnnnnnnnnnnnnnnnnnnnnnnnnnnnnnnnnnnnnnnnnnnnnnnnnnnnnnnnnnnnnnnnnnnnnnnnnnnnnnnnnnnnnnnnnnnnnnnnnnnnnnnnnnnnnnnnnnnnnnnnnnnnnnnnnnnnnnnnnnnnnggcccggaacttgcctgtttggctccccaaccaggacgagccccttcctggcagcagctgtgccatccgagttggggataaagnnnnnnnnnnnnnnnnnnnnnnnnnnnnnnnnnnnnnnnnnnnnnnnnnnnnnnnnnnnnnnnnnnnnnnnnnnnnnnnnnnnnnnnnnnnnnnnnnnnnnnnnnnnnnnnnnnnnnnnnnnnnnnnnnnnnnnnnnnnnnnnnnngatgccattggcctgcagccagatgcccgtggtgtggccacatctctggggctcaatgagcggctctttgttgtcaacccacaggaagtgcatgagctnnnnnnnnnnnnnnnnnnnnnnnnnnnnnnnnnnnnnnnnnnnnnnnnnnnnnnnnnnnnnnnnnnnnnnnnnnnnnnnnnnnnnnnnnnnnnnnnnnnnnnnnnnnnnnnnnnnnnnnnnnccaggtggagctaatttactatgtgctgggcccccagcatctgcgggatgtcaccaccgccaacctggagcgcttcatgcgccgcttcaacgagctgcagtactgggtggccaccgagctgtgtctctgcccggtgcccggcccccgggcccagctgctcaggaagttcattaagctggcggccc

SEQ ID NO: 24131 - DNA, 116 bp, Macaca Mulatta
agagcaataaaacattgttggttccaacaccacgactgagaacggggttgtttaataagatcacaccaccccctggggcaactaaagacatcttgagaaaatgtgccacctctcag

SEQ ID NO: 24132 - DNA, 701 bp, Macaca Mulatta
cttggctgggccacatctgtcacaccgctgtggcctgtgccatcataatcagccccaactatataaccaggggctgccagggcctctgtaaagctaggcctgctgggagaggacgaggaggaggccctgcccctccaaacgtggcctcctatggacaccaagactcacagccttcctatcacccacacccagctccacagcaactctcggccccaaagccgcagccagtgcacctgcacccaccactgccagaccttcagccagagttgcagacagagccagcgtggcagccggagccggagttccagccagagcccggctacccaccagaacccaaccggagcccacagctcatccggctgccagagccagagtcccaacgccagcccaccaccaaagcgccacaataagagcatgaactcccgccactctcccacgcggcccaccatcgtgcacagcagctgccccaagaacagaaagaacttggaaggcaagctgaacaagaaaaaaatggccaagaggatccagcaggtgtacaaaaccaagaagcggagctcaggtatcctttaaggaggtgggaagggccacagagcccacagatgatggggagcagaccttgggggcagtgagatgaagaatgcagccaggtcacagaggaaccacaggcaagggtgaagagggagaagagaaacaatgacagt

SEQ ID NO: 24133 - DNA, 581 bp, Macaca Mulatta
tgctccagggctttaaatgagaagtataattttctaagttaatagagatgaagaatgggtgactattatgatgaaccataactaaatgtcttattaaagcaactcagtgtctagccctaaattaaccaggtaaaaactgttaacactaacctgaagtttgtgaataattgttctttaacttattgagatgttgcaagaaatgcacatcgagggtggactgggagctatgaaatgactgaattcctccttgcagtgtttgccttcaagattgtataggtgttctctcctcttcttcccccagtccccattacttatttgcacacttgttttaactgacttcctgttttgatatttatcaccaagaacataaactcatcaatatgaattgtcttgatgtatactcaccactgtctttgatttatgttcctaaatttttttagatggggtgtattgtgcttggcagaattcgtttttggcttaatttttacttcctttcccagcttgcttgagtcttccttaacctggttttctcaacaccaatgatgacccagagaaaatgcctgcatttggcctttgcctag

SEQ ID NO: 24134 - DNA, 784 bp, Macaca Mulatta
  misc_feature (1)...(784): n = A,T,C or G
ggaacgagcaatagcagagaatgccagaaggtaatcattcagatacacttgggaccaagagacagtgaaaaatagatgaactaagagaaaaagaatctgatggtctttgtaactgattctggacatatgcatcattgatgttgcagtgttaaaactacaagagctagaaaactgaagatgtcgtctgcttacagaagcgctgaaagactaggatgtgatttattaacgaccaacttctgttattgtgtgttaagtttttcatctgtgcatcaaatcacaaagaataaatagagcttttttctttctcagtcccttgggcacagcaggtcctgaacaccctgctctacaatgttgcatcaagagttcaaacaacaaaataaaaaatattaagaggaaatccccatcctgtgacttgagtcccttaagtctacaggggctggagacctctttttgctaataggaaaatcacatgactacaaaatggggagaaaactgtttgcctgtggtagacacctgcacgcataggattgaagacagtacaggctcctgtacagaaaagcgtctctcacacctgaactgcatactgagcgggcaagttggttgtaagttcagtaaaaccctctgatgatgcanannannaaaanannnannnnnaaaaaaagtattaagtttcacaaagctgttttgtactcaaaatatatttttcctcagttttccagatccctctggctaattttaaattgaagtggaaaaagtctttggaagctggaaaagggtttccaat

SEQ ID NO: 24135 - DNA, 811 bp, Macaca Mulatta
ggtaacttctatcagagaaatgacacaagcaccatatctggaaatcaagaagcagatggataaacaggacccccttgctcatcccttactgcaatgggttatatcaagtaatagatcacatattgtgaaactgccagttaacaggcaattgaagtttatgcatactccacatcagttcctccttctcagcagtccaccagccaaagaatccaattttagagctgctaaaaaactctttggaagcacctttgcatttcatggctcacacattgaaaactggcactccatcctgaggaatggtctggttgttgcttctaatacacgactgcagctccatggtgcaatgtatggaagtggaatctatcttagtccaatgtccagcatatcatttggttactcagggatgaacaagaaacagaaggtgtcagccaaggacgagccagcttcaagcagtaaaagcagcaatgcatcacagtcacagaaaaaaggacagcaatcccaattcctgcaaagccgtaacttaaaatgcatagccttatgtgaagtgatcacctcacccgacctgcacaaacatggagagatatgggttgtccccaatactgaccatgtctgcacacgattctttttcgtctatgaagacggccaagtgggagaatgcaaatattaatacacaagaaggaggcatttacaaagagatccctccgaagtaatgggtaatcaaactggctactgggttaaaaaggacccaccacttttaattaaccatggaaatttggaaaagcccttccccttcgcgggttttcaaaaagct

SEQ ID NO: 24136 - DNA, 797 bp, Macaca Mulatta
  misc_feature (1)...(797): n = A,T,C or G
gggttggccaggatagtctccatctcttgacctcgtgatccacccgccttgacctcccaaagtgttgggattacaggcgtaagctaccgcacccgcctggtaaatgcatttcaatacaaaatttttgtagaacagctatctctcttctcagttctactgattgccagaaaattgacagaagttttagtagagtcctcaggacatggaaaacccaagggatatattttatattccagttttttctcctcttttggtataatagaacagtgtgtatgtgtatgtatccttacatacacacagctttacacacacatctctatcaatatctatatgttattaacaaaagaaaaaacccaaagtgtctgagcccaagttactttgtaaagctgtctcttaatattttaaacttgtataattaaaaaaggaaatttttacttctatacttaacatttgcactctccatttcccagagctgattgcttcctatgattgccagatgtatctaaagacctgcattaactttctgtgaggtttaaggaacaggcttttagggctgtagatagtgctttctcttcaagtttcagtcataggagaggctgctgtagaggtcttgagaatgctctgaaatcattctgggaatacactaaatctccccatatgaaactaggggactgtttttcattgcttggaatgtccaggtgattaaacttggttccttatttggggtcanagaatataaactttagccccaaaaaggctttaaataatttggatgggccttaaaaacaaaacggaac

SEQ ID NO: 24137 - DNA, 3905 bp, Macaca Mulatta
  misc_feature (1)...(3905): n = A,T,C or G
ttctctcaggaaccttgcccaaggtgcgctgaaggaactgaagcagaaagtcacgtccaaaattgactatggcaacaannnnnnnnnnnnnnnnnnnnnnnnnnnnnnnnnnnnnnnnnnnnnnnnnnnnnnnnnnnnnnnnnnnnnnnnnnnnnnnnnnnnnnnnnnnnnnnnnnnnnnnnnnnnnnnnnnnnnnnnnnnnnnnnnnnnnnnnnnnnnnnnnnnnnnnnnnnnnnnnnnnnnnnnnnnnnnnnnnnnnnnnnnnnnnnnnnnnnnnnnnnnnnnnnnnnnnnnnnnnnnnnnnnnnnnnnnnnnnnnnnnnnnnnnnnnnnnnnnnnnnnnnnnnnnnnnnnnnnnnnnnnnnnnnnnnnnnnnnnnnnnnnnnnnnnnnnnnnnnnnnnnnnnnnnnnnnnnnnnnnnnnnnnnnnnnnnnnnnnnnnnnnnnnnnnnnnnnnnnnnnnnnnnnnnnnnnnnnnnnnnnnnnnnnnnnnnnnnnnnnnnnnnnnnnnnnnnnnnnnnnnnnnnnnnnnnnnnnnnnnnnnnnnnnnnnnnnnnnnnnnnnnnnnnnnnnnnnnnnnnnnnnnnnnnnnnnnnnnnnnnnnnnnnnnnnnnnnnnnnnnnnnnnnnnnnnnnnnnnnnnnnnnnnnnnnnnnnnnnnnnnnngttacagctgagaatgacttcctacacagcctgctgggcaaagtcatagcctccaagggggacagtggcgggcaaggnnnnnnnnnnnnnnnnnnnnnnnnnnnnnnnnnnnnnnnnnnnnnnnnnnnnnnnnnnnnnnnnnnnnnnnnnnnnnnnnnnnnnnnnnnnnnnnnnnnnnnnnnnnnnnnnnnnnnnnnnncaggggatgtcaggaacgacatttacattactctctacaaaggtgactttgacaagtacaacaagaccacacagaggaatgtggaagtcatcatgtgtgtgtgcgcggaggacggcaaaacgctgcnnnnnnnnnnnnnnnnnnnnnnnnnnnnnnnnnnnnnnnnnnnnnnnnnnnnnnnnnnnnnnnnnnnnnnnnnnnnnnnnnnnnnnnnnnnnnnnnnnnnnnnnnnnnnnnnnnnnnnnnnnnnnnnnnnnnnnnnnnnnnnnnnnnnnnnnnnnnnnnnnnnnnnnnnnnnnnnnnnnnnnnnnnnnnnnnnnnnnnnnnnnnnnnnnnnnnnnnnnnnnnnnnnnnnnnnnnnnnnnnnnnnnnnnnnnnnnnnnnnnnnnnnnnnnnnnnnnnnnnnnnnnnnnnnnnnnnnnnnnnnnnnnnnnnnnnnnnnnnnnnnnnnnnnnnnnnnnnnnnnnnnnnnnnnnnnnnnnnnnnnnnnnnnnnnnnnnnnnnnnnnnnnnnnnnnnnnnnnnnnnnnnnnnnnnnnnnnnnnnnnnnnnnnnnnnnnnnnnnnnnnnnnnnnnnnnnnnnnnnnnnnnnnnnnnnnnnnnnnnnnnnnnnnnnnnnnnnnnnnnnnnnnnnnnnnnnnnnnnnnnnnnnnnnnnnnnnnnnnnnnnnnnnnnnnnnnnnnnnnnnnnnnnnnnnnnnnnnnnnnnnnnnnnnnnnnnnnnnnnnnnnnnnnnnnnnnnnnnnnnnnnnnnnnnnnnnnnnnnnnnnnnnnnnnnnnnnnnnnnnnnnnnnnnnnnnnnnnnnnnnnnnnnnnnnnnnnnnnnnnnnnnnnnnnnnnnnnnnnnnnnnnnnnnnnnnnnnnnnnnnnnnnnnnnnnnnnnnnnnnnnnnnnnnnnnnnnnnnnnnnnnnnnnnnnnnnnnnnnnnnnnnnnnnnnnnnnnnnnnnnnnnnnnnnnnnnnnnnnnnnnnnnnnnnnnnnnnnnnnnnnnnnnnnnnnnnnnnnnnnnnnnnnnnnnnnnnnnnnnnnnnnnnnnnnnnnnnnnnnnnnnnnnnnnnnnnnnnnnnnnnnnnnnnnnnnnnnnnnnnnnnnnnnnnnnnnnnnnnnnnnnnnnnnnnnnnnnnnnnnnnnnnnnnnnnnnnnnnnnnnnnnnnnnnnnnnnnnnnnnnnnnnnnnnnnnnnnnnnnnnnnnnnnnnnnnnnnnnnnnnnnnnnnnnnnnnnnnnnnnnnnnnnnnnnnnnnnnnnnnnnnnnnnnnnnnnnnnnnnnnnnnnnnnnnnnnnnnnnnnnnnnnnnnnnnnnnnnnnnnnnnnnnnnnnnnnnnnnnnnnnnnnnnnnnnnnnnnnnnnnnnnnnnnnnnnnnnnnnnnnnnnnnnnnnnnnnnnnnnnnnnnnnnnnnnnnnnnnnnnnnnnnnnnnnnnnnnnnnnnnnnnnnnnnnnnnnnnnnnnnnnnnnnnnnnnnnnnnnnnnnnnnnnnnnnnnnnnnnnnnnnnnnnnnnnnnnnnnnnnnnnnnnnnnnnnnnnnnnnnnnnnnnnnnnnnnnnnnnnnnnnnnnnnnnnnnnnnnnnnnnnnnnnnnnnnnnnnnnnnnnnnnnnnnnnnnnnnnnnnnnnnnnnnnnnnnnnnnnnnnnnnnnnnnnnnnnnnnnnnnnnnnnnnnnnnnnnnnnnnnnnnnnnnnnnnnnnnnnnnnnnnnnnnnnnnnnnnnnnnnnnnnnnnnnnnnnnnnnnnnnnnnnnnnnnnnnnnnnnnnnnnnnnnnnnnnnnnnnnnnnnnnnnnnnnnnnnnnnnnnnnnnnnnnnnnnnnnnnnnnnnnnnnnnnnnnnnnnnnnnnnnnnnnnnnnnnnnnnnnnnnnnnnnnnnnnnnnnnnnnnnnnnnnnnnnnnnnnnnnnnnnnnnnnnnnnnnnnnnnnnnnnnnnnnnnnnnnnnnnnnnnnnnnnnnnnnnnnnnnnnnnnnnnnnnnnnnnnnnnnnnnnnnnnnnnnnnnnnnnnnnnnnnnnnnnnnnnnnnnnnnnnnnnnnnnnnnnnnnnnnnnnnnnnnnnnnnnnnnnnnnnnnnnnnnnnnnnnnnnnnnnnnnnnnnnnnnnnnnnnnnnnnnnnnnnnnnnnnnnnnnnnnnnnnnnnnnnnnnnnnnnnnnnnnnnnnnnnnnnnnnnnnnnnnnnnnnnnnnnnnnnnnnnnnnnnnnnnnnnnnnnnnnnnnnnnnnnnnnnnnnnnnnnnnnnnnnnnnnnnnnnnnnnnnnnnnnnnnnnnnnnnnnnnnnnnnnnnnnnnnnnnnnnnnnnnnnnnnnnnnnnnnnnnnnnnnnnnnnnnnnnnnnnnnnnnnnnnnnnnnnnnnnnnnnnnnnnnnnnnnnnnnnnnnnnnnnnnnnnnnnnnnnnnnnnnnnnnnnnnnnnnnnnnnnnnnnnnnnnnaggtacctgtacaaactccgcgatcttcacctggactgtgacaattacacagaggctgcctacacgctccttctccacacttggcttctcaannnnnnnnnnnnnnnnnnnnnnnnnnnnnnnnnnnnnnnnnnnnnnnnnnnnnnnnnnnnnnnnnnnnnnnnnnnnnnnnnnnnnnnnnnnnnnnnnnnnnnnnnnnnnnnnnnnnnnnnnnnnnnnnnnnnnnnnnnnnnnnnnnnnnnnnnnnnnnnnnnnnnnnnnnnnnnnnnnnnnnnnnnnnnnnnnnnnnnnnnnnnnnnnnnnnnnnnnnnnnnnnnnnnnnnnnnnnnnnnnnnnnnnnnnnnnnnnnnnnnnnnnnnnnnnnnnnnnnnnnnnnnnnnnnnnnnnnnnnnnnnnnnnnntgcagaacaaagtgttcatctaccgcggaaaggagtatgagcgaagagaagatttccagatgcagctgatgacccagttccccaatgcagagaagatgaacaccacctctgccccgggagatgatgtgaagaatgctccaggccagtgtatccnnnatccagtgcttcactgtccagcctgtcttggatgaacaccccaggttcaagaataagccagtgcctgaccagattataa

SEQ ID NO: 24138 - DNA, 360 bp, Macaca Mulatta
ccctgtgctcattctctgtctcctccacagggccatccggactctccacatcatccaacatcctcctggcctctgttgggtcagtgttgggggcctacttggggaagtcaccttcttctctcccagctgaacccgaggctgaaggaaatgaggcaacagaaaatgtaccccaagatgaacctccaaaacctccactcaagtcagagaaacatgaggaataaaggtcacatgcagatgcatctccctgtctttgtttcttgcagctctggttggagttctgagctagaggtttccagttctccccctctcccagcctgccttgtcatggaggggcagagggaggtggttggccatgcagag

SEQ ID NO: 24139 - DNA, 1007 bp, Macaca Mulatta
  misc_feature (1)...(1007): n = A,T,C or G
actgaagcaaagaaattagcttctgcctctgcagagctannnnnnnnnnnnnnnnnnnnnnnnnnnnnnnnnnnnnnnnnnnnnnnnnnnnnnnnnnnnnnnnnnnnnnnnnnnnnnnnnnnnnnnnnnnnnnnnnnnnnnnnnnnnnnnnnnnnnnnnnnnnnnnnnnnnnnnnnnnnnnnnnnnnnnnnnnnnnnnnnnnnnnnnnnnnnnnnnnnnnnnnnnnnnnnnnnnnnnnnnnnnnnnnnnnnnnnnnnnnnnnnnnnnnnnnnnnnnnnnnnnnnnnnnnnnnnnnnnnnnnnnnnnnnnnnnnnnnnnnnnnnnnnnnnnnnnnnnnnnnnnnnnnnnnnnnnnnnnnnnnnnnnnnnnnnnnnnnnnnnnnnnnnnnnnnnnnnnnnnnnnnnnnnnnnnnnnnnnnnnnnnnnnnnnnnnnnnnnnnnnnnnnnnnnnnnnnnnnnnnnnnnnnnnnnnnnnnnnnnnnnnnnnnnnnnnnnnnnnnnnnnnnnnnnnnnnnnnnnnnnnnnnnnnnnnnnnnnnnnnnnnnnnnnnnnnnnnnnnnnnnnnnnnnnnnnnnnnnnnnnnnnnnnnnnnnnnnnnnnnnnnnnnnnnnnnnnnnnnnnnnnnnnnnnnnnnnnnnnnnnnnnnnnnnnnnnnnnnnnnnnnnnnnnnnnnnnnnnnnnnnnnnnnnnnnnnnnnnnnnnnnnnnnnnnnnnnnnnnnnnnnnnnnnnnnnnnnnnnnnnnnnnnnnnnnnnnnnnnnnnnnnnnnnnnnnnnnnnnnnnnnnnnnnnnnnnnnnnnnttgaacatgagaaatattgtgaccaatatcgctttgctatggagcagcgaaagatcttgatatcaaattggaataaaaataagaaagactttacacagaaggctgtgctgacactcattgaggcttgtgcagctcatgaaatggagagcacattggctaaggacaagaaaaagcaacaggaattgtgtgctgatctgaaagccaaggt

SEQ ID NO: 24140 - DNA, 258 bp, Macaca Mulatta
  misc_feature (1)...(258): n = A,T,C or G
agaatgcaaagtatggcgaaatccactaaatttatttaggggtgctgaatataatcggtanggtatacttgggtgacaggacgagagcctcttacttactatgacatgaatctctctgcccaggaccaccagacgttctttacttgtgactcggaccatctgcgtcccgcagatgcaantaatgcagaaagcctggagagagagaaacccccaagctaggatttctgcagctcatgaagcgttggagataaatgagtn

SEQ ID NO: 24141 - DNA, 264 bp, Macaca Mulatta
cagaatgcaagattcaccaggaagatgatttatttctgtcatctggataggttgtttccatctgggttatgcaaatctgtcagacaacgtggaaaaaaaggagggaggatgcttcttgtagcagtaggaattcagctataggaaagtcagctgtaagctaatgtggcatcttatttgctttgcttacatttctccattaagaagtatccagggaaagattgctaagggccacatttttggaaaactaggaagattttcattaga

SEQ ID NO: 24142 - DNA, 1002 bp, Macaca Mulatta
  misc_feature (1)...(1002): n = A,T,C or G
aggattactacttcttcctggcgagcaactggcgaagcgcgggcggcgtgttcatagaaatggacagctatgaaaagatctacaacctcaagtccgcgtacgagctgccggagcgcattttcctggacaagggcactgagtacagcttcgccatcttcctgtcggcgcagagccgctcgttccggacgatggcagacctcggtctgcgcggggccagagtcactcccgaagggcagggcgagggctgccggaatctgggagcctggggggaggggacaccatccgaagggcggggcctnnnnnnnnnnnnnnnnnnnnnnnnnnnnnnnnnnnnnnnnnnnnnnnnnnnnnnnnnnnnnnnnnnnnnnnnnnnnnnnnnnnnnnnnnnnnnnnnnnnnnnnnnnnnnnnnnnnnnnnnnnnnnnnnnnnnnnnnnnnnnnnnnnnnnnnnnnnnnnnnnnnnnnnnnnnnnnnnnnnnnnnnnnnnnnnnnnnnnnnnnnnnnnnnnnnnnnnnnnnnnnnnnnnnnnnnnnnnnnnnnnnnnnnnnnnnnnnnnnnnnnnnnnnnnnnnnnnnnnnnnnnnnnnnnnnnnnnnnnnnnnnnnnnnnnnnnnnnnnnnnnnnnnnnnnnnnnnnnnnnnnnnnnnnnnnnnnnnnnnnnnnnnnnnnnnnnnnnnnnnnnnnnnnnnnnnnnnnnnnnnnnnnnnnnnnnnnnnnnnnnnnnnnnnnnnnnnnnnnnnnnnnnnnnnnnnnnnnnnnnnnnnnnnnnnnnnnnnnnnnnnnnnnnnnnnnnnnnnnnnnnnnnnnnnnnnnnnnnnnnnnnnnnnnnnnnnnnnnnnnnnnnnnnnnnnnnnnnnnnnnnnnnnnnnnnnnnnnnnnnnnnnnnnnnnnnnnnnnnnnagaggagtggacacgagcacctactgcaactaccagctcaccttcctgctgcacatccacgggctgccactcagtcccaagcgggcccttttcatcctcatggt

SEQ ID NO: 24143 - DNA, 515 bp, Macaca Mulatta
gaaggaggaggagctggaacggaagcccagcctgtcactgacgttgaccctgggcgaggctgaccacaaccactgtgggtacccgcactcctcctgaggccggaccccgtccaggcagggagcggctgtgagtccagctgaggcccacccgggtggtccctctggccctggtcaggcactgagggctctggatgggctccaggaaccctggggtgatggcagcagtgagctggctctgctgcccccgccctgcactggaccaggggtctgggggtgccgggtagcctcagcatttggagggggacctgttcccatcggtccccaaatatccccttctgtttatgtggttaaggaagggaccgagagatcagatagttgctgttttgtaaaatgtaatgtacatgtggtttttagtaaaataggacacctgtttgacaagtggtctcagcgcctctgttgcttatggccattctgggactgcgctgctcacatcagagggctcccctgctgggctg

SEQ ID NO: 24144 - DNA, 453 bp, Macaca Mulatta
  misc_feature (1)...(453): n = A,T,C or G
ggaatatttggagttttcctggtcttattggatgtggctctnnnnnnnnnnnnnnnnnnnnnnnnnnnnnnnnnnnnnnnnnnnnnnnnnnnnnnnnnnnnnnnnnnnnnnnnnnnnnnnnnnnnnnnnnnnnnnnnnnnnnnnnnnnnnnnnnnnnnnnnnnnnnnnnnnnnnnnnnnnnnnnnnnnnnnnnnnnnnnnnnnnnnnnnnnnnnnnnnnnnnnnnnnnnnnnnnnnnnnnnnnnnnnnnnnnnnnnnnnnnnnnnnnnnnnnnnnnnnnnnnagatggacacgtttatttcgacttctacgacttatcattctgataagagtttttcatctggctcatctaaaaagacaacttggaaagctgataagaaggctggtaagtngtttcaggaaacaaaaggcgatacaaaagggatggatttgacctagacctcacttatattac

SEQ ID NO: 24145 - DNA, 262 bp, Macaca Mulatta
gaccctcactctctttgctatgacatcaccatcatccctaagttcagacctggaccacagtggtgtgcggttcaaggccaggtggataaaaagacttttcttcactatgactgtggcaacaagacagtcacatccgtcagtcccctggggaagaaactaaatgtcacaaaggcctggaaagcacagaacccagtactgagagaggtggtggacatgctcacagagcaactgcttgacattcagctggagaattacacaccca

SEQ ID NO: 24146 - DNA, 190 bp, Macaca Mulatta
  misc_feature (1)...(190): n = A,T,C or G
nagatgtagtggagactgaggtgggcatggaagtatctgtcgatcaggagttctcgccggacctcaatgacaacacttctcaggcctacagggatttcaacaagaccttctggaatcannncagatgcagaagatttttgcaggcatgcggggcttcaacttcaagggtgtggagatcctgtccctgagg

SEQ ID NO: 24147 - DNA, 442 bp, Macaca Mulatta
  misc_feature (1)...(442): n = A,T,C or G
tgtggttgagagaggggctaaaggcgggtcccagcgctgccgcaccatggcggaccagctttatctggaaaatatagacgagttcgtcacggaccaaaacaagatcgtgangtgacatacaaatggctgagctatacactaggggttcatgttaaccaggccaaacagnnnnnnnnnnnnnnnnnnnnnnnnnnnnnnnnnnnnnnnnnnnnnnnnnnnnnnnnnnnnnnnnnnnnnnnnnnnnnnnnnnnnnnnnnnnnnnnnnnnnnnnnnnnnnnnnnnnnnnnnnnnnnnnnnnnnnnnnnnnnagcagtgaagtccaagctagctgtgactgccagcatccatgtgtacagcatccagaaagccatgctaaaggacagtgggcctctgttcaatactgactatgacatccttaaaagcaacttgcagaactgcagca

SEQ ID NO: 24148 - DNA, 1300 bp, Macaca Mulatta
  misc_feature (1)...(1300): n = A,T,C or G
agcttattccactaagctcaacaaatttcctgtatttaatattaatgatgacttgaatgatctgtgtaccagtgcagtaagcccaaatactaccaaagccacgcggtacgccttgaatgtgtggcgatattggtgcatgaccaacgggctcaaagaccacacagacatcaccaagnagatccctgcagtgaagttgaacgagctgcttgagaacttttatgtcaccgttaagaagagcgacggctcagacttcctggccacctcactccatgctattcgccgaggcctggaccgcatcctgaagaatgcaggtgtcggcttttccatcaccagcagcaccttcagctcctccaccaagaaactcaaggagaagctgtgggtgctgagtaaggcaggcatgtcgggcgcgcgttctcgcaacatcgtctacttctccctctctgacgaggaggagatgtggcaggcagggtgtctgggggatgacagccctatcactctcctgtccactgtggtcaagtacaacagccagtacctgaacatgcggacgctgcaggagcatgcagatctgatgtacggtgacatcgagctgctcaaagacccccaaaaccagccgtactttgcccggacagacagcgtcaagcgggagagtcggagcggctccaccagagtgtgtcacgggaaaatctaccatgagcattcccggggacacaaacagtgcccttactgcctcctctacaagtacatgtacatccaccggccgcccacccaaatggaggccaaatcccccttctacctgactgccaggaaggaggccacagacatgggcagcgtgtggtacgaggagcagagaatggggctgcgctctcttcggggaattgtcccaaacttagccaagaaggtcaagctggaaaactgtgagaacttcacctttgtctcgttcactcaggtctcccggaggcttggctcccacagctgctgccagtgagccctccctggggcccagccactgccctgtcacctgctcnnnnnngccagggctggagcagctggagctccgcggaggcaggggctgactgggtgtgacctccggtctggcagctctccccctggtgtggcccgctctccctttgtcttggggtttgctttttaaaatgaaactagatgagtctaaatcattcgaatggtttatccaaatgtgtgtcaactttgttagcttttagaatctaacacaatgtataattgctacatgcaagagtgaggaaattcattttctctagtgcctttctagcacaggttttct

SEQ ID NO: 24149 - DNA, 97 bp, Macaca Mulatta
gactgcgagaactacatcactctcctggagaggcggagtgaggggctgctggcctgtggcaccaatgcccggcaccccagctgctggaacctggtga

SEQ ID NO: 24150 - DNA, 437 bp, Macaca Mulatta
actgaaaacccccccagtgcctcactgagcccctgaccttcacccaacacggctaccacgctcaaatgggcctgattcaaactcccaggtacatccctgccaccagggagtgggatcagaaaacctccagaagtgaaactgatgagaaagtgacatttaatcacttcaaaactgaaacttcactggcaaggtcaaaaccataggccaagtctgacaattgagcactggtcagttccaggggtcaggctcggaacctgaaaatgcagatcctagctgctcctgtgtccctcggatgtggaggaaagaaaaacagcctaggtgtatgtgctggctgcggtgagagtcgaggtagaaagcctggaagttctgaaacgtgaggggatggatcacacacccagccttttctcactcaccaaagcaaaccttttcccccatct

SEQ ID NO: 24151 - DNA, 688 bp, Macaca Mulatta
  misc_feature (1)...(688): n = A,T,C or G
gttgtccgtggcagctcagtcctccagcagacccctgcatacatacaggtgcaaaccaacaaaatggcgatgctgtcctgcgaggctaaaatctccctcggtaacatgcgcatctactggctgagacagcgccaggccccgagcagtgacagtcaccacgagttcctggccctctgggactccacaaaagggactgtccatggtgaagaggtggcacaggagaagatagctgtgtttcgggatgcaagccggttcattctcaatctcacaagcgtgaagccggaagacagtggcatctacttctgcatgatcatcgggagccccgagctgaccttcggaaagggaactcagctgagtgtggnnnnnnnnnnnnnnnnnnnnnnnnnnnnnnnnnnnnnnnnnnnnnnnnnnnnnnnnnnnnnnnnnnnnnnnnnnnnnnnnnnnnnnnnnnnnnnnnnnnnnnnnnnnnnnnnnnnnnnnnnnnnnnnnnnnnnnnnnnnnnnnnnnnnnnnnnnnnnnnnnnnnnnnnnnnnnnnnnnnnnnnnnnnnnnnnnnnnnnnnnnnnnnnnnnnnnnnnngaaattcaatatcgtttgcctgaaaatacgtggtttcacaacttgctgttgttttcaggttttacaaatgagcagagaaaacggttttggtgtcctgctacaaaaagaca

SEQ ID NO: 24152 - DNA, 1499 bp, Macaca Mulatta
  misc_feature (1)...(1499): n = A,T,C or G
ggtgtgaagtctctcaacaaccagattgagacccttcttactcctgaaggctctagaaagaacccagctcgcacatgccgtgacttgagactcagccacccagagtggagcagcggttactactggattgaccctaaccaaggatgcactatggatgctatcaaagtatactgtgatttctctactggcgaaacctgtatccgggcccaacctgaaaacatcccagccaagaactggtataggagctctaaggacaagaaacacgtctggctaggagaaactatcaatgctggcagccagtttgaatacaatgtagaaggagtgacttccaaggaaatggctacccaacttgccttcatgcgcttgctggccaactatgcctctcagaacatcacctaccactgcaagaacagcattgcatacatggatgaggagactggcaacctgaaaaaggctgtcattctacagggctctaatgatgttgaacttgttgctgagggcaacagcaggttcacttacactgttctcgtagatggctgctctaaaaagacaaatgaatggggaaagacaatcattgaatacaaaacaaataagccatctcgcctgcccttccttgatattgcacctttggacatcggtggtgccaaccaggaattctttgtggacattggcccagtctgtttcaaataaatgaactcaacctaaattaaaaaaggaagaaattttggaaaaactttctctttgccatttcttcttcttctttttttaactgaaagctgaatccttccatttcttctgcacatctacttgcttaaattgtgggnnnnnnnnnnnnnnnnnnnttgatcagagcattgtgcaataaaatttcattaactccctcccccgctnnnnnnnnnnnnnnnnnnnnnnnnnnnaacactcttacacctgtttatggaaaatgtcaacctttgtaagataaccaaaataaaaatttggaaaataaaaaaccatgaacatttgccaccaccttgtgggcttttggaatatacttccacagaagggaaagttttaaaacacctaaactttccaaagggttttaaactatacctcaaaaacaactttttcccggggaagtgtggatcccaaatttggttcaggtggctggaacctaaggcataataatgcaaactggagggtccgctgtgcttttggtttttgttcccacggaatacaaaaagggtggctctacttcagtaagttactttcgcattaatacctttgaaagtaaaggtttcgaatggggggacctcaaaaagaaaatttctcacaaagaaaaaatcacccccatcggaacctagacaatctggatatagtgagggaggggggtgatcctcttctataaaaaaagcacttgacatcttacagcaatttccaaatattagttctccaattatttttacatctcacaaaattttatcaaaaagtctctgccgaaagaactactctctctcggc

SEQ ID NO: 24153 - DNA, 321 bp, Macaca Mulatta
agtgcacctatgatatgtgttttagaaatagctgttaaactttggtttgaatgaagaatgtctctcaattcacctatatttctcaaacgaagtgaagaaaataattcaaaatttgtggaaacaaaacagtcacaaactacttccatagcttcagaagatccccttcaaaacttatgtttagcatctcaagaagttcttcaaaaagctcagcaaagtgggagatcaaaatgtctcagatgtggtggttccagaatgttctactgctatacatgttatgttccagttgaaaatgtacctattgaacagattccacttgtgaag

SEQ ID NO: 24154 - DNA, 87 bp, Macaca Mulatta
tctgtcagaatggccaccatagtaccatccgtatcgtggcccggggcctgctggactctgctggtctgctgtctgctgaccccaggt

SEQ ID NO: 24155 - DNA, 192 bp, Macaca Mulatta
aggtgaccatggaggctggtggcctgcccttggagctgtggcgcatgatcttagcctacttgcaccttcccgacctgggccgctgcagcctggtatgcagggcctggtatgaactgatcctcagtctcgacaacgcccgctggcggcagctatgtctgggttgcaccgagtgacgccatcccaattggccca

SEQ ID NO: 24156 - DNA, 636 bp, Macaca Mulatta
actgatttttagagctgttgaactggttttcccatgggctgctatatcactgagtattatagtaagtagataattgttttaaagtaaacaaataccatcccatgtctgcctaaaaatgattcagataatagaggaactcttagaatttacggggatattcctcttcagaagctgcttgagagcctaagaattttccccaaattatgaacaagacagattgttttatttattgtaatcatatgagaaactaaactcttatttatttcctttttaggtatttacttggtgtttgcctttgagaaacagcagtgagcacaggcagtagtcccagaggggccatgttctgccctgcacggatgtgaacaactcatctcgatatatttgacatttctctgtctgttgattttaattctaaatgtgcaggatgctgccagaaactgcagtgcagaaattcagcatttgctgtctgtgacagatgaacttttgcatgtgtatataagaatgaattgggacctctgtctttaaaaatctatttttaggtaatgttctaagaattccatttgcctctatgatcttagctcatacaaatataatatgacttgttaaagcaactaaactctttcctcagtgctcaga

SEQ ID NO: 24157 - DNA, 2402 bp, Macaca Mulatta
  misc_feature (1)...(2402): n = A,T,C or G
atcctaaaaacagccctcccctcaaagagaaactgaagtccttcaaagctgcactgattgccctttacctccttgtgtttgcagttctcatccctctcattggaatagtggcagncagctcagcttctgaagtgggaaacgaagaattgctccattggttctactaatgcagacgatataactcaaagtctcacaggaaaaggaaatgacagtgaagcggaaacgagatttcaagaagtctttatggaacacatgagcaacatggagaagagaatccagcacatttcagacatggaagccaatctcatagatgcagagcatttccaaaacttcagcatgacaactgatcaaagatttaatgacattcttctccagctaagtaccttgttttcctcagtccagggacatgggaatacaatagatgaaatctccaagtccttaataagtttgaataccacactgcttgatttgcagctcaacatagaaaagctgaatggcaaaatccaagagaaaaccttcaaacaacaagaggnnnnnnnnnnnnnnnnnnnnnnnnnnnnnnnnnnnnnnnnnnnnnnnnnnnnnnnnnnnnnnnnnnnnnnnnnnnnnnnnnnnnnnnnnnnnnnnnnnnnnnnnnnnnnnnnnnnnnnnnnnnnnnnnnnnnnnnnnnnnnnnnnnnnnnnnnnnnnnnnnnnnnnnnnnnnnnnnnnnnnnnaaggtcctcctggacctccaggtgaaaaaggagatcgaggtccaactggagaaagtggtccacgaggatttccaggtccagtaggtnnnnnnnnnnnnnnnnnnnnnnnnnnnnnnnnnnnnnnnnnnnnnnnnnnnnnnnnnnnnnnnnnnnnnnnnnnnnnnnnnnnnnnnnnnnnnnnnnnnnnnnnnnnnnnnnnnnnnnnnnnnnnnnnnnnnnnnnnnnnnnnnnnnnnnnnnnnnnnnnnnnnnnnnnnnnnnnnnnnnnnnnnnnnnnnnnnnnnnnnnnnnnnnnnnnnnnnnnnnnnnnnnnnnnnnnnnnnnnnnnnnnnnnnnnnnnnnnnnnnnnnnnnnnnnnnnnnnnnnnnnnnnnnnnnnnnnnnnnnnnnnnnnnnnnnnnnnnnnnnnnnnnnnnnnnnnnnnnnnnnnnnnnnnnnnnnnnnnnnnnnnnnnnnnnnnnnnnnnnnnnnnnnnnnnnnnnnncaatgggggacaagaacctgttcacattctgaagatgctggagtcacttgcactttataatgcaccatattttcattcacaactatgaaatcgctgctcaaaaatgattttattaccttcttcctgtaaaatccatttaatgaatatttaagagattaagaatattgcccaaataatatttttaaatcacaggattaacatattggaaaaccttcatacttaccatttatatctatattaaacccattttactttctataggtttttaaatggaattttctaatataatgacttatatgttgaattgaacgtattgaagttatagctttccagattacaaaggccaagtgtaatagaaatgcataacaataattgactccaattcataatatgttcatcaggagattacaatttcttgctctttttgtctctgtaatctatttagttgattttaattactttctgaataatagaaggattcagaagatatcttttgtgcctagactgcaaaacctccaatccacacatattattttaaaagaaggatgttatccaactattaagatatctcagtgtgcaataacttgtgtagtagatatcaatgttaatgatatgtcttggccacgatggactagggagcttatttttcttgtcatgtattgacaactgtttaattgaatcatgaagtaaattgaaagcagaacatatgagaaaacttaccatcataatatttgtccagataattggtggatcaaaaatgccacttgttaacaggaagcttagtttgttatgtgttttaaattgaataattagcttgttacaattctaggacatggtggttaaaatgtaaagctcattactccattttaacaaacaaaatgcaaacatcttgagtgcagaagaaagagaaatttcagttttttggagtcttttatgaagtcagtcaacatttacaaccnnnnnnnnnnnnnnnnnnnnnnnnnnnnntctttagtcctaaagggacaataactcggagcatgccccaaaaagtagcttagcaactttttgttggtagtcaacccatccccagggccacagtgtagagtgtgaaaagctaccctgaaaacagtgattctactctgaaagtgactgtctgcagaaagaccaatagttgatattaaagcccaaagtgaattcaacctcagccctgaaaataacagaat

SEQ ID NO: 24158 - DNA, 500 bp, Macaca Mulatta
  misc_feature (1)...(500): n = A,T,C or G
accctccgagggctgaccctagctggggacaggtcccctggttttcaggcacaagatagtagcccagcctctagcaaccctaaacagctgggctgctgccctcctcctcctcctcagcccagagggtctcccaggaccccgagggccatccacagaagaagtgggcaaagttgcgggtcaggcctcggtcgaaggggttgccggggcgctggcggagataggcgatgcggtgtgaggagatgaattcccaggtggtggtgttgctggccaccaggtagaggtgtgaggcgaggagcaggctggccaccaacgagaggagggacagcagcaggaaggtggcgaacaggagcccactggatcgaagccacagtccccagggctggaagaataagaggcctgacctgcagggcaggggacaggggcctggtgctgggggagggcaggggagcccttccctcctttaaagggtccctgggngtcctggctctgtccngccctgt

SEQ ID NO: 24159 - DNA, 677 bp, Macaca Mulatta
caggaaaggcccttgtgacaggacgctggctgggctggtccttgctgtgggcctcactcccctctcccttatctgtaggcctgagggaagacatgctggaaaccctggttcccaaggcagagggtgaccgtgtgatggtcgtgctgggcccacaggctggaagggtgagtctcagacctggcagtagaggtttgtgggtcgttcagcgcctgtcccagggtctaggctggccttgttgattccacttcacctctgttccaggtgggacatttgctgagccgggacagagcacggagccgggctttggtgcaactgccaagagaagatcaggtggtggagcttcactacgatgccatctgccagtacatgggccctagtgacacagatgatgactgacccatgggactcctcccatcccccaggctggtaccagttctgtaccatatgagaaagttgccttcaagaaggtgggaagatcattgttccatcctctacttctggtgcagtcctgggacaaggacaagggaaagggatgggtgaaccagtagggaagctagaaacaaacccaaggtttaccaaaatttagggtataataaaaaccatttcaagtacttaatagaaagatgaaatcataagtggtatgatgagctgcgaatgaaagtgggaactgagttgac

SEQ ID NO: 24160 - DNA, 214 bp, Macaca Mulatta
  misc_feature (1)...(214): n = A,T,C or G
gttggtctcgaagcataggtcctctattcaaaagatctgngatattacaaagaaacaggatggacattttgatacaccaccacatttatttgctaaggtaannnnnaggtaaaagaagtagaccagagtggggaatggttcaaggaaggaatgaaattggaagctatagacccattaaatctttctacaatatgtgtcgcaaccattagaaagg

SEQ ID NO: 24161 - DNA, 189 bp, Macaca Mulatta
aggtgacaaatgtggatgacgagggggtagagctgggctctggggtgatggagctgacgcagagtgagctggtgctgcacctgcatcggcgtgaggccgtccgctggccctacctctgcctgcggcgctatggctatgactccaacctcttctcctttgagagtgtccgccgatgtaaaacaggtcagg

SEQ ID NO: 24162 - DNA, 782 bp, Macaca Mulatta
  misc_feature (1)...(782): n = A,T,C or G
tagaagtacttttgttgatacttgttgtaaaacagggctatacatttataaaatgacacgggacatttgtgtatgtacttcttctctcctgagtatgtttcaggctgttattatcagtccttgtcattccaagtgggcatggctcaaacctcaaatctccccataattttttcccttattgatttattcctaaataaacaacatgctaatcaatatgtgggtcattataagcaccatatccaccagcaaatccactaatgttggacttggatattctctgatatactgtaaaacaaacattttatatactaccatgcaacgatatttcaaagtgccatgtttactcaaggtttcctctttttgttcctcatgatttagagtagtttctacatggtgactattttcttaaggcatcaaaagacggtctttcatattcacagtatcagtctctctccacaatcttttcctgaaacagaagccactcgtgttgtcttcttgctggtgagctgctttgttttcttttatgggactaacatgtgtctttccacttatattagctctacatatgagaacagcctaatcctggagaacagtactagctttgtttcatcttcctacccaattatctgcactttgatgttgattaattatgataatagagtttccagattaacctgtgccattttaaatatgattacttccccctgcttacacacagctttctattgcatcaaaggaatcctgataaaaattattttaactancagagaatgcatttttaa

SEQ ID NO: 24163 - DNA, 889 bp, Macaca Mulatta
aaaaaaaaaacaatgtttgttagatttatttgaccaggcaacatcttgaagggttagggttcaaataaccatgcttggataacagcaaggattggaaaaactatttttaaattatatttgtaattattcaaactttttttaaatctgtgataaatccttttgtgaaatgggaatttatctgttacctagtttacctgtggtgataacctgtattttgtttatcagttttcttaaaggaaaatacatatcctaaaattgatggctaaagtaatgattagcagcagctatgtgacaccaccaagaaagaggagatgtcattgtataaaactaaaacatatttaactagggtcttttctcttttaaggtatgattttaattggtatagatgaagagcaaggccctcaggtatataagtgtgatcctgcaggttactactgtgggtttaaagccactgcagcaggagttaaacaaactgagtcaaccagcttccttgaaaaaaaagtgaagaagaaatttgactggacatttgaccagacagtggaaactgcaattacatgcctgtctactgttctatcaattgatttcaaaccttcagaaatagacgttggagtagtgacagttgaaaatcctaaattcaggtgagtgatattgtgggccacatgcagactacataggtggaggcatgtgagtccatgtgttctataacttgtggggaaatctctttccggtactggcatttagttgttttttcccctaacccttagattgttaacattctggcccttttaaagtaattaaagtttccatatcaaggctaatttgaccagatatggtctcaaccttttagaaagtgtgtttttcagatgcaaatcccgatgtttacattggt

SEQ ID NO: 24164 - DNA, 627 bp, Macaca Mulatta
  misc_feature (1)...(627): n = A,T,C or G
cacagagctactgccacagtcctttgagtgtcaggctctgaatctctcaaaatgtgccgtcttcggttcctcatggctgttatctgtctttatgatttcatgattagacaatgtggaattacataacaggcattgcactaaaagtgatgtgatttatgcatttatgcatgagaactaaatagatttttagattcctacttaaacaaaaactttccatgacagtagcatactgatgaaacaacacacacacacataaaacaacagcaacaacaacagaacaacaacaaagcatgctcagtattgagacactgtcaagattaagttataccagcaaaagtgcagtagtgtcacttttttcctgtcaatatatagagacttctaaatcataatcatnnnnnnnnnnnnnnnnnnnnnnttaaaaaagatggatttgacacactcaccatttaatcatttccagcaaaatatatgtttggctgaaattatgttaaatggatgtaatatagggtttgtttgctgcttttgatggctacgttttggagaaagcaatcttgctgtgaaacagtgtggatgtaaattttataaggctgactcttactaaccaccatttcccctgtggtttgttat

SEQ ID NO: 24165 - DNA, 579 bp, Macaca Mulatta
  misc_feature (1)...(579): n = A,T,C or G
aacacaagttcagtgggaggattagaattgactgatcagactcctgtttattagggagtacgnccatggcaaccagtctcacgaatgtaggaaactcgtttagtgtnccagctaatcctntagtgtctagatctaataagtttcagaactcgtcagtggaagatgatgatgatgttgtttttatcgaacctgtacaacctcccccaccttctgtaccagtggtagctgatcaaagaaccataacatttacatcatcaaaaaatgaagaactacaaggaaatgattccaaaattactccttcctcaaaagagttggcatctcagaagggaagtgtaagtgagacaattgtcattgatgatgaagaggaccacggaaacaaatcaagggcaagagaaaaattcctcgaaattatgaacgaagacctccnnnnnnnnnnnnnnnnnnnnnnnnnnnnnnnnnnnnnnnnnnnnnnnnnnnnnnnnnngaccaagactggagtaggaccttttaaccctggtagaatgaatgtggcaggagacgtatttcagaatggagaatctgcaactcatcataatcctg

SEQ ID NO: 24166 - DNA, 673 bp, Macaca Mulatta
ggggattcccgctcgggtttgacctacagccgcccgggagaagatggccgccccaggagtgtccggtctctcccggcaggtgcgatgtttcagtacctctgtggtcagaccgtttgccaagcttgtgaggcctcctgttcaggtatacggtattgaaggtcgctatgccacggctctttattctgctgcatcaaaacagaataaggtggagcaagtagaaaaggagttgttgagagtagcacaaatcctgaaggaacccaaagtggctgcttctgttttgaatccctatgtgaagcgttctattaaagtgaaaagcctaaatgacatcacagcaaaagagaggttctctcccctcaccaccaacctgatcaatttgcttgcggaaaatggtcgcttaagcaatgcccagggagtcgtttctgccttttctaccatgatgagtgtccatcgcggagaggtgccttgcacggtgaccactgcatctcctttagaagaagccacactctctgaattaaaaactgtcctcaagagcttcctgagtcaaggccaagtattgaaattggaggctaagactgatccgtcaatcatgggtggaatgattgtgcgcattggagagaagtatgttgacatgtctgtcaagaccaagatccagagctgggcaggcttatgcgga

SEQ ID NO: 24167 - DNA, 256 bp, Macaca Mulatta
  misc_feature (1)...(256): n = A,T,C or G
gcagagcagtgcccggatcaccatctccgagggctcctgccccgaacgcatcaccaccatcaccgggtctacagcggctgtcttccatgcagtctccatgattgctttcaaactggatgagnnaggacctttgtgctgctcctgcaaatggtggaaatgtctccaggcctccagtgaccctgcgccttgtcatccctgccagtcagtgtggctcactgattgggaaggctggcaccaagatcaaggagatccgaga

SEQ ID NO: 24168 - DNA, 1173 bp, Macaca Mulatta
tccctactccaagattaccagaagactttcatataaaaattgaggctctctcggatagttgtaaaatctgtatctttactagaacatgagaatcttgttccctatggaagcttgaattataaatgtggtgtatggcctgcctctgcagcactggttgcctgctcgtgtgccagcagtgttgggaggacgggcaggacgctgcagctttctccagccctgttggcatcctcagtgcctgcaagcctctccctgcctgtcgggctgtctggggggtggccatttagggatcgtggggacggggtccaccccaagaagaaaggaaggcccatccacaggcctggctctgggccgtgtgccccagaagcaagtgtgtccagagccagctgagggctctcctcacaccacccagcaggcgccagtgctccttctgcctcacgggaccagtccagcttccagctgctctggctcaagggtgttctaagcccttccttcagagtgggcttctccaggagctctccagtggcactgctggacctgccccacgtttctgtaaaatcagaatacgtggctttagtaagtagaccaagcgcttcatggcagggagagcagcgtgcgaggaatcactgaaaagtgctgcctaaggaagtttgaaaatagtccctgttccagattgccttgaattttaaaacattttgctttgggaaagtaggtcgacagcacctaagataaatgatgcattccattttcacacttcacagtcataaaaactgagaaaactgtcttcagcatgaactaaagttcacaggcagatcactgtgatccagaacacagtaagaactcatcaaacagcttgataagcctttttgactgtgtacatctgtaccgggaataacattcctatgctgaaattttcacaaagaatagaacctgcacccagttcttcagtctgatttctctgacctcttgggcatttgtatttgtagtaaagtattgcaaaagtttcctaagtattttatagcagccatcaaaaatgggactttgtattggttatccaaaaagaaaacttagtaaataaactgaaacgaaacttgtatggataacagtagtatgtacgccaaaatcacccttcctgaaatgtagggctgccttaaacctaaaggtaaaaccttggtc

SEQ ID NO: 24169 - DNA, 95 bp, Macaca Mulatta
gaaccaaacacacatctggatcaccaagacacaaaggcctgaagaagacccacttcatcaagaacatgaggcagtacgacaccaggaacagcagg

SEQ ID NO: 24170 - DNA, 220 bp, Macaca Mulatta
aggaaaattactcaaacagctttgaaatttctgggtcgtgctatgttcttttcaatgggatttatagtttctgtaaaaggaaggattgcaagtcctttggaagcaccggtttttgttgctgcccctcattcaacattctttgatggaattgcctgtgttgtagctgggttaccttctatggtatctcgaaatgagaatgcacaagtccctctgattggca

SEQ ID NO: 24171 - DNA, 210 bp, Macaca Mulatta
gtttgagcttttggaagacggaaaaggaaatatgaactgtgcttattttcataatgggaaaatgcaccctaccttctgtgaaaacaaacattatttaatgtgtgagaggaaggctggcatgaccaaggttgaccaactaccttaatgcaaagagatggataggataacacagataagggctttattgtacaataaaagatatgtatgaat

SEQ ID NO: 24172 - DNA, 660 bp, Macaca Mulatta
  misc_feature (1)...(660): n = A,T,C or G
gggggcggccagacgccagcgccatggaggagtacgctcgggaaccttggtacggcgatgggcactggcatccggactgttgctgcgacgccaaggccagccgtgggggtcgggcgggggaggcaccggccgcacagagccatgtaccagactcgggggactcttaacgtatctcccgctacccctactcggttcctgtcactcgggctccgttatgaggggccacaaccgtctcccctcagaagcccatggcgaattgtggattttttcggtggagccttcactatgggtgtcatcggtggcggagtcttccaggccatcaagggtttccgcaatgcccctgttggaattcggcaccggttgagaggtagtaccaacgctgtgaggatccgagccccccagattggaggtagcttcgcagtgtgggggggcctgttctccaccatcgactgtggcctggtgcggcttcggggcaaggaggatccctggaactctatcaccagtggagcgttgaccggngctgtactggctgcccgcagtggcccactggccatggtgggctcagcgatgatggggggcatcctgttggccctcattgagggcgttggcatcctcctcactcgctacacggcccagcagtttcgaaatgcgcccccattc

SEQ ID NO: 24173 - DNA, 628 bp, Macaca Mulatta
  misc_feature (1)...(628): n = A,T,C or G
ntccagaatgaggaaggatcagagaagagactactgggggagaattcggtgcccccctcaccctctagggagcagacctccactgtcattgtcctgtgagctgccaaagaccccaccgggatgcccgcatgtctctgtctggggcagcccagggcccccactcctggctcctcatactcgcctcccctatggccgctgtccagatcctcctcctttcttctccccacatcagcacctgctgttcctgctccggggttctcaagtccatgaacagatattgttgcattttccacagtgctgattaaacataataaacaatccagaaaaacaattttgcccagaaagatatggtttctctttgtttatacaccttgtacgccgtgaaaggcctttctttgtgtcgctatgtatgaggttaaatgggagctgacttatcccattgaaacactgtcccaagaagactaaatttaattatgttctgctctgcatcccaggtggcaaaatccctttttatgattttattcaattcagtgtaaagtggaaggaagtctagtgggcctagaatcttcttacctgctgagattgtctaggctccgacgacctcagcctgtagacttgagagaactgt

SEQ ID NO: 24174 - DNA, 2258 bp, Macaca Mulatta
  misc_feature (1)...(2258): n = A,T,C or G
ttgcgagagagatgagccgcggcgatgagcccnnnnnnnnnnnnnnnnnnnnnnnnnnnnnnnnnnnnnnnnnnnnnnnnnnnnnnnnnnnnnnnnnnnnnnnnnnnnnnnnnnnnnnnnnnnnnnnnnnnnnnnnnnnnnnnnnnnnnnnnnnnnnnnnnnnnnnnnnnnnnnnnnnnnnnnnnnnnnnnnnnnnnnnnnnnnnnnnnnnnnnnnnnnnnnnnnnnnnnnnnnnnnnnnnnnnnnnnnnnnnnnnnnnngtacagtcggaaatcagtgaaatattgaacaaaagtattattgaagtagaaaacccacaatttggctcagaaaaaaatctggcgtttggtgcacgcattgaaaaggatttgnnnnnnnnnnnnnnnnnnnnnnnnnnnnnnnnnnnnnnnnnnnnnnnnnnnnnnnnnnnnnnnnnnnnnnnnnnnnnnnnnnnnnnnnnnnnnnnnnnnnnnnnnnnnnnnnnnnnnnnnnnnnnnnnnnnnnnnnnnnnnnnnnnnnnnnnnnnnnnnnnnnnnnnnnnnnnnnnnnnnnnnnnnnnnnnnnnnnnnnnnnnnnnnnnnnnnnnnnnnnnnnnnnnnnnnnnnnnnnnnnnnnnnnnnnnnnnnnnnnnnnnnnnnnnnnnnnnnnnnnnnnnnnnnnnnnnnnnnnnnnnnnnnnnnnnnnnnnnnnnnnnnnnnnnnnnnnnnnnnnnnnnnnnnnnnnnnnnnnnnnnnnnnnnnnnnnnnnnnnnnnnnnnnnnnnnnnnnnnnnnnnnnnnnnnnnnnnnnnnnnnnnnnnnnnnnnnnnnnnnnnnnnnnnnnnnnnnnnnnnnnnnnnnnnnnnnnnnnnnnnnnnnnnnnnnnnnnnnnnnnnnnnnnnnnnnnnnnnnnnnnnnnnnnnnnnnnnnnnnnnnnnnnnnnnnnnnnnnnnnnnnnnnnnnnnnnnnnnnnnnnnnnnnnnnnnnnnnnnnnnnnnnnnnnnnnnnnnnnnnnnnnnnnnnnnnnnnnnnnnnnnnnnnnnnnnnnnnnnnnnnnnnnnnnnnnnnnnnnnnnnnnnnnnnnnnnnnnnnnnnnnnnnnnnnnnnnnnnnnnnnnnnnnnnnnnnnnnnnnnnnnnnnnnnnnnnnnnnnnnnnnnnnnnnnnnnnnnnnnnnnnnnnnnnnnnnnnnnnnnnnnnnnnnnnnnnnnnnnnnnnnnnnnnnnnnnnnnnnnnnnnnnnnnnnnnnnnnnnnnnnnnnnnnnnnnnnnnnnnnnnnnnnnnnnnnnnnnnnnnnnnnnnnnnnnnnnnnnnnnnnnnnnnnnnnnnnnnnnnnnnnnnnnnnnnnnnnnnnnnnnnnnnnnnnnnnnnnnnnnnnnnnnnnnnnnnnnnnnnnnnnnnnnnnnnnnnnnnnnnnnnnnnnnnnnnnnnnnnnnnnnnnnnnnnnnnnnnnnnnnnnnnnnnnnnnnnnnnnnnnnnnnnnnnnnnnnnnnnnnnnnnnnnnnnnnnnnnnnnnnnnnnnnnnnnnnnnnnnnnnnnnnnnnnnnnnnnnnnnnnnnnnnnnnnnnnnnnnnnnnnnnnnnnnnnnnnnnnnnnnnnnnnnnnnnnnnnnnnnnnnnnnnnnnnnnnnnnnnnnnnnnnnnnnnnnnnnnnnnnnnnnnnnnnnnnnnnnnnnnnnnnnnnnnnnnnnnnnnnnnnnnnnnnnnnnnnnnnnnnnnnnnnnnnnnnnnnnnnnnnnnnnnnnnnnnnnnnnnnnnnnnnnnnnnnnnnnnnnnnnnnnnnnnnnnnnnnnnnnnnnnnnnnnnnnnnnnnnnnnnnnnnnnnnnnnnnnnnnnnnnnnnnnnnnnnnnnnnnnnnnnnnnnnnnnnnnnnnnnnnnnnnnnnnnnnnnnnnnnnnnnnnnnnnnnnnnnnnnnnnnnnnnnnnnnnnnnnnnnnnnnnnnnnnnnnnnnnnnnnnnnnnnnnnnnnnnnnnnnnnnnnnnnnnnnnnnnnnnnnnnnnnnnnnnnnnnnnnnnnnnnnnnnnnnnnnnnnnnnnnnnnnnnnnaacctaccaatctactgcagaagagaattttctgcaagaaataaaaaacgcaaaatcagaagcaagtatttataagaatagcttgtcggaaattggcaaggaatgcgaaatgttatcaaaaatggtcatggaaaccaaaacagataatcagattctaaaagaagaactaaagaaacataaagggaaaatgtaaaatttgaaaacagcatcagtagacttactgaagacaaaatacttt

SEQ ID NO: 24175 - DNA, 168 bp, Macaca Mulatta
atggacttgccagtttcaaaagtttcctgaagtctgaattcagtgaggaaaaccttgagttctggattgcctgtgaggattacaagaagatcaagtcccctgccaagatggctgagaaggcaaagcaaatatatgaagaattcattcaaacggaggctcctaaagagg

SEQ ID NO: 24176 - DNA, 1756 bp, Macaca Mulatta
  misc_feature (1)...(1756): n = A,T,C or G
caaaatggagttaatcctgactgggagaagaaagtaattgaatattttaaggaaaagctgaaggaaaataatgctcctaagtgggtnnnnnnnnnnnnnnnnnnnnnnnnnnnnnnnnnnnnnnnnnnnnnnnnnnnnnnnnnnnnnnnnnnnnnnnnnnnnnnnnnnnnnnnnnnnnnnnnnnnnnnnnnnnnnnnnnnnnnnnnnnnnnnnnnnnnnnnnnnnnnnnnnnnnnnnnnnnnnnnnnnnnnnnnnnnnnnnnnnnnnnnnnnnnnnnnnnnnnnnnnnnnnnnnnnnnnnnnnnnnnnnnnnnnnnnnnnnnnnnnnnnnnnnnnnnnnnnnnnnnnnnnnnnnnnnnnnnnnnnnnnnnnnnnnnnnnnnnnnnnnnnnnnnnnnnnnnnnnnnnnnnnnnnnnnnnnnnnnnnnnnnnnnnnnnnnnnnnnnnnnnnnnnnnnnnnnnnnnnnnnnnnnnnnnnnnnnnnnnnnnnnnnnnnnnnnnnnnnnnnnnnnnnnnnnnnnnnnnnnnnnnnnnnnnnnnnnnnnnnnnnnnnnnnnnnnnnnnnnnnnnnnnnnnnnnnnnnnnnnnnnnnnnnnnnnnnnnnnnnnnnnnnnnnnnnnnnnnnnnnnnnnnnnnnnnnnnnnnnnnnnnnnnnnnnnnnnnnnnnnnnnnnnnnnnnnnnnnnnnnnnnnnnnnnnnnnnnnnnnnnnnnnnnnnnnnnnnnnnnnnnnnnnnnnnnnnnnnnnnnnnnnnnnnnnnnnnnnnnnnnnnnnnnnnnnnngggacgcctctgcactgctggatccgatggagtgcacagacacagcagaggagcagagagtgcacagtcctcctgcttcattagtgccgagaattcatgtgatcttagcccagaagttgcaacacatcaacccgttattgcctgcctgccttaacaaagaggagagcaaaacctgtaagtnnnnnnnnnnnnnnnnnnnnnnnnnnnnnnnnnnnnnnnnnnnnnnnnnnnnnnnnnnnnnnnnnnnnnnnnnnnnnnntagtttggctgctgaataccttatattacatctcatctccacagnnnnnnnnnnnnnnnnnnnnnnnnnnnnnnnnnnnnnnnnnnnnnnnnnnnnnnnnnnnnnnnnnnnnnnnnnnnnnnnnnnnnnnnnnnnnnnnnnnnnnnnnnnnnnnnnnnnnnnnnnnnnnnnnnnnnnnnnnnnnnnnnnnnnnnnnnnnnnnnnnnnnnnnnnnnnnnnnnnnnnnnnnnnnnnnnnnnnnnnnnnnnnnnnnnnnnnnnnnnnnnnnnnnnnnnnnnnnnnnnnnnnnnnnnnnnnnnnnnnnnnnnnnnnnnnnnnnnnnnnnnnnnnnnnnnnnnnnnnnnnnnnnnnnnnnnnnnnnnnnnnnnnnnnnnnnnnnnnnnnnnnnnnnnnnnnnnnnnnnnnnnnnnnnnnnnnnnnnnnnnnnnnnnnnnnnnnnnnnnnnnnnnnnnnnnnnnnnnnnnnnnnnnnnnnnnnnnnnnnnnnnnnnnnnnnnnnnnnnnnnnnnnnnnnnnnnnnnnnnnnnnnnnnnnnnnnnnnnnnnnnnnnnnnnnnnnnnnnnnnnnnnnnnnnnnnnnnnnnnnnnnnnnnnnnnnnnnnnnnnnnnnnnnnnnnnnnnnnnnnaggcagttgaagatgactttgtggaaatgcggaagaatgaccctcagagcatcactgctgatgatcttcaccagctgctcgtggtggctcggtg

SEQ ID NO: 24177 - DNA, 548 bp, Macaca Mulatta
  misc_feature (1)...(548): n = A,T,C or G
ggaacactcttggctacaggttcatatgacggttttgcaagaatatggacggaagatggtnggtaacctggccagcaccttaggccaacataaaggccccatctttgccttgaaatggaacagaaaggggaattacattttgagtgctggtgtagacaaannnnnnnnnnnnnnnnnnnnnnnnnnnnnnnnnnnnnnnnnnnnnnnnnnnnnnnnnnnnnnnnnnnnnnnnnnnnnnnnnnnnnnnnnnnnnnnnnnnnnnnnnnnnnnnnnnnnnnnnnnnnnnnnnnnnnnnnnnnnnnnnnnnnnnnnnnnnnnnnnnnnnnnnnnnnnnnnnnnnnnnnnnnnnnnnnnnnnnnnnnnnnnnnnnnnnnnnnnnngttgctggcctcctgctcagatgacatgacattgaagnagatctggagcatgaaacaggaggtgtgcatccacgatcttcaggctcacaataaagagatctacaccatcaagtggagccccaccgggcccgccaccagcaacccaaactccaacatcatgttggcaag

SEQ ID NO: 24178 - DNA, 1452 bp, Macaca Mulatta
  misc_feature (1)...(1452): n = A,T,C or G
atgctcacctaccgtgtggacgcggacaagggcttcaacttttcggtgggcgatgatgcctttgtgtgccagaagaagaaccacttccaggtgacggtgtacatcggcatgctgggcgagcccaagttcgtcaagacgcctgagggcctcaagcccctcgtctgcttctatctgaagctgcnnnnnnnnnnnnnnnnnnnnnnnnnnnnnnnnnnnnnnnnnnnnnnnnnnnnnnnnnnnnnnnnnnnnnnnnnnnnnnnnnnnnnnnnnnnnnnnnnnnnnnnnnnnnnnnnnnnnnnnnnnnnnnnnnnnnnnnnnnnnnnnnnnnnnnnnnnnnnnnnnnnnnnnnnnnnnnnnnnnnnnnnnnnnnnnnnnnnnnnnnnnnnnnnnnnnnnnnnnnnnnnnnnnnnnnnnnnnnnnnnnnnnnnnnnnnnnnnnnnnnnnnnnnnnnnnnnnnnnnnnnnnnnnnnnnnnnnnnnnnnnnnnnnnnnnnnnnnnnnnnnnnnnnnnnnnnnnnnnnnnnnnnnnnnnnnnnnnnnnnnnnnnnnnnnnnnnnnnnnnnnnnnnnnnnnnnnnnnnnnnnnnnnnnnnnnnnnnnnnnnnnnnnnnnnnnnnnnnnnnnnnnnnnnnnnnnnnnnnnnnnnnnnnnnnnnnnnnnnnnnnnnnnnnnnnnnnnnnnnnnnnnnnnnnnnnnnnnnnnnnnnnnnnnnnnnnnnnnnnnnnnnnnnnnnnnnnnnnnnnnnnnnnnnnnnnnnnnnnnnnnnnnnnnnnnnnnnnnnnnnnnnnnnnnnnnnnnnnnnnnnnnnnnnnnnnnnnnnnnnnnnnnnnnnnnnnnnnnnnnnnnnnnnnnnnnnnnnnnnnnnnnnnnnnnnnnnnnnnnnnnnnnnnnnnnnnnnnnnnnnnnnnnnnnnnnnnnnnnnnnnnnnnnnnnnnnnnnnnnnnnnnnnnnnnnnnnnnnnnnnnnnnnnnnnnnnnnnnnnnnnnnnnnnnnnnnnnnnnnnnnnnnnnnnnnnnnnnnnnnnnnnnnnnnnnnnnnnnnnnnnnnnnnnnnnnnnnnnnnnnnnnnnnnnnnnnnnnnnnnnnnnnnnnnnnnnnnnnnnnnnnnnnnnnnnnnnnnnnnnnnnnnnnnnnnnnnnnnnnnnnnnnnnnnnnnnnnnnnnnnnnnnnnnnnnnnnnnnnnnnntcatcgtccgtggttccggaccaggcctgcatcagccagcgcttcctgcagggaaccatcattgccctggtggtggtcatggccttcaggncaggcatcacctgggagcgcagcttcaggagcaaggaccacagccttgtcctggagagagggcactggctggtggctccagctctaacagtcacccttttccgtggctccagcgtggtgtccatgtccacactgtacgtgctgagcctgcgcacagaggaggacctggtagacactga

SEQ ID NO: 24179 - DNA, 1848 bp, Macaca Mulatta
  misc_feature (1)...(1848): n = A,T,C or G
ggcggaggcggcggacgagcgcttcccggcctgcatccgcgacgccgtgtcgcaggtgctcaagggctacgactggagcctggtgcccatgccggtgcgcggcggcggtggcggcgcgctcaaagcctagccgcacgtgtatcggcccttgaacgctttcatggtgtgggcgcannnnnnnnnnnnnnnnnnnnnnnnnnnnnnnnnnnnnnnnnnnnnnnnnnnnnnnnnnnnnnnnnnnnnnnnnnnnnnnncttgctgagcgagagtgagaagcggcccttcgtggaggaggcagagcggcttcgcgtgcagcacaagaaggaccaccccgactacaagtaccagccacggcgcaggaagagcacgaaggccggccagagcgactcggactccggcgccgagctgggaccccaccctggcggcggtgccgtgtacaaggccgaatcggggcttggagacgcgcaccaccacggtgaccacacaggnnnnnnnnnnnnnnnnnnnnnnnnnnnnnnnnnnnnnnnnnnnnnnnnnnnnnnnnnnnnnnnnnnnnnnnnnnnnnnnnnnnnnnnnnnnnnnnnnnnnnnnnnnnnnnnnnnnnnnnnnnnnnnnnnnnnnnnnnnnnnnnnnnnnnnnnnnnnnnnnnnnnnnnnnnnnnnnnnnnnnnnnnnnnnnnnnnnnnnnnnnnnnnnnnnnnnnnnnnnnnnnnnnnnnnnnnnnnnnnnnnnnnnnnnnnnnnnnnnnnnnnnnnnnnnnnnnnnnnnnnnnnnnnnnnnnnnnnnnnnnnnnnnnnnnnnnnnnnnnnnnnnnnnnnnnnnnnnnnnnnnnnnnnnnnnnnnnnnnnnnnnnnnnnnnnnnnnnnnnnnnnnnnnnnnnnnnnnnnnnnnnnnnnnnnnnnnnnnnnnnnnnnnnnnnnnnnnnnnnnnnnnnnnnnnnnnnnnnnnnnnnnnnnnnnnnnnnnnnnnnnnnnnnnnnnnnnnnnnnnnnnnnnnnnnnnnnnnnnnnnnnnnnnnnnnnnnnnnnnnnnnnnnnnnnnnnnnnnnnnnnnnnnnnnnnnnnnnnnnnnnnnnnnnnnnnnnnnnnnnnnnnnnnnnnnnnnnnnnnnnnnnnnnnnnnnnnnnnnnnnnnnnnnnnnnnnnnnnnnnnnnnnnnnnnnnnnnnnnnnnnnnnnnnnnnnnnnnnnnnnnnnnnnnnnnnnnnnnnnnnnnnnnnnnnnnnnnnnnnnnnnnnnnnnnnnnnnnnnnnnnnnnnnnnnnnnnnnnnnnnnnnnnnnnnnnnnnnnnnnnnnnnnnnnnnnnnnnnnnnnnnnnnnnnnnnnnnnnnnnnnnnnnnnnnnnnnnnnnnnnnnnnnnnnnnnnnnnnnnnnnnnnnnnnnnnnnnnnnnnnnnnnnnnnnnnnnnnnnnnnnnnnnnnnnnnnnnnnnnnnnnnnnnnnnnnnnnnnnnnnnnnnnnnnnnnnnnnnnnnnnnnnnnnnnnnnnnnnnnnnnnnnnnnnnnnnnnnnnnnnnnnnnnnnnnnnnnnnnnnnnnnnnnnnnnnnnnnnnnnnnnnnnnnnnnnnnnnnnnnnnnnnnnnnnnnnnnnnnnnnnnnnnnnnnnnnnnnnnnnnnnnnnnnnnnnnnnnnnnnnnnnnnnnnnnnnnnnnnnnnnnnnnnnnnnnnnnnnnnnnnnnnnnnnnnnnnnnnnnncctgtcagatctgaggcgtctccttgctggcagagtgcacccacgcaaggtctggctgggattaacacgtctctnnnnnnnnnnnnnnnnnnnnnnnnnnnnnnnnnngaagcttaaatgtgtttcttttgaaagctgttaaagatgtatttatgttctg

SEQ ID NO: 24180 - DNA, 2857 bp, Macaca Mulatta
  misc_feature (1)...(2857): n = A,T,C or G
gttctgtgacaaatgcaacatctgtgtgcaccaggnnnnnnnnnnnnnnnnnnnnnnnnnnnnnnnnnnnnnnnnnnnnnnnnnnnnnnnnnnnnnnnnnnnnnnnnnnnnnnnnnnnnnnnnnnnnnnnnnnnnnnnnnnnnnnnnnnnnnnnnnnnnnnnnnnnnnnnnnnnnnnnnnnnnnnnnnnnnnnnnnnnnnaggtgagcattggcagcccagagaagatggagcccatcaccaaggtgtcacatattcccagcagtcggtgggcgctagtgtgcagcctctgcaatgagaagtttggggcctctatacannnnnnnnnnnnnnnnnnnnnnnnnnnnnnnnnnnnnnnnnnnnnnnnnnnnnnnnnnnnnnnnnnnnnnnnnnnnnnnnnnnnnnnnnnnnnnnnnnnnnnnnnnnnnnnnnnnnnnnnnnnnnnnnnnnnnnnnnnnnnnnnnnnnnnnnnnnnnnnnnnnnnnnnnnnnnnnnnnnnnnnnnnnnnnnnnnnnnnnnnnnnnnnnnnnnnnnnnnnnnnnnnnnnnnnnnnnnnnnnnnnnnnnnnnnnnnnnnnnnnnnnnnnnnnnnnnnnnnnnnnnnnnnnnnnnnnnnnnnnnnnnnnnnnnnnnnnnnnnnnnnnnnnnnnnnnnnnnnnnnnnnnnnnnnnnnnnnnnnnnnnnnnnnnnnnnnnnnnnnnnnnnnnnnnnnnnnnnnnnnnnnnnnnnnnnnnnnnnnnnnnnnnnnnnnnnnnnnnnnnnnnnnnnnnnnnnnnnnnnnnnnnnnnnnnnnnnnnnnnnnnnnnnnnnnnnnnnnnnnnnnnnnnnnnnnnnnnnnnnnnnnnnnnnnnnnnnnnnnnnnnnnnnnnnnnnnnnnnnnnnnnnnnnnnnnnnnnnnnnnnnnnnnnnnnnnnnnnnnnnnnnnnnnnnnnnnnnnnnnnnnnnnnnnnnnnnnnnnnnnnnnnnnnnnnnnnnnnnnnnnnnnnnnnnnnaaaacatgcttttgtttaacagtccttctgtgggccctgatgctcccaagatagaggacttgttgtggcattccgcgttcttcagaaaacaaatgggtacttccttggttcattcgctgaaaaagccccataagcgagatcctttgcagaatagcactggaagggaaggcaaaaccctgctgaagcagccagacctctgtggtagaagggaggggatggtggtcccagagagctttttgggtttggaaaagacctttgcagaagcacgtctcatatcagcacaatttaaaaatggtgtggtgatgccagaccacgggaaaagaagagacaatcgttttcattgtgatctcattaaaggagacttaaaggacaaatcttttaaacagagtcacaagcctctcaggtcctcagatgtgtcccagaggcatctggacaacacaagagctgccacctcccctggagtggggcagtcagcacctggcacaaggaaggagatagtgcccaagtgcaatggctccctaatcaaagtaaactataatcagactgcagtcaaagtgcctacaacacctgccagcccagtgaaaaactggggaggattccggattccaaagaagggggaacggcagcagcagggagaggcccacgatggggcctgccaccagcactcagactacccatatttgggcttaggccgagttccagccaaggaaannnnnnnnnnnnnnnnnnnnnnnnnnnnnnnnnnnnnnnnnnnnnnnnnnnnnnnnnnnnnnnnnnnnnnnnnnnnnnnnnnnnnnnnnnnnnnnnnnnnnnnnnnnnnnnnnnnnnnnnnnnnnnnnnnnnnnnnnnnnnnnnnnnnnnnnnnnnnnnnnnnnnnnnnnnnnnnnnnnnnnnnnnnnnnnnnnnnnnnnnnnnnnnnnnnnnnnnnnnnnnnnnnnnnnnnnnnnnnnnnnnnnnnnnnnnnnnnnnnnnnnnnnnnnnnnnnnnnnnnnnnnnnnnnnnnnnnnnnnnnnnnnnnnnnnnnnnnnnnnnnnnnnnnnnnnnnnnnnnnnnnnnnnnnnnnnnnnnnnnnnnnnnnnnnnnnnnnnnnnnnnnnnnnnnnnnnnnnnnnnnnnnnnnnnnnnnnnnnnnnnnnnnnnnnnnnnnnnnnnnnnnnnnnnnnnnnnnnnnnnnnnnnnnnnnnnnnnnnnnnnnnnnnnnnnnnnnnnnnnnnnnnnnnnnnnnnnnnnnnnnnnnnnnnnnnnnnnnnnnnnnnnnnnnnnnnnnnnnnnnnnnnnnnnnnnnnnnnnnnnnnnnnnnnnnnnnnnnnnnnnnnnnnnnnnnnnnnnnnnnnnnnnnnnnnnnnnnnnnnnnnnnnnnnnnnnnnnnnnnnnnnnnnnnnaggcagcagctctgaagcttcagtaacactaggaaatttatgtgtaaatatagcagtcagggaagagaatttttaaaaggtcattattgaaggagctgaggggacagggtagagctgctgcaatgtggagatttagggtaatatagcaaggtcctgctgcttgaagcctgtgagtgggttgtggatatgggactggtggagagtgagactgttaggaaagttgtatctatgaataagggcagttgaagtacaatttttaccagtccacttgaccttttttttccctaaccactggctcttgagccagcttgggatttccctggccattgccaatacctggccatttggcttccaatagtacaatggctactcaagttcaagtgaagaacttccagactttggtgacttttacttcccagagccaaccactagtgcatatgtcagggaatccgggcttccaacatgaacggattccttaagaaaaag

SEQ ID NO: 24181 - DNA, 417 bp, Macaca Mulatta
actggactctcacggggttccgtcctagctctcctggtgagctcctgccaggcactcgcagcccctatagcactgagctcacacgagactgggatgtggggggcatctctccccaaggaggcccttgctgagcctcctgtgcctggtcctatcccgggccatgtcttaggtgagacagttgcccgaaactaagccaggccgggctgtaggagcagcagctttgggagagggatttccgtgcagacctcaagtcatcatgcagtgggtgctgccatgacagaggctgtacccctgggccagcgaggctgctcacccacctcttgtgcaaggtggacttcgtgctgtgcctgcaggcagagctggagctcccagcagaggcaggctgggacagaccagcatttggaagatgtacatagt

SEQ ID NO: 24182 - DNA, 772 bp, Macaca Mulatta
  misc_feature (1)...(772): n = A,T,C or G
ggggactgggatgcttagcttttcaagtagctactctgcatacttaccatgtctaacatgggcatattttagatgtactaataaatctgtccataaaatcacaaatgtgatttggatccagctgagaaaccactatcaatatggttaatgtaccccagaatcatagtcatatttanagtttagtcaactataactcttatctcttttaaacnagggccatccaaagtagagatgtggcccagttcagaaatgttgtcacacaattggaagctgatttagacatcaccaaaagacaactaggaacagagcgctttgaaaggtaagtttatctctatgcaagctcaaaaacaatgcttttcagcatggaaagcattgtttcttaggtaaaaatcggttttagttctttcatgatggttagattttaaagtatgaattaagctacagttttttatgatagttttaatacttttgctggatataaaattttaaagcatcactattttgctttagggagagggccgtacaagaacttcgccgccaaaattattcaagtaatgcttatcatgtgagttctacgatgaagccaaatacaaaatgtcattcaccagaacgtgctcaccatcgatctcctgaccgaggcctagatcgatcattagaagagtgagtctgtttaaggatccattctcttgagatcaaatagtaatatctagtatagtgaatatttggggtaataaggaaactcaatagtctatctctttaatagtgatattta

SEQ ID NO: 24183 - DNA, 2326 bp, Macaca Mulatta
  misc_feature (1)...(2326): n = A,T,C or G
agcagcggcccgaggctcccggagcatcgcgctgggagaagacttcgccgctcggggccgcagcctggtgagctcagcccccttcgggccctcccctgcatcccagccggggcctctccgagccggcgctgatcgatgccgacacaccccggggaccctatcgcgactccatcgcgccatatcgcgacaccatcgtgctctgtcgagactccattttgtcacagcccttttcaatatatatnnnnnnnnnnnnaatttgccctgtcatctttgggggcnnnnnnnnnnnnnnnnnnnnnnnnnnnnnnnnnnnnnnnnnnnnnnnnnnnnnnnnnnnnnnnnnnnnnnnnnnnnnnnnnnnnnnnnnnnnnnnnnnnnnnnnnnnnnnnnnnnnnnnnnnnacagttgggcaaggcgggcatcatggcctcggattgcgagccagctctgaaccaggcagagggccgaaaccccaccctggagcgctacctgggagccctccgtgaggccaagaatgacagcgagcagtttgcagccctgctgctagnnnnnnnnnnnnnnnnnnnnnnnnnnnnnnnnnnnnnnnnnnnnnnnnnnnnnnnnnnnnnnnnnnnnnnnnnnnnnnnnnnnnnnnnnnnnnnnnnnnnnnnnnnnnnnnnnnnnnnnnnnnnnnnnnnnnnnnnnnnnnnnnnnnnnnnnnnnnnnnnnnnnnnnnnnnnnnnnnnnnnnnnnnnnnnnnnnnnnnnnnnnnnnnnnnnnnnnnnnnnnnnnnnnnnnnnnnnnnnnnnnnnnnnnnnnnnnnnnnnnnnnnnnnnnnnnnnnnnnnnnnnnnnnnnnnnnnnnnnnnnnnnnnnnnnnnnnnnnnnnnnnnnnnnnnnnnnnnnnnnnnnnnnnnnnnnnnnnnnnnnnnnnnnnnnnnnnnnnnnnnnnnnnnnnnnnnnnnnnnnnnnnnnnnnnnnnnnnnnnnnnnnnnnnnnnnnnnnnnnnnnnnnnnnnnnnnnnnnnnnnnnnnnnnnnnnnnnnnnnnnnnnnnnnnnnnnnnnnnnnnnnnnnnnnnnnnnnnnnnnnnnnnnnnnnnnnnnnnnnnnnnnnnnnnnnnnnnnnnnnnnnnnnnnnnnnnnnnnnnnnnnnnnnnnnnnnnnnnnnnnnnnnnnnnnnnnnnnnnnnnnnnnnnnnnnnnnnnnnnnnnnnnnnnnnnnnnnnnnnnnnnnnnnnnnnnnnnnnnnnnnnnnnnnnnnnnnnnnnnnnnnnnnnnnnnnnnnnnnnnnnnnnnnnnnnnnnnnnnnnnnnnnnnnnnnnnnnnnnnnnnnnnnnnnnnnnnnnnnnnnnnnnnnnnnnnnnnnnnnnnnnnnnnnnnnnnnnnnnnnnnnnnnnnnnnnnnnnnnnnnnnnnnnnnnnnnnnnnnnnnnnnnnnnnnnnnnnnnnnnnnnnnnnnnnnnnnnnnnnnnnnnnnnnnnnnnnnnnnnnnnnnnnnnnnnnnnnnnnnnnnnnnnnnnnnnnnnnnnnnnnnnnnnnnnnnnnnnnnnnnnnnnnnnnnnnnnnnnnnnnnnnnnnnnnnnnnnnnnnnnnnnnnnnnnnnnnnnnnnnnnnnnnnnnnnnnnnnnnnnnnnnnnnnnnnnnnnnnnnnnnnnnnnnnnnnnnnnnnnnnnnnnnnnnnnnnnnnnnnnnnnnnnnnnnnnnnnnnnnnnnnnnnnnnnnnnnnnnnnnnnnnnnnnnnnnnnnnnnnnnnnnnnnnnnnnnnnnnnnnnnnnnnnngctcctcctgcctggctggtgccacctgaccgtcgaagatgggccccgggagatcctgatcaaggaaggtgccccctcgcttctgtgcaagtatttcctgcagcagtgggagctcacatcccctggccacgacacctcggtgctgcccgacagcgtggagattggcctgcagacctgctgccacatcttcctcaacctcgtggtcaccgcaccggggctgatcaagngcgtgatgcctgcttcacatctcttatgaacnnnnnnnnnnnnnnnnnnnnnnnnnnnnnnnnnnnnnnnnnnnnnnnnnnnnnnnnnnnnnnnnnnnnnnnnnnnnnnnnnnnnnnnnnnnnnnnnnnnnnnnnnnnnncagctcttcagggaacaccagcatcccgagggttcttcgcagctgccatcctcttcctatcgcagtcccacgtggcgcgggccaccccgggctcagaccaggcagtgctagccctgtcccctgagtgtgagggcatctgggctgacctgcaggagctctggttcctgggcatgcaggccttcacgggatgtgtgccgctgctgc

SEQ ID NO: 24184 - DNA, 1078 bp, Macaca Mulatta
  misc_feature (1)...(1078): n = A,T,C or G
gataacaagacctctgccagaagaaccatggctttgaaaggtggagttcaggctgaggagatgggtgcggtcctcagtgagcccctnnnnnnnnnnnnnnnnnnnnnnnnnnnnnnnnnnnnnnnnnnnnnnnnnnnnnnnnnnnnnnnnnnnnnnnnnnnnnnnnnnnnnnnnnnnnnnnnnnnnnnnnnnnnnnnnnnnnnnnnnnnnnnnnnnnnnnnnnnnnnnnnnnnnnnnnnnnnnnnnnnnnnnnnnnnnnnnnnnnnnnnnnnnnnnnnnnnnnnnnnnnnnnnnnnnnnnnnnnnnnnnnnnnnnnnnnnnnnnnnnnnnnnnnnnnnnnnnnnnnnnnnnnnnnnnnnnnnnnnnnnnnnnnnnnnnnnnnnnnnnnnnnnnnnnnnnnnnnnnnnnnnnnnnnnnnnnnnnnnnnnnnnnnnnnnnnnnnnnnnnnnnnnnnnnnnnnnnnnnnnnnnnnnnnnnnnagcttccagcgctacctgggcatctgccacccgctggccccctggcacaaacgtgggggccgccgggccgcctggctagtgtgtgtagccgtgtggctggctgtgacaacccagtccctgcccacagctgtctttgctgccacaggcatccagcgtaaccgcaccgtttgctatgacctcagcccgtttttcctggccacccgctatatgccctatggcatgactctcactgtcatcggcttcctgctgccctttgctgccctgctggcctgctactgtctcctggcccgccgcttgtgccgccaggatggcccagcagagcctgtggcccaggagcggcgtggcaaggcagcccgcatggcggtggtggtggccgctgcctttgccatcagcttcctgcctttccacatcaccaagacagcctacctggcagtgcgctcaacgccaggcgtcccctgccctgtgttggaggcctttgcagcggcctataaaggcacacggccgttcgccagcgccaacagcgtgctggaccccatcctcttctacttcacccagaagaagttccgccgacgaccacatgagctcctacagaaactcac

SEQ ID NO: 24185 - DNA, 731 bp, Macaca Mulatta
ggatatggcacgtctcggattctctttctccagtaaaatgaaaatcttagttcagagaaaggacctgcaaattcccagaatgctgataaaattttagctactccaagtcgggaatatctggggttcgcgtgggagagcggtttcggtttgagacaatcgtttctctctagtatctgacgttctttttgattttacagacatggccattcgtggtctcgggaagaccggactctgacaccaaagaagtttccgcagccaacagactatgtggaaccaccgcttaaatcgtactggaattcacttgatgggattattcgttaaatgcgagtgtttgggggccacggagagaagggagagctcgtgagatgggaagaagtttccgtgggattctccttgacccttcccctttccctggaactgtgatcacgacaggtggcgggcatggctgtctctgctcagcgcccacggctacagctgcggcggatctaggcgaccacgttttgcctctccagaaagagcctcctttcgtgtccagaacgcggacgcaggtccaccctccggccctagctctgtagactaactctcggctgctgccccagcccgcgccagacagcccaggggtccgttctcagccgagccagattcatcgcacacgtgcgggacgattccacacagcccgggcctttcgcggtgacacaatggttaggaaacggttagaacgcgctctacac

SEQ ID NO: 24186 - DNA, 2173 bp, Macaca Mulatta
  misc_feature (1)...(2173): n = A,T,C or G
tagaagagaaagcctcttgaaaccgagaagcatctgcaaccacaaactacaaaatacagctgctaaacaaaatgaaagttggatcaaattggtggcaaatatcaagagtgaatatactccgcggcacggtactgcaaatnnnnnnnnnnnnnnnnnnnnnnnnnnnnnnnnnnnnnnnnnnnnnnnnnnnnnnnnnnnnnnnnnnnnnnnnnnnnnnnnnnnnnnnnnnnnnnnnnnnnnnnnnnnnnnnnnnnnnnnnnnnnnnnnnnnnnnnnnnnnnnnnnnnnnnnnnnnnnnnnnnnnnnnnnnnnnnnnnnnnnnnnnnnnnnnnnnnnnnnnnnnnnnnnnnnnnnnnnnnnnnnnnnnnnnnnnnnnnnnnnnnnnnnnnnnnnnnnnnnnnnnnnnnnnnnnnnnnnnnnnnnnnnnnnnnnnnnnnnnnnnnnnnnnnnnnnnnnnnnnnnnnnnnnnnnnnnnnnnnnnnnnnnnnnnnnnnnnnnnnnnnnnnnnnnnnnnnnnnnnnnnnnnnnnnnnnnnnnnnnnnnnnnnnnnnnnnnnnnnnnnnnnnnnnnnnnnnnnnnnnnnnnnnnnnnnnnnnnnnnnnnnnnnnnnnnnnnnnnnnnnnnnnnnnnnnnnnnnnnnnnnnnnnnnnnnnnnnnnnnnnnnnnnnnnnnnnnnnnnnnnnnnnnnnnnnnnnnnnnnnnnnnnnnnnnnnnnnnnnnnnnnnnnnnnnnnnnnnnnnnnnnnnnnnnnnnnnnnnnnnnnnnnnnnnnnnnnnnnnnnnnnnnnnnnnnnnnnnnnnnnnnnnnnnnnnnnnnnnnnnnnnnnnnnnnnnnnnnnnnnnnnnnnnnnnnnnnnnnnnnnnnnnnnnnnnnnnnnnnnnnnnnnnnnnnnnnnnnnnnnnnnnnnnnnnnnnnnnnnnnnnnnnnnnnnnnnnnnnnnnnnnnnnnnnnnnnnnnnnnnnnnnnnnnnnnnnnnnnnnnnnnnnnnnnnnnnnnnnnnnnnnnnnnnnnnnnnnnnnnnnnnnnnnnnnnnnnnnnnnnnnnnnnnnnnnnnnnnnnnnnnnnnnnnnnnnnnnnnnnnnnnnnnnnnnnnnnnnnnnnnnnnnnnnnnnnnnnnnnnnnnnnnnnnnnnnnnnnnnnnnnnnnnnnnnnnnnnnnnnnnnnnnnnnnnnnnnnnnnnnnnnnnnnnnnnnnnnnnnnnnnnnnnnnnnnnnnnnnnnnnnnnnnnnnnnnnnnnnnnnnnnnnnnnnnnnnnnnnnnnnnnnnnnnnnnnnnnnnnnnnnnnnnnnnnnnnnnnnnnnnnnnnnnnnnnnnnnnnnnnnnnnnnnnnnnnnnnnnnnnnnnnnnnnnnnnnnnnnnnnnnnnnnnnnnnnnnnnnnnnnnnnnnnnnnnnnnnnnnnnnnnnnnnnnnnnnnnnnnnnnnnnnnnnnnnnnnnnnnnnnnnnnnnnnnnnnnnnnnnnnnnnnnnnnnnnnnnnnnnnnnnnnnnnnnnnnnnnnnnnnnnnnnnnnnnnnnnnnnnnnnnnnnnnnnnnnnnnnnnnnnnnnnnnnnnnnnnnnnnnnnnnnnnnnnnnnnnnnnnnnnnnnnnnnnnnnnnnnnnnnnnnnnnnnnnnnnnnnnnnnnnnnnnnnnnnnnnnnnnnnnnnnnnnnnnnnnnnnnnnnnnnnnnnnnnnnnnnnnnnnnnnnnnnnnnnnnnnnnnnnatatgtaccaaatttgctttatccagtctaccatcaatgggcatttaggttgattctatttctttgctattgtgaatagtgctgcaatgaacatacatgtgtaggtgtctttatcatagaattatttatattcctttgggcatatacccagtaatgggattgctgggtcgaatggcatttctgtctgtaggtatctcagggatcgccacactgtcttccacagtggctgaactgatttacactcccaccaacagtgtctaagtattcctttttctccagaacctcaccagtgcctgttattttttgactttttaataatagccattctgactggcgttagatggtgtcttattgtggttttgatttgcatttttctaatgaccagtgatactgagctttttctcatgtgatttcagccacaggtatgtcttcttttgaaaagtgttcatgtcctttgcccacttctttatgt

SEQ ID NO: 24187 - DNA, 95 bp, Macaca Mulatta
ttggagttgtatgatcttcagatcttaggcaaaaaaaccactgatgaatcccaatatacattgtaactttgactccattgcaacccttagaaatc

SEQ ID NO: 24188 - DNA, 384 bp, Macaca Mulatta
  misc_feature (1)...(384): n = A,T,C or G
aggaattacttgatttatctctttttattccagacgtggagcccaaacctgcaaccaagaatgctacacgaacaaaggatatttctgaagatttatcacaggatgccgtactagagaaacttacggagaatggtctgtgggattccagagtggaagggttatggaaatggaatgataggatattgagattacaaaataatcaggagaatcatttgannnnnnnnnnnnnnnnnnnnnnnnnnnnnnnnnnnnnnnnnnnnnnnnnnnnnnnnnnnnnnnnnnnnnnnnnnnnnnnnnnnnnnnnnnnnnnnnnnnnnnnnnnnnnnnnnnnncagagaattcaaactggagagaaaccctataaatgtaatgaatgcgggaaag

SEQ ID NO: 24189 - DNA, 794 bp, Macaca Mulatta
gacatcaaggctgcgggggtcgagccggacgccatcctgaaacctgagctcctgtcagccatcgagaagctctcttgaaataaaagcagggttggcctcagccctgtgggtctgtctcatgctctccctgttcctccccccaccaccccagggcctccaagccccctctggaaatacttggctctgccccatgggcacgggaggggcgccagctagctgtggagctgtggaactgggccctgtggcagagccgccatctcctgggggctgtggagatgcgcccaagcccccgagggagaggcctggggatgccatcaaatctaagccctccctagctgctggtaactgtgtcatgaagctgccaggcagacacacgtggcatctccctgggcaggagagcaggcctgcagcacgggtcccgttcccgtgtgctgtgggtggcagcggctgcgcctggcactagggctactctgtggatgtgggtgacgacggcaggaggggacgctggccttcccgcacacagacctgcagttagtaaatcataagcccaaataaacagggtgtttgaatctagttttttggtgctccattgaaaccatgggacacagggcaggctcacctgctatagagcaggcggcacgggggctgggcatggctccctgtcaaagcggcaccaggcgaatacctgctctcgggccaatgcctggccacaagtgcccgatgagccacttgcctggggaggaaatcccatgcgctaggggaggctgtgctgtgcccacaaaggcccagtcccc

SEQ ID NO: 24190 - DNA, 780 bp, Macaca Mulatta
  misc_feature (1)...(780): n = A,T,C or G
ttctgctgagagagaggctccaagccgctctgggaagtgtagtccagttggcgtagcagtagtttcgtggaggggagccgaggttccgggaaggggctgagccgacttgaaaagagnnnnnnnnnnnnnnnnnnnnnnnnnnnnnnnnnnnnnnnnnnnnnnnnnnnnnnnnnnnnnnnnnnnnnnnnnnnnnnnnnnnnnnnnnnnnnnnnnnnnnnnnnnnnnnnnnnnnnnnnnnnnnnnnnnnnnnnnnnnnnnnnnnnnnnnnnnnnnnnnnnnnnnnnnnnnnnnnnnnnnnnnnnnnnnnnnnnnnnnnnnnnnnnnnnnnnnnnnnnnnnnnnnnnnnagacccgtacgaaacagaaggaagatgtggaagttgtaggaggcagtgatggagaaggagccattgggctcagcagtgatcccaagagccgggaacaaatgatcaatgatcggattggttatcaaccccaacccaagcccaataatcgttcatctcaatttggaagtcttgaattttagagatggattatcttgcatgccagagcgctggaatggaacaaaatgatggcagaagtacaaaccagatttagagaactgagcgcttgcagtcaagcagaatgtacctcctgcagagacacatccttctgcatgagattactgctgcttcacttgcacgctaagccggaatccaaactgtggtttgtctctggaaaatctgactctataaaactgatctgagttcttgtttttcaaaataaatatatttttggaaaa

SEQ ID NO: 24191 - DNA, 619 bp, Macaca Mulatta
  misc_feature (1)...(619): n = A,T,C or G
gagctaggagccccgcgggccgcgcccgccaccggctccacccatccgggtccaggaggccgaggccatggccgcgatagacgagcggagcctgcacaacttctttgccaactgggacaaggagaagaagaaggagccgagcaaccaggcggcgagttctgagggcgccgccggcagggcggcgggagcagtggagccgccgggggtgtagcggacggcggggagcgagcgggaacccggctgggccaaggcagcacagcgaccgcgggggctgtggacccaggggccgccaccaaggctgtgaagaaggacgaagatgaatggaaaggattggagcaaaaaggttgattacagcggccgcagggttcaggcaatgcaaataagtgaaaaggaagaagataatgaagagacaaggtccaggtgataactggaaagaaggtggagatggtggtggtatagaaaaatcttcaggtccctggaataaaacaactccagtacaagcacctcctgctccagtanttgtnnnnnnnnnnnnnnnnnnnnnnnnnnnnnnnnnnnnnataggccccctagggccaggttaaccacaacaaggaaaaacgacaaggaccaccagaaa

SEQ ID NO: 24192 - DNA, 171 bp, Macaca Mulatta
agggtccatggtcagaccaaggtcttggctgcacagacatcaccgggagcctgcatggcccctgatcactccttctccttcctccagcaaactccagcctggcctctgaccccagttcaatctgaccatgcccaagcccaagcgggccttccctccagagctgctccaggg

SEQ ID NO: 24193 - DNA, 1928 bp, Macaca Mulatta
  misc_feature (1)...(1928): n = A,T,C or G
tgtcccgggcttacagtgacacgactgaatccttaagagtcggctggcttttgagctctcacgattggagaggagggggttttctggttcgcagctcgacaggatcgcgnnnnnnnnnnnnnnnnngtcccccacagtcacgctctgccctgaggtgcagcatttgacaagttaccccctcgcacataccacttccacccagatccgagttaactttgttattaaccttcttgagactcccctccgcctccagaacaggtcttttttccccagttcatttttgcccttgagtttcgagtttcagatattatgcagaaagtttacctttaagactgagcacgcatctgatacccttcctcccgaaaaagttcatgctcacgagagagtttgtgggaaaagtgaaagccagtacacacaggaagctatggctgagcacggggctcacatcacaactgcttctgtagctgatgaccagccatccatctttgaggtggtagcacaggacagtttaatgacagcagtgagacccgctcttcagcatgtggtcaaggnnnnnnnnnnnnnnnnnnnnnnnnnnnnnnnnnnnnnnnnnnnnnnnnnnnnnnnnnnnnnnnnnnnnnnnnnnnnnnnnnnnnnnnnnnnnnnnnnnnnnnnnnnnnnnnnnnnnnnnnnnnnnnnnnnnnnnnnnnnnnnnnnnnnnnnnnnnnnnnnnnnnnnnnnnnnnnnnnnnnnnnnnnnnnnnnnnnnnnnnnnnnnnnnnnnnnnnnnnnnnnnnnnnnnnnnnnnnnnnnnnnnnnnnnnnnnnnnnnnnnnnngaagctggtttctagcctgagagaagaggatgaatattctattcatcccccttcttcncgctggaaacgattttacagagccttcctggcagcctacccatttgtgaatatggcctgggaaggatggtttcttgtacaacaacttcgatacatcctaggaaaagctcagcatcactcaccactgctgaggctggctggagttcggctaggtcgactgacagttcaggatatacaagctctggagcacaaaccagctaaggccagcatgatgcagcagccagccaggangaaagctgtggcggttgttgccttatccctgtctactggcctttctgtgggcgtattcttcttgcagttccttgactggtggtactcatctgaaaatcaagaaaccatcaagtcattgactgccctgcctactccaccaccacctgtacacctagactataactctgattctcccctcttacccaaaatgaagactgtgtgcccactgtgtcgtaaaacccgggtgaatgatactgttcttgccacctctggctatgtgttttgttaccgctgtgtgtttcattatgtgaggagtcaccaagcttgtcccatcacaggttatccaacagaagtacaacatctgattaaactctactcccccgagaactgaaaaggaattgtgtcttatcctcacaacaaaagtattgcgctataatgccacagagctggtttcagtatggtactgagttgacacttctcagcctcaattcataactatatgaactttaaatgactatatggatttctttaaaaggatatgcccatttgatcctaaccttttagcctgctctccagaaccctacttacagttgaccaaactgcttaaagtagaagaatcaggactggcaggggatatgagggccagtgtagagattaaacagaataatgagtacacaagtttttgtctatccctttccttaaaatataagaagtacagaagctcttgggaaaaatagactacataaaaaataaagtgaacagtgagttgttagcaagcctttttagaaaagaaagcatttacttgcctgtctgtaaggtggaaatttcatcagtttgtaaatgata

SEQ ID NO: 24194 - DNA, 783 bp, Macaca Mulatta
ggggcgggctggtccaagatggcggatgaggccacgcgacgtgttgtgtctgagatccctgtgctgaagactaacgccggaccccgagatcgggagttgtgggtgcagcgactgaaggaggaatatcagtcccttatccggtatgtggagaacaacaagaatgctgacaacgattggttccgactggagtccaacaaggaagggactcggtggtttggaaaatgctggtatatccatgacctcctgaaatatgagtttgacatcgagtttgacattcctatcacatatcctactactgccccagaaattgcagttcctgagctggatggaaagacagcaaagatgtacaggggtggcaaaatatgcctgacggatcatttcaaacctttgtgggccaggaatgtgcccaaatttggactagctcatctcatggctctggggctgggtccatggctggcagtagaaatcccctgatctgattcagaagggcgtcatccaacacaaagagaaatgcaaccaatgaagaatcaagccaccgaggcagggccagagggccctttgataggctacgatactgtttttcctgtgcatcacactttcctaactggttccccgggaaaccctccaactctagtttgtttactaagtaagctgccagccagttcattgtgttggggggaataaacaaacccaaacccccaaccagttattgctactttagtttccaaggctgccccggggaaagggaaaaaactggggcttttgggacaaaggttaaggtgt

SEQ ID NO: 24195 - DNA, 8856 bp, Macaca Mulatta
  misc_feature (1)...(8856): n = A,T,C or G
ggtttgcaggcgctttcctcttggaagttgcgactgctgcggggctgagcgctggtctcccgcgcctcgggagccaggttggcggcgcgatgaggcgcagcaaggccgacgtggagcggtacatcgcctcggtgcagggctccgccccgtcgcctcgnnnnnnnnnnnnnnnnnnnnnnnnnnnnnnnnnnnnnnnnnnnnnnnnnnnnnnnnnnnnnnnnnnnnnnnnnnnnnnnnnnnnnnnnnnnnnnnnnnnnnnnnnnnnnnnnnnnnnnnnnnnnnnnnnnnnnnnnnnnnnnnnnnnnnnnnnnnnnnnnnnnnnnnnnnnnnnnnnnnnnnnnnnnnnnnnnnnnnnnnnnnnnnnnnnnnnnnnnnnnnnnnnnnnnnnnnnnnnnnnnnnnnnnnnnnnnnnnnnnnnnnnnnnnnnnnnnnnnnnnnnnnnnnnnnnnnnnnnnnnnnnnnnnnnnnnnnnnnnnnnnnnnnnnnnnnnnnnnnnnnnnnnnnnnnnnnnnnnnnnnnnnnnnnnnnnnnnnnnnnnnnnnnnnnnnnnnnnnnnnnnnnnnnnnnnnnnnnnnnnnnnnnnnnnnnnnnnnnnnnnnnnnnnnnnnnnnnnnnnnnnnnnnnnnnnnnnnnnnnnnnnnnnnnnnnnnnnnnnnnnnnnnnnnnnnnnnnnnnnnnnnnnnnnnnnnnnnnnnnnnnnnnnnnnnnnnnnnnnnnnnnnnnnnnnnnnnnnnnnnnnnnnnnnnnnnnnnnnnnnnnnnnnnnnnnnnnnnnnnnnnnnnnnnnnnnnnnnnnnnnnnnnnnnnnnnnnnnnnnnnnnnnnnnnnnnnnnnnnnnnnnnnnnnnnnnnnnnnnnnnnnnnnnnnnnnnnnnnnnnnnnnnnnnnnnnnnnnnnnnnnnnnnnnnnnnnnnnnnnnnnnnnnnnnnnnnnnnnnnnnnnnnnnnnnnnnnnnnnnnnnnnnnnnnnnnnnnnnnnnnnnnnnnnnnnnnnnnnnnnnnnnnnnnnnnnnnnnnnnnnnnnnnnnnnnnnnnnnnnnnnnnnnnnnnnnnnnnnnnnnnnnnnnnnnnnnnnnnnnnnnnnnnnnnnnnnnnnnnnnnnnnnnnnnnnnnnnnnnnnnnnnnnnnnnnnnnnnnnnnnnnnnnnnnnnnnnnnnnnnnnnnnnnnnnnnnnnnnnnnnnnnnnnnnnnnnnnnnnnnnnnnnnnnnnnnnnnnnnnnnnnnnnnnnnnnnnnnnnnnnnnnnnnnnnnnnnnnnnnnnnnnnnnnnnnnnnnnnnnnnnnnnnnnnnnnnnnnnnnnnnnnnnnnnnnnnnnnnnnnnnnnnnnnnnnnnnnnnnnnnnnnnnnnnnnnnnnnnnnnnnnnnnnnnnnnnnnnnnnnnnnnnnnnnnnnnnnnnnnnnnnnnnnnnnnnnnnnnnnnnnnnnnnnnnnnnnnnnnnnnnnnnnnnnnnnnnnnnnnnnnnnnnnnnnnnnnnnnnnnnnnnnnnnnnnnnnnnnnnnnnnnnnnnnnnnnnnnnnnnnnnnnnnnnnnnnnnnnnnnnnnnnnnnnnnnnnnnnnnnnnnnnnnnnnnnnnnnnnnnnnnnnnnnnnnnnnnnnnnnnnnnnnnnnnnnnnnnnnnnnnnnnnnnnnnnnnnnnnnnnnnnnnnnnnnnnnnnnnnnnnnnnnnnnnnnnnnnnnnnnnnnnnnnnnnnnnnnnnnnnnnnnnnnnnnnnnnnnnnnnnnnnnnnnnnnnnnnnnnnnnnnnnnnnnnnnnnnnnnnnnnnnnnnnnnnnnnnnnnnnnnnnnnnnnnnnnnnnnnnnnnnnnnnnnnnnnnnnnnnnnnnnnnnnnnnnnnnnnnnnnnnnnnnnnnnnnnnnnnnnnnnnnnnnnnnnnnnnnnnnnnnnnnnnnnnnnnnnnnnnnnnnnnnnnnnnnnnnnnnnnnnnnnnnnnnnnnnnnnnnnnnnnnnnnnnnnnnnnnnnnnnnnnnnnnnnnnnnnnnnnnnnnnnnnnnnnnnnnnnnnnnnnnnnnnnnnnnnnnnnnnnnnnnnnnnnnnnnnnnnnnnnnnnnnnnnnnnnnnnnnnnnnnnnnnnnnnnnnnnnnnnnnnnnnnnnnnnnnnnnnnnnnnnnnnnnnnnnnnnnnnnnnnnnnnnnnnnnnnnnnnnnnnnnnnnnnnnnnnnnnnnnnnnnnnnnnnnnnnnnnnnnnnnnnnnnnnnnnnnnnnnnnnnnnnnnnnnnnnnnnnnnnnnnnnnnnnnnnnnnnnnnnnnnnnnnnnnnnnnnnnnnnnnnnnnnnnnnnnnnnnnnnnnnnnnnnnnnnnnnnnnnnnnnnnnnnnnnnnnnnnnnnnnnnnnnnnnnnnnnnnnnnnnnnnnnnnnnnnnnnnnnnnnnnnnnnnnnnnnnnnnnnnnnnnnnnnnnnnnnnnnnnnnnnnnnnnnnnnnnnnnnnnnnnnnnnnnnnnnnnnnnnnnnnnnnnnnnnnnnnnnnnnnnnnnnnnnnnnnnnnnnnnnnnnnnnnnnnnnnnnnnnnnnnnnnnnnnnnnnnnnnnnnnnnnnnnnnnnnnnnnnnnnnnnnnnnnnnnnnnnnnnnnnnnnnnnnnnnnnnnnnnnnnnnnnnnnnnnnnnnnnnnnnnnnnnnnnnnnnnnnntatggaccagactcagtgcctgatgggtatcaggggtcacagacatttcatggggctccactaacagnnnnnnnnnnnnnnnnnnnnnnnnnnnnnnnnnnnnnnnnnnnnnnnnnnnnnnnnnnnnnnnnnnnnnnnnnnnnnnnnnnnnnnnnnnnnnnnnnnnnnnnnnnnnnnnnnnnnnnnnnnnnnnnnnnnnnnnnnnnnnnnnnnnnnnnnnnnnnnnnnnnnnnnnnnnnnnnnnnnnnnnnnnnnnnnnnnnnnnnnnnnnnnnnnnnnnnnnnnnnnnnnnnnnnnnnnnnnnnnnnnnnnnnnnnnnnnnnnnnnnnnnnnnnnnnnnnnnnnnnnnnnnnnnnnnnnnnnnnnnnnnnnnnnnnnnnnnnnnnnnnnnnnnnnnnnnnnnnnnnnnnnnnnnnnnnnnnnnnnnnnnnnnnnnnnnnnnnnnnnnnnnnnnnnnnnnnnnnnnnnnnnnnnnnnnnnnnnnnnnnnnnnnnnnnnnnnnnnnnnnnnnnnnnnnnnnnnnnnnnnnnnnnnnnnnnnnnnnnnnnnnnnnnnnnnnnnnnnnnnnnnnnnnnnnnnnnnnnnnnnnnnnnnnnnnnnnnnnnnnnnnnnnnnnnnnnnnnnnnnnnnnnnnnnnnnnnnnnnnnnnnnnnnnnnnnnnnnnnnnnnnnnnnnnnnnnnnnnnnnnnnnnnnnnnnnnnnnnnnnnnnnnnnnnnnnnnnnnnnnnnnnnnnnnnnnnnnnnnnnnnnnnnnnnnnnnnnnnnnnnnnnnnnnnnnnnnnnnnnnnnnnnnnnnnnnnnnnnnnnnnnnnnnnnnnnnnnnnnnnnnnnnnnnnnnnnnnnnnnnnnnnnnnnnnnnnnnnnnnnnnnnnnnnnnnnnnnnnnnnnnnnnnnnnnnnnnnnnnnnnnnnnnnnnnnnnnnnnnnnnnnnnnnnnnnnnnnnnnnnnnnnnnnnnnnnnnnnnnnnnnnnnnnnnnnnnnnnnnnnnnnnnnnnnnnnnnnnnnnnnnnnnnnnnnnnnnnnnnnnnnnnnnnnnnnnnnnnnnnnnnnnnnnnnnnnnnnnnnnnnnnnnnnnnnnnnnnnnnnnnnnnnnnnnnnnnnnnnnnnnnnnnnnnnnnnnnnnnnnnnnnnnnnnnnnnnnnnnnnnnnnnnnnnnnnnnnnnnnnnnnnnnnnnnnnnnnnnnnnnnnnnnnnnnnnnnnnnnnnnnnnnnnnnnnnnnnnnnnnnnnnnnnnnnnnnnnnnnnnnnnnnnnnnnnnnnnnnnnnnnnnnnnnnnnnnnnnnnnnnnnnnnnnnnnnnnnnnnnnnnnnnnnnnnnnnnnnnnnnnnnnnnnnnnnnnnnnnnnnnnnnnnnnnnnnnnnnnnnnnnnnnnnnnnnnnnnnnnnnnnnnnnnnnnnnnnnnnnnnnnnnnnnnnnnnnnnnnnnnnnnnnnnnnnnnnnnnnnnnnnnnnnnnnnnnnnnnnnnnnnnnnnnnnnnnnnnnnnnnnnnnnnnnnnnnnnnnnnnnnnnnnnnnnnnnnnnnnnnnnnnnnnnnnnnnnnnnnnnnnnnnnnnnnnnnnnnnnnnnnnnnnnnnnnnnnnnnnnnnnnnnnnnnnnnnnnnnnnnnnnnnnnnnnnnnnnnnnnnnnnnnnnnnnnnnnnnnnnnnnnnnnnnnnnnnnnnnnnnnnnnnnnnnnnnnnnnnnnnnnnnnnnnnnnnnnnnnnnnnnnnnnnnnnnnnnnnnnnnnnnnnnnnnnnnnnnnnnnnnnnnnnnnnnnnnnnnnnnnnnnnnnnnnnnnnnnnnnnnnnnnnnnnnnnnnnnnnnnnnnnnnnnnnnnnnnnnnnnnnnnnnnnnnnnnnnnnnnnnnnnnnnnnnnnnnnnnnnnnnnnnnnnnnnnnnnnnnnnnnnnnnnnnnnnnnnnnnnnnnnnnnnnnnnnnnnnnnnnnnnnnnnnnnnnnnnnnnnnnnnnnnnnnnnnnnnnnnnnnnnnnnnnnnnnnnnnnnnnnnnnnnnnnnnnnnnnnnnnnnnnnnnnnnnnnnnnnnnnnnnnnnnnnnnnnnnnnnnnnnnnnnnnnnnnnnnnnnnnnnnnnnnnnnnnnnnnnnnnnnnnnnnnnnnnnnnnnnnnnnnnnnnnnnnnnnnnnnnnnnnnnnnnnnnnnnnnnnnnnnnnnnnnnnnnnnnnnnnnnnnnnnnnnnnnnnnnnnnnnnnnnnnnnnnnnnnnnnnnnnnnnnnnnnnnnnnnnnnnnnnnnnnnnnnnnnnnnnnnnnnnnnnnnnnnnnnnnnnnnnnnnnnnnnnnnnnnnnnnnnnnnnnnnnnnnnnnnnnnnnnnnnnnnnnnnnnnnnnnnnnnnnnnnnnnnnnnnnnnnnnnnnnnnnnnnnnnnnnnnnnnnnnnnnnnnnnnnnnnnnnnnnnnnnnnnnnnnnnnnnnnnnnnnnnnnnnnnnnnnnnnnnnnnnnnnnnnnnnnnnnnnnnnnnnnnnnnnnnnnnnnnnnnnnnnnnnnnnnnnnnnnnnnnnnnnnnnnnnnnnnnnnnnnnnnnnnnnnnnnnnnnnnnnnnnnnnnnnnnnnnnnnnnnnnnnnnnnnnnnnnnnnnnnnnnnnnnnnnnnnnnnnnnnnnnnnnnnnnnnnnnnnnnnnnnnnnnnnnnnnnnnnnnnnnnnnnnnnnnnnnnnnnnnnnnnnnnnnnnnnnnnnnnnnnnnnnnnnnnnnnnnnnnnnnnnnnnnnnnnnnnnnnnnnnnnnnnnnnnnnnnnnnnnnnnnnnnnnnnnnnnnnnnnnnnnnnnnnnnnnnnnnnnnnnnnnnnnnnnnnnnnnnnnnnnnnnnnnnnnnnnnnnnnnnnnnnnnnnnnnnnnnnnnnnnnnnnnnnnnnnnnnnnnnnnnnnnnnnnnnnnnnnnnnnnnnnnnnnnnnnnnnnnnnnnnnnnnnnnnnnnnnnnnnnnnnnnnnnnnnnnnnnnnnnnnnnnnnnnnnnnnnnnnnnnnnnnnnnnnnnnnnnnnnnnnnnnnnnnnnnnnnnnnnnnnnnnnnnnnnnnnnnnnnnnnnnnnnnnnnnnnnnnnnnnnnnnnnnnnnnnnnnnnnnnnnnnnnnnnnnnnnnnnnnnnnnnnnnnnnnnnnnnnnnnnnnnnnnnnnnnnnnnnnnnnnnnnnnnnnnnnnnnnnnnnnnnnnnnnnnnnnnnnnnnnnnnnnnnnnnnnnnnnnnnnnnnnnnnnnnnnnnnnnnnnnnnnnnnnnnnnnnnnnnnnnnnnnnnnnnnnnnnnnnnnnnnnnnnnnnnnnnnnnnnnnnnnnnnnnnnnnnnnnnnnnnnnnnnnnnnnnnnnnnnnnnnnnnnnnnnnnnnnnnnnnnnnnnnnnnnnnnnnnnnnnnnnnnnnnnnnnnnnnnnnnnnnnnnnnnnnnnnnnnnnnnnnnnnnnnnnnnnnnnnnnnnnnnnnnnnnnnnnnnnnnnnnnnnnnnnnnnnnnnnnnnnnnnnnnnnnnnnnnnnnnnnnnnnnnnnnnnnnnnnnnnnnnnnnnnnnnnnnnnnnnnnnnnnnnnnnnnnnnnnnnnnnnnnnnnnnnnnnnnnnnnnnnnnnnnnnnnnnnnnnnnnnnnnnnnnnnnnnnnnnnnnnnnnnnnnnnnnnnnnnnnnnnnnnnnnnnnnnnnnnnnnnnnnnnnnnnnnnnnnnnnnnnnnnnnnnnnnnnnnnnnnnnnnnnnnnnnnnnnnnnnnnnnnnnnnnnnnnnnnnnnnnnnnnnnnnnnnnnnnnnnnnnnnnnnnnnnnnnnnnnnnnnnnnnnnnnnnnnnnnnnnnnnnnnnnnnnnnnnnnnnnnnnnnnnnnnnnnnnnnnnnnnnnnnnnnnnnnnnnnnnnnnnnnnnnnnnnnnnnnnnnnnnnnnnnnnnnnnnnnnnnnnnnnnnnnnnnnnnnnnnnnnnnnnnnnnnnnnnnnnnnnnnnnnnnnnnnnnnnnnnnnnnnnnnnnnnnnnnnnnnnnnnnnnnnnnnnnnnnnnnnnnnnnnnnnnnnnnnnnnnnnnnnnnnnnnnnnnnnnnnnnnnnnnnnnnnnnnnnnnnnnnnnnnnnnnnnnnnnnnnnnnnnnnnnnnnnnnnnnnnnnnnnnnnnnnnnnnnnnnnnnnnnnnnnnnnnnnnnnnnnnnnnnnnnnnnnnnnnnnnnnnnnnnnnnnnnnnnnnnnnnnnnnnnnnnnnnnnnnnnnnnnnnnnnnnnnnnnnnnnnnnnnnnnnnnnnnnnnnnnnnnnnnnnnnnnnnnnnnnnnnnnnnnnnnnnnnnnnnnnnnnnnnnnnnnnnnnnnnnnnnnnnnnnnnnnnnnnnnnnnnnnnnnnnnnnnnnnnnnnnnnnnnnnnnnnnnnnnnnnnnnnnnnnnnnnnnnnnnnnnnnnnnnnnnnnnnnnnnnnnnnnnnnnnnnnnnnnnnnnnnnnnnnnnnnnnnnnnnnnnnnnnnnnnnnnnnnnnnnnnnnnnnnnnnnnnnnnnnnnnnnnnnnnnnnnnnnnnnnnnnnnnnnnnnnnnnnnnnnnnnnnnnnnnnnnnnnnnnnnnnnnnnnnnnnnnnnnnnnnnnnnnnnnnnnnnnnnnnnnnnnnnnnnnnnnnnnnnnnnnnnnnnnnnnnnnnnnnnnnnnnnnnnnnnnnnnnnnnnnnnnnnnnnnnnnnnnnnnnnnnnnnnnnnnnnnnnnnnnnnnnnnnnnnnnnnnnnnnnnnnnnnnnnnnnnnnnnnnnnnnnnnnnnnnnnnnnnnnnnnnnnnnnnnnnnnnnnnnnnnnnnnnnnnnnnnnnnnnnnnnnnnnnnnnnnnnnnnnnnnnnnnnnnnnnnnnnnnnnnnnnnnnnnnnnnnnnnnnnnnnnnnnnnnnnnnnnnnnnnnnnnnnnnnnnnnnnnnnnnnnnnnnnnnnnnnnnnnnnnnnnnnnnnnnnnnnnnnnnnnnnnnnnnnnnnnnnnnnnnnnnnnnnnnnnnnnnnnnnnnnnnnnnnnnnnnnnnnnnnnnnnnnnnnnnnnnnnnnnnnnnnnnnnnnnnnnnnnnnnnnnnnnnnnnnnnnnnnnnnnnnnnnnnnnnnnnnnnnnnnnnnnnnnnnnnnnnnnnnnnnnnnnnnnnnnnnnnnnnnnnnnnnnnnnnnnnnnnnnnnnnnnnnnnnnnnnnnnnnnnnnnnnnnnnnnnnnnnnnnnnnnnnnnnnnnnnnnnnnnnnnnnnnnnnnnnnnnnnnnnnnnnnnnnnnnnnnnnnnnnnnnnnnnnnnnnnnnnnnnnnnnnnnnnnnnnnnnnnnnnnnnnnnnnnnnnnnnnnnnnnnnnnnnnnnnnnnnnnnnnnnnnnnnnnnnnnnnnnnnnnnnnnnnnnnnnnnnnnnnnnnnnnnnnnnnnnnnnnnnnnnnnnnnnnnnnnnnnnnnnnnnnnnnnnnnnnnnnnnnnnnnnnnnnnnnnnnnnnnnnnnnnnnnnnnnnnnnnnnnnnnnnnnnnnnnnnnnnnnnnnnnnnnnnnnnnnnnnnnnnnnnnnnnnnnnnnnnnnnnnnnnnnnnnnnnnnnnnnnnnnnnnnnnnnnnnnnnnnnnnnnnnnnnnnnnnnnnnnnnnnnnnnnnnnnnnnnnnnnnnnnnnnnnnnnnnnnnnnnnnnnnnnnnnnnnnnnnnnnnnnnnnnnnnnnnnnnnnnnnnnnnnnnnnnnnnnnnnnnnnnnnnnnnnnnnnnnnnnnnnnnnnnnnnnnnnnnnnnnnnnnnnnnnnnnnnnnnnnnnnnnnnnnnnnnnnnnnnnnnnnnnnnnnnnnnnnnnnnnnnnnnnnnnnnnnnnnnnnnnnnnnnnnnnnnnnnnnnnnnnnnnnnnnnnnnnnnnnnnnnnnnnnnnnnnnnnnnnnnnnnnnnnnnnnnnnnnnnnnnnnnnnnnnnnnnnnnnnnnnnnnnnnnnnnnnnnnnnnnnnnnnnnnnnnnnnnnnnnnnnnnnnnnnnnnnnnnnnnnnnnnnnnnnnnnnnnnnnnnnnnnnnnnnnnnnnnnnnnnnnnnnnnnnnnnnnnnnnnnnnnnnnnnnnnnnnnnnnnnnnnnnnnnnnnnnnnnnnnnnnnnnnnnnnnnnnnnnnnnnnnnnnnnnnnnnnnnnnnnnnnnnnnnnnnnnnnnnnnnnnnnnnnnntaaaatttccaatgggcaaatactggagcggctgtgttgggaacacagtcagttgaaacccagtcaatggtaaaagttggtgaagatgaagatggtagtgatgaagaagtagttcataatgaagatatccattntgaaccaatagtgtcactaccagaggtaaatgt

SEQ ID NO: 24196 - DNA, 985 bp, Macaca Mulatta
ccggggggccagccatggttgctgggagcgacgcgggacgagccctgggggtcctcggcgtgttctgtctgttgcgctgcttcggtttcatcagctgtatttcccaacaaacatatggcattctgcataagaatgtcactttccatgtaccaagcaatatacctttaacagaaatcctatggaaaaaacaaaaggataaagttgcagaacgggaaaattctgaattcagagctttctcatcttttaaagatagggtttatttggacactgtgtcaggtagcctcactatctacaacttaacattatcagacgaagatgagtatgaaatggaatcgccaaatattaccgataccatgaagttctttctttatgtacttgagcctcttccatctcctacactaacttgtgcattgactaatggaagcattgaagtccagtgcatgataccggagcattacaacactcatccacaacttaacacgtactcatgggattgtcctttggagcaatgtaaacataactcaacccgtatatattttaagatggaaaatgatcttccacaaaaagtacagtgtactgctagcaatccattatttaaaagaacatcatcaatcattccgggaaacctgtatcccaagcagtggtcattcaagagagagatatggacttatacctgtagcattagcactaactgtaacatgtgttgtactgtgtgtgcgtggtatgtatgttttttaaaacaaaataattttcaaacttgcattggttttccaaaggccagaaaatagtttaaggatgaaaataaagtttgaaattttagatatttgaaaagaaacaaaagctcttttgctttacttatgtgggactgctgagcatgctaggttcctccaaagatcctacattatctcaaggtagaatgaatccttgggccacagagagctttacaggcctgggaacatagcctggacctgttgcatagtctcct

SEQ ID NO: 24197 - DNA, 853 bp, Macaca Mulatta
cagtctccagcatggcctggtctcctctcctcctcaccctcctcgctcactgcacaggatcctgggcccagtctgtgctgactcagccgccctcagtgtctggggccccagggcagagggtcaccatctcctgcactgggggcagctccaacattggaggttattatgtatcctggtaccagcagctcccaggaacggcccccaaactcctcatctatgacgataataagcgaccctcagggatttctgaccgattctctggctccaagtctggtacctcagcctccctgaccatcactgggctccaggctggggatgaggctgattattactgctcagcatgggacagcagcctgagtggtggcttattcggaggagggacccggctgaccgtcctaggtcagcccaaggctgccccctcggtcactctcttcccgccctcctctgaggagcttcaagccaacaaggccacactagtgtgtctgatcagtgacttctacccgggagccgtggaagtggcctggaaggcagatggcagcgctgtcaacgcgggagtggagaccaccaaaccctccaaacagagcaacaacaagtacgcggccagcagctacctgagcctgacgtccgaccagtggaagtcccacaagagctacagctgccaggtcacgcacgaagggagcaccgtggagaagacagtggcccctgcagaatgttcataggttcccaagcctcatcccagccacgggggcctggagctgcaggatcccaggggaggggtctctcctcccaccccaaggcatccagcccttctccctgcactcaataaaccctcaataaatattctcactgacaa

SEQ ID NO: 24198 - DNA, 653 bp, Macaca Mulatta
  misc_feature (1)...(653): n = A,T,C or G
gggcatttttctggctggtctccctgctcctggcctctgtggtctggttcatcttggtccatgtgaccgaccggtcagatgcccggctccagtacggcctcctgatttttggtgctgctgtctctgtccttctacaggaggtgttccgctttgcctactacaagctgcttaagngaaggcagatgaggggttagcatcgctgagtgaggacggaagatcacccatctccatccgccagatggcctatgnnnnnnnnnnnnnnnnnnnnnnnnnnnnnnnnnnnnnnnnnnnnnnnnnnnnnnnnnnnnnnnnnnnnnnnnnnnntgtggttgtcatccatggagactcaccctattactttttgacttcagncagcctttctgacagcagccattatcctgctccataccttttggggagttgtgttctttgatgcctgtgagaggagacggtactgggctttgggcctggtggttgggagtcacctactgacatcgggactgngacattcctgaacccctggtatgaggccagcctgctgcccatctatgcagtcactgtttccatggggctctgggccttcatcacagctggagggtccctccgaagtattcagcgcagcctcttgtgtaaggactgactacctggactga

SEQ ID NO: 24199 - DNA, 598 bp, Macaca Mulatta
actggagcttggtggaacagtcaatattacatgtcgacaaaactgggatacagtgcaatacttgaatctaaactaaagccattcctagggagtagtgactgtgttaatcaaatatcagggaaacttaaactgggaaaagaagtcctagctactttggaaggtcattgggatagtgaagtttctattactgataaaaagactgataattcagaggtatctggaatccaacacctgacattaagcaatggagattaataaggcacactgtaaaatttgaagaacagggagattttgaatcagagaaactctggcaacgggtaactcgagccataaatgccaaagaccaaactgaagctacccaagagaagtacgttttggaagaagctcaaagacgagctgccagagatcggaaaacaaaaaatgaagaatggtcttgcaaattatcttgaacttgatccactcactggagaatggcatgacaagtttgcagatacccgaccatgggacccacttaatgatatgatacaatttgaaaaagatggcgttattcagaccaaagtgaaaccatcgtactcccaatggtttatgtgcccaaaat

SEQ ID NO: 24200 - DNA, 806 bp, Macaca Mulatta
atggctcctaagacatgcagattcgctgaggagcattggttaatcatgcacctttgtgccatgtctaattcttttatttctttttacttaatctaatgttagtgaatttgtcttacgtaaaaggatatttcagggaaatattttcagaagtctatttagagtctctttaacacagtgtcccattgaaattttagtttttagagaatttatgaatcactgtttcaagaaccagattggaatgacaatgaagcctttattgagccactacattaaaagtatatattgctttaccaccttcaataccagtattacataaatgcatgtatcagaaacttcacagaaattacatgacaactcttgtagctaagaaagtaattctgaggtgtacatttgtcttgcctttttaaatttataaacctgccctaaaaggagatgcatatctgggaaactgaactgtcttttgcagtttagccttcatgtacataaaatatgccattaattttattggggaagaaattccatccaaaaatgttgcctacagctatgagttaagagtgtctgtacagtgtgtagcttttattttctaaaatcacagatagggcatgtatatgaattataaatatataaatacaattttgtattaaaagttttgtagtttatggcaaaatctggtcctgtggtaggctaaataagtacagtccctgtgaaaggaatgtttgtggctcatgtcagtgtgtgaatgcatagacaatttgaagtttttgatatatttgtgatatttatcttgagcactgcaatctcacccc

SEQ ID NO: 24201 - DNA, 3935 bp, Macaca Mulatta
  misc_feature (1)...(3935): n = A,T,C or G
tccaggctccaaccattcaagtgtcatcatgacagcaaaaccttttgagtctggtcttcagcaaacagaggacaaatcactcctgaaccaggggagcagctcagaggaagttgcaggnnnnnnnnnnnnnnnnnnnnnnnnnnnnnnnnnnnnnnnnnnnnnnnnnnnnnnnnnnnnnnnnnnnnnnnnnnnnnnnnnnnnnnnnnnnnnnnnnnnnnnnnnnnnnnnnnnnnnnnnnnnnnnnnnnnnnnnnnnnnnnnnnnnnnnnnnnnnnnnnnnnnnnnnnnnnnnnnnnnnnnnnnnnnnnnnnnnnnnnnnnnnnnnnnnnnnnnnnnnnnnnnnnnnnnnnnnnnnnnnnnnnnnnnnnnnnnnnnnnnnnnnnnnnnnnnnnnnnnnnnnnnnnnnnnnnnnnnnnnnnnnnnnnnnnnnnnnnnnnnnnnnnnnnnnnnnnnnnnnnnnnnnnnnnnnnnnnnnnnnnnnnnnnnnnnnnnnnnnnnnnnnnnnnnnnnnnnnnnnnnnnnnnnnnnnnnnnnnnnnnnnnnnnnnnnnnnnnnnnnnnnnnnnnnnnnnnnnnnnnnnnnnnnnnnnnnnnnnnnnnnnnnnnnnnnnnnnnnnnnnnnnnnnnnnnnnnnnnnnnnnnnnnnnnnnnnnnnnnnnnnnnnnnnnnnnnnnnnnnnnnagttgcaaccgccaatccaggaaagtgcctgtcatgcacaaactcaacattcactttcaccacctgtagaatattacatccctctgacatcactcaggttacccccagnnnnnnnnnnnnnnnnnnnnnnnnnnnnnnnnnnnnnnnnnnnnnnnnnnnnnnnnnnnnnnnnnnnnnnnnnnnnnnnnnnnnnnnnnnnnnnnnnnnnnnnnnnnnnnnnnnnnnnnnnnnnnnnnnnnnnnnnnnnnnnnnnnnnnnnnnnnnnnnnnnnnnnnnnnnnnnnnnnnnnnnnnnnnnnnnnnnnnnnnnnnnnnnnnnnnnnnnnnnnnnnnnnnnnnnnnnnnnnnnnnnnnnnnnnnnnnnnnnnnnnnnnnnnnnnnnnnnnnnnnnnnnnnnnnnnnnnnnnnnnnnnnnnnnnnnnnnnnnnnnnnnnnnnnnnnnnnnnnnnnnnnnnnnnnnnnnnnnnnnnnnnnnnnnnnnnnnnnnnnnnnnnnnnnnnnnnnnnnnnnnnnnnnnnnnnnnnnnnnnnnnnnnnnnnnnnnnnnnnnnnnnnnnnnnnnnnnnnnnnnnnnnnnnnnnnnnnnnnnnnnnnnnnnnnnnnnnnnnnnnnnnnnnnnnnnnnnnnnnnnnnnnnnnnnnnnnnnnnnnnnnnnnnnnnnnnnnnnnnnnnnnnnnnnnnnnnnnnnnnnnnnnnnnnnnnnnnnnnnnnnnnnnnnnnnnnnnnnnnnnnnnnnnnnnnnnnnnnnnnnnnnnnnnnnnnnnnnnnnnnnnnnnnnnnnnnnnnnnnnnnnnnnnnnnnnnnnnnnnnnnnnnnnnnnnnnnnnnnnnnnnnnnnnnnnnnnnnnnnnnnnnnnnnnnnnnnnnnnnnnnnnnnnnnnnnnnnnnnnnnnnnnnnnnnnnnnnnnnnnnnnnnnnnnnnnnnnnnnnnnnnnnnnnnnnnnnnnnnnnnnnnnnnnnnnnnnnnnnnnnnnnnnnnnnnnnnnnnnnnnnnnnnnnnnnnnnnnnnnnnnnnnnnnnnnnnnnnnnnnnnnnnnnnnnnnnnnnnnnnnnnnnnnnnnnnnnnnnnnnnnnnnnnnnnnnnnnnnnnnnnnnnnnnnnnnnnnnnnnnnnnnnnnnnnnnnnnnnnnnnnnnnnnnnnnnnnnnnnnnnnnnnnnnnnnnnnnnnnnnnnnnnnnnnnnnnnnnnnnnnnnnnnnnnnnnnnnnnnnnnnnnnnnnnnnnnnnnnnnnnnnnnnnnnnnnnnnnnnnnngacaatagtgagatggcttatatgtttcccctgttaatatctggttaaattatacatccatcaaatgatatgctcgcagcattagcaaaattaggagtttcatctttttcattgaatcataggtggagactcctattttcctttctgttttcaggcctttgagcccctgggagcccaaataccactcaattattttgtatttatgattaataaaagttcattttttaaatttgtatttttatacaacctccnnnnnnnnnnnnnnnnnnnnnnnnnnnnnnnnnnnnnnnnnnnnnnnnnnnnnnnnnnnnnnnnnnnnnnnnnnnnnnnnnnnnnnnnnnnnnnnnnnnnnnnnnnnnnnnnnnnnnnnnnnnnnnnnnnnnnnnnnnnnnnnnnnnnnnnnnnnnnnnnnnnnnnnnnnnnnnnnnnnnnnnnnnnnnnnnnnnnnnnnnnnnnnnnnnnnnnnnnnnnnnnnnnnnnnnnnnnnnnnnnnnnnnnnnnnnnnnnnnnnnnnnnnnnnnnnnnnnnnnnnnnnnnnnnnnnnnnnnnnnnnnnnnnnnnnnnnnnnnnnnnnnnnnnnnnnnnnnnnnnnnnnnnnnnnnnnnnnnnnnnnnnnnnnnnnnnnnnnnnnnnnnnnnnnnnnnnnnnnnnnnnnnnnnnnnnnnnnnnnnnnnnnnnnnnnnnnnnnnnnnnnnnnnnnnnnnnnnnnnnnnnnnnnnnnnnnnnnnnnnnnnnnnnnnnnnnnnnnnnnnnnnnnnnnnnnnnnnnnnnnnnnnnnnnnnnnnnnnnnnnnnnnnnnnnnnnnnnnnnnnnnnnnnnnnnnnnnnnnnnnnnnnnnnnnnnnnnnnnnnnnnnnnnnnnnnnnnnnnnnnnnnnnnnnnnnnnnnnnnnnnnnnnnnnnnnnnnnnnnnnnnnnnnnnnnnnnnnnnnnnnnnnnnnnnnnnnnnnnnnnnnnnnnnnnnnnnnnnnnnnnnnnnnnnnnnnnnnnnnnnnnnnnnnnnnnnnnnnnnnnnnnnnnnnnnnnnnnnnnnnnnnnnnnnnnnnnnnnnnnnnnnnnnnnnnnnnnnnnnnnnnnnnnnnnnnnnnnnnnnnnnnnnnnnnnnnnnnnnnnnnnnnnnnnnnnnnnnnnnnnnnnnnnnnnnnnnnnnnnnnnnnnnnnnnnnnnnnnnnnnnnnnnnnnnnnnnnnnnnnnnnnnnnnnnnnnnnnnnnnnnnnnnnnnnnnnnnnnnnnnnnnnnnnnnnnnnnnnnnnnnnnnnnnnnnnnnnnnnnnnnnnnnnnnnnnnnnnnnnnttctaaataaattctgcaaaaacaaaggatgaagatggtctctccctttcgttccccttcacttagttgtgctgaggtcaatagagcgtacacattcagaaaggattccagcaggtttatatgtgaatataagtgtccttgaatggggcaggcattaaatagaagaatccctgctgtttaaatttcccacatattccaattcactttttaaaaataccatttgaatttgtgtttcatagagtgactctggggtgcttactttagccaattcttaaaattttttatttgttccctaagaaagtaattagtgtttctgttgcctgaacagttacagtttccaggaaacatcaggaagtaggaaactgtagggccagagagtagtacaaagttaaattgtccgatttatgtgtattacataaagctataaattgaactagattttgccgtgctctgtactgagtataatttgtatacttttttataattaatgactaaatgatcattttgaaggcagggtggtgggggtgtgttagcagccaaataaggacatctgattaaaaagaaccagacttagatttttttaaagtacactgatgttgatgttccaccagaaacaccttaattgtatactgatgtgtaatgtctctagaaatgaatcctgtcttaaaactgggttttgctgttttttgaagtttctgcctaaaatcatttttggt

SEQ ID NO: 24202 - DNA, 3030 bp, Macaca Mulatta
  misc_feature (1)...(3030): n = A,T,C or G
gtcgatgatcagctgactgttaacatagatgaaggtggatgggcttgtctggtgtgcaaagagaagctcattatttggaagattgctctgtcacctattactaagnnnnnnnnnnnnnnnnnnnnnnnnnnnnnnnnnnnnnnnnnnnnnnnnnnnnnnnnnnnnnnnnnnnnnnnnnnnnnnnnnnnnnnnnnnnnnnnnnnnnnnnnnnnnnnnnnnnnnnnnnnnnnnnnnnnnnnnnnnnnnnnnnnnnnnnnnnnnnnnnnnnnnnnnnnnnnnnnnnnnnnnnnnnnnnnnnnnnnnnnnnnnnnnnnnnnnnnnnnnnnnnnnnnnnnnnnnnnnnnnnnnnnnnnnnnnnnnnnnnnnnnnnnnnnnnnnnnnnnnnnnnnnnnnnnnnnnnnnnnnnnnnnnnnnnnnnnnnnnnnnnnnnnnnnnnnnnnnnnnnnnnnnnnnnnnnnnnnnnnnnnnnnnnnnnnnnnnnnnnnnnnnnnnnnnnnnnnnnnnnnnnnnnnnnnnnnnnnnnnnnnnnnnnnnnnnnnnnnnnnnnnnnnnnnnnnnnnnnnnnnnnnnnnnnnnnnnnnnnnnnnnnnnnnnnnnnnnnnnnnnnnnnnnnnnnnnnnnnnnnnnnnnnnnnnnnnnnnnnnnnnnnnnnnnnnnnnnnnnnnnnnnnnnnnnnnnnnnnnnnnnnnnnnnnnnnnnnnnnnnnnnnnnnnnnnnnnnnnnnnnnnnnnnnnnnnnnnnnnnnnnnnnnnnnnnnnnnnnnnnnnnnnnnnnnnnnnnnnnnnnnnnnnnnnnnnnnnnnnnnnnnnnnnnnnnnnnnnnnnnnnnnnnnnnnnnnnnnnnnnnnnnnnnnnnnnnnnnnnnnnnnnnnnnnnnnnnnnnnnnnnnnnnnnnnnnnnnnnnnnnnnnnnnnnnnnnnnnnnnnnnnnnnnnnnnnnnnnnnnnnnnnnnnnnnnnnnnnnnnnnnnnnnnnnnnnnnnnnnnnnnnnnnnnnnnnnnnnnnnnnnnnnnnnnnnnnnnnnnnnnnnnnnnnnnnnnnnnnnnnnnnnnnnnnnnnnnnnnnnnnnnnnnnnnnnnnnnnnnnnnnnnnnnnnnnnnnnnnnnnnnnnnnnnnnnnnnnnnnnnnnnnnnnnnnnnnnnnnnnnnnnnnnnnnnnnnnnnnnnnnnnnnnnnnnnnnnnnnnnnnnnnnnnnnnnnnnnnnnnnnnnnnnnnnnnnnnnnnnnnnnnnnnnnnnnnnnnnnnnnnnnnnnnnnnnnnnnnnnnnnnnnnnnnnnnnnnnnnnnnnnnnnnnnnnnnnnnnnnnnnnnnnnnnnnnnnnnnnnnnnnnnnnnnnnnnnnnnnnnnnnnnnnnnnnnnnnnnnnnnnnnnnnnnnnnnnnnnnnnnnnnnnnnnnnnnnnnnnnnnnnnnnnnnnnnnnnnnnnnnnnnnnnnnnnnnnnnnnnnnnnnnnnnnnnnnnnnnnnnnnnnnnnnnnnnnnnnnnnnnnnnnnnnnnnnnnnnnnnnnnnnnnnnnnnnnnnnnnnnnnnnnnnnnnnnnnnnnnnnnnnnnnnnnnnnnnnnnnnnnnnnnnnnnnnnnnnnnnnnnnnnnnnnnnnnnnnnnnnnnnnnnnnnnnnnnnnnnnnnnnnnnnnnnnnnnnnnnnnnnnnnnnnnnnnnnnnnnnnnnnnnnnnnnnnnnnnnnnnnnnnnnnnnnnnnnnnnnnnnnnnnnnnnnnnnnnnnnnnnnnnnnnnnnnnnnnnnnnnnnnnnnnnnnnnnnnnnnnnnnnnnnnnnnnnnnnnnnnnnnnnnnnnnnnnnnnnnnnnnnnnnnnnnnnnnnnnnnnnnnnnnnnnnnnnnnnnnnnnnnnnnnnnnnnnnnnnnnnnnnnnnnnnnnnnnnnnnnnnnnnnnnnnnnnnnnnnnnnnnnnnnnnnnnnnnnnnnnnnnnnnnnnnnnnnnnnnnnnnnnnnnnnnnnnnnnnnnnnnnnnnnnnnnnnnnnnnnnnnnnnnnnnnnnnnnnnnnnnnnnnnnnnnnnnnnnnnnnnnnnnnnnnataatacgccagcatgcgtttgtcctgaaggtggtttatccacaggcagacagcaacctctgaaacatcgtgaccgagcaactggtagccctgatcgattgcttcctggatggttatgtttctcagctgaagtcggtggataaatccagtaatcgggaaagatatgacaatctggagatggaatacctacagaaaagatcagatctcttatctcctcttcnnncactaggccagtacctgtgggctgcttctctagcagagaaatactgtgactttgatatcttggtacaaatgtgtgagcagactgacaaccagagccgactgcagcgctacatgacccnnnnnnnnnnngaatttttcagactttctcttccgttggtatctggagaaaggaaagcgaggcaaattattatctcagcccgtttctcagcatggacagttggcgaattttttgcaagctcatgaacatctcagctggttacatgaaattaatagccaagaattagaaaaggnnnnnnnnnnnnnnnnnnnnnnnnnnnnnnnnnnnnnnnnnnnnnnnnnnnnnnnnnnnnnnnnnnnnnnnnnnnnnnnnnnnnnnnnnnnnnnnnnnnnnnnnnnnnnnnnnnnnnnnnnnnnnnnnnnnnngaaatggctgagcaggagcgctttctactgcatcaggagaccctacctgaacagctgctagcggagaaacagctacatctcagtgcgatgccagtattgactgcaccacaactcattggtnnnnnnnnnnnnnnnnnnnnnnnnnnnnnnnnnnnnnnnnnnnnnnnnnnnnnnnnnnnnnnnnnnnnnnnnnnnnnnnnnnnnnnnnnnnnnnnnnnnnnnnnnnnnnnnnnnnnnnnnnnnnnnnnnnnnnnnnnnnnnnnnnnctggtccagttctgatggcaaagatgatccaattgaagtatctaaagacagtatatttgtgaagatcttacagaaacttttaaaagatg

SEQ ID NO: 24203 - DNA, 738 bp, Macaca Mulatta
ggggcaggagacagcatgtcacccgggactctgccggtgcagaatatgaacaatgccatgttcttggagaatacgcttagcctgagtttcataggaggtaatcaccggacaactgcagaatgtagaacactgagcaggacgactggcctgtctccttcacacagtccatgtcaccacgaatctcacaacaaaaaggagaagagatattttgggttcaaagaaagtaaaaagggactgtagctacatttctttattttgaaccccaaatatttcctcatctttttgttgttgtcattgattgtggtgacatggactcgtttgtaggggacaggtcagctgtctggctcagtgatctacattctgaagttgtctgaaaatgtcttcatgattcaattcagcctaagcgttttgccaggaacactgcagagtcaatactgtgactttccaacctcagcctgtctatctgcgggcatagaaggtctagtttgtccatcaccattatcatgatatcaggactggttacttggttaaggaggggtctaggagatctgttgcttttaaagacaccttacttataatgaaatatttggggaagtggtttttaaaagtataaacgtcatgtattccaatcatcatcctctaaacacttcatcgttttattaatcaatccctggtctgtgtcctatttattaaatccagtatctcctacactgggaaaattttcctggtctcaaatta

SEQ ID NO: 24204 - DNA, 719 bp, Macaca Mulatta
  misc_feature (1)...(719): n = A,T,C or G
ttgcacagatgtatttcatccttctttttggtggggctgaatgttttctcctgggagcaatggcttatgaccgatttgctgcaatttgtcatcctctcaactaccaaatgattatgaataaaggagtttttatgaaattagttatattttcatgggccttaggttttatgttaggtactgtgcaaacgtcatgggtatctagttttcccttttgtggccttaatgaaattaaccatatatcttgtgaaaccccagcagtgttagaacttgcatgtgcagacacgtttttgtttgaaatctatgcattcacaggcacctttttgattattttggttcctttcttgttgatactcctgtcttacattcgaattctttttgccatcctgaagattccatcaactactgggagacaaaaggccttttcaacctgtgcctctcacctcacatctgtgaccctgttctacggcacagccaatatgacttatttacagcccaaatctggctactcaccagaaaccaagaaactgatgtcactgtcttattcacttctgacacctctgctgaatccacttatctacagtctgcaaaacagtgagatgaagagggctttgatganactatggcgaaggcgagtggttttacacacaatctgactgtgttgagaagccatgtaagatttagtcactgcctgaatgtactcaatctaaatttaataaatg

SEQ ID NO: 24205 - DNA, 3675 bp, Macaca Mulatta
  misc_feature (1)...(3675): n = A,T,C or G
aaagaaagtgacaaccctaggcgacttttgaggagaggaacttgtgccttcagcatcttatttaaacttttttctgaaggactgttttctgccaaacttttcctcacagccactttacatgagccaattatgcaactccttgttgaagatgaagatcacctggaaacagatccaaacaagctaattgagaggttctcccaaagtcagcaggaaaaactctttggagagaagggctcnnnnnnnnnnnnnnnnnnnnnnnnnnnnnnnnnnnnnnnnnnnnnnnnnnnnnnnnnnnnnnnnnnnnnnnnnnnnnnnnnnnnnnnnnnnnnnnnnnnnnnnnnnnnnnnnnnnnnnnnnnnnnnnnnnnnnnnnnnnnnnnnnnnnnnnnnnnnnnnnnnnnnnnnnnnnnnnnnnnnnnnnnnnnnnnnnnnnnnnnnnnnnnnnnnnnnnnnnnnnnnnnnnnnnnnnnnnnnnnnnnnnnnnnnnnnnnnnnnnnnnnnnnnnnnnnnnnnnnnnnnnnnnnnnnnnnnnnnnnnnnnnnnnnnnnnnnnnnnnnnnnnnnnnnnnnnnnnnnnnnnnnnnnnnnnnnnnnnnnnnnnnnnnnnnnnnnnnnnnnnnnnnnnnnnnnnnnnnnnnnnnnnnnnnnnnnnnnnnnnnnnnnnnnnnnnnnnnnnnnnnnnnnnnnnnnnnnnnnnnnnnnnnnnnnnnnnnnnnnnnnnnnnnnnnnnnnnnnnnnnnnnnnnnnnnnnnnnnnnnnnnnnnnnnnnnnnnnnnnnnnnnnnnnnnnnnnnnnnnnnnnnnnnnnnnnnnnnnnnnnnnnnnnnnnnnnnnnnnnnnnnnnnnnnnnnnnnnnnnnnnnnnnnnnnnnnnnnnnnnnnnnnnnnnnnnnnnnnnnnnnnnnnnnnnnnnnnnnnnnnnnnnnnnnnnnnnnnnnnnnnnnnnnnnnnnnnnnnnnnnnnnnnnnnnnnnnnnnnnnnnnnnnnnnnnnnnnnnnnnnnnnnnnnnnnnnnnnnnnnnnnnnnnnnnnnnnnnnnnnnnnnnnnnnnnnnnnnnnnnnnnnnnnnnnnnnnnnnnnnnnnnnnnnnnnnnnnnnnnnnnnnnnnnnnnnnnnnnnnnnnnnnnnnnnnnnnnnnnnnnnnnnnnnnnnnnnnnnnnnnnnnnnnnnnnnnnnnnnnnnnnnnnnnnnnnnnnnnnnnnnnnnnnnnnnnnnnnnnnnnnnnnnnnnnnnnnnnnnnnnnnnnnnnnnnnnnnnnnnnnnnnnnnnnnnnnnnnnnnnnnnnnnnnnnnnnnnnnnnnnnnnnnnnnnnnnnnnnnnnnnnnnnnnnnnnnnnnnnnnnnnnnnnnnnnnnnnnnnnnnnnnnnnnnnnnnnnnnnnnnnnnnnnnnnnnnnnnnnnnnnnnnnnnnnnnnnnnnnnnnnnnnnnnnnnnnnnnnnnnnnnnnnnnnnnnnnnnnnnnnnnnnnnnnnnnnnnnnnnnnnnnnnnnnnnnnnnnnnnnnnnnnnnnnnnnnnnnnnnnnnnnnnnnnnnnnnnnnnnnnnnnnnnnnnnnnnnnnnnnnnnnnnnnnnnnnnnnnnnnnnnnnnnnnnnnnnnnnnnnnnnnnnnnnnnnnnnnnnnnnnnnnnnnnnnnnnnnnnnnnnnnnnnnnnnnnnnnnnnnnnnnnnnnnnnnnnnnnnnnnnnnnnnnnnnnnnnnnnnnnnnnnnnnnnnnnnnnnnnnnnnnnnnnnnnnnnnnnnnnnnnnnnnnnnnnnnnnnnnnnnnnnnnnnnnnnnnnnnnnnnnnnnnnnnnnnnnnnnnnnnnnnnnnnnnnnnnnnnnnnnnnnnnnnnnnnnnnnnnnnnnnnnnnnnnnnnnnnnnnnnnnnnnnnnnnnnnnnnnnnnnnnnnnnnnnnnnnnnnnnnnnnnnnnnnnnnnnnnnnnnnnnnnnnnnnnnnnnnnnnnnnnnnnnnnnnnnnnnnnnnnnnnnnnnnnnnnnnnnnnnnnnnnnnnnnnnnnnnnnnnnnnnnnnnnnnnnnnnnnnnnnnnnnnnnnnnnnnnnnnnnnnnnnnnnnnnnnnnnnnnnnnnnnnnnnnnnnnnnnnnnnnnnnnnnnnnnnnnnnnnnnnnnnnnnnnnnnnnnnnnnnnnnnnnnnnnnnnnnnnnnnnnnnnnnnnnnnnnnnnnnnnnnnnnnnnnnnnnnnnnnnnnnnnnnnnnnnnnnnnnnnnnnnnnnnnnnnnnnnnnnnnnnnnnnnnnnnnnnnnnnnnnnnnnnnnnnnnnnnnnnnnnnnnnnnnnnnnnnnnnnnnnnnnnnnnnnnnnnnnnnnnnnnnnnnnnnnnnnnnnnnnnnnnnnnnnnnnnnnnnnnnnnnnnnnnnnnnnnnnnnnnnnnnnnnnnnnnnnnnnnnnnnnnnnnnnnnnnnnnnnnnnnnnnnnnnnnnnnnnnnnnnnnnnnnnnnnnnnnnnnnnnnnnnnnnnnnnnnnnnnnnnnnnnnnnnnnnnnnnnnnnnnnnnnnnnnnnnnnnnnnnnnnnnnnnnnnnnnnnnnnnnnnnnnnnnnnnnnnnnnnnnnnnnnnnnnnnnnnnnnnnnnnnnnnnnnnnnnnnnnnnnnnnnnnnnnnnnnnnnnnnnnnnnnnnnnnnnnnnnnnnnnnnnnnnnnnnnnnnnnnnnnnnnnnnnnnnnnnnnnnnnnnnnnnnnnnnnnnnnnnnnnnnnnnnnnnnnnnnnnnnnnnnnnnnnnnnnnnnnnnnnnnnnnnnnnnnnnnnnnnnnnnnnnnnnnnnnnnnnnnnnnnnnnnnnnnnnnnnnnnnnnnnnnnnnnnnnnnnnnnnnnnnnnnnnnnnnnnnnnnnnnnnnnnnnnnnnnnnnnnnnnnnnnnnnnnnnnnnnnnnnnnnnnnnnnnnnnnnnnnnnnnnnnnnnnnnnnnnnnnnnnnnnnnnnnnnnnnnnnnnnnnnnnnnnnnnnnnnnnnnnnnnnnnnnnnnnnnnnnnnnnnnnnnnnnnnnnnnnnnnnnnnnnnnnnnnnnnnnnnnnagaaaaagagccccatatattgcttatctcactcgttgtcgacaaggactacagaccacacaggctcacctggaaaggctattgcaaagggttttgcgagacaaagaagtggccaatcgatactttaccaccgtctgtgtgagattactgcttgagagcaaagaaaagaagatcagggaattcattcaannnnnnnnnnnnnnnnnnnnnnnnnnnnnnnnnnnnnnnnnnnnnnnnnnnnnnnnnnnnnnnnnnnnnnnnnnnnnnnnnnnnnnnnnnnnnnnnnnnnnnnnnnnnnnnnnnnnnnnnnnnnnnnnnnnnnnnnnnnnnnnnnnnnnnnnnnnaccggattttcaagcttgccttctaccctaatcaggatggggacatacttcgcgaccagnnnnnnnnnnnnnnnnnnnnnnnnnnnnnnnnnnnnnnnnnnnnnnnnnnnnnnnnnnnnnnnnnnnnnnaggtttatcttcgagaagcaccatggccatctgcacaatcagaaatcaggacaataagtgcttataaaaccccccgggacaaagtgcagtgcatcctgagaatgtgctctacgattatgaacctcctgagcctggccaatgaggactctgtccctggagcggatgactttgttcctgtgttggtgtttgtgttgataaag

SEQ ID NO: 24206 - DNA, 442 bp, Macaca Mulatta
  misc_feature (1)...(442): n = A,T,C or G
gaaaggaaatttccaccttacaacggttttggttctgaagaggattctctccgtacctgcataggcctcaagcccacacctcatcggaggaacttcaagaagtttatggaaaaagacannnnnnnnnnnnnnnnnnnnnnnnnnnnnnnnnnnnnnnnnnnnnnnnnnnnnnnnnnnnnnnnnnnnnnnnnnnnnnnnnnnnnnnnnnnnnnnnnnnnnnnnnnnnnnnnnnnnnnnnnnnnnnggaattaccggtgggatgttcttgaaaagaagtcgcgttaagaagcctgggcaagaagtctttaaaagtgaactatctgaatatatcaaggctgaggacctgtacattggagtcacagtgaatgtgaatggttacctatttcgtttgctcaatgctgatgagtataccttaaactacatggagcagaatacagataag

SEQ ID NO: 24207 - DNA, 1091 bp, Macaca Mulatta
ggaacccaagcgagccaaccaaagtcaccagttcggaagtgctaagctaataggagtctgacccgagggcctgctgcttcctggttaagtatcttttgagattctagaacacatggaagcttttcacttttggggaaaaaccagatttttttcttctccaattatttcaaaagacacactacatagaaggaagccctataaactcaaaaaatccttgggaaacttaaagtccattctactttgcaagagcaatgtgttttatgaacaataggttacatcagaactgcagtgggtgggggggaaccttacaaattgaacacatggcccccttagagaccacaggtgatgtccgtctccatccttccctcttcttttctgtcacctttccccctagctggctcctttggacccacccctgtccttgctgacttgtgttgcattgcattccaaacgtgtttacaggttctctcaagcaatgttgtgtttgcaggcttttctaaaaaccaaatctgctttttgtaaagcgtaaaaacatcacaaagtagttcattccatcaccaacccttgtctctctacacattttgccctttggggttcctggttggggtttttggggttttttttggttgttggtttttttattttagtggtaaattgcacttttgaaagggtaattggttgacttaatatatttgctttttttttctgggttgaaccttagaggaaatttgaacaagttggaaaaaaacaatttttgtttcaattctaagaaacacttgcagctctagtattcacttgggtcttcctgtttttcctgtaccaggtcatggtcatttttggttgttttggttgttttcttaaaaaacaatttaaaacctgaagatttctgcaagctgtgtaagcatgtttacctgttgggcttgctttgtgtgtctgttaaatgaatgtcatatggtaaatgctaaaataaaatcgacagtgtctcagaactgaataactgcagtgactttgatgctctaaaaccagtgttaggatttaagaaatagatgggtttttaaacccttggaaaatgtgaattgtgaacccctgaa

SEQ ID NO: 24208 - DNA, 622 bp, Macaca Mulatta
  misc_feature (1)...(622): n = A,T,C or G
ccggggaggaagacgtgagtgacctgaaggccttgagcccgctgctgtccctgcagtggaagaacagggcggccagcttccaggcccgagaggaagttcaaacgcgacagctgcgcgcacggagccctactgcgccatctgcacgctcttctacccctactgccagnnnnnnnnnnnnnnnnnnnnnnnnnnnnnnnnnnnnnnnnnnnnnnnnnnnnnnnnnnnnnnnnnnnnnnnnnnnnnnnnnnnnnnnnnnnnnnnnnnnnnnnnnnnnnnnnnnnnnnnnnnnnnnnnnnnnnnnnnnnnnnnnnnnnnnnnnnnnnnnnnnnnnnnnnnnnnnnnnnnnnnnnnnnnnnnnnnnnnnnnnnnnnnnnnnnnnnnnnnnnnnnnnnnnnnnnnnnnnnnnnnnnnnnnnnnnnnnnnnnnnnnnnnnnnnnnnnnnnnnnnnnnnnnnnnnnnnnnnnnnnnnnnnnnnnnnnnnnnnnnnnnnnnnnnnnnnnnnnnnnnnnnnaggtggatccacgtgatctgcgccatcgcggtccccgaggcgcgcttcctgaacgtgattgagcgccaccctgtggacatcagcgccatccccgagcagcggtggaagctg

SEQ ID NO: 24209 - DNA, 3925 bp, Macaca Mulatta
  misc_feature (1)...(3925): n = A,T,C or G
caaggagatgatgggcagagaccaggactgcctgctgcctgtggaggaggccggcatcatctgggacagcatctgcttcttcttcctgctgctgcagcgccgtgtcttcctcagctattactacctgcacgtcagggccgacctccaggccaccgccctgctggcatccaggcannnnnnnnnnnnnnnnnnnnnnnnnnnnnnnnnnnnnnnnnnnnnnnnnnnnnnnnnnnnnnnnnnnnnnnnnnnnnnnnnnnnnnnnnnnnnnnnnnnnnnnnnnnnnnnnnnnnnnnnnnnnnnnnnnnnnnnnnnnnnnnnnnnnnnnnnnnnnnnnnnnnnnnnnnnnnnnnnnnnnnnnnnnnnnncagggcccgacagtccagggggctcctccccgcctcggaggcagtggtggcggccctggctggaccacgccacannnnnnnnnnnnnnnnnnnnnnnnnnnnnnnnnnnnnnnnnnnnnnnnnnnnnnnnnnnnnnnnnnnnnnnnnnnnnnnnnnnnnnnnnnnnnnnnnnnnnnnnnnnnnnnnnnnnnnnnnnnnnnnnnnnnnnnnnnnnnnnnnnnnnnnnnnnnnnnnnnnnnnnnnnnnnnnnnnnnnnnnnnnnnnnnnnnnnnnnnnnnnnnnnnnnnnnnnnnnnnnnnnnnnnnnnnnnnnnnnnnnnnnnnnnnnnnnnnnnnnnnnnnnnnnnnnnnnnnnnnnnnnnnnnnnnnnnnnnnnnnnnnnnnnnnnnnnnnnnnnnnnnnnnnnnnnnnnnnnnnnnnnnnnnnnnnnnnnnnnnnnnnnnnnnnnnnnnnnnnnnnnnnnnnnnnnnnnnnnnnnnnnnnnnnnnnnnnnnnnnnnnnnnnnnnnnnnnnnnnnnnnnnnnnnnnnnnnnnnnnnnnnnnnnnnnnnnnnnnnnnnnnnnnnnnnnnnnnnnnnnnnnnnnnnnnnnnnnnnnnnnnnnnnnnnnnnnnccagtgggctgggtgcggaggagccactcagcagcacaacagatgacacgggaagccccctgagcactggctaccacacacgcagtggcagcgaggaggcggtcgctgaccccggggagcacgaggctggtgcctctctgcaccagggacgcatgcggacggccagcgagctgctgctggacagnnnnnnnnnnnnnnnnnnnnnnnnnnnnnnnnnnnnnnnnnnnnnnnnnnnnnnnnnnnnnnnnnnnnnnnnnnnnnnnnnnnnnnnnnnnnnnnnnnnnnnnnnnnnnnnnnnnnnnnnnnnnnnnnnnnnnnnnnnnnnnnnnnnnnnnnnnnnnnnnnnnnnnnnnnnnnnnnnnnnnnnnnnnnnnnnnnnnnnnnnnnnnnnnnnnnnnnnnnnnnnnnnnnnnnnnnnnnnnnnnnnnnnnnnnnnnnnnnnnnnnnnnnnnnnnnnnnnnnnnnnnnnnnnnnnnnnnnnnnnnnnnnnnnnnnnnnnnnnnnnnnnnnnnnnnnnnnnnnnnnnnnnnnnnnnnnnnnnnnnnnnnnnnnnnnnnnnnnnnnnnnnnnnnnnnnnnnnnnnnnnnnnnnnnnnnnnnnnnnnnnnnnnnnnnnnnnnnnnnnnnnnnnnnnnnnnnnnnnnnnnnnnnnnnnnnnnnnnnnnnnnnnnnnnnnnnnnnnnnnnnnnnnnnnnnnnnnnnnnnnnnnnnnnnnnnnnnnnnnnnnnnnnnnnnnnnnnnnnnnnnnnnnnnnnnnnnnnnnnnnnnnnnnnnnnnnnnnnnnnnnnnnnnnnnnnnnnnnnnnnnnnnnnnnnnnnnnnnnnnnnnnnnnnnnnnnnnnnnnnnnnnnnnnnnnnnnnnnnnnnnnnnnnnnnnnnnnnnnnnnnnnnnnnnnnnnnnnnnnnnnnnnnnnnnnnnnnnnnnngaggaagagaaagaggcccccacggggagagagaagaggccgagccgcgctggaagaagagtgagggtggctgggcggcagctgcagggcttctgtctgtccctggcccagggcacataccggccgctacggcgcttcttccatgacatcctgcacactaagtaccgcgcagccaccgacgtctatgccctcatgttcctggccgacgtcgtcgacttcatcatcatcatttttggcttctgggcctttgggnnncactcggcggccacggatatcacgtcttccctttcagacgaccaggtacccgaggccttcctggtcatgctgctgatccagttcaataccatggtggttgatcgcgccctctacctgcgcaagaccgtgctgggcaagctggccttccaggtggcgctggtgctggccatccacctatggatgttcttcatcctgcctgccgtcaccgagagnnnnnnnnnnnnnnnnnnnnnnnnnnnnnnnnnnnnnnnnnnnnnnnnnnnnnnnnnnnnnnnnnnnnnnnnnnnnnnnnnnnnnnnnnnnnnnnnnnnnnnnnnnnnnnnnnnnnnnnnnnnnnnnnnnnnnnnnnnnnnnnnnnnnnnnnnnnnnnnnnnnnnnnnnnnnnnnnnnnnnnnnnnnnnnnnnnnnnnnnnnnnnnnnnnnnnnnnnnnnnnnnnnnnnnnnnnnnnnnnnnnnnnnnnnnnnnnnnnnnnnnnnnnnnnnnnnnnnnnnnnnnnnnnnnnnnnnnnnnnnnnnnagaaatatccgcagcccaaagggcagaagaagaagaagatcgtcaagtacggcatgggtggcctcatcatcctcttcctcatcgccatcatctggttcccgctgctcttcatgtcgctggtgcgttccgtggtcggggtcgtcaaccagcccgtcgatgtcaccgtcaccctcaagctgggcggctannagccgctgttcaccatgagcgcccagcagccgtccatcatccccttcacggcccaggcctacgaggagctgtcccggcagtttgacccccannnctggccatgcagttcatcagccagtacagccctgaggacatcgtcacggcgcagattgagggcagctccggggcgctgtggnnnnnnnnnnnnnnnnnnnnnnnnnnnnnnnnnnnnnnnnnnnnnnnnnnnnnnnnnnnnnnnnnnnnnnnnnnnnnnnnnnnnnnnnnnnnnnnnnnnnnnnnnnnnnnnnnnnnnnnnnnnnnnnnnnnnnnnnnnnnnnnnnnnnnnnnnnnnnnnnnnnnnnnnnnnnnnnnnnnnnnnnnnnnnnnnnnnnnnnnnnnnnnnnnnnnnnnnnnnnnnnnnnnnnnnnnnnnnnnnnnnnnnnnnnnnnnnnnnnnnnnnnnnnnnnnnnnnnnnnnnnnnnnnnnnnnnnnnnnnnnnnnnnnnnnnnnnnnnnnnnnnnnnnnnnnnnnnnnnnnnnnnnnnnnnnnnnnnnnnnnnnnnnnnnnnnnnnnnnnnnnnnnnnnnnnnnnnnnnnnnnnnnnnnnnnnnnnnnnnnnnnnnnnnnnnnnnnnnnnnnnnnnnnnnnnnnnnnnnnnnnnnnnnnnnnnnnnnnnnnnntcatggggctgtatgtctccatcgtgctggtcatcggcaagttcgtgcgtggattcttcagcgagatctcacactccatcatgtttgaggagctgccgtgcgtggaccgtatcctcaagctctgccaggacatcttcctggtgcgggagactcgtgagctggagctggaggaggagttgtacgccaagctcatcttcctctaccgctcaccagagaccatgatcaagtggactcgtgagaaggagtaggagctgctgctggcgcccgagagggaaggagccggcctgctgggcagcgtggccacagggggaggcactcctcaggccgggggagccactgccccatccaaggccgccagctgtgatgcatcctcccggcctgcctgagccctgatgctgctgtcaga

SEQ ID NO: 24210 - DNA, 386 bp, Macaca Mulatta
cagcaatctccccagctgggtacccctcaagcctctaagcctcctgtttatctgcctcaccgctggctcctccctggccctacctgtggggctgctcttgagggcactgtcctggctcagcctaccatcctgttcacaggtctctgtcttcccctacaggcctccactgccagcctatggttgttcgccaccaagccaggagtgctgcgccacccagtggtccccctcgggctccaggcccccactgagaccctcttggaggcagaagcacttcaaccctcagagtcctacaagtccaaccagtggacctggaattggccaagggcccaggagagggctgtgttgctctcaactatatccaccccagctcttaaggctggatcttt

SEQ ID NO: 24211 - DNA, 772 bp, Macaca Mulatta
  misc_feature (1)...(772): n = A,T,C or G
caggactacgtagagtatgctggccaggtnnnnnnnnnnnnnnnnnnnnnnnnnnnnnnnnnnnnnnnnnnnnnnnnnnnnnnnnnnnnnnnnnnnnnnnnnnnnnnnnnnnnnnnnnnnnnnnnnnnnnnnnnnnnnnnnnnnnnnnnnnnnnnnnnnnnnnnnnnnnnnnnnnnnnnnnnnnnnnnnnnnnnnnnnnnnnnnnnnnnnnnnnnnnnnnnnnnnnnnnnnnnnnnnnnnnnnnnnnnnnnnnnnnnnnnnnnnnnnnnnnnnnnnnnnnnnnnnnnnnnnnnnnnnnnnnnnnnnnnnnnnnnnnnnnnnnnnnnnnnnnnnnnnnnnnnnnnnnnnnnnnnnnnnnnnnnnnnnnnnnnnnnnnnnnnnnnnnnnnnnnnnnnnnnnnnnnnnnnnnnnnnnnnnnnnnnnnnnnnnnnnnnnnnnnnnnnnnnnnnnnnnnnnnnnnnnnnnnnnnnnnnnnnnnnnnnnnnnnnnnnnnnnnnnnnnnnnnnnnnnnnnnnnnnnnnnnnnnnnnnnnnnnnnnnnnnnnnnnnnnnnnnnnnnnnnnnnnnnnnnnnnnnnnnnnnnnnnnnnnnnnnnnnnnnnnnnnnnnnnnnnnnnnnnnnnnnnnnnnnnnnnnnnnnnnnnttctgaacatcaaggtgatccgcagaggggatcagaacaggacctccaaggttcgctgcagcacgcgggatggctctgcccagtctggtgtggattattacccaaagagccgagttttgaagttcagtcc

SEQ ID NO: 24212 - DNA, 124 bp, Macaca Mulatta
agattgattgtaccaaacaccgctgtgtagatgaaagtgaaggacgtctttgggctgaaagcaaagggttcctgtactttgaaacttcagcacaaactggagaaggcattaatgagatgttcca

SEQ ID NO: 24213 - DNA, 768 bp, Macaca Mulatta
gggcgtgttaaagggcgaccctttcctgtcccggcctgcgtggcgtgggcttgtgggtctttgagccccgaaaattgagagcgttttcgcaccccaggggctgctcctggcggccctgcggccgtcaccatgccacagaacgaatatattgaattacaccgtaaacgctatggataccgtttggattaccatgagaaaaagagaaagaaggaaagtcgagaggctcatgaacgttcaaagaaggcaaagaaaatgattggtctgaaagctaagctttaccataaacagcgccatgctgaaaaaatacaaatgaaaaagactatcaagatgcatgaaaagagaaacaccaaacaaaagaatgatgaaaagactccacagggagcagtacctgcctatctgctggacagagagggacaatctcgagctaaagtactttccaatatgattaaacagaaacgaaaagagaaggcgggaaaatgggaagtccctctgcctaaagtacgtgcccagggagaaacagaagtattaaaagttgttcgaacaggaaagagaaagaagaaagcatggaagaggatggttactaaagtgtgctttgttggagatggctttacaagaaaaccacctaaatatgaaagatttatcagggccatggggcttgcgtttcaagaaagccccatgtacacatccctgaactgaaagctaccttttgccctaccgatccttggcggtaaggaagaatcccctcatcccccactgtatacaaacttc

SEQ ID NO: 24214 - DNA, 2320 bp, Macaca Mulatta
  misc_feature (1)...(2320): n = A,T,C or G
attagttaactgctgatggaaaagagagggttctgagcagaaacaaacttaggattgcagaacagagaagatcacaggggttacagttgtgagttgtttgggtaatcgtgcatggtttaaaccgaaaggattgtcctttaaaaatggaacgtggacttgattacaaatgggacttagattagaaaagatatttgtcccctatgttaagccatgtgaagctgctttaggtaccaagatccccagtaaagtctttctagactcacatgtttagaacacgtacttacgtgcatcataagcaatgtaggtaggagcgcaaatctactctggatttgtatcaacgtttgaaatgtgcgctccctacttgggggttggaatccaaacagaacttgtatttagttaccttttttgtgtcgtgcaaacttctcttaactgtcatgcatttttctagtaatagttcttcaagtctgcaataaaaaatggcctccaataaaactacattgcaaaaaatggggaaaaaacagaatggaaagagtaaaaaagttgaagaggcagagcctgaagaatttgtggtggaaaaagtactagatcgacgtgtagtgaatgggaaagtggaatatttcctgaagtggaagggatttacagatgctgacaatacttgggaacctgaagaaaatttagattgtccagagttgattgaagcatttcttaactctcagaaagctggcaaagaaaaagatggtacaaaaagaaaatctttatctgacagtgaatctgatgacagcaaatcaaagaagaaaagagatgctgctgacaaaccaagaggatttgccagaggtcttgatcctgaaagaataattggtgccacagacagcagtggagaattgatgtttcttatgaaatggaaagattcagatgaggcagacttggtgctggcgaaagaggcaaatatgaagtgtcctcaaattgtaattgctttttatgaagagagactaacttggcattcttgtccagaagatgaagctcaataattgttcacattgtttttttatatatannnnnnnnnnnnnnnnnnatttgggtcttggattttgatttactagtgtgacgaaataactacatcctaatgaaaatcaagtttgatatgtttgttttgaaagtagcgttggaagagttgttggggggttttttgcatctatagcactggttactttgaacaaataaataaaagctttctgtagttgctttcctttatcagaaaagaacatttgataccatggtatattatttcctcttcattgaagaacagcttttctaaatgttgggggaaatgtccatagtcattaatcaaaacttgtgttctcataagcctaaggaccattttaggttttttacatgtnnnnnnnnnnnnnnnnnnccataaaatgcatatgtaaatttttctttgtttttaagcattcacccaaacaaaaaatcacaggtaaacccatgtttctgagatgccattattctgaccaaaataagagataatcacttcaagttaaattgaaatttttcctgaagccatacatttcaagtagaataagtaattctaaataggacaatttaaattggataattttaaagtatctataattgcagtggtttatttgcaaaattcctaaaaggaaaaattttatcactgccgtcacagcaggtttcttcatccagatgaggacactagacaaatgctagtgtgttttaactagctaaacaaaactaagttaaacgaaaatttaaaattttccctagtgagccattccttaacaaaatgttgaaatccctgttgctacattgactgaaaggtaatgatgaatggaatatgtaagatttggctcatataaacctaatcagatggttagagatgttggcagttgaggacctgctgccataaatgtgtgaacagcctttttttcatatacatctattgacctgcatgttttttctttaccccaactgatttcttacatgtaggctcaatcttcagttatttgctttactggttcaacaaaagccaggaagaacaactttgtagtaatcagagtgttatccaactgtatattgtttactttattgtaaatactggtgaacagtggttaataaatagttttatattcctttatgcaattattagacttttctttaatttgatacgccctttacgggtagaaaaagaaacgccccacactcattgggaattatctttggtttataagtttggatgataccagttaaggcattanaagtacatatcccaaaatctttttgaagcttatgaagtttt

SEQ ID NO: 24215 - DNA, 169 bp, Macaca Mulatta
  misc_feature (1)...(169): n = A,T,C or G
gctcaaaagattaagaaaagttctcacgtgtctctggaatgtgacaagttacttcctcgacctccagacaccgaattccgaaggaattaccaaattccagctaanattcctgagcttcaggatttcagtttcaaatacggatgctactcaagcttgcccgttgcttctc

SEQ ID NO: 24216 - DNA, 425 bp, Macaca Mulatta
aaaaattgtatactgtacaggtaggaaaattaatgaagtgagccgttttttctaagtgaacagtgcgtaaatggtgattcttcctagatgagtaactttctcaaagatattcgtttctgctatttcaccaataattgtaatgacaaaatagacaattaatggagatttctgattttgtttctatcgttacagctattgtacagggagatacgctggaagacatttacaaccaagtgaaacagatcatagaagaacagtctggttcttacatctgggttccagcaaaagaaaagttatgaaaactcatgtttctctatttctcttttccacaattccattttctttgacatctctttgccctttcctctggagtcttttttcaataatgatttcatgttgaattatatcccacatcatggtctgca

SEQ ID NO: 24217 - DNA, 451 bp, Macaca Mulatta
  misc_feature (1)...(451): n = A,T,C or G
ccaggtgaaaatccccagcaaggaggaagaggcagatatgtcctcacccacacagcgaacctacagcagctccctcaaacgctccagccccaggaccatctcctttcggnnnnnnnnnnnnnnnnnnnnnnnnnnnnnnnnnnnnnnnnnnnnnnnnnnnnnnnnnnnnnnnnnnnnnnnnnnnnnnnnnnnnnnnnnnnnnnnnnnnnnnnnnnnnnnnnnnnnnnnnnnnnnnnnnnnnnnnnnnnnnnnnnnnnnnnnnnnnnnnnnnnnnnnnnnnnnnnnnnnnnnnnnnnnnnnnnnnnnnnnnnnnnnnnnnnnnnnnnnnnnnnnnnnnnnnnnnnnnnnnnnnnnnnnnnnnnaggagaacttgaggctctcaggggttgtgacatcaagactcaacctgtggatcagcaggacccaagagtctggagatcaggacccccag

SEQ ID NO: 24218 - DNA, 9353 bp, Macaca Mulatta
  misc_feature (1)...(9353): n = A,T,C or G
agggagtgtacgacgttcggcaggcctacattcagtttgctctctcctttctaattgcgggtgatgacagcactatagtgcaggtgttggaagtgaaannnnnnnnnnnnnnnnnnnnnnnnnnnnnnnnnnnnnnnnnnnnnnnnnnnnnnnnnnnnnnnnnnnnnnnnnnnnnnnnnnnnggtagttcacaataaaaatatcacaaaaacccagaaggtgcgtttttttacggggcagttattgaaccacatagcatcgctgtacagctggaatgggattaccgacgtgaacccggaagatgtcaaggtnnnnnnnnnnnnnnnnnnnnnnnnnnnnnnnnnnnnnnnnnnnnnnnnnnnnnnnnnnnnnnnnnnnnnnnnnnnnnnnnnnnnnnnnnnnnnnnnnnnnnnnnnnnnnnnnnnnnnnnnnnnnnnnnnnnnnnnnnnnnnnnnnnnnnnnnnnnnnnnnnnnnnnnnnnnnnnnnnnnnnnnnnnnnnnnnnnnnnnnnnnnnnnnnnnnnnnnnnnnnnnnnnnnnnnnnnnnnnnnnnnnnnnnnnnnnnnnnnnnnnnnnnnnnnnnnnnnnnnnnnnnnnnnnnnnnnnnnnnnnnnnnnnnnnnnnnnnnnnnnnnnnnnnnnnnnnnnnnnnnnnnnnnnnnnnnnnnnnnnnnnnnnnnnnnnnnnnnnnnnnnnnnnnnnnnnnnnnnnnnnnnnnnnnnnnnnnnnnnnnnnnnnnnnnnnnnnnnnnnnnnnnnnnnnnnnnnnnnnnnnnnnnnnnnnnnnnnnnnnnnnnnnnnnnnnnnnnnnnnnnnnnnnnnnnnnnnnnnnnnnnnnnnnnnnnnnnnnnnnnnnnnnnnnnnnnnnnnnnnnnnnnnnnnnnnnnnnnnnnnnnnnnnnnnnnnnnnnnnnnnnnnnnnnnnnnnnnnnnnnnnnnnnnnnnnnnnnnnnnnnnnnnnnnnnnnnnnnnnnnnnnnnnnnnnnnnnnnnnnnnnnnnnnnnnnnnnnnnnnnnnnnnnnnnnnnnnnnnnnnnnnnnnnnnnnnnnnnnnnnnnnnnnnnnnnnnnnnnnnnnnnnnnnnnnnnnnnnnnnnnnnnnnnnnnnnnnnnnnnnnnnnnnnnnnnnnnnnnnnnnnnnnnnnnnnnnnnnnnnnnnnnnnnnnnnnnnnnnnnnnnnnnnnnnnnnnnnnnnnnnnnnnnnnnnnnnnnnnnnnnnnnnnnnnnnnnnnnnnnnnnnnnnnnnnnnnnnnnnnnnnnnnnnnnnnnnnnnnnnnnnnnnnnnnnnnnnnnnnnnnnnnnnnnnnnnnnnnnnnnnnnnnnnnnnnnnnnnnnnnnnnnnnnnnnnnnnnnnnnnactaatgaaatgtttgtgaccagtagtcatttacaactgaagtcatcgactaaacttctgatcatgaagnnnnnnnnnnnnnnnnnnnnnnnnnnnnnnnnnnnnnnnnnnnnnnnnnnnnnnnnnnnnnnnnnnnnnnnnnnnnnnnnnnnnnnnnnnnnnnnnnnnnnnnnnnnnnnnnnnnnnnnnnnnnnnnnnnnnnnnnnnnnnnnnnnnnnnnnnnnnnnnnnnnnnnnnnnnnnnnnnnnnnnnnnnnnnnnnnnnnnnnnnnnnnnnnnnnnnnnnnnnnnnnnnnnnnnnnnnnnnnnnnnnnnnnnnnnnnnnatgttctcgacatggtggatgtcctggtggagggcagtgaaggcttggacgaggaaatagggttcacgttaaatgaagacatgatcctgctcacgttcccattcagtgctgtggtccctgcggccctggaagcgaggaataagttgcttcttgggacagacagtgaagcagnnnnnnnnnnnnnnnnnnnnnnnnnnnnnnnnnnnnnnnnnnnnnnnnnnnnnnnnnnnnnnnnnnnnnnnnnnnnnnnnnnnnnnnnnnnnnnnnnnnnnnnnnnnnnnnnnnnnnnnnnnnnnnnnnnnnnnnnnnnnnnnnnnnnnnnnnnnnnnnnnnnnnnnnnnnnnnnnnnnnnnnnnnnnnnnnnnnnnnnnnnnnnnnnnnnnnnnnnnnnnnnnnnnnnnnnnnnnnnnnnnnnnnnnnnnnnnnnnnnnnnnnnnnnnnnnnnnnnnnnnnnnnnnnnnnnnnnnnnnnnnnnnnnnnnnnnnnnnnnnnnnnnnnnnnnnnnnnnnnnnnnnnnnnnnnnnnnnnnnnnnnnnnnnnnnnnnnnnnnnnnnnnnnnnnnnnnnnnnnnnnnnnnnnnnnnnagctgggcagaagcgtgggtccgcccctcctgcagctcttcctggatctcctcaggcgcctggttgtccactgtgagcagctggatgcccagaaccagcagagatgtgaggccgcccgggccgaagccgacctcttcctggacatggagtctgtggcctcactggagttggccaatgatcagnnnnnnnnnnnnnnnnnnnnnnnnnnnnnnnnnnnnnnnnnnnnnnnnnnnnnnnnnnnnnnnnnnnagcagcaggccctcccgccgcactcgttcagccctgtccttgtgaagctcctggccgcccacttcagtgcagggctcctccagctgctggcggcgagtgccccgatcctccggaacattgggcagctgggccttctggccaggtacttagaggccatcacccagagcgtgctgaaggaacttcagagcaggagggagggcccggccacatcgccaccaaagacaccgctgcagctggaggccctgcaggagctgcatccatacatggagggtgcccagctccgtgaggtcacgctggccctgctgagcctgcctgagacccacctggtgacccagcaacccacgaaatgccccgggaaagaaagacacataaatgctcttgggaagaccctggtgcagctgctgacctgcagcccccaggatcagctgcagagtggtgggctcctgtggtcctccgagtctgtgagaggcctgggggctctgctgcccgcgctggcagtggacgagctggacacagtgctcctccacactctgcagagagagcctgtgctggtccccgcggtcggggctgatctgaaagactactgcctggcccggcgcacgcaggcggccctcagcatcgcnnnnnnnnnnnnnnnnnnnnnnnnnnnnnnnnnnnnnnnnnnnnnnnnnnnnnnnnnnnnnnnnnnnnnnnnnnnnnnnnnnnnnnnnnnnnnnnnnnnnnnnnnnnnnnnnnnnntgtgtacctccagtgcaggatgcggagccacttcacacgcccagcaggannnnnnnnnnnnnnnnnnnnnnnnnnnnnnnnnnnnnnnnnnnnnnnnnnnnnnnnnnnnnnnnnnnnnnnnnnnnnnnnnnnnnnnnnnnnnnnnnnnnnnnnnnnnnnnnnnnnnnnnnnnnnnnnnnnnnnnnnnnnnnnnnnnnnnnnnnnnnnnnnnnnnnnnnnnnnnnnnnnnnnnnnnnnnnnnnnnnnnnnnnnnnnnnnnnnnnnnnnnnnnnnnnnnnnnnnnnnnnnnnnnnnnnnnnnnnnnnnnnnnnnnnnnnnnnnnnnnnnnnnnnnnnnnnnnnnnnnnnnnnnnnnnnnnnnnnnnnnnnnnnnnnnnnnnnnnnnnnnnnnnnnnnnnnnnnnnnnnnnnnnnnnnnnnnnnnnnnnnnnnnnnnnnnnnnnnnnnnnnnnnnnnnnnnnnnnnnnnnnnnnnnnnnnnnnnnnnnnnnnnnnnnnnnnnnnnnnnnnnnnnnnnnnnnnnnnnnnnnnnnnnnnnnnnnnnnnnnnnnnnnnnnnnnnnnnnnnnnnnnnnnnnnnnnnnnnnnnnnnnnnnnnnnnnnnnnnnnnnnnnnnnnnnnnnnnnnnnnnnnnnnnnnnnnnnnnnnnnnnnnnnnnnnnnnnnnnnnnnnnnnnnnnnnnnnnnnnnnnnnnnnnnnnnnnnnnnnnnnnnnnnnnnnnnnnnnnnnnnnnnnnnnnnnnnnnnnnnnnnnnnnnnnnnnnnnnnnnnnnnnnnnnnnnnnnnnnnnnnnnnnnnnnnnnnnnnnnnnnnnnnnnnnnnnnnnnnnnnnnnnnnnnnnnnnnnnnnnnnnnnnnnnnnnnnnnnnnnnnnnnnnnnnnnnnnnnnnnnnnnnnnnnnnnnnnnnnnnnnnnnnnnnnnnnnnnnnnnnnnnnnnnnnnnnnnnnnnnnnnnnnnnnnnnnnnnnnnnnnnnnnnnnnnnnnnnnnnnnnnnnnnnnnnnnnnnnnnnnnnnnnnnnnnnnnnnnnnnnnnnnnnnnnnggacacacaggagctgatattcaaagacaagagcagggtggatcttgatggcctctacgacccctgctttctccttcagctcttcagtgagctgaccaggccagnnnnnnnnnnnnnnnnnnnnnnnnnnnnnnnnnnnnnnnnnnnnnnnnnnnnnnnnnnnnnnnnnnnnnnnnnnnnnnnnnnnnnnnnnnnnnnnnnnnnnnnnnnnnnnnnnnnnnnnnnnnnnnnnnnnnnnnnnnnnnnnnnnnnnnnnnnnnnnnngctactttacctgttggatgtagtccggaatgggattcgaactcaggacatgagactcacttttaccttggctctcttcattgccaaagcaaccctgcagattttgaaaccagnnnnnnnnnnnnnnnnnnnnnnnnnnnnnnnnnnnnnnnnnnnnnnnnnnnnnnnnnnnnnnnnnnnnnnnnnnnnnnnnnnnnnnnnnnnnnnnnnnnnnnnnnagcaaaaatcggagcaggagtgggtgtttggccttctgcggcaggggatccgtgacaagcagtgctatgagctgtgtgcccgccgtggcatcttccacatcatcctgtccttcttctacagcccactgtgtgacgaggcggcacannnnnnnnnnnnnnnnnnnnnnnnnnnnnnnnnnnnnnnnnnnnnnnnnnnnnnnnnnnnnnnnnnnnnnnnnnnnnnnnnnnnnnnnnnnnnnnnnnnnnnnnnnnnnnnnnnnnnnnnnnnnnnnnnnnnnnnnnnnnnnnnnnnnnnnnnnnnnnnnnnnnnnnnnnnnnnnnnnnnnnnnnnnnnnnnnnnnnnnnnnnnnnnnnnnnnnnnnnnnnnnnnnnnnnnnnnnnnnnnnnnnnnnnnnnnnnnnnnnnnnnnnnnnnnnnnnnnnnnnnnnnnnnnnnnnnnnnnnnnnnnnnnnnnnnnnnnnnnnnnnnnnnnnnnnnnnnnnnnnnnnnnnnnnnnnnnnnnnnnnnnnnnnnnnnnnnnnnnnnnnnnnnnnnnnnnnnnnnnnnnnnnnnnnnnnnnnnnnnnnnnnnnnnnnnnnnnnnnnnnnnnnnnnnnnnnnnnnnnnnnnnnnnnnnnnnnnnnnnnnnnnnnnnnnnnnnnnnnnnnnnnnnnnnnnnnnnnnnnnnnnnnnnnnnnnnnnnnnnnnnnnnnnnnnnnnnnnnnnnnnnnnnnnnnnnnnnnnnnnnnnnnnnnnnnnnnnnnnnnnnnnnnnnnnnnnnnnnnnnnnnnnnnnnnnnnnnnnnnnnnnnnnnnnnnnnnnnnnnnnnnnnnnnnnnnnnnnnnnnnnnnnnnnnnnnnnnnnnnnnnnnnnnnnnnnnnnnnnnnnnnnnnnnnnnnnnnnnnnnnnnnnnnnnnnnnnnnnnnnnnnnnnnnnnnnnnnnnnnnnnnnnnnnnnnnnnnnnnnnnnnnnnnnnnnnnnnnnnnnnnnnnnnnnnnnnnnnnnnnnnnnnnnnnnnnnnnnnnnnnnnnnnnnnnnnnnnnnnnnnnnnnnnnnnnnnnnnnnnnnnnnnnnnnnnnnnnnnnnnnnnnnnnnnnnnnnnnnnnnnnnnnnnnnnnnnnnnnnnnnnnnnnnnnnnnnnnnnnnnnnnnnnnnnnnnnnnnnnnnnnnnnnnnnnnnnnnnnnnnnnnnnnnnnnnnnnnnnnnnnnnnnnnnnnnnnnnnnnnnnnnnnnnnnnnnnnnnnnnnnnnnnnnnnnnnnnnnnnnnnnnnnnnnnnnnnnnnnnnnnnnnnnnnnnnnnnnnnnnnnnnnnnnngcctccgcagcattcctggtgtctctctacataaaggacatctggctgggggcccagcggcctgacaccctcttagcccacatccggatggtgtgtgaggccgcagatgatgctccgagcagtgaagaggaggccatcgtggtgctctgcaaggatgtcgccagtgcagcctcagatgcttgactcctgccggccagcgccttgcgccctgatgaccagagcctcnnnnnnnnnnnnnnnnnnngaagtttggttgagtcaagggtttccggagaaggtgtgggaaacaacaagttcagtacattgactcagttctctgacaagaaaagtcgagaggacttgattgaacaggccagtaaatgataaactcgggcctgtgtgtgccccgcatcagagttgcagggaatgtggggacttccaggccatgaggcccatccattgcctcgtcaggccaggccagccccttcctctctatggggcttggagctcgtcacaggaaatagctcaagtttgaggcacttctgaatgcagaagagattcatgtgtgttaaagctgaaatgtcaaaaggtatcagnnnnnnnnnnnnaaacgaagagatatgtttaaattttatttttcagctgggtgaggtggctcatgcctctaatcccagcactttgggaggccaaggcaggtggataacctgaggtcaggagttcaaggccagccttcccaacatggtgaaaccccatctctactaaaaatacaaaaattagctggacgtggtggtgcacgcctgaaattccagctactcgggaggctaaggcaggggaatcgcttgaaactgggaggtggaggctgcagtgagccgagattgtgccactgcactccaacctaggcgacagagcaagactccatctcnnnnnnnnnnnnnnnnnnnnnnnnnnnnnnnnnnnnnnnnnnnnnnnnnnnnnnnnnnnnnnnnnnnnnnnnnnnnnnnnnnnnnnnnnnnnnnnnnnnnnnnnnnnnnnnnnnnnnnnnnnnnnnnnnnnnnnnnnnnnnnnnnnnnnnnnnnnnnnnnnnnnnnnnnnnnnnnnnnnnnnnnnnnnnnnnnnnnnnnnnnnnnnnnnnnnnnnnnnnnnnnnnnnnnnnnnnnnnnnnnnnnnnnnnnnnnnnnnnnnnnnnnnnnnnnnnnnnnnnnnnnnnnnnnnnnnnnnnnnnnnnnnnnnnnnnnnnnnnnnnnnnnnnnnnnnnnnnnnnnnnnnnnnnnnnnnnnnnnnnnnnnnnnnnnnnnnnnnnnnnnnnnnnnnnnnnnnnnnnnnnnnnnnnnnnnnnnnnnnnnnnnnnnnnnnnnnnnnnnnnnnnnnnnnnnnnnnnnnnnnnnnnnnnnnnnnnnnnnnnnnnnnnnnnnnnnnnnnnnnnnnnnnnnnnnnnnnnnnnnnnnnnnnnnnnnnnnnnnnnnnnnnnnnnnnnnnnnnnnnnnnnnnnnnnnnnnnnnnnnnnnnnnnnnnnnnnnnnnnnnnnnnnnnnnnnnnnnnnnnnnnnnnnnnnnnnnnnnnnnnnnnnnnnnnnnnnnnnnnnnnnnnnnnnnnnnnnnnnnnnnnnnnnnnnnnnnnnnnnnnnnnnnnnnnnnnnnnnnnnnnnnnnnnnnnnnnnnnnnnnnnnnnnnnnnnnnnnnnnnnnnnnnnnnnnnnnnnnnnnnnnnnnnnnnnnnnnnnnnnnnnnnnnnnnnnnnnnnnnnnnnnnnnnnnnnnnnnnnnnnnnnnnnnnnnnnnnnnnnnnnnnnnnnnnnnnnnnnnnnnnnnnnnnnnnnnnnnnnnnnnnnnnnnnnnnnnnnnnnnnnnnnnnnnnnnnnnnnnnnnnnnnnnnnnnnnnnnnnnnnnnnnnnnnnnnnnnnnnnnnnnnnnnnnnnnnnnnnnnnnnnnnnnnnnnnnnnnnnnnnnnnnnnnnnnnnnnnnnnnnnnnnnnnnnnnnnnnnnnnnnnnnnnnnnnnnnnnnnnnnnnnnnnnnnnnnnnnnnnnnnnnnnnnnnnnnnnnnnnnnnnnnnnnnnnnnnnnnnnnnnnnnnnnnnnnnnnnnnnnnnnnnnnnnnnnnnnnnnnnnnnnnnnnnnnnnnnnnnnnnnnnnnnnnnnnnnnnnnnnnnnnnnnnnnnnnnnnnnnnnnnnnnnnnnnnnnnnnnnnnnnnnnnnnnnnnnnnnnnnnnnnnnnnnnnnnnnnnnnnnnnnnnnnnnnnnnnnnnnnnnnnnnnnnnnnnnnnnnnnnnnnnnnnnnnnnnnnnnnnnnnnnnnnnnnnnnnnnnnnnnnnnnnnnnnnnnnnnnnnnnnnnnnnnnnnnnnnnnnnnnnnnnnnnnnnnnnnnnttgcagtgtgatgctgtctcctctccaggaacaaggctgctgggcactagaggactggttcttcagggttcccagatccactgtcacataaagtcacatccagaannnnnnnnnnnnnnnttccagggctctttgtgttctgtgacagcgtttgggcataggccctgcttaccgggcctggctgctgacaggcgctggctgcctgccctccaggggagagacttccttgggctctgtctttgaaaggctgtggggaggctgaaggtgagactcaggtcccctgactgcagcgagctgacctggcagggcagatgtatcacatctgggggagccggagggtgtcagtggagcttggatgggaacttacccagcatcctaacaaaggtacagaaggaccaggtgaactcagggctgataacacattacacagtaatggtaaagtggcatagtaagcaaacaggttttcctctggatttacatatattttattttcctactcttccctaagcaaacaagccataagcaagcgggccaagtgtgctcaataaaatcagcaacacctgggatgacctctgccctcgagggatcactgcaatctttgtcaaaggcataggatgctcctgctctggtcgcacttgacctaggtgccctttccgctacacgcagacagcctctaagaagaacaaagaacggaggtgtccaggttggcttgatttcatcagatcactcagctatggccacgatctgctgacatcagctctgcaattgagaggtcctgtctccaggaggaggctcgctgggcttgctcctgatgaggggacccccattgagggtcagttcccagaggagagtggggtggatctggaaaaccccaaggggcaaggtggaggagctctcctgtcgtagcagctggtcagggtcagttctgctccctggcgccactgaacgcgcctgagc

SEQ ID NO: 24219 - DNA, 788 bp, Macaca Mulatta
  misc_feature (1)...(788): n = A,T,C or G
gatcctgcgcagccgaggctgtgttagcgccaaggacttccagcagctgttagcagagnnnnnnnnnnnnnnnnnnnnnnnnnnnnnnnnnnnnnnnnnnnnnnnnnnnnnnnnnnnnnnnnnnnnnnnnnnnnnnnnnnnnnnnnnnnnnnnnnnnnnnnnnnnnnnnnnnnnnnnnnnnnnnnnnnnnnnnnnnnnnnnnnnnnnnnnnnnnnnnnnnnnnnnnnnnnnnnnnnnnnnnnnnnnnnnnnnnnnnnnnnnnnnnnnnnnnnnggagaagcgcatctaccgggtgcctgtgttcacagcacccttctgccaggccctgctggaagagctggagcacttcgagcagtcggacatgcctaaggggaggcccaacaccatgaacaactacggggtgggnggaatcccctcccaggtgctgctgcacgagctcggactggacgagccgctgatgacaccactgcgggagcgctttctgcagccactgatggccctgctgtaccccgactgtggcgggggccggctcgacagccaccgggcctttgtggtcaaatacgcactgggccaggacctcgagctgggctgccactatgataatgccgagctcaccctcaatgtggccttgggcaaggtcttcacagggggcgccctgtattttgggggcctcttccaggncaggcacccacagccctgacggagcctctggaggtggagcacgtggtggggcagggtgttctccaccgtggcggccagctacatgggggccgggccttgggcactgg

SEQ ID NO: 24220 - DNA, 534 bp, Macaca Mulatta
tgccactgaagcattatctccttttgctggtgggctgccaagcctggggtgcagggttggcctactatggctgccctagtgagtgtacctgctccagggcctcccaggtggagtgcaccggggcacgcattgtggccgtacccacccctctgccctggaacgccatgagcctgcagatcctcaacacacacatcactgaactcagtgagtccccgttcctcaatatctcagccctcatcgccctgaggattgagaagaatgaactgtcacacatcatgcccggtgccttccgaaacctgggctcgctgcgctatctcagcctcgccaacaacaagctgcatgttctgcccatcggcctctatcagggcctggacagcctcgagtcactccttctgtcgagtaaccagctggtgcatatgcagccggcccacttctcccagtgcagcaacctcaaggagctgcagctgcatggcaaccacctggaatacctacacgacggagccttctacccactggtgggactcacgaagctca

SEQ ID NO: 24221 - DNA, 168 bp, Macaca Mulatta
  misc_feature (1)...(168): n = A,T,C or G
ncccaggtgttcggcctggactccatcatgggcaacgaggacctgtggcccctgctgctgagcatcatcttcgtcccagccctgctgcagtgcatcgtgctgcccttctgccccgagagcccccgcttcctgctcatcaaccgcaatgaggagaaccgggccaagagt

SEQ ID NO: 24222 - DNA, 611 bp, Macaca Mulatta
aaggaccaccggccacagtctaaggacatggaccgggtgcccccagatgtgcgcacaggggaccctctgccccattctgggcttttcagagactccaaccaaaaagcctgctttaaaccgcaagatggggcctggacatgtgcaggaagacccatcgggtactacgcagcaacactcacaactatccaggctgagatatatcctgggacctgaactattagcgcgtcagtagagactgggggccgaggcagtggtgccggcccaagcgaaggcgagtgagggctgatgcagctctttgcaggtcttgagagggaaggactcttccaaagccccaaagccgagggtttcacccgcactgccagcctgggtcggggcccaaggatgtgaccttgagtatcaaggctggatagctactgccggatgccaaagataggagaaagtgccagccctgaagccggagccgtttgtgaataaactgttcttcttcgtcactgacactggggaaaggtgtcctccatgccctcaggcagcagagaactggcccagggcccttggagtgtaggtggagatcagagtgccgtggtggaggtctgggactatgtcagagtgtc

SEQ ID NO: 24223 - DNA, 195 bp, Macaca Mulatta
gacaaagaattcactgttcggctggaaacagacaagcggctgcacacagtgggagagccggtggagttcagatgcatcctgtaggctcagaacgtccccgaccgttactttgctgtctcctgggccttcaacagctcgctcatcggcaccatgggccctaacgctgtgcctgtcctcaacagtgaatttgctcac

SEQ ID NO: 24224 - DNA, 694 bp, Macaca Mulatta
acacctgtctaaaaatggaggcattatatggtttggctgtgtccccatccaaatctcatcttgaattgtagctcccatagggacccagtgggaggtaattgaatcatggggaggggtttttcccatgctgctctcatgatagtgaaaatgtctcatgagatctgatggttttataaagggcagttcctctgcacacgctctcttgcctgccaccacgtaagacgtggctttgctcctccttcaccttctgccatgattgtgaggcctccccagccatgtggaactgtgagtccattgaacctcttttttctttataaactacccagtctcagatatttcttcatagctgtgggaaaatggactaatacaaggagtatataagacagattgataattcagaaacaatgatcaggcatgcccccaagcctgatcaaatggctcttctccaagcagcaaaagttctttccatcttgtggcctccccttttaagttctcagagtcctctccattcagtcagaagaagaaaaatcgagggttgcaggtgggagggctatagtggtcaggcttgaaagaagcatacattacctctactcacatcacctgtccccacattctagtggccagaagtcagttctgtggcttcatataaacacaaaagaactagaaatttccgacagtcgtgtgccagaaagac

SEQ ID NO: 24225 - DNA, 1506 bp, Macaca Mulatta
  misc_feature (1)...(1506): n = A,T,C or G
tagccaaggctaattctccctcgagttcttgggagatgggcgtttggcgagaaggctggcgttagtgaagcgcgccgggcgtcacggtgagtgcgnnnnnnnnnnnnnnnnnnnnnnnnnnnnnnnnnnnnnnnnnnnnnnnnnnnnnnnnnnnnnnnnnnnnnnnnnnnnnnnnnnnnnnnnnnnnnnnnnnnnnnnnnnnnnnnnnnnnnnnnnnnnnnnnnnnnnnnnnnnnnnnnnnnnnnnnnnnnnnnnnnnnnnnnnnnnnnnnnnnnnnnnnnnnnnnnnnnnnnnnnnnnnnnnnnnnnnnnnnnnnnnnnnnnnnnnnnnnnnnnnnnnnnnnnnnnnnnnnnnnnnnnnnnnnnnnnnnnnnnnnnnnnnnnnnnnnnnnnnnnnnnnnnnnnnnnnnnnnnnnnnnnnnnnnnnnnnnnnnnnnnnnnnnnnnnnnnnnnnnnnnnnnnnnnnnnnnnnnnnnnnnnnnnnnnnnnnnnnnnnnnnnnnnnnnnnnnnnnnnnnnnnnnnnnnnnnnnnnnnnnnnnnnnnnnnnnnnnnnnnnnnnnnnnnnnnnnnnnnnnnnnnnnnnnnnnnnnnnnnnnnnnnnnnnnnnnnnnnnnnnnnnnnnnagatatgaagaagccgaagtccggaaaaaacttgaggaaaaggacaggcaggaggaagcacagcggctacaacagaaaagacaggaaacaggaagagaggatggtggcacgttggctaaaggttctttggagaatgtattggattccaaagacaaaacccaaaannnnnnnnnnnnnnnnnnnnnnnnnnnnnnnnnnnnnnnnnnnnnnnnnnnnnnnnnnnnnnnnnnnnnnnnnnnnnnnnnnnnnnnnnnnnnnnnnnnnnnnnnnnnnnnnnnnnnnnnnnnnnnnnnnnnnnnnnnnnnnnnnnnnnnnnnnnnnnnnnnnnnnnnnnnnnnnnnnnnnnnnnnnnnnnnnnnnnnnnnnnnnnnnnnnnnnnnnnnnnnnnnnnnnnnnnnnnnnnnnnnnnnnnnnnnnnnnnnnnnnnnnnnnnnnnnnnnnnnnnnnnnnnnnnnnnnnnnnnnnnnnnnnnnnnnnnnnnnnnnnnnnnnnnnnnnnnnnnnnnnnnnnnnnnnnnnnnnnnnnnnnnnnnnnnnnnnnnnnnnnnnnnnnnnnnnnnnnnnnnnnnnnnnnnnnnnnnnnnnnnnnnnnnnnnnnnnnnnnnnnnnnnnnnnnnnnnnnnnnnnnnnnnnnnnnnnnnnnnnnnnnnnnnnnnnnnnnggattttacttatccctcattggaacatttaggttcttctaaacctgctgcccagataccacctccctttatagaagtagatgaaaatatagaattgataagtgatcaaaatgagagaatgggaccactgaatatatcttttccagctgaaccagttgctgcttctaaatctgatgtttcacccataattcagccagtgcctagtataaagaatattccacag

SEQ ID NO: 24226 - DNA, 5394 bp, Macaca Mulatta
  misc_feature (1)...(5394): n = A,T,C or G
aggcctggagttccaggagcccctttgccaggaagagccattctctcaatgaatggattgagctatggggtaatacgggtcaatactgaagacaaaaattcagcactgacagtccaggatgtggggcatgtaatgcctggtggnnnnnnnnnnnnnnnnnnnnnnnnnnnnnnnnnnnnnnnctgcaaaacagatgaaattggagaaatctgtgttagctctagaactggaggcatgatgtactttgggcttgccggtgtgacaaaaaatacatntgaggtnnnnnnnnnnnnnnnnnnnnnnnnnnnnnnnnnnnnnnnnnntcatccgatcaggattgctggggtttgtagggccggnnnnnnnnnnnnnnnnnnnnnnnnnnnnnnnnnnnnnnnnnnnnnnnnnnnnnnnnnnnnnnnnnnnnnnnnnnnnnnnnnnnnnnnnnnnnnnnnnnnnnnnnnnnnnnnnnnnnnnnnnnnnnnnnnnnnnnnnnnnnnnnnnnnnnnnnnnnnnnnnnnnnnnnnnnnnnnnnnnnnnnnnnnnnnnnnnnnnnnnnnnnnnnnnnnnnnnnnnnnnnnnnnnnnnnnnnnnnnnnnnnnnnnnnnnnnnnnnnnnnnnnnnnnnnnnnnnnnnnnnnnnnnnnnnnnnnnnnnnnnnnnnnnnnnnnnnnnnnnnnnnnnnnnnnnnnnnnnnnnnnnnnnnnnnnnnnnnnnnnnnnnnnnnnnnnnnnnnnnnnnnnnnnnnnnnnnnnnnnnnnnnnnnnnnnnnnnnnnnnnnnnnnnnnnnnnnnnnnnnnnnnnnnnnnnnnnnnnnnnnnnnnnnnnnnnnnnnnnnnnnnnnnnnnnnnnnnnnnnnnnnnnnnnnnnnnnnnnnnnnnnnnnnnnnnnnnnnnnnnnnnnnnnnnnnnnnnnnnnnnnnnnnnnnnnnnnnnnnnnnnnnnnnnnnnnnnnnnnnnnnnnnnnnnnnnnnnnnnnnnnnnnnnnnnnnnnnnnnnnnnnnnnnnnnnnnnnnnnnnnnnnnnnnnnnnnnnnnnnnnnnnnnnnnnnnnnnnnnnnnnnnnnnnnnnnnnnnnnnnnnnnnnnnnnnnnnnnnnnnnnnnnnnnnnnnnnnnnnnnnnnnnnnnnnnnnnnnnnnnnnnnnnnnnnnnnnnnnnnnnnnnnnnnnnnnnnnnnnnnnnnnnnnnnnnnnnnnnnnnnnnnnnnnnnnnnnnnnnnnnnnnnnnnnnnnnnnnnnnnnnnnnnnnnnnnnnnnnnnnnnnnnnnnnnnnnnnnnnnnnnnnnnnnnnnnnnnnnnnnnnnnnnnnnnnnnnnnnnnnnnnnnnnnnnnnnnnnnnnnnnnnnnnnnnnnnnnnnnnnnnnnnnnnnnnnnnnnnnnnnnnnnnnnnnnnnnnnnnnnnnnnnnnnnnnnnnnnnnnnnnnnnnnnnnnnnnnnnnnnnnnnnnnnnnnnnnnnnnnnnnagatgtcccaatctgcagtgaacgctctgtgtcgagccatcaagctccagtgtgagttgtactcttctcggcagatcgccataggccttgacccttactgtggacttggcttcgcgctctnnnnnnnnnnnnnnnnnnnnnnnnnnnnnnnnnnnnnnnnnnnnnnnnnnnnnnnnnnnnnnnnnnnnnnnnnnnnnnnnnnnnnnnnnnnnnnnnnnnnnnnnnnnnnnnnnnnnnnnnnnnnnnnnnnnnnnnnnnnnnnnnnnnnnnnnnnnnnnnnnnnnnnnnnnnnnnnnnnnnnnnnnnnnnnnnnnnnnnnnnnnnnnnnnnnnnnnnnnnnnnnnnnnnnnnnnnnnnnnnnnnnnnnnnnnnnnnnnnnnnnnnnnnnnnnnnnnnnnnnnnnnnnnnnnnnnnnnnnnnnnnnnnnnnnnnnnnnnnnnnnnnnnnnnnnnnnnnnnnnnnnnnnnnnnnnnnnnnnnnnnnnnnnnnnnnnnnnnnnnnnnnnnnnnnnnnnnnnnnnnnnnnnnnnnncagggttcgtcttgtggaacgcggcgcccctcagagtttgcttctctcggagtctggaaannnnnnnnnnnnnnnnnnnnnnnnnnnnnnnnnnnnnnnnnnnnnnnnnnnnnnnnnnnnnnnnnnnnnnnnnnnnnnnnnnnnnnnnnnnnnnnnnnnnnnnnnnnnnnnnnnnnnnnnnnnnnnnnnnnnnnnnnnnnnnnnnnnnnnnnnnnnnnnnnnnnnnnnnnnnnnnnnnnnnnnnnnnnnnnnnnnnnnnnnnnnnnnnnnnnnnnnnnnnnnnnnnnnnnnnnnnnnnnnnnnnnnnnnnnnnnnnnnnnnnnnnnnnnnnnnnnnnnnnnnnnnnnnnnnnnnnnnnnnnnnnnnnnnnnnnnnnnnnnnnnnnnnnnnnnnnnnnnnnnnnnnnnnnnnnnnnnnnnnnnnnnnnnnnnnnnnntgccgtgttcacgtggaccaacttgcttgtggtggttgtggaactgtgcggctctgaacnnnnnnnnnnnnnnnnnnnnnnnnnnnnnnnnnnnnnnnnnnnnnnnnnnnnnnnnnnnnnnnnnnnnnnnnnnnnnnnnnnnnnnnnnnnnnnnnnnnnnnnnnnnnnnnnnnnnnnnnnnnnnnnnnnnnnnnnnnnnnnnnnnnnnnnnnnnnnnnnnnnnnnnnnnnnnnnnnnnnnnnnnnnnnnnnnnnnnnnnnnnnnnnnnnnnnnnnnnnnnnnnnnnnnnnnnnnnnnnnnnnnnnnnnnnnnnnnnnnnnnnnnnnnnnnnnnnnnnnnnnnnnnnnnnnnnnnnnnnnnnnnnnnnnnnnnnnnnnnnnnnnnnnnnnnnnnnnnnnnnnnnnnnnnnnnnnnnnnnnnnnnnnnnnnnnnnnnnnnnnnnnnnnnnnnnnnnnnnnnnnnnnnnnnnnnnnnnnnnnnnnnnnnnnnnnnnnnnnnnnnnnnnnnnnnnnnnnnnnnnnnnnnnnnnnnnnnnnnnnnnnnnnnnnnnnnnnnnnnnnnnnnnnnnnnnnnnnnnnnnnnnnnnnnnnnnnnnnnnnnnnnnnnnnnnnnnnnnnnnnnnnnnnnnnnnnnnnnnnnnnnnnnnnnnnnnnnnnnnnnnnnnnnnnnnnnnnnnnnnnnnnnnnnnnnnnnnnnnnnnnnnnnnnnnnnnnnnnnnnnnnnnnnnnnnnnnnnnnnnnnnnnnnnnnnnnnnnnnnnnnnnnnnnnnnnnnnnnnnnnnnnnnnnnnnnnnnnnnnnnnnnnnnnnnnnnnnnnnnnnnnnnnnnnnnnnnnnnnnnnnnnnnnnnnnnnnnnnnnnnnnnnnnnnnnnnnnnnnnnnnnnnnnnnnnnnnnnnnnnnnnnnnnnnnnnnnnnnnnnnnnnnnnnnnnnnnnnnnnnnnnnnnnnnnnnnnnnnnnnnnnnnnnnnnnnnnnnnnnnnnnnnnnnnnnnnnnnnnnnnnnnnnnnnnnnnnnnnnnnnnnnnnnnnnnnnnnnnnnnnnnnnnnnnnnnnnnnnnnnnnnnnnnnnnnnnnnnnnnnnnnnnnnnnnnnnnnnnnnnnnnnnnnnnnnnnnnnnnnnnnnnnnnnnnnnnnnnnnnnnnnnnnnnnnnnnnnnnnnnnnnnnnnnnnnnnnnnnnnnnnnnnnnnnnnnnnnnnnnnnnnnaaaacgatctttcagatttagagtgactatgtaagaatttaggatttcctcttttccaggcccattgtaaactgtgtctacagtttatccatataacttctcttttctgaaaactgaggagtgtcctctgttcttccagttcatgagggcagggggtttaaaacaagaatgataggccaggaaggcagtggggatccaccgtcacatggaactgtaaggccatataactacacaaaactgaccaatctgggttgccaaagcagccaggcttatgctgaaaccggggaagtctgacgtatgcaggaaattcttttgaaataactgtggtgcccaggccaagcagaatgagacaggactgagtttggcctctgactcggtttcctttctttggtctgatacttcatgtatttgaatatagttaaatcttattattttttttttaacagaaatatttttaaaaacgaaaaagtactcaaaagtgaaaagagttaacttgttaaagcagaatggttctctttgacccactctggtctattgtgtaaatatttagactattttagtaatacatattatttaccccagctataacatcatgtaaactaagtatgtttttaaacaatttttaagacttgtaattaccctgaaaataaggtttataatgcaaagaccagctcctttgcggtggcagtgctctggggctgccattacccggccttctgactaaaagccactttgtgactcccttcacgtaatcctcttttcctccccactcctccacagagggcagagctcaggacatttgccagttccagatctctttttcagcatttcgatggaattaatttacatgtgatgagggaagtcctaggatggacagaaaaaaaagcacttacattggggcacccaggaaatcccagtgtctagcgagagtttggtttgcagagaacnnnnnnnnnnnnnnnnnnnnnnnnnnnnnnnnnnnnnnnnnnnnnnnnnnnnnnnnnnnnnnnnnnnnnnnnnnnnnnnnnnnnnnnnnnnnnnnnnnccaagttctaaaagttatggttagatgctattctgtgggttgctttgataattcttactaacacagattagggtataggcatctagagatgcatggtccactgtaaatactataatgagagccacatctgtaattaaatttttctagtaaccacattttttaaaaataaaaagaaacccatggtattgatttaaatatattttattcaacccaatagctcgaaaacactatcatttcaacataagatcaatataaaaattattaatgaggtattttactttttttcatattaggcctttgaaattcagtgtgcattaaacacatctcagtccaaaccatcgccatatttcaagtctttgtagccaaatgtgactagtggctatcatattagacagtgcagatgtatacttattccttcaaatacattactccgttaatctcaaagtgtggccaactcccagttacttagaggctgattatctagttttgtagttcctcaggcctctannnnnnnnnnnnnnnnnnnnnnnnnnnnnnnnnnnatgtcccccaaagccagaatctgctcatggaggaaggaaggctaagaactgtccttgaggaacttcatcagtaactctgggaaagcatcctgtggagggagaggagagtccagtcatttgcttagatggtgtttgtgggatcacctgcagatttaaagtctactgaaccacagactc

SEQ ID NO: 24227 - DNA, 788 bp, Macaca Mulatta
gccgatgtgggataggagaggtcgcatcctggaagccagcccctctggggaacacgagccccttcttcgcggggctgccttgcgtcttagaggagggagagcagagaacacagagcacgcatccttggctcctggctctccgagcttcctgatacaggatctgagcatgtccctgggattctgagctgccaacagggccctgggtggtcacctcttgtactcccctctactgtccctgaggtagtggcaggagttgggccagcccccactaaatggcagggggaagactcatgattgggaagctacctctttgggaatcttggatgtggtgatctgaagttcccacaggccacctccttctggccactcactgctgggacccaggcacctcccttctccatcctctctggattgtcagtaatgtcctggaacagaagcctgtggaatggccttaggaacagagaagccctggggtcagtgtcgtgcatggatggcggcagtgttgaacccaggaggctgaacccagccaccaaggaagatcagtgcatggcaactgcctgccttcacgtcgctccactcagtaaccccaaggtctgggctgttctaggtattactccatgtgccccaacaagcccttcacaagagggcctgtttcccttaagaagcaatcccaggaaggggccttgatccctccgccttgctgagagggaaccctcgtctctcctcaccctccatttcatttctggaaattgaggtttagttttgaaccgttggcaaggctgttcttg

SEQ ID NO: 24228 - DNA, 2319 bp, Macaca Mulatta
  misc_feature (1)...(2319): n = A,T,C or G
gtagtacaacaaccatcgctacactatgactttggaaaagatgattccttgtttggtagctgctttgggaaagatatggccagctgcgatatcaacggtgaagaggaaaaaggcggaaaaaacagatcgaaaagcgagagcctgatgggtacgctcaaaaggcggctttctgcaaaacagaagccaaaaggcaaggcgggcacgccctccgggagctctgccgacgaggacaccttctcctcctcctcagcacccatcgtctttaaagacgtgagagcccagaggccgataaggtccacctcgctccgcagccatcactacagccccacgccgtggcctctgcggcccacgaactcctatgagacctgcatcaagatggaggtgagagtcaaggccttggttcactcttccagcccgagtccagccctgaacggcgtgcggaaggatttccacgacctccagaacgagaccgcgtgccaagagcaagccaattcactgaagagctcggcttctcataacggagacctgcatctccacctggatgaacatgtgcctgtcgttattggacttatgcctcaggactacattcagtatactgtgcctttagatgaggggatgtatcctttggaaggatcgcggagctattgtctggacagctcttctcccatggaagtctctgcggttcctcctccagggggagggcgcgctttccccgaagatgagagtcaggtagaccaggacctggttgtcgccccagagatcttcgtggatcagtccgtgaacggcttgttgattggcaccacgggagtcatgttgcagagcccgagagcgggtcacgatgatgtccctccactctcaccattgctacctccaatgcagaataatcaaatccaagggaacttcagtggactcactggcacagaagcccacgtggctgaaagtatgcgctgtcatttgaatttnnnnnnnnnnnnnnnnnnnnnnnnnnnnnnnnnnnnnnnnnnnnnnnnnnnnnnnnnnnnnnnnnnnnnnnnnnnnnnnnnnnnnnnnnnnnnnnnnnnnnnnnnnnnnnnnnnnnnnnnnnnnnnnnnnnnnnnnnnnnnnnnnnnnnnnnnnnnnnnnnnnnnnnnnnnnnnnnnnnnnnnnnnnnnnnnnnnnnnnnnnnnnnnnnnnnnnnnnnnnnnnnnnnnnnnnnnnnnnnnnnnnnnnnnnnnnnnnnnnnnnnnnnnnnnnnnnnnnnnnnnnnnnnnnnnnnnnnnnnnnnnnnnnnnnnnnnnnnnnnnnnnnnnnnnnnnnnnnnnnnnnnnnnnnnnnnnnnnnnnnnnnnnnnnnnnnnnnnnnnnnnnnnnnnnnnnnnnnnnnnnnnnnnnnnnnnnnnnnnnnnnnnnnnnnnnnnnnnnnnnnnnnnnnnnnnnnnnnnnnnnnnnnnnnnnnnnnnnnnnnnnnnnnnnnnnnnnnnnnnnnnnnnnnnnnnnnnnnnnnnnnnnnnnnnnnnnnnnnnnnnnnnnnnnnnnnnnnnnnnnnnnnnnnnnnnnnnnnnnnnnnnnnnnnnnnnnnnnnnnnnnnnnnnnnnnnnnnnnnnnnnnnnnnnnnnnnnnnnnnnnnnnnnnnnnnnnnnnnnnnnnnnnnnnnnnnnnnnnnnnnnnnnnnnnnnnnnnnnnnnnnnnnnnnnnnnnnnnnnnnnntgtcagcaaggtgtcttgggtttattttggttctttaaaaagggaagtcttgaggttttagaggtgtgaattatctttcatcaatgtgcagaataatcacaatgtgaattatcaaattctcctaatgcccctccccccagtcctttgctgctatccactgtgatttttatgcattaaaagcacatttcatgtgtattcaaccctaagtaaagctgaatgaaacttacagaatggaaattgctatgtctttttaaatggcccattttcaaaagatagtgttgaataaacatacctgtgtgataaaacacagaatttactatacactgaagatgagtttttaatctaaataaaaagatttatttagaatcgtgaattgacataatcttgggtaatggaacggagatctgcaacttatcttttaacaacacttttttctaaattatttctaaggttgtgctaattcttttggttgtgaaaagttgaatttttctgttgccttcattttcatcttatagtttgtctattttaataaatggccttacattaaaaaattgtaaagaaatgtataacaccgatttagaaattgttgccttttctgtaattgaactcgggtacaaattggcgcataacatga

SEQ ID NO: 24229 - DNA, 647 bp, Macaca Mulatta
  misc_feature (1)...(647): n = A,T,C or G
tcgggaagcagctgtcaagttgactccccangcatctcactcagcaggactataaaagaaaaaaatgtcaaatgagagagctttcttttctgaggttaatataaagagtatcaaaggttcttaagggaaagaaagcagtgcttttatttgacttgttccaaattaaacactccgccttgtgactcagcaatgctatctaccttcgcactcctgagctccgccttcctttgttttgatacagtcattatatttgattactattcccaggaatacccccacctagttactcaaatatttttcacttaactttttatacccttattttggtaataagcttacaatattaggaagctggggacctttttgtaactgaagccttgcgtcccctataccgggaatgcaactattaatagattcccatattttaaaaggagggaagggacaatttaatataaatttctgtttgtgcatttctgacaggccattactatctgctttgacaaagcctttctgaaacgcagtgtacaatgaatcttaatgatgttatgaaaccagctttgctcggggctcttgattggagcttccggtatgtaatgacggtatgtcatgtatgcatggatgtactcaactgtgtttaatactctgaa

SEQ ID NO: 24230 - DNA, 5675 bp, Macaca Mulatta
  misc_feature (1)...(5675): n = A,T,C or G
gagccgcggggcttccatccttcctttgactgatatttaaattttaatttgtattttccccgccgccccgcccctttnnnnnnnnnnnnnnnnnnnnnnnnnnnnnnnnnnnnnnnnnnnnnnnnnnnnnnnnnnnnnnnnnnnnnnnnnnnnnnnnnnnnnnnnnnnnnnnnnnnnnnnnnnnnnnnnnnnnnnnnnnnnnnnnnnnnnnnnnnnnnnnnnnnnnnnnnnnnnnnnnnnnnnnnnnnnnnnnnnnnnnnnnnnnnnnnnnnnnnnnnnnnnnnnnnnnnnnnnnnnnnnnnnnnnnnnnnnnnnnnnnnnnnnnnnnnnnnnnnnnnnnnnnnnnnnnnnnnnnnnnnnnnnnnnnnnnnnnnnnnnnnnnnnnnnnnnnnnnnnnnnnnnnnnnnnnnnnnnnnnnnnnnnnnnnnnnnnnnnnnnnnnnnnnnnnnnnnnnnnnnnnnnnnnnnnnnnnnnnnnnnnnnnnnnnnnnnnnnnnnnnnnnnnnnnnnnnnnnnnnnnnnnnnnnnnnnnnnnnnnnnnnnnnnnnnnnnnnnnnnnnnnnnnnnnnnnnnnnnnnnnnnnnnnnnnnnnnnnnnnnnnnnnnnnnnnnnnnnnnnnnnnnnnnnnnnnnnnnnnnnnnnnnnnnnnnnnnnnnnnnnnnnnnnnnnnnnnnnnnnnnnnnnnnnnnnnnnnnnnnnnnnnnnnnnnnnnnnnnnnnnnnnnnnnnnnnnnnnnnnnnnnnnnnnnnnnnnnnnnnnnnnnnnnnnnnnnnnnnnnnnnnnnnnnnnnnnnnnnnnnnnnnnnnnnnnnnnnnnnnnnnnnnnnnnnnnnnnnnnnnnnnnnnnnnnnnnnnnnnnnnnnnnnnnnnnnnnnnnnnnnnnnnnnnnnnnnnnnnnnnnnnnnnnnnnnnnnnnnnnnnnnnnnnnnnnnnnnnnnnnnnnnnnnnnnnnnnnnnnnnnnnnnnnnnnnnnnnnnnnnnnnnnnnnnnnnnnnnnnnnnnnnnnnnnnnnnnnnnnnnnnnnnnnnnnnnnnnnnnnnnnnnnnnnnnnnnnnnnnnnnnnnnnnnnnnnnnnnnnnnnnnnnnnnnnnnnnnnnnnnnnnnnnnnnnnnnnnnnnnnnnnnnnnnnnnnnnnnnnnnnnnnnnnnnnnnnnnnnnnnnnnnnnnnnnnnnnnnnnnnnnnnnnnnnnnnnnnnnnnnnnnnnnnnnnnnnnnnnnnnnnnnnnnnnnnnnnnnnnnnnnnnnnnnnnnnnnnnnnnnnnnnnnnnnnccaaccgctcgtcccctctctcatggcgctacggccagtccagtccgcggctgcaggctggtgacgcaccttctgtgggtgggagctgccgctccgaggggacgcccgcctggtacatgcacggggagcgggcccactactcccacaccatgcccatgcgcagccccagcaagctcagccacatctcccgcctggagctggtcgagtccctggactcagatgaggtggacctcaagtccggctacatgagcgacagtgacctcatgggcaagaccatgacggaagacgacgacatcactaccgnnnnnnnnnnnnnnnnnnnnnnnnnnnnnnnnnnnnnnnnnnnnnnnnnnnnnnnnnnnnnnnnnnnnnnnnnnnnnnnnnnnnnnnnnnnnnnnnnnnnnnnnnnnnnnnnnnnnnnnnnnnnnnnnnnnnnnnnnnnnnnnnnnnnnnnnnnnnnnnnnnnnnnnnnnnnnnnnnnnnnnnnnnnnnnnnnnnnnnnnnnnnnnnnnnnnnnnnnnnnnnnnnnnnnnnnnnnnnnnnnnnnnnnnnnnnnnnnnnnnnnnnnnnnnnnnnnnnnnnnnnnnnnnnnnnnnnnnnnnnnnnnnnnnnnnnnnnnnnnnnnnnnnnnnnnnnnnnnnnnnnnnnnnnnnnnnnnnnnnnnnnnnnnnnnnnnnnnnnnnnnnnnnnnnnnnnnnnnnnnnnnnnnnnnnnnnnnnnnnnnnnnnnnnnnnnnnnnnnnnnnnnnnnnnnnnnnnnnnnnnnnnnnnnnnnnnnnnnnnnnnnnnnnnnnnnnnnnnnnnnnnnnnnnnnnnnnnnnnnnnnnnnnnnnnnnnnnnnnnnnnnnnnnnnnnnnnnnnnnnnnnnnnnnnnnnnnnnnnnnnnnnnnnnnnnnnnnnnnnnnnnnnnnnnnnnnnnnnnnnnnnnnnnnnnnnnnnnnnnnnnnnnnnnnnnnnnnnnnnnnnnnnnnnnnnnnnnnnnnnnnnnnnnnnnnnnnnnnnnnnnnnnnnnnnnnnnnnnnnnnnnnnnnnnnnnnnnnnnnnnnnnnnnnnnnnnnnnnnnnnnnnnnnnnnnnnnnnnnnnnnnnnnnnnnnnnnnnnnnnnnnnnnnnnnnnnnnnnnnnnnnnnnnnnnnnnnnnnnnnnnnnnnnnnnnnnnnnnnnnnnnnnnnnnnnnnnnnnnnnnnnnnnnnnnnnnnnnnnnnnnnnnnnnnnnnnnnnnnnnnnnnnnnnnnnnnnnnnnnnnnnnnnnnnnnnnnnnnnnnnnnnnnnnnnnnnnnnnnnnnnnnnnnnnnnnnnnnnnnnnnnnnnnnnnnnnnnnnnnnnnnnnnnnnnnnnnnnnnnnnnnnnnnnnnnnnnnnnnnnnnnnnnnnnnnnnnnnnnnnnnnnnnnnnnnnnnnnnnnnnnnnnnnnnnnnnnnnnnnnnnnnnnnnnnnnnnnnnnnnnnnnnnnnnnnnnnnnnnnnnnnnnnnnnnnnnnnnnnnnnnnnnnnnnnnnnnnnnnnnnnnnnnnnnnnnnnnnnnnnnnnnnnnnnnnnnnnnnnnnnnnnnnnnnnnnnnnnnnnnnnnnnnnnnnnnnnnnnnnnnnnnnnnnnnnnnnnnnnnnnnnnnnnnnnnnnnnnnnnnnnnnnnnnnnnnnnnnnnnnnnnnnnnnnnnnnnnnnnnnnnnnnnnnnnnnnnnnnnnnnnnnnnnnnnnnnnnnnnnnnnnnnnnnnnnnnnnnnnnnnnnnnnnnnnnnnnnnnnnnnnnnnnnnnnnnnnnnnnnnnnnnnnnnnnnnnnnnnnnnnnnnnnnnnnnnnnnnnnnnnnnnnnnnnnnnnnnnnnnnnnnnnnnnnnnnnnnnnnnnnnnnnnnnnnnnnnnnnnnnnnnnnnnnnnnnnnnnnnnnnnnnnnnnnnnnnnnnnnnnnnnnnnnnnnnnnnnnnnnnnnnnnnnnnnnnnnnnnnnnnnnnnnnnnnnnnnnnnnnnnnnnnnnnnnnnnnnnnnnnnnnnnnnnnnnnnnnnnnnnnnnnnnnnnnnnnnnnnnnnnnnnnnnnnnnnnnnnnnnnnnnnnnnnnnnnnnnnnnnnnnnnnnnnnnnnnnnnnnnnnnnnnnnnnnnnnnnnnnnnnnnnnnnnnnnnnnnnnnnnnnnnnnnnnnnnnnnnnnnnnnnnnnnnnnnnnnnnnnnnnnnnnnnnnnnnnnnnnnnnnnnnnnnnnnnnnnnnnnnnnnnnnnnnnnnnnnnnnnnnnnnnnnnnnnnnnnnnnnnnnnnnnnnnnnnnnnnnnnnnnnnnnnnnnnnnnnnnnnnnnnnnnnnnnnnnnnnnnnnnnnnnnnnnnnnnnnnnnnnnnnnnnnnnnnnnnnnnnnnnnnnnnnnnnnnnnnnnnnnnnnnnnnnnnnnnnnnnnnnnnnnnnnnnnnnnnnnnnnnnnnnnnnnnnnnnnnnnnnnnnnnnnnnnnnnnnnnnnnnnnnnnnnnnnnnnnnnnnnnnnnnnnnnnnnnnnnnnnnnnnnnnnnnnnnnnnnnnnnnnnnnnnnnnnnnnnnnnnnnnnnnnnnnnnnnnnnnnnnnnnnnnnnnnnnnnnnnnnnnnnnnnnnnnnnnnnnnnnnnnnnnnnnnnnagaacttcggatcaagagacaaaactcctcagatagcatctcaagcctcaacagcatcactagccattccagcatcggcagcagcaaggatgctgatgnnnnnnnnnnnnnnnnnnnnnnnnnnnnnnnnnnnnnnnnnnnnnnnnnnnnnnnnnnnnnnnnnnnnnnnnnnnnnnnnnnnnnnnnnnnnnnnnnnnnnnnnnnnnnnnnnnnnnnnnnnnnnnnnnnnnnnnnnnnnnnnnnnnnnnnnnnnnnnnnnnnnnnnnnnnnnnnnnnnnnnnnnnnnnnnnnnnnnnnnnnnnnnnnnnnnnnnnnnnnnnnnnnnnnnnnnnnnnnnnnnnnnnnnnnnnnnnnnnnnnnnnnnnnnnnnnnnnnnnnnnnnnnnnnnnnnnnnnnnnnnnnnnnnnnnnnnnnnnnnnnnnnnnnnnnnnnnnnnnnnnnnnnnnnnnnnnnnnnnnnnnnnnnnnnnnnnnnnnnnnnnnnnnnnnnnnnnnnnnnnnnnnnnnnnnnnnnnnnnnnnnnnnnnnnnnnnnnnnnnnnnnnnnnnnnnnnnnnnnnnnnnnnnnnnnnnnnnnnnnnnnnnnnnnnnnnnnnnnnnnnnnnnnnnnnnnnnnnnnnnnnnnnnnnnnnnnnnnnnnnnnnnnnnnnnnnnnnnnnnnnnnnnnnnnnnnnnnnnnnnnnnnnnnnnnnnnnnnnnnnnnnnnnnnnnnnnnnnnnnnnnnnnnnnnnnnnnnnnnnnnnnnnnnnnnnnnnnnnnnnnnnnnnnnnnnnnnnnnnnnnnnnnnnnnnnnnnnnnnnnnnnnnnnnnnnnnnnnnnnnnnnnnnnnnnnnnnnnnnnnnnnnnnnnnnnnnnnnnnnnnnnnnnnnnnnnnnnnnnnnnnnnnnnnnnnnnnnnnnnnnnnnnnnnnnnnnnnnnnnnnnnnnnnnnnnnnnnnnnnnnnnnnnnnnnnnnnnnnnnnnnnnnnnnnnnnnnnnnnnnnnnnnnnnnnnnnnnnnnnnnnnnnnnnnnnnnnnnnnnnnnnnnnnnnnnnnnnnnnnnnnnnnnnnnnnnnnnnnnnnnnnnnnnnnnnnnnnnnnnnnnnnnnnnnnnnnnnnnnnnnnnnnnnnnnnnnnnnnnnnnnnnnnnnnnnnnnnnnnnnnnnnnnnnnnnnnnnnnnnnnnnnnnnnnnnnnnnnnnnnnnnnnnnnnnnnnnnnnnnnnnnnnnnnnnnnnnnnnnnnnnnnnnnnnnnnnnnnnnnnnnnnnnnnnnnnnnnnnnnnnnnnnnnnnnnnnnnnnnnnnnnnnnnnnnnnnnnnnnnnnnnnnnnnnnnnnnnnnnnnnnnnnnnnnnnnnnnnnnnnnnnnnnnnnnnnnnnnnnnnnnnnnnnnnnnnnnnnnnnnnnnnnnnnnnnnnnnnnnnnnnnnnnnnnnnnnnnnnnnnnnnnnnntccctatattataggtaccaccaatcagcctgtaaaaatgacacccaaccatggcttgcacttgagcttcaggnnnnnnnnnnnnnnnnnnnnnnnnnnnnnnnnnnnnnnnnnnnnnnnnnnnnnnnnnnnnnnnnnnnnnnnnnnnnnnnnnnnnnnnnnnnnnnnnnnnnnnnnnnnnnnnnnnnnnnnnnnnnnnnnnnnnnnnnnnnnnnnnnnnnnnnnnnnnnnnnnnnnnnnnnnnnnnnnnnnnnnnnnnnnnnnnnnnggcccttgcttctttctgtcctgtcccattggcattgaagacttccggacctggttcattgacctgtggaacaactctatcattccctatttacaggaaggagccaaggatgggatcaagg

SEQ ID NO: 24231 - DNA, 501 bp, Macaca Mulatta
tgggccggggcccctgagggctgctctgcgttagtaagattgtcaggtttgcccccctcacctgttgccggtgtgcgggcagcattagccacccccctccatctgtccccagcactggagaaaggggtgctcggatggaggtgtgggatgtgcgcctcagttcctgcctcgcgcctgctgctctaccccaccaccaccacagcccggctgcccagagggctggatgcctgctggtccccgagcgagccccggaactcaggaaaattcacaagacttgggagattctaaatctgaagtgcaattgtttttaataaaaggggcatttggaatcagcttctgccggtctctttgggattcagggcagggagcatgtttccaggggccctggaaccgaggcagttcctttgtcctcagcaggcccccggacattcccacggagggtacacaccatcctctgtctcaagccggcatccattgcatcatgtccccatgtcacgaggc

SEQ ID NO: 24232 - DNA, 1496 bp, Macaca Mulatta
  misc_feature (1)...(1496): n = A,T,C or G
ggtgttcagaatgccaggattccctcaccaactggtactacgagaaagatgggaagctctactgccccaaggactactgggggaagtttggggagttctgtcatgggtgctccctgctgatgacagggccttttatggtnnnnnnnnnnnnnnnnnnnnnnnnnnnnnnnnnnnnnnnnnnnnnnnnnnnnnnnnnnnnnnnnnnnnnnnnnnnnnnnnnnnnnnnnnnnnnnnnnnnnnnnnnnnnnnnnnnnnnnnnnnnnnnnnnnnnnnnnnnnnnnnnnnnnnnnnnnnnnnnnnnnnnnnnnnnnnnnnnnnnnnnnnnnnnnnnnnnnnnnnnnnnnnnnnnnnnnnnnnnnnnnnnnnnnnnnnnnnnnnnnnnnnnnnnnnnnnnnnnnnnnnnnnnnnnnnnnnnnnnnnnnnnnnnnnnnnnnnnnnnnnnnnnnnnnnnnnnnnnnnnnnnnnnnnnnnnnnnnnnnnnnnnnnnnnnnnnnnnnnnnnnnnnnnnnnnnnnnnnnnnnnnnnnnnnnnnnnnnnnnnnnnnnnnnnnnnnnnnnnnnnnnnnnnnnnnnnnnnnnnnnnnnnnnnnnnnnnnnnnnnnnnnnnnnnnnnnnnnnnnnnnnnnnnnnnnnnnnnnnnnnnnnnnnnnnnnnnnnnnnnnnnnnnnnnnnnnnnnnnnnnnnnnnnnnnnnnnnnnnnnnnnnnnnnnnnnnnnnnnnnnnnnnnnnnnnnnnnnnnnnnnnnnnnnnnnnnnnnnnnnnnnnnnnnnnnnnnnnnnnnnnnnnnnnnnnnnnnnnnnnnnnnnnnnnnnnnnnnnnnnnnnnnnnnnnnnnnnnnnnnnnnnnnnnnnnnnnnnnnnnnnnnnnnnnnnnnnnnnnnnnnnnnnnnnnnnnnnnnnnnnnnnnnnnnnnnnnnnnnnnnnnnnnnnnnnnnnnnnnnnnnnnnnnnnnnnnnnnnnnnnnnnnnnnnnnnnnnnnnnnnnnnnnnnnnnnnnnnnnnnnnnnnnnnnnnnnnnnnnnnnnnnnnnnnnnnnnnnnnnnnnnnnnnnnnnnnnnnnnnnnnnnnnnnnnnnnnnnnnnnnnnnnnnnnnnnnnnnnnnnnnnnnnnnnnnnnnnnnnnnnnnnnnnnnnnnnnnnnnnnnnnggatccgttcccctggcagcagaaggtcaggtttgccaaaggaattgcctccggaatgnnnnnnnnnnnnnnnnnnnnnnnnnnnnnnnnnnnnnnnnnnnnnnnnnnnnnnnnnnnnnnnnnnnnnnnnnnnnnnnnnnnnnnnnnnnnnnnnnnnnnnnnnnnnnnnnnnnnnnnnnnnnnnnnnnnnnnnnnnnnnnnnnnnnnnnnnnnnnnnnnnnnnnnnnnnnnnnnnnnnnnnnnnnnnnnnnnnnnnnnnnnnnnnnnnnnnnnnnnnnnnnnnnnnnnnnnnnnnnnggaaagagctatgatgagacggtggatatcttctcctttgggatcgttctctgtga

SEQ ID NO: 24233 - DNA, 378 bp, Macaca Mulatta
tctggcaaaatatttacaaagctgattaatgaaatcaagaaattctgttctgtttccttgagtaaataattttggtaaggcagctagaaaatagtaagtattttgttcgataaagctgtttgcatttctgcataacatgctaaattgtcctgctgtagagttactataaaataaacatgactattccaaaagagatttttttttccagtctaaggaatatgttggaattaaatatgcagttttttcctcacttgaatcatgtatactgaaaacccatttcctcagcaactacacaaaataagggaaagggaagtgctatattccagatacaaacgactcaaaggcagctcagttgtactggttttgaaaactcaagga

SEQ ID NO: 24234 - DNA, 299 bp, Macaca Mulatta
tgtgaaactaaatccacaacctttggagacccaggaacaccctccaatctctgtgtgctttgtaaacgtcactggagaatcctctgggctggcaattggattgtcaccaccctgcctgttttgtgcctgggaagtgccctggtcttgcttggctccaaattgttggctttcacttttgacccgaagcatctgaagtcatgggccacacatggaggcagggaatatcaccatccaagtgtccatacctcaagttctttcagctcttggtgctggcttgtctttctcatttctgttcaggt

SEQ ID NO: 24235 - DNA, 454 bp, Macaca Mulatta
  misc_feature (1)...(454): n = A,T,C or G
tgtcaccttcacacatgctgggccctttcagaaaagtgccagatcgtgtaactggtgctatttttcatgctctggtacaatgtgtagcaccacggggctctcagctttaccaaaatcaaaattccatttgtcagctaagtgcagaggcattcattttttgctctcctcccacagaattgttggccatttatttgcaggccttttgcgggatttcttggccgtttatttgcaggccttttctcccagccccaaattcttgggttggctctgtctgcttaaagagcctgtcttcacaaagccgcactcgggtgcctctgtgcgctgtcttagatcctactgccagcccttcaggactccgagccaggaaagaactctccaacctctggctcgagactctnnnnnnnnntcattcttttccttgctctcctccttcttctatttctgactaattcca

SEQ ID NO: 24236 - DNA, 156 bp, Macaca Mulatta
agataccagcagtttggaatcttacctacaaactgaacttcatttatacactgaacaatcacataaagaggagaagacccctatgccacccatcagttctgtcctcttggcattttctgttcttggagaactacacagcaagcttaaatcatttgg

SEQ ID NO: 24237 - DNA, 1529 bp, Macaca Mulatta
  misc_feature (1)...(1529): n = A,T,C or G
gagctggtggagaagagttcggggttctagagtactggatgaggctgcgtttccccataaaacccagcctacaggcatgcaataaacgaaagaaaggccagggcgacctgtcaannnnnnnnnnnnnnnnnnnnnnnnnnnnnnnnnnnnagttcagattggagtcttgggaacctcagaacgagctgcagattgaaatcaccaagtgctgtggcctccggagtcgatggctgggaactcaacccagtccatatgctgtgtaccgcttcttcaccttttctgaccatgacactgccatcattccagctagtaacaacccctactttagagaccaggctcgattcccggtgcttgtgacctctgacctggaccaatatctgagacgggaggccctgtctatacatgtttttgatgatgaagacttagagcctggctcatatcttggccgagcccaagtgcctatactgcctcttgcaaaaaatgaatctatcaaaggtnnnnnnnnnnnnnnnnnnnnnnnnnnnnnnnnnnnnnnnnnnnnnngtgcaactggattggaagtttccctacataccccctgagagtttcctgaaaccagaagctcagactaaggggaaggataccaaggacagttcaaagatctcatctgaagaggaaaaggcttcatttccttcccaggnnnnnnnnnnnnnnnnnnnnnnnnnnnnnnnnnnnnnnnnnnnnnnnnnnnnnnnnnnnnnnnnnnnnnnnnnnnnnnnnnnnnnnnnnnnnnnnnnnnnnnnnnnnnnnnnnnnnnnnnnnnnnnnnnnnnnnnnnnnnnnnnnnnnnnnnnnnnnnnnnnnnnnnnnnnnnnnnnnnnnnnnnnnnnnnnnnnnnnnnnnnnnnnnnnnnnnnnnnnnnnnnnnnnnnnnnnnnnnnnnnnnnnnnnnnnnnnnnnnnnnnnnnnnnnnnnnnnnnnnnnnnnnnnnnnnnnnnnnnnnnnnnnnnnnnnnnnnnnnnnnnnnnnnnnnnnnnnnnnnnnnnnnnnnnnnnnnnnnnnnnnnnnnnnnnnnnnnnnnnnnnnnnnnnnnnnnnnnnnnnnnnnnnnnnnnnnnnnnnnnnnnnnnnnnnnnnnnnnnnnnnnnnnnnnnnnnnnnnnnnnnnnnnnnnnnnnnnnnnnnnnnnnnnnnnnnnnnnnnnnnnnnnnnnnnnnnnnnnnnnnnnnnnnnnnnnnnnnnnnnnnnnnnnnnnnnnnnnnnnnnnnnnnnnnnnnnnnnnnnnnnnnnnnnnnnnnnnnnnnnnnnnnnnnnnnnnnnnnnnnnnnnnnnnnnnnnngtaatagacctggacccacaggagcagcaagaccgaaggcagtttctgttcgacgtgctgactggacaagatcctgatcaaggacttaaagtttacagtggtaagtgatcctctggatgaagaaaagaaagaatgtgaagaagtaggatatgcgtatcttaaactgtggcagatcctggagtcaggaagagatattctagagcaagagctagaca

SEQ ID NO: 24238 - DNA, 151 bp, Macaca Mulatta
attttctggggaaaagaaactttgtacgcacaaaaactggtgtaattggcaaataactcaagactcacaagaaatgtataacttcacactcatagctgaaaattacttaaggaagagaagtgtcaatatcctttttaacctgactcatcga

SEQ ID NO: 24239 - DNA, 155 bp, Macaca Mulatta
agagaaagaccccaaactagagattcgctatcggcacaagaagtcacgggagcgggatggcaatgagcgggacggcagtgagccccgggatgagggaggagggcgcaagaggcctgtccccgatccagacctgcagagccgggcagggtcaggga

SEQ ID NO: 24240 - DNA, 539 bp, Macaca Mulatta
  misc_feature (1)...(539): n = A,T,C or G
tcatgaaggagaagggcaagaggtcatctgaacacatccaccagatcgacctggacgtgagggggacactaaggactcacatcttcttaagggatcgctacggaaccaangcagcgggaactattctacatcctcctggcatattcggagtataacccgnggaggtgggctactgcagggacctgagccccatcgcggccttgtttctcctgtatctgcctgaggaggatgcattctgggcactggtgcagctgctggccagtgagaggcactccctgcaggnnnnnnnnnnnnnnnnnnnnnnnnnnnnnnnnnnnnnnnnnnnnnnnnnnnnnnnnnnnnnnnnnnnnnnnnnnnnnnnnnnnnnnnnnnnnnnnnnnnnnnnnnnnnnnnnnnnnnnnnnnnnnnnnnnnnnnnnnnnnnnnnnnnnnnnnnnnnnnngatctctcttgggctcaccctgcgcctgtgggacgtgtatttgctggaaggagaacaggtgttgatgccgatgacaagcattgcctttaaagttcagc

SEQ ID NO: 24241 - DNA, 611 bp, Macaca Mulatta
tctttgtcagtttcctatgacaagagcctgtgacttctcagatatctctttgggaagtgggagaggactatttccagaacctttgaagttgttatgcaaatagggcattcgtaatcctattagccggaattcttatctatcacttgaatgagtctcttagaaaagttgtgttggtaaggaattagccccagttgcttcacaagtaagtcagccaacactatagccgcccaagagattttggctggcccctcttccagttttctctggttttaatcaaggaagttgctgttagatgctgcctttgcagtccaaagatgtacagccatccacttcacacgaatcaattgggctaactttaaaataatttctttgtcatcatgactaaattttatgaatcagttacttcagggacattgcacagatactggcttgggtatcctattaacacttggatcagggtgccaagtttgaatgatgtgtgtgtgtttaataagctcctgcctgtttcttctcagacactgagacatgtgactatggctggcacaaattccaagggcagtgctacaaatactttgcccatcgacgcacatgggatgcagctgaacgggaat

SEQ ID NO: 24242 - DNA, 1350 bp, Macaca Mulatta
cctctcttccatgcttaactgggtttagaaaggtgagctatgcgtagaagaactacttgagatattcaagtgctgtatttgaacgataagcctatagataccagtctgaagctgcaagggagactttgttagtacactactataaacaggtaaactacctgtttgtacttgatatagtgcatatgaaatgactgatttaatacaaaactacagaacatgcaagattttttctgagatgttaagtattacttcagtggagaacaaaacttacttaaccttttgctaatgcatgtagtaccagaaagcaaacatggttttagcttccctttactcaaaaatatgaacattaagttgttgtgaatttgtctgccaagtggttcagaaatacattataaataacctagttaaaaaaagaaactgtgaaccatcttggtcagtctattctattctatgtttatatgttattttctcaagcaatagcttcataattatggggtttacaaaaaggttgagaaagaagagggaaggcgaaatagcctctactgcattacaaggaacatcaggataaactgtacaaagaattacatggtttccataccatgaatgtagaaagcagaccaggtttaggaatgataggacaatgcactctctgcaatagccaactacaacaaaacacttcgaaagtaaaggtgaaaattatgtaaagggaaaaaattcaagcctttaaatagcattatgtcaagaggtgaaaacaaaggtatcaaaacaccctgttgcactacgttgatagttacagactgatagagtgccctcccttttcaatgaggatgtctccatattttagttcagtgatgtaatgaagtactgattactgatttttaacccaactcttaataggctgcattaagacagcaaaattagccaaatacaacaaagtattgaaaccactactttgtgattgtgttcttggatataggaaaattacagggttaggctagttgtaagtgaaaaagccacaggattacaaaaagggctcatggggaaagatacacacacacacccatacccacacacacctacacacccacacgcccacacgccaaccaaccaatcagcaactgatcagtaaaacttgttattaaccagggtgactgttcttggtaatagtttaaccctgctgtagaatgctacgttgcctttaaaatcaattcaattattacccaattattagggagtatcagtccctaacccaccctcccctctctaaaaatttgaggtacattcaattattgcatgacttggctaagaaaaaactcttaatatttttagtaaggttatatggatggcaag

SEQ ID NO: 24243 - DNA, 1801 bp, Macaca Mulatta
  misc_feature (1)...(1801): n = A,T,C or G
tcagagctggaaacaacttctggtggattcctgtagtgggccctttggttggtgcnnnnnnnnnnnnnnnnnnnnnnnnnnnnnnnnnnnnnnnnnnnnnnnnnnnnnnnnnnnnnnnnnnnnnnnnnnnnnnnnnnnnnnnnnnnnnnnnnnnnnnnnnnnnnnnnnnnnnnnnnnnnnnnnnnnnnnnnnnnnnnnnnnnnnnnnnnnnnnnnnnnnnnnnnnnnnnnnnnnnnnnnnnnnnnnnnnnnnnnnnnnnnnnnnnnnnnnnnnnnnnnnnnnnnnnnnnnnnnnnnnnnnnnnnnnnnnnnnnnnnnnnnnnnnnnnnnnnnnnnnnnnnnnnnnnnnnnnnnnnnnnnnnnnnnnnnnnnnnnnnnnnnnnnnnnnnnnnnnnnnnnnnnnnnnnnnnnnnnnnnnnnnnnnnnnnnnnnnnnnnnnnnnnnnnnnnnnnnnnnnnnnnnnnnnnnnnnnnnnnnnnnnnnnnnnnnnnnnnnnnnnnnnnnnnnnnnnnnnnnnnnnnnnnnnnnnnnnnnnnnnnnnnnnnnnnnnnnnnnnnnnnnnnnnnnnnnnnnnnnnnnnnnnnnnnnnnnnnnnnnnnnnnnnnnnnnnnnnnnnnnnnnnnnnnnnnnnnnnnnnnnnnnnnnnnnnnnnnnnnnnnnnnnnnnnnnnnnnnnnnnnnnnnnnnnnnnnnnnnnnnnnnnnnnnnnnnnnnnnnnnnnnnnnnnnnnnnnnnnnnnnnnnnnnnnnnnnnnnnnnnnnnnnnnnnnnnnnnnnnnnnnnnnnnnnnnnnnnnnnnnnnnnnnnnnnnnnnnnnnnnnnnnnnnnnnnnnnnnnnnnnnnnnnnnnnnnnnnnnnnnnnnnnnnnnnnnnnnnnnnnnnnnnnnnnnnnnnnnnnnnnnnnnnnnnnnnnnnnnnnnnnnnnnnnnnnnnnnnnnnnnnnnnnnnnnnnnnnnnnnnnnnnnnnnnnnnnnnnnnnnnnnnnnnnnnnnnnnnnnnnnnnnnnnnnnnnnnnnnnnnnnnnnnnnnnnnnnnnnnnnnnnnnnnnnnnnnnnnnnnnnnnnnnnnnnnnnnnnnnnnnnnnnnnnnnnnnnnnnnnnnnnnnnnnnnnnnnnnnnnnnnnnnnnnnnnnnnnnnnnnnnnnnnnnnnnnnnnnnnnnnnnnnnnnnnnnnnnnnnnnnnnnnnnnnnnnnnnnnnnnnnnnnnnnnnnnnnnnnnnnnnnnnnnnnnnnnnnnnnnnnnnnnnnnnnnnnnnnnnnnnnnnnnnnnnnnnnnnnnnnnnnnnnnnnnnnnnnnnnnnnnnnnnnnnnnnnnnnnnnnnnnnnnnnnnnnnnnnnnnnnnnnnnnnnnnnnnnnnnnnnnnnnnnnnnnnnnnnnnnnnnnnnnnnnnnnnnnnnnnnnnnnnnnnnnnnnnnnnnnnnnnnnnnnnnnnnnnnnnnnnnnnnnnnnnnnnnnnnnnnnnnnnnnnnnnnnnnnnnnnncacttgctgagtacagatgaaggaaagtggtagcaatgtaatcataactttcatttgcgtgaaaaacataatcagaagtcctcccttcctaagctacctctggtgttgctaagtcttgatcttccttcctgccagcaccaaacattacattcaggggatttcctctggctcagtcttttccccttgaagttctctaatagatgttacttttgacaaaacactgcctatgagttacaagtaccaggggatgctctatatcaagggatgccccttcattcaaactgtcaaaaagcccagcattcccaagggcatttggtttccca

SEQ ID NO: 24244 - DNA, 969 bp, Macaca Mulatta
  misc_feature (1)...(969): n = A,T,C or G
gggcctttttgctgtaggcctgagtggttgctgccgaaatgggcaagttcatgaaacctgggaaggtggtgcttgtcctggctggacgctactctggacgcaaagccgtcatcgtgaagaacattgatgatggcacctcagatcgcccctacagccatgctctggtggctggaattgaccgctacccccgcaaagtgacagctgccatgggcaagaagaagatcgccaagaggtcaaagatcaagtcttttgtgaaagtttataactacaatcacctaatgcccacaaggtactctgtggatatccccttggacaaaactgttgtcaataaagatgtcttcagagatcctgctcttaaacgcaaggcccgacgagaggccaaggtcaagtttgaagagagatacaagacaggcaagtacaagtggttcttccagaagctgcggttttagatgctttgttttggtcattaaatattaaaaaggaaagaatgagtatctaaataaaattgatacttggaaaaaaggtgttcagacccaagggcccttcaacaaaccttcatctcccttctcgtattgcaccccttggcgccctttaggtcaaggttcacctagtcctaataccttttttcccgcgcccacaaaccccgccttaaaaaaaaactttccttagcacattttctctttacaagggaacgaaggggcccccgttgggttaaaactattaaaaaatttnnnnnnnnnnnnnnnnnnntctttggaaagaaactttctgggcaccattacacctgtattccttttgtaaccacacaacagcgccaaaaacaaagatcatccccctcgaagcgttatctcttccgcccgctgttttcatcagaacaaacgtcatctcgacggaggaaattttatgtgtgatgaaatactctaaggtggaggaacaaatattacattgctcgacgaaacgacgtagaca

SEQ ID NO: 24245 - DNA, 2096 bp, Macaca Mulatta
  misc_feature (1)...(2096): n = A,T,C or G
ggtaccaaaaggaaaaatgaagattctcctggtctttctagggcttcttggtaattctgttgctatgccnnnnnnnnnnnnnnnnnnnnnnnnnnnnnnnnnnnnnnnnnnnagatgatgcggtataatcaattcaactttatgnnnnnnnnnnnnggcacacctgggggcccttctttggaaacagtcttcctcagcaattttcacagtaacagatgcccatgtggcctcaagcaccaacatggcaaccacaaaaaccctcagcacaaaaacgtcttaatagactgatcagacccaagaaacccgaaaaccaaccggactcgttcaaaaagccaccacaannnnnnnnnnnnnnnnnnnnnnnnnnnnnnnnnnnnnnnnnnnnnnnnnnnnnnnnnnnnnnnnnnnnnnnnnnnnnnnnnnnnnnnnnnnnnnnnnnnnnnnnnnnnnnnnnnnnnnnnnnnnnnagaggttaccgccaccaggttatggacgcccaccagccagcaatgaagaaggnnnaatccttactttggatattttggatatcatggctttgggggtcgccctccttattattcagaagaaatgtttgaacaagattttgaaaaacccaaagaagaagatcctcctaaagcagaaagtccaggcacagaacccacagctaattcaacagttactgagacgaattctacccaatcaaatcctaaagggagtcagggtggaaatgacaccagccccacaggaaacagtatcccaggaccgaacactgggaacaaccctccagctcaaaatgggattgtcccactccctgcagtcaacacttcaggccagggagggccaggaagtcaaatcccatggagaccaagtcagccaaatattcgtgaaaatcatccaaatcctaatataagaaattttccnnnnnnnnnnnnnnnnnnnnnnnnnnnnnnnnnnnnnnnnnnnnnnnnnnnnnnnnnnnnnnnnnnnnnnnnnnnnnnnnnnnnnnnnnnnnnnnnnnnnnnnnnnnnnnnnnnnnnnnnnnnnnnnnnnnnnnnnnnnnnnnnnnnnnnnnnnnnnnnnnnnnnnnnnnnnnnnnnnnnnnnnnnnnnnnnnnnnnnnnnnnnnnnnnnnnnnnnnnnnnnnnnnnnnnnnnnnnnnnnnnnnnnnnnnnnnnnnnnnnnnnnnnnnnnnnnnnnnnnnnnnnnnnnnnnnnnnnnnnnnnnnnnnnnnnnnnnnnnnccaagggagaagcacctgggtccaaaagaacaaataatagttcctacaaagaatccaaccagcgccgggagaaactctcaacagtatgaagttaataaatcaaattataagctgcctcactctgagggttatacaccagtcccaaattttaattctgttgatcaacatgaaaactcctattacccaagggaagattccagaaaactaccaaattctgatggacaaacccaaagccagattttgcccaaaggggatggttttagcgccaagaaggatcccatatgaatcagaaactaatcagccagaattaaagcacagtgcatatcagcctgctgtacaccctgaggaaatcccttctgcaaaagaacattttcctgctggaagaaatacttgggaccaccaagaaatctctccaccttttaaggaacatcctgggaggcaagaagaacatttaccccatccttcccatggttctagaggaagggttttctaccctgaatataacccctatgatcccagggaaaactcaccataccgtagaagcaatacatgggatgagagagatgattctcccaatactatggggcaaaaagaaagttcactctaccccataaataccccagaccacaaggagacagtcccttataatgaagaagacccaattgatccaactggagatgaagtctttcctggacaaaatagatggggtgaagagttgagcttcaaagggggcccaacagttaggcactatgaaggtgaacaatatacctcaaatcagccaaaggaatatcctccctattctttagcaatccatcaaaccaagggaggatttttattatagtgaattctacccatgg

SEQ ID NO: 24246 - DNA, 6209 bp, Macaca Mulatta
  misc_feature (1)...(6209): n = A,T,C or G
atggcccctacgctgttccagaagctcttcagcaagaagaccgggctgggcgcgcccggccgcgacgcccgggatccagattgcgggttcagnnnnnnnnnnnnnnnnnnnnnnnnnnnnnnnnnnnnnnnnnnnnnnnnnnnnnnnnnnnnnnnnnnnnnnnnnnnnnnnnnnnnnnnnnnnnnnnnnnnnnnnnnnnnnnnnnnnnnnnnnnnnnnnnnnnnnnnnnnnnnnnnnnnnnnnnnnnnnnnnnnnnnnnnnnnnnnnnnnnnnnnnnnnnnnnnnnnnnnnnnnnnnnnnnnnnnnnnnnnnnnnnnnnnnnnnnnnnnnnnnnnnnnnnnnnnnnnnnnnnnnnnnnnnnnnnnnnnnnnnnnnnnnnnnnnnnnnnnnnnnnnnnnnnnnnnnnnnnnnnnnnnnnnnnnnnnnnnngttttggtaagcagtttggaggaaaaagaggatgtgattgtcttgtattagagccttcagaaatgattgtggtannnnnnnnnnnnnnnnnnnnnnnnnnnnnnnnnnnnnnnnnnnnnnnnnnnnnnnnnnnnnnnnnnnnnnnnnnnnnnnnnnnnnnnnnnnnnnnnnnnnnnnnnnnnnnnnnnnnnnnnnnnnnnnnnnnnnnnnnnnnnnnnnnnnnnnnnnnnnnnnnnnnnnnnnnnnnnnnnnnnnnnnnnnnnnnnnnnnnnnnnnnnnnnnnnnnnnnnnnnnnnnnnnnnnnnnnnnnnnnnnnnnnnnnnnnnnnnnnnnnnnnnnnnnnnnnnnnnnnnnnnnnnnnnnnnnnnnnnnnnnnnnnnnnnnnnnnnnnnnnnnnnnnnnnnnnnnnnnnnnnnnnnnnnnnnnnnnnnnnnnnnnnnnnnnnnnnnnnnnnnnnnnnnnnnnnnnnnnnnnnnnnnnnnnnnnnnnnnnnnnnnnnnnnnnnnnnnnnnnnnnnnnnnnnnnnnnnnnnnnnnnnnnnnnnnnnnnnnnnnnnnnnnnnnnnnnnnnnnnnnnnnnnnnnnnnnnnnnnnnnnnnnnnnnnnnnnnnnnnnnnnnnnnnnnnnnnnnnnnnnnnnnnnnnnnnnnnnnnnnnnnnnnnnnnnnnnnnnnnnnnnnnnnnnnnnnnnnnnnnnnnnnnnnnnnnnnnnnnnnnnnnnnnnnnnnnnnnnnnnnnnnnnnnnnnnnnnnnnnnnnnnnnnnnnnnnnnnnnnnnnnnnnnnnnnnnnnnnnnnnnnnnnnnnnnnnnnnnnnnnnnnnnnnnnnnnnnnnnnnnnnnnnnnnnnnnnnnnnnnnnnnnnnnnnnnnnnnnnnnnnnnnnnnnnnnnnnnnnnnnnnnnnnnnnnnnnnnnnnnnnnnnnnnnnnnnnnnnnnnnnnnnnnnnnnnnnnnnnnnnnnnnnnnnnnnnnnnnnnnnnnnnnnnnnnnnnnnnnnnnnnnnnnnnnnnnnnnnnnnnnnnnnnnnnnnnnnnnnnnnnnnnnnnnnnnnnnnnnnnnnnnnnnnnnnnnnnnnnnnnnnnnnnnnnnnnnnnnnnnnnnnnnnnnnnnnnnnnnnnnnnnnnnnnnnnnnnnnnnnnnnnnnnnnnnnnnnnnnnnnnnnnnnnnnnnnnnnnnnnnnnnnnnnnnnnnnnnnnnnnnnnnnnnnnnnnnnnnnnnnnnnnnnnnnnnnnnnnnnnnnnnnnnnnnnnnagatgaatggtcatctccggttattgaatattgcctgtgctgcaaaggctaagtggagacaggttgtgctgcagaaggcttcccgcgagtcccctctacaattcagccttaatggaggaagtgagaagggatttggtatttttgttgaaggagtagaacctggtagcaaagctgctgattcaggactgaaacgtggtgatcagnnnnnnnnnnnnnnnnnnnnnnnnnnnnnnnnnnnnnnnnnnnnnnnnnnnnnnnnnnnnnnnnnnnnnnnnnnnnnnnnnnncttactgtgaagaccaacatttnnnnnnnnnnnnnnnnnnnnnnnnnnnnnnnnnnnnnnnnnnnnnnnnnnnnnnnnnnnnnnnnnnnnnnnnnnnnnnnnnnnnnnnnnnnnnnnnnnnnnnnnnnnnnnnnnnnnnnnnnnnnnnnnnnnnnnnnnnnnnnnnnnnnnnnnnnnnnnnnnnnnnnnnnnnnnnnnnnnnnnnnnnnnnnnnnnnnnnnnnnnnnnnnnnnnnnnnnnnnnnnnnnnnnnnnnnnnnnnnnnnnnnnnnnnnnnnnnnnnnnnnnnnnnnnnnnnnnnnnnnnnnnnnnnnnnnnnnnnnnnnnnnnnnnnnnnnnnnnnnnnnnnnnnnnnnnnnnnnnnnnnnnnnnnnnnnnnnnnnnnnnnnnnnnnnnnnnnnnnnnnnnnnnnnnnnnnnnnnnnnnnnnnnnnnnnnnnnnnnnnnnnnnnnnnnnnnnnnnnnnnnnnnnnnnnnnnnnnnnnnnnnnnnnnnnnnnnnnnnnnnnnnnnnnnnnnnnnnnnnnnnnnnnnnnnnnnnnnnnnnnnnnnnnnnnnnnnnnnnnnnnnnnnnnnnnnnnnnnnnnnnnnnnnnnnnnnnnnnnnnnnnnnnnnnnnnnnnnnnnnnnnnnnnnnnnnnnnnnnnnnnnnnnnnnnnnnnnnnnnnnnnnnnnnnnnnnnnnnnnnnnnnnnnnnnnnnnnnnnnnnnnnnnnnnnnnnnnnnnnnnnnnnnnnnnnnnnnnnnnnnnnnnnnnnnnnnnnnnnnnnnnnnnnnnnnnnnnnnnnnnnnnnnnnnnnnnnnnnnnnnnnnnnnnnnnnnnnnnnnnnnnnnnnnnnnnnnnnnnnnnnnnnnnnnnnnnnnnnnnnnnnnnnnnnnnnnnnnnnnnnnnnnnnnnnnnnnnnnnnnnnnnnnnnnnnnnnnnnnnnnnnnnnnnnnnnnnnnnnnnnnnnnnnnnnnnnnnnnnnnnnnnnnnnnnnnnnnnnnnnnnnnnnnnnnnnnnnnnnnnnnnnnnnnnnnnnnnnnnnnnnnnnnnnnnnnnnnnnnnnnnnnnnnnnnnnnnnnnnnnnnnnnnnnnnnnnnnnnnnnnnnnnnnnnnnnnnnnnnnnnnnnnnnnnnnnnnnnnnnnnnnnnnnnnnnnnnnnnnnnnnnnnnnnnnnnnnnnnnnnnnnnnnnnnnnnnnnnnnnnnnnnnnnnnnnnnnnnnnnnnnnnnnnnnnnnnnnnnnnnnnnnnnnnnnnnnnnnnnnnnnnnnnnnnnnnnnnnnnnnnnnnnnnnnnnnnnnnnnnnnnnnnnnnnnnnnnnnnnnnnnnnnnnnnnnnnnnnnnnnnnnnnnnnnnnnnnnnnnnnnnnnnnnnnnnnnnnnnnnnnnnnnnnnnnnnnnnnnnnnnnnnnnnnnnnnnnnnnnnnnnnnnnnnnnnnnnnnnnnnnnnnnnnnnnnnnnnnnnnnnnnnnnnnnnnnnnnnnnnnnnnnnnnnnnnnnnnnnnnnnnnnnnnnnnnnnnnnnnnnnnnnnnnnnnnnnnnnnnnnnnnnnnnnnnnnnnnnnnnnnnnnnnnnnnnnnnnnnnnnnnnnnnnnnnnnnnnnnnnnnnnnnnnnnnnnnnnnnnnnnnnnnnnnnnnnnnnnnnnnnnnnnnnnnnnnnnnnnnnnnnnnnnnnnnnnnnnnnnnnnnnnnnnnnnnnnnnnnnnnnnnnnnnnnnnnnnnnnnnnnnnnnnnnnnnnnnnnnnnnnnnnnnnnnnnnnnnnnnnnnnnnnnnnnnnnnnnnnnnnnnnnnnnnnnnnnnnnnnnnnnnnnnnnnnnnnnnnnnnnnnnnnnnnnnnnnnnnnnnnnnnnnnnnnnnnnnnnnnnnnnnnnnnnnnnnnnnnnnnnnnnnnnnnnnnnnnnnnnnnnnnnnnnnnnnnnnnnnnnnnnnnnnnnnnnnnnnnnnnnnnnnnnnnnnnnnnnnnnnnnnnnnnnnnnnnnnnnnnnnnnnnnnnnnnnnnnnnnnnnnnnnnnnnnnnnnnnnnnnnnnnnnnnnnnnnnnnnnnnnnnnnnnnnnnnnnnnnnnnnnnnnnnnnnnnnnnnnnnnnnnnnnnnnnnnnnnnnnnnnnnnnnnnnnnnnnnnnnnnnnnnnnnnnnnnnnnnnnnnnnnnnnnnnnnnnnnnnnnnnnnnnnnnnnnnnnnnnnnnnnnnnnnnnnnnnnnnnnnnnnnnnnnnnnnnnnnnnnnnnnnnnnnnnnnnnnnnnnnnnnnnnnnnnnnnnnnnnnnnnnnnnnnnnnnnnnnnnnnnnnnnnnnnnnnnnnnnnnnnnnnnnnnnnnnnnnnnnnnnnnnnnnnnnnnnnnnnnnnnnnnnnnnnnnnnnnnnnnnnnnnnnnnnnnnnnnnnnnnnnnnnnnnnnnnnnnnnnnnnnnnnnnnnnnnnnnnnnnnnnnnnnnnnnnnnnnnnnnnnnnnnnnnnnnnnnnnnnnnnnnnnnnnnnnnnnnnnnnnnnnnnnnnnnnnnnnnnnnnnnnnnnnnnnnnnnnnnnnnnnnnnnnnnnnnnnnnnnnnnnnnnnnnnnnnnnnnnnnnnnnnnnnnnnnnnnnnnnnnnnnnnnnnnnnnnnnnnnnnnnnnnnnnnnnnnnnnnnnnnnnnnnnnnnnnnnnnnnnnnnnnnnnnnnnnnnnnnnnnnnnnnnnnnnnnnnnnnnnnnnnnnnnnnnnnnnnnnnnnnnnnnnnnnnnnnnnnnnnnnnnnnnnnnnnnnnnnnnnnnnnnnnnnnnnnnnnnnnnnnnnnnnnnnnnnnnnnnnnnnnnnnnnnnnnnnnnnnnnnnnnnnnnnnnnnnnnnnnnnnnnnnnnnnnnnnnnnnnnnnnnnnnnnnnnnnnnnnnnnnnnnnnnnnnnnnnnnnnnnnnnnnnnnnnnnnnnnnnnnnnnnnnnnnnnnnnnnnnnnnnnnnnnnnnnnnnnnnnnnnnnnnnnnnnnnnnnnnnnnnnnnnnnnnnnnnnnnnnnnnnnnnnnnnnnnnnnnnnnnnnnnnnnnnnnnnnnnnnnnnnnnnnnnnnnnnnnnnnnnnnnnnnnnnnnnnnnnnnnnnnnnnnnnnnnnnnnnnnnnnnnnnnnnnnnnnnnnnnnnnnnnnnnnnnnnnnnnnnnnnnnnnnnnnnnnnnnnnnnnnnnnnnnnnnnnnnnnnnnnnnnnnnnnnnnnnnnnnnnnnnnnnnnnnnnnnnnnnnnnnnnnnnnnnnnnnnnnnnnnnnnnnnnnnnnnnnnnnnnnnnnnnnnnnnnnnnnnnnnnnnnnnnnnnnnnnnnnnnnnnnnnnnnnnnnnnnnnnnnnnnnnnnnnnnnnnnnnnnnnnnnnnnnnnnnnnnnnnnnnnnnnnnnnnnnnnnnnnnnnnnnnnnnnnnnnnnnnnnnnnnnnnnnnnnnnnnnnnnnnnnnnnnnnnnnnnnnnnnnnnnnnnnnnnnnnnnnnnnnnnnnnnnnnnnnnnnnnnnnnnnnnnnnnnnnnnnnnnnnnnnnnnnnnnnnnnnnnnnnnnnnnnnnnnnnnnnnnnnnnnnnnnnnnnnnnnnnnnnnnnnnnnnnnnnnnnnnnnnnnnnnnnnnnnnnnnnnnnnnnnnnnnnnnnnnnnnnnnnnnnnnnnnnnnnnnnnnnnnnnnnnnnnnnnnnnnnnnnnnnnnnnnnnnnnnnnnnnnnnnnnnnnnnnnnnnnnnnnnnnnnnnnnnnnnnnnnnnnnnnnnnnnnnnnnnnnnnnnnnnnnnnnnnnnnnnnnnnnnnnnnnnnnnnnnnnnnnnnnnnnnnnnnnnnnnnnnnnnnnnnnnnnnnnnnnnnnnnnnnnnnnnnnnnnnnnnnnnnnnnnnnnnnnnnnnnnnnnnnnnnnnnnnnnnnnnnnnnnnnnnnnnnnnnnnnnnnnnnnnnnnnnnnnnnnnnnnnnnnnnnnnnnnnnnnnnnnnnnnnnnnnnnnnnnnnnnnnnnnnnnnnnnnnnnnnnnnnnnnnnnnnnnnnnnnnnnnnnnnnnnnnnnnnnnnnnnnnnnnnnnnnnnnnnnnnnnnnnnnnnnnnnnnnnnnnnnnngccacccccatgtctcatagcaccaggttgtgtctgacctgacataccctgcagctctcagctgcctgcagcaaaattttgtgggagaaagaggagctggagttatagaaatgattgtctcttggttctcagtttttagcccttgagaggacatacttttccagcctcatgggcatggcactcttaattaaaatttcagtgactgtttactggatgaggcagatttttca

SEQ ID NO: 24247 - DNA, 1202 bp, Macaca Mulatta
ggggctttcaagcttggcgtttgtttggtggggtcccacgcgggttcaacatgcgtatcgagaagtgttatttctgttcggggcccatctaccctggacacggcatgatgttcgtccgcaacgattgcaaggtgttcagattttgcaaatctaaatgtcataaaaactttaaaaagaagcgcaatcctcgcaaagttaggtggaccaaggcattccggaaagcagctggtaaagagcttacagtggataattcatttgaatttgaaaaacgtagaaatgaacctatcaaataccagcgagagctatggaataaaactattgatgcaatgaagagagttgaagagatcaaacagaaacgccaagctaaatttataatgaacagattgaagaaaaataaagagctacagaaagttcaggatatcaaagaagtcaagcaaaacatccatcttatccgagcccctcttgcaggcaaagggaagcagttggaagagaaaatggtacagcagttacaagaggatgtggacatggaagatgctccttaaaaatctctgtaaccatttcttttgtgtacatttgaaaagaccctttggatacttggaactgctaaattatcttattttttacataaggtcacttaaatgaaaagtgattaaaatacatctttcctacattgccttctacataacatcaggtaattacggatgttagattgcatctcagtgttaaatcttcactgatagaaagtacttaagtaaatcatgaaaattctgcttagtaactatagaaattgaattgggggatgtaaaatgggttatgctatttggggaaatggcactatagcagcactttgtttagtaactaatggcaaaaattcatggctagtgatgtataaaataaaatattctttgcggtaaaatattctctttgttaatgttatagaagagggggatacgaaaaggaactagcagtttgtatggcagtatcagatattatttttggggtaggaatttccgggtgtggggtgatttggatcgtggaaagagggataatggacattggtttggaggaaaacctaccggaatggctgggagctggtttggaccggggggtaaacggcgtccggaaggagggaaggccgggggataggtgggggagaaggaaaaaacgggaaactaagacgagtgagcgcgggaaacagacct

SEQ ID NO: 24248 - DNA, 1818 bp, Macaca Mulatta
  misc_feature (1)...(1818): n = A,T,C or G
ggccaatacagagaagcctaccttgaataagacagagcaggctgggagaaatgctctcctttctgatatcagcaaagggaagaaactaaagaagacagtcaccaatgacagaagtgcaccaatattggacnnnnnnnnnnnnnnnnnnnnnnnnnnnnnnnnnnnnnnnnnnnnnnnnnnnnnnnnnnnnnnnnnnnnnnnnnnnnnnnnnnnnnnnnnnnnnnnnnnnnnnnnnnnnnnnnnnnnnnnnnnnnnnnnnnnnnnnnnnnnnnnnnnnnnnnnnnnnnnnnnnnnnnnnnnnnnnnnnnnnnnnnnnnnnnnnnnnnnnnnnnnnnnnnnnnnnnnnnnnnnnnnnnnnnnnnnnnnnnnnnnnnnnnnnnnnnnnnnnnnnnnnnnnnnnnnnnnnnnnnnnnnnnnnnnnnnnnnnnnnnnnnnnnnnnnnnnnnnnnnnnnnnnnnnnnnnnnnnnnnnnnnnnnnnnnnnnnnnnnnnnnnnnnnnnnnnnnnnnnnnnnnnnnnnnnnnnnnnnnnnnnnnnnnnnnnnnnnnnnnnnnnnnnnnnnnnnnnnnnnnnnnnnnnnnnnnnnnnnnnnnnnnnnnnnnnnnnnnnnnnnnnnnnnnnnnnnnnnnnnnnnnnnnnnnnnnnnnnnnnnnnnnnnnnnnnnnnnnnnnnnnnnnnnnnnnnnnnnnnnnnnnnnnnnnnnnnnnnnnnnnnnnnnnnnnnnnnnnnnnnnnnnnnnnnnnnnnnnnnnnnnnnnnnnnnnnnnnnnnnnnnnnnnnnnnnnnnnnnnnnnnnnnnnnnnnnnnnnnnnnnnnnnnnnnnnnnnnnnnnnnnnnnnnnnnnnnnnnnnnnnnnnnnnnnnnnnnnnnnnnnnnnnnnnnnnnnnnnnnnnnnnnnnnnnnnnnnnnnnnnnnnnnnnnnnnnnnnnnnnnnnnnnnnnnnnnnnnnnnnnnnnnnnnnnnnnnnnnnnnnnnnnnnnnnnnnnnnnnnnnnnnnnnnnnnnnnnnnnnnnnnnnnnnnnnnnnnnnnnnnnnnnnnnnnnnnnnnnnnnnnnnnnnnnnnnnnnnnnnnnnnnncaggccccctcccaccacctcctccaataagcagaaacggcagcacgtctcgggccctgcctgccacccctcagttgccgtccaggagtggagtagacagtccaaggagtggacccaggcctccccttcctcctgacaggcccagtgctggggcacctcccccacctccaccatcaacatctattagaaatggcttccaagactctccatgtgaaggtgannnnnnnnnnnnnnnnnnnnnnnnnnnnnnnnnnnnnnnnnnnnnnnnnnnnnnnnnnnnnnnnnnnnnnnnnnnnnnnnnnnnnnnnnnnnnnnnnnnnnnnnnnnnntggatccaaccgaagagaaaggggtgccccaccactccctcccatcccgaggtgatctttgcctgctcttctctacccaagctcaagagctgcttctgttgctaagaactgcacaccctcctccccgcttcttcccttgtgccccatgtatgggcaggaggaaagatgggagggtgagtgggaatatgcgtgtgtgcgtgggaatcggtaagaaatgcacctagcttttcatattgtttattctccaggctattgcttgcttcagctgcannnnnnnnnnnnnnnnnnnngggtcgataggcttttgtggtaataggcagagatgaattgcatcccagctttccaccaaccaaatccaaacattcactgcttatttgccacagactgtaattattaaagtccctgagagctgtt

SEQ ID NO: 24249 - DNA, 221 bp, Macaca Mulatta
ttttattcttattggaatgctaacaaccagccagggcccgtgctgccggagcacgcagttgtgtacagggagacagctggttatggccggctcctggccttgacagagcttctcagcctcttggagcctctgtcccctcagctgctgaaagaacacatctcctgcacttctcaagttgctgctggaactgaggtgactccaggttctgcagtttgggctcc

SEQ ID NO: 24250 - DNA, 739 bp, Macaca Mulatta
  misc_feature (1)...(739): n = A,T,C or G
gcacaaccacatgtggacatgggtatcagatgcgagatgttaaatgtgtcaatgagctagttagtgcagtgttagaagacacagaatgccatgaagctagtcgccccagcaacagacannnnnnnnnnnnnnnnnnnnnnnnnnnnnnnnnnnnnnnnnnnnnnnnnnnnnnnnnnnnnnnnnnnnnnnnnnnnnnnnnnnnnnnnnnnnnnnnnnnnnnnnnnnnnnnnnnnnnnnnnnnnnnnnnnnnnnnnnnnnnnnnnnnnnnnnnnnnnnnnnnnnngttcagcttcctgtggctatggaanaacaactcgacaagttttatgcatgaactaccatcagnccattgatgagaattactgtgatcctgaaannnnnnnnnnnnnnnnnnnnnnntgtagcctagcagcctgcccgcctgcacacaggcacttttctagttctgctgtgcanccaagctattatcttagccacgaatttgccattaacctcccaaacttggagatgatgaaaatccaggtggtcctnnnnnnnnnnnnnnnnnnnnnnnnnnnnnnnnnnnnnnnnnnnnnnntgctctagcagttgttctggaggacttcagcgtagggctgtggtctgccaggatgaaaatggacaaagtgctagttactgcgatgcaacctccaagccctccagagttacagcactgtggtccagggccttgtccacagtggaactacggaaattggggaga

SEQ ID NO: 24251 - DNA, 145 bp, Macaca Mulatta
atgaacagtgtgggggaggcatgcacggacatgaagcgcgaatacgaccagtgcttcaatcgctggttcgccgagaagtttctcaagggggacagctccggggaacggtgcaccgacctcttcaagcgctaccagcaggtgttca

SEQ ID NO: 24252 - DNA, 567 bp, Macaca Mulatta
ttcaagtccatgtcgacttccactgaaatagttgatggcaaaaaaatcaccaccaagagaatcattgagaatggccaagaaagggtggaagtggaggaagatggagagttgagttaaagtccttcataataaatagcaaagagcagttgctccgcattgacaccaagtaatcccagtccacatttgacttaaagcatatctggaggaatagcggactttttttagaattgaaagtgaactttactttcagaaaaactgtacccaagaatttataaacgctttatgccaacgcctattattgttgggactacacgaatagtacctctgtctttcaatcgttgtaaatatctgtatgcactttgctgtttattaaacttaagcctgaggctgacaatgtttatttcctagtgctaggacagaatgttcagctcagcactttgagccttacctttttccgttgggaaagtatgaaccaggtggtttgctctaaaccatttgacttcaattttttagtgtgtagtggtgaaatctatgaatatattaatactgctgaattaatttaatgat

SEQ ID NO: 24253 - DNA, 1267 bp, Macaca Mulatta
  misc_feature (1)...(1267): n = A,T,C or G
tagccaaaaggggcgggcgaggacggcccgcgggcggcggtcactggaaaggctgtactgggcggctgaccgaggggctgacgcgcggaggggtagacagctggggactgcgggcggcgctgtgtccatcgccatgacanagatcagacgtattgtgaccgcctggtgcaggacacgcctttcctgacaggccacgggcgcttgagtgagcagcaggtggacaggatcatcctccagctgaaccgctactacccacagatccttaccaacaaggaggcggaaaannnnnnnnnnnnnnnnnnnnnnnnnnnnnnnnnnnnnnnnnnnnnnnnnnnnnnnnnnnnnnnnnnnnnnnnnnnnnnnnnnnnnnnnnnnnnnnnnnnnnnnnnnnnnnnnnnnnnnnnnnnnnnnnnnnnnnnnnnnnnnnnnnnnnnnnnnnnnnnnnnnnnnnnnnnnnnnnnnnnnnnnnnnnnnnnnnnnnnnnnnnnnnnnnnnnnnnnnnnnnnnnnnnnnnnnnnnnnnnnnnnnnnnnnnnnnnnnnnnnnnnnnnnnnnnnnnnnnnnnnnnnnnnnnnnnnnnnnnnnnnnnnnnnnnnnnnnngccccgaggggagagtgtggcaggcacaggcagtgcggatgttggtctctgtctcccactttctccatctctctctgtcatggcagttttcacacagaagggggcatcttgtgcgtcctctcttgcccttccttttctagcctcgttccagggggatcctttcctgtctgtgtggacagcagccttgttcccacagctgcatagcgctcctaggcggtccccgctggaattacccaaccccatgatgaaccctttcattgccgtgatctgcacacgtgtgggggtttccatagggcgtggtcaggcccggatggctggtccgaagcacatgcatttcagctctgaggctcctgtcctcaggcagtgtgcgctcaggccccgggagtcatgtggatgccagtagcctgggcccacagagctgccgggacgttcagggcgcctcgaggtgaagacggcaactctgatctgtcgcctctgtggtcagggccctaggaggaggggctactgccccgtggccctcaagcaacaggacagagaccagagggactgggtggctcaccccaggctactgggctgggggtctctgagcccccggaggcctccacaggcctcacaggacacagtgcagatggtgggcagggagagatcgaggggaggcccagccctg

SEQ ID NO: 24254 - DNA, 659 bp, Macaca Mulatta
atttgtgagagaattcattcttctgggactctctggttaccccaaacttgagatcattttctttgctctgattctagttatgtatgtagtgattctaattggcaatggtgttctgatcatagcaagcatcttggattctcgtcttcacatgcccatgtacttctttctgggcaacctctctttcctggatatctgctatacaacctcctccattccctcaacattggtgagcttaatctcaaagaaaagaaacatttctttctctggatgtgcagtgcagatgttctttgggtttgcgatggggtcaacagaatgtttacttcttggcatgatggcatttgatcattacgtggccatctgtaaccctctgagataccccatcatcatgagcaagatggtgtatgtactgatggcttctgtatcatggctttccggtggaatcaattcaattgtgcaaacatcacttgccatgcgattgcctttttgtgggaacaatattattaatcatttcttatgtgagatcttagctgtcctaaaattagcttgtgctgatatatctctcaatattgttaccctagcagtgtcaaatactgctttcctagttcttcctttgctcgtggtttttttctcctatatgttcatcctctacaccatcttgc

SEQ ID NO: 24255 - DNA, 3228 bp, Macaca Mulatta
  misc_feature (1)...(3228): n = A,T,C or G
gcactgcaaaatacaacataatcacattccttccaagatttctctactctcagttcagaagagctgctaattcattttttctctttattgcactgctnnnnnnnnnnnnnnnnnnnnnnnnnnnnnnnnnnnnnnnnnnnnnnnnnnnnnnnnnnnnnnnnnnnnnnnnnnnnnnnnnnnnnnnnnnnnnnnnnnnnnnnnnnnnnnnnnnnnnnnnnnnnnnnnnnnnnnnnnnnnnnnnnnnnnnnnnnnnnnnnnnnnnnnnnnnnnnnnnnnnnnnnnnnnnnnnnnnnnnnnnnnnnnnnnnnnnnnnnnnnnnnnnnnnnnnnnnnnnnnnnnnnnnnnnnnnnnnnnnnnnnnnnnnnnnnnnnnnnnnnnnnnnnnnnnnnnnnnnnnnnnnnnnnnnnnnnnnnnnnnnnnnnnnnnnnnnnnnnnnnnnnnnnnnnnnnnnnnnnnnnnnnnnnnnnnnnnnnnnnnnnnnnnnnnnnnnnnnnnnnnnnnnnnnnnnnnnnnnnnnnnnnnnnnnnnnnnnnnnnnnnnnnnnnnnnnnnnnnnnnnnnnnnnnnnnnnnnnnnnnnnnnnnnnnnnnnnnnnnnnnnnnnnnnnnnnnnnnnnnnnnnnnnnnnnnnnnnnnnnnnnnnnnnnnnnnnnnnnnnnnnnnnnnnnnnnnnnnnnnnnnnnnnnnnnnnnnnnnnnnnnnnnnnnnnnnnnnnnnnnnnnnnnnnnnnnnnnnnnnnnnnnnnnnnnnnnnnnnnnnnnnnnnnnnnnnnnnnnnnnnnnnnnnnnnnnnnnnnnnnnnnnnnnnnnnnnnnnnnnnnnnnnnnnnnnnnnnnnnnnnnnnnnnnnnnnnnnnnnnnnnnnnnnnnnnnnnnnnnnnnnnnnnnnnnnnnnnnnnnnnnnnnnnnnnnnnnnnnnnnnnnnnnnnnnnnnnnnnnnnnnnnnnnnnnnnnnnnnnnnnnnnnnnnnnnnnnnnnnnnnnnnnnnnnnnnnnnnnnnnnnnnnnnnnnnnnnnnnnnnnnnnnnnnnnnnnnnnnnnnnnnnnnnnnnnnnnnnnnnnnnnnnnnnnnnnnnnnnnnnnnnnnnnnnnnnnnnnnnnnnnnnnnnnnnnnnnnnnnnnnnnnnnnnnnnnnnnnnnnnnnnnnnnnnnnnnnnnnnnnnnnnnnnnnnnnnnnnnnnnnnnnnnnnnnnnnnnnnnnnnnnnnnnnnnnnnnnnnnnnnnnnnnnnnnnnnnnnnnnnnnnnnnnnnnnnnnnnctgcacctataatatgtgaatttcttacaatgatggcagtctgtcacacagcagtgccagagcgagaaggtgataagattatttatcaagcagcatctccagnnnnnnnnnnnnnnnnnnnnnnnnnnnnnnnnnnnnnnnnnnnnnnnnnnnnnnnnnnnnnnnnnnnnnnnnnnnnnnnnnnnnnnnnnnnnnnnnnnnnnnnnnnnnnnnnnnnnnnnnnnnnnnnnnnnnnnnnnnnnnnnnnnnnnnnnnnnnnnnnnnnnnnnnnnnnnnnnnnnnnnnnnnnnnnnnnnnnnnnnnnnnnnnnnnnnnnnnnnnnnnnnnnnnnnnnnnnnnnnnnnnnnnnnnnnnnnnnnnnnnnnnnnnnnnnnnnnnnnnnnnnnnnnnnnnnnnnnnnnnnnnnnnnnnnnnnnnnnnnnnnnnnnnnnnnnnnnnnnnnnnnnnnnnnnnnnnnnnnnnnnnnnnnnnnnnnnnnnnngcagaacaggctgctcaaactcgaagagagctatgagttgattgaaaannnnnnnnnnnnnnnnnnnnnnnnnnnnnnnnnnnnnnnnnnnnnnnnnnnnnnnnnnnnnnnnnnnnnnnnnnnnnnnnnnnnnnnnnnnnnnnnnnnnnnnnnnnnnnnnnnnnnnnnnnnnnnnnnnnnnnnnnnnnnnnnnnnnnnnnnnnnnnnnnnnnnnnnnnnnnnnnnnnnnnnnnnnnnnnnnnnnnnnnnnnnnnnnnnnnnnnnnnnnnnnnnnnnnnnnnnnnnnnnnnnnnnnnnnnnnnnnnnnnnnnnnnnnnnnnnnnnnnnnnnnnnnnnnnnnnnnnnnnnnnnnnnnnnnnnnnnnnnnnnnnnnnnnnnnnnnnnnnnnnnnnnnnnnnnnnnnnnnnnnnnnnnnnnnnnnnnnnnnnnnnnnnnnnnnnnnnnnnnnnnnnnnnnnnnnnnnnnnnnnnnnnnnnnnnnnnnnnnnnnnnnnnnnnnnnnnnnnnnnnnnnnnnnnnnnnnnnnnnnnnnnnnnnnnnnnnnnnnnnnnnnnnnnnnnnnnnnnnnnnnnnnnnnnnnnnnnnnnnnnnnnnnnnnnnnnnnnnnnnnnnnnnnnnnnnnnnnnnnnnnnnnnnnnnnnnnnnnnnnnnnnnnnnnnnnnnnnnnnnnnnnnnnnnnnnnnnnnnnnnnnnnnnnnnnnnnnnnnnnnnnnnnnnnnnnnnnnnnnnnnnnnnnnnnnnnnnnnnnnnnnnnnnnnnnnnnnnnnnnnnnnnnnnnnnnnnnnnnnnnnnnnnnnnnnnnacagcaatgcctcctttaactcttggaatatttgagagatcgtgcagaaaagagaatatgttgaagtaccctgaattatacaaaacatctcaggaatgccctggacttcaacaccannnnnnnnnnnnnnnnnnnnnnnnnnnnnnnnnnnnnnnnnnnnnnnnnnnnnnnnnnnnnnnnnnnnnnnnnnnnnnnnnnnnnnnnnnnnnnnnnnnnnnnnnnnnnnnnnnnnnnnnnnnnnnnnnnnnnnnnnnnnnnttgtggtgataactgtgtgtttgaaagctggattggagacatcatattggacatggnnnnnnnncatagcgatatggggaagcatcgcactctgggtggtgtttttggaatctactcatctctgtggcctgccattccaatggcccctgatatgtcaggagagnnnnnnnnnnnnnnnnnnnnnnnnnnnnnnnnnnnnnnnnnnnnnnnnnnnnnnnnnnnnnnnnnnnnnnnnnnnnnnnnnnnnnnnnnnnnnnnnnnnnnnnnnnnnnnnnnnnnnnnnnnnnnnnnnnnnnnnnnnnnnnnnnnnnnnnnnnnnnnnnnnnnnnnnnnnnnnnnnnnagcctgaccgagagggcgcaactgctcaagaacgtctttaagaagaaccacgtgaacttgtaccgctctgaatccttgcaacaaaacctgctc

SEQ ID NO: 24256 - DNA, 781 bp, Macaca Mulatta
  misc_feature (1)...(781): n = A,T,C or G
ggggtttcagccatgtcccttttccccgagaagctgtgggagacagatgacaatgatgcttgcactatcaggaatttaccatctcgttgaggaaacctttgcataggacttcctaggagctcagttgattgtgacatttgcccagaagaggctttggggaactccttcacccctcttgctgctttgggggaatatcctcccctaccaccattccccctcccctgccctgctccagctcacacgtggatggtactttggggaacagtgactttcagggtgatggcttgctggcctgatccccaactttccaatcctatagtcactccaaagaagaaaatccacatggtatgtatatgtgtgagggttgggtctattgagaggtgggactttaattattgttattattattggtgcttatttttcctgctgtatannnnnnnnnnnnnnnnnnnnaataaagcaggaatgtatatttaggtcatgttaaataaaatggctggaggaaggagggaagaaattaggaactgcagtacatcatcaccccaggtgtaagagttatttctctcccagtgcaaaaaggggagtgtggcccctggctgtaccttgagcttcctcttctccatccctgaaacatcacaaaatcacctgggtttctgaacctctccacttccagctctcactgacatctgggatatctgggatgcactgcctgttttgtaacaacctcttttgcggaatgctaataaaccttccggggttccaaaaggggaaccccctcaat

SEQ ID NO: 24257 - DNA, 318 bp, Macaca Mulatta
aggatgaactgccatgtgacttggaaaggtaagatgctagccagcatggagaagaagctgctgagcatggctttctgtagtctttcacaagacacaagtggattttgactttgtatcatgtcatgatttctaataataaatgatgtttttatgtgcctcccctaagaatatttagcactggagtggaattcagtagtttctgaggattcataccccagactgccacatctaggacaaaggctctttcagttgatgttttaatttataaacattgagtttttatttcctgcccccaaaaaggtatccattaagccccca

SEQ ID NO: 24258 - DNA, 647 bp, Macaca Mulatta
gccagacgagaaacgtgaaattttttttcctgaattggacatgtgtttgcaaacactgtcttgaagattatgctgtttatgcaataatttgtgaacatgtacagagttttatataaatttaaaccaatttttaaaacaaaactgcggacacaaccaccataaaaatggaatcaaaagaaagttaatttatgaaattaagaggtcagcagaatatactcagtgatggaagacacttgggaaagtctttttaattgaacaagaacgatcttaatttaagaatattatcttggttttacagcagtgccctgtttacaacagattgtgccctatctcatctgcagccgaggaataaaggattctgattagaaagagggttgcctacaaattagtaagcaattccttggatcttatgcacagaacttgtaccatttgaatctgttttatgcttaaatcaaagtgctttgatcaaatacataacctgccatatctttacatatttgttggtagcaatttgtattaaagaaatcacaagtgcaaataaaaagtcatttatcatttgtttaactaaactgtcatggtttagtttacaatttttaaaagttcttaaaataccgaaaatgcaatggacacttgtatggcttatgaag

SEQ ID NO: 24259 - DNA, 616 bp, Macaca Mulatta
gggtgcagaagtccaggttcaggcccctcctgttgttcctgcaactccctcacccgcagcggtacctgaggtggcttctggagagactgcagatgtagtccaagctgctgcagagcagagcttcgctgaactggggctggggtcacacaccccagtgggactgatccagaatttactggaatttatgcatgttgacctgggcctaccttggtggggggccattgctgcatgtacagtctttgcccgctgcctcatttttcctctcatcgtggtgggccagcgagaggcagccaagatccacaatcacttgccagagatccagaagttttccagtcgagtcagagaggccaagttggcgggagatgatactgagttttacaaggcttcctcggagatggcactttaccagaaaaaacatggtattaaactctttaaacctctcattcttcctctgactcaggccccaatcttcctctccttcttcattgctttgagagagatggccaaccttcctgtggccagcctgcagacaggtggcctctggtggttccaggatctcacggtatccgatcccacctacgtgttaccactggtagtcactgctacaattgtggct

SEQ ID NO: 24260 - DNA, 814 bp, Macaca Mulatta
  misc_feature (1)...(814): n = A,T,C or G
tcttcacctactcgcaccacagcatggccacactgccctacctggactcgggggccctgggtgggacgcaccgggtgaagctggtgcccggctatgccggcctgcagcgccttagcaaggaggggctctcgggcaagagctgcacctgtcgccgctgcatgggtgacactggcgcctccgactggtttgacagccactttgatggcaacatttcccccgtctggacccgagagaacatggatcttccaccggatgtccagaggtggtggatgnnnnnnnnnnnnnnnnnnnnnnnnnnnnnnnnnnnnnnnnnnnnnnnnnnnnnnnnnnnnnnnnnnnnnnnnnnnnnnnnnnnnnnnnnnnnnnnnnnnnnnnnnnnnnnnnnnnnnnnnnnnnnnnnnnnnnnnnnnnnnnnnnnnnnnnnnnnnnnnnnnnnnnnnnnnnnnnnnnnnnnnnnnnnnnnnnnnnnnnnnnnnnnnnnnnnnnnnnnnnnnnnnnnnnnnnnnnnnnnnnnnnnnnnnnnnnnnnnnnnnnnnnnnnnnnnnnnnnnnnnnnnnnnnnnnnnnnnnnnnnnnnnnnnnnnnnnnnnnnnnnnnnnnnnnnnnnnnnnnnnnnnnnnnnnnnnnnnnnnnnnnnnnnnnnnnnnnnnnnnnnnnnnnnnnnnnnnnnnnnnnnnnnnnnnnnnnnnnnaggtccagatctacaacccagccttcttcaagtatatccatgaccggtggacagagcatcatgggcggtacccttccacggggatgctggtgctcttctttgccctgcatgtgtgtgatgaggt

SEQ ID NO: 24261 - DNA, 1598 bp, Macaca Mulatta
  misc_feature (1)...(1598): n = A,T,C or G
agatgtatgtgaaatgccaaatgaaactggcccctgcctggctttttttattcggtggtggtatgacaagaaaaataatacttgctccacatttgtctatggtggctgccagggaaacaataacaacttccaatccgaagccaactgcctgaacacctgcaagaataaacnnnnnnnnnnnnnnnnnnnnnnnnnnnnnnnnnnnnnnnnnnnnnnnnnnnnnnnnnnnnnnnnnnnnnnnnnnnnnnnnnnnnnnnnnnnnnnnnnnnnnnnnnnnnnnnnnnnnnnnnnnnnnnnnnnnnnnnnnnnnnnnnnnnnnnnnnnnnnnnnnnnnnnnnnnnnnnnnnnnnnnnnnnnnnnnnnnnnnnnnnnnnnnnnnnnnnnnnnnnnnnnnnnnnnnnnnnnnnnnnnnnnnnnnnnnnnnnnnnnnnnnnnnnnnnnnnnnnnnnnnnnnnnnnnnnnnnnnnnnnnnnnnnnnnnnnnnnnnnnnnnnnnnnnnnnnnnnnnnnnnnnnnnnnnnnnnnnnnnnnnnnnnnnnnnnnnnnnnnnnnnnnnnnnnnnnnnnnnnnnnnnnnnnnnnnnnnnnnnnnnnnnnnnnnnnnnnnnnnnnnnnnnnnnnnnnnnnnnnnnnnnnnnnnnnnnnnnnnnnnnnnnnnnnnnnnnnnnnnnnnnnnnnnnnnnnnnnnnnnnnnnnnnnnnnnnnnnnnnnnnnnnnnnnnnnnnnnnnnnnnnnnnnnnnnnnnnnnnnnnnnnnnnnnnnnnnnnnnnnnnnnnnnnnnnnnnnnnnnnnnnnnnnnnnnnnnnnnnnnnnnnnnnnnnnnnnnnnnnnnnnnnnnnnnnnnnnnnnnnnnnnnnnnnnnnnnnnnnnnnnnnnnnnnnnnnnnnnnnnnnnnnnnnnnnnnnnnnnnnnnnnnnnnnnnnnnnnnnnnnnnnnnnnnnnnnnnnnnnnnnnnnnnnnnnctgcaggtttgttacttaagtaagcctgtgccatggtgatttgctgcacctataaacccattacctgggtattaagccccacatgcattagctatttatcctgatgctttccctccccctgccccnnnnnnnnnnnnntgttctcattgttcagctcccacttacaagtgagaacatgtggtatttagttttgttcctgcgttactttgctgaggataatggcttccggcctcatccatgtccctgcaaaggacgtgatctcatttctttttatggctgcatagtattccatggtatatatgtaccagattttctttatgcagcctatcattgatggacatttgggttgattccatgttttcggtattgtaaatagtgctgcagtgaatgtatcaggcatgtatctttataaaagaatgatttatattcctttgaatgtatacccagtaatgggattgctgggtcaaatggtatttctggttctagatctttcaggaatttgcacactctctttcacaatggttgaactaatttccattccattccactgacagtgtaaaagcattcatgtttctccacagctttaccagcatctgttgtttcttgactttttaataatcaccattctgactggcatg

SEQ ID NO: 24262 - DNA, 706 bp, Macaca Mulatta
agagcacccaccaggattgaaatttttggagtaaccctggtccttccttggcccgggtccaagtacctgctcactaggccagtgagggagggacaggccatttgccattcctccaccaacctgacttgatcctctcttctgtcctcccaggtgttatgtctggctgtagctgttggtcacgtgaagatgacagacgatgagcttgtgtataacattcacctggctgtcaacttcttggtgtcattgctcaagaaaaactggcagaatgtccgggccttatatatcaagagcaccatgggcaagccccagcgcctatattaaggcacatttgaataaattctgttaccagtcccctctgtctgcctgtgattgagggtgaggggtggtttgtcagctgacaagtgagggccttggcactgccatggctcgttgtgtagtttgtcatcttgatgatggatagttgggtactacagggaagaggatgtttttctgccatcaaaattaggcagtcttgggtatgtgatagggtgctaacggcattaaagctttttgacaggattggtccatgtaaatttaaaataaggattttagtcagcatttctgtcttaacaaggccccacatggagtatcctatgctttaggtcagtaatgagtaaatgttaaggaaaacaaggcgcacagcaaaccagtacaaaagtgtaattaa

SEQ ID NO: 24263 - DNA, 638 bp, Macaca Mulatta
ggggattgagggaagcggcaaccgccgcgatggacttgttcctcagggttcggcgccacaaaaccgccatcttcactgatgccgaggagtccagcacggtgttcgagctgaagcgcctcgtggagggactcctcaagcggcctcccgacgagcagcggctatacaaggacgaccagctcttggatgatggcaagacacttggcgagtgtggcttcaccagccaaacagcacggccactggctccagcctcagtggggctggccttccgggcagacgacacctttgaggccctgtgcatcgagccgttctccagcccgcccgagctgctcgacgtgatgaagccccaggactcgggaaacagtgcccgtgaaccagctgtgcagtgaggacccccgagaggcccattccccccgatgaaaaaatttgggagtctgaaaaaaaaaaactggaaaagtttggtctttgactttaatttaacaaattacttttcaaaaggattcccctccttgaaacccacccaaaaacttgaaagaaatatcccccaagttccggttttccattggagggggatttcccccctatcccttaaaaattcccccttttcccttttttggactacaaatttttttgaaagggga

SEQ ID NO: 24264 - DNA, 835 bp, Macaca Mulatta
  misc_feature (1)...(835): n = A,T,C or G
gagagacagctggatctttccggggattcggtcaagaccatcgccaagctatgggacagtaagatgngtttgctgagattatgatgaagattgaggagtatatcagcaagcaagccaaagcttcagaagnagtgatgggaccggtggaggcagcgcctgaataccgcgtcatcgtggatgccaacaacctgaccgtggagatcgaaaacgagctganacatcatccataagttcatccgggataagtactcgaagagattccctgaactggagtccttggtccccaatgcactggattacatccgcacggtcaaggnaggagctgggcaacagcctggacaagtgcaagaacaatgagaacctgcagcagatcctcaccaacgccaccatcatggtcgtcagcgtcaccgcctccaccacccaggggnggcagcagctgtcggaggaggagctggagcggctggaggaggcctgtgacatggcgctggagctgaacgcctccaagcaccgcatctacgagtacgtggagtcccggatgtccttcatcgcgcccaacctctccatcattatcggggcgtccacggccgccaagatcatgggnnnnnnnnnnnnnnnnnnnnnnnnnnnnnnnnnnnnnnnnnnnnnnnnnnnnnnnnnnnnnnnnnnnnnnnnnnnnnnnnnnnnnnnnnnnnnnnnnnnnnnnnnnnnnnnnnnnnnnnnnnnnnnnnnnnnnnnnnnnnnnnnnnnnnnnnnnnnggatctccggcggaaagtgtcccggctggtggctgccaagtgcacgttgccagcccgtgtggaccgtttccaggagagc

SEQ ID NO: 24265 - DNA, 1695 bp, Macaca Mulatta
  misc_feature (1)...(1695): n = A,T,C or G
atgaaaattgggttaccctgaggactcttgcttaactgaaatcacaaatggagcagacggaaaaatcaaaagtgtatgctgagaacgnnnnnnnnnnnnnnnnnnnnnnnnnnnnnnnnnnnnnnnnnnnnnnnnnnnnnnnnnnnnnnnnnnnnnnnnnnnnnnnnnnnnnnnnnnnnnnnnnnnnnnnnnnnnnnnnnnnnnnnnnnnnnnnnnnnnnnnnnnnnnnnnnnnnnnnnnnnnnnnnnnnnnnnnnnnnnnnnnnnnnnnnnnnnnnnnnnnnnnnnnnnnnnnnnnnnnnnnnnnnnnnnnnnnnnnnnnnnnnnnnnnnnnnnnnnnnnnnnnnnnnnnnnnnnnnnnnnnnnnnnnnnnnnnnnnnnnnnnnnnnnnnggttccaaacagatgctgtagccaaatttggtgttatttttttcttatggcacattgtatccgaagtcctccatcttcgaaaaattactgccaattccactggctctacagaggctactgattttgttgcaagtcaccaaaacttcagcattgcagaatttatcaggaacaaaggtttttatcttgacaacagcactttgttggactgtgatttttttggaaagccatgtagcccaaaggnnnnnnnnnnnnnnnnnnnnnnnnnnnnnnnnnnnnnnnnnnnnnnnnnnnnnnnnnnnnnnnnnnnnnnnnnnnnnnnnnnnnnnnnnnnnnnnnnnnnnnnnnnnnnnnnnnnnnnnnnnnnnnnnnnnnnnnnnnnnnnnnnnnnnnnnnnnnnnnnnnnnnnnnnnnnnnnnnnnnnnnnnnnnnnnnnnnnnnnnnnnnnnnnnnnnnnnnnnnnnnnnnnnnnnnnnnnnnnnnnnnnnnnnnnnnnnnnnnnnnnnnnnnnnnnnnnnnnnnnnnnnnnnnnnnnnnnnnnnnnnnnnnnnnnnnnnnnnnnnnnnnnnnnnnnnnnnnnnnnnnnnnnnnnnnnnnnnnnnnnnnnnnnnnnnnnnnnnnnnnnnnnnnnnnnnnnnnnnnnnnnnnnnnnnnnnnnnnnnnnnnnnnnnnnnnnnnnnnnnnnnnnnnnnnnnnnnnnnnnnnnnnnnnnnnnnnnnnnnnnnnnnnnnnnnnnnnnnnnnnnnnnnnnnnnnnnnnnnnnnnnnnnnnnnnnnnnnnnnnnnnnnnnnnnnnnnnnnnnnnnnnnnnnnnnnnnnnnnnnnnnnnnnnnnnnnnnnnnnnnnnnnnnnnnnnnnnnnnnnnnnnnnnnnnnnnnnnnnnnnnnnnnnnnnnnnnnnnnnnnnnnnnnnnnnnnnnnnnnnnnnnnnnnnnnnnnnnnnnnnnnnnnnnnnnnnnnnnnnnnnnnnnnnnnnnnnnnnnnnnnnnnnnnnnnnnnnnnnnnnnnnnnnnnnnnnnnnnnagtctgatcacgatcatagagattattgagtatctattcaccaatttctactggatatgcattttctttttgctgaagatacctgaaatgacccagtggactcctccacctcagaatcatctgggaaataaaaataggatagaggagtgttaatggtcatttagaataaaataatttgcttttctcttcatgataccttcagatttatcatgactaattcattgttattcaaactttgccatagtttcgagagttcaataaaagccattaaagatatatatctctt

SEQ ID NO: 24266 - DNA, 2084 bp, Macaca Mulatta
  misc_feature (1)...(2084): n = A,T,C or G
cagacttgaagattgtgcggaagatcaaggagttacctctcaagaaggacttctgtgaaggaaagctatcccaggcagtgataacagagagacnnnnnnnnnnnnnnnnnnnnnnnnnnnnnnnnnnnnnnnnnnnnnnnnnnnnnnnnnnnnnnnnnnnnnnnnnnnnnnnnnnnnnnnnnnnnnnnnnnnnnnnnnnnnnnnnnnnnnnnnnnnnnnnnnnnnnnnnnnnnnnnnnnnnnnnnnnnnnnnnnnnnnnnnnnnnnnnnnnnnnnnnnnnnnnnnnnnnnnnnnnnnnnnnnnnnnnnnnnnnnnnnnnnnnnnnnnnnnnnnnnnnnnnnnnnnnnnnnnnnnnnnnnnnnnnnnnnnnnnncaggccagcgatctgtacgtgagacccaggaattatttccaaagcaagattcatatgctgaaggagaaacagacagaacctcaaacactaaacttgagtgttccagtttcagagaaaattgggattctgactgtgtgtttggaaggaagcttgcagtangtcaagagacacaattcagggaagagccaattaatcataataaaaccctctctaaggaaagagaacgtacgtataacaaatctnnnnnnnnnnnnnnnnnnnnnnnnnnnnnnnnnnnnnnnnnnnnnnnnnnnnnnnnnnnnnnnnnnnnnnnnnnnnnnnnnnnnnnnnnnnnnnnnnnnnnnnnnnnnnnnnnnnnnnnnnnnnnnnnnnnnnnnnnnnnnnnnnnnnnnnnnnnnnnnnnnnnnnnnnnnnnnnnnnnnnnnnnnnnnnnnnnnnnnnnnnnnnnnnnnnnnnnnnnnnnnnnnnnnnnnnnnnnnnnnnnnnnnnnnnnnnnnnnnnnnnnnnnnnnnnnnnnnnnnnnnnnnnnnnnnnnnnnnnnnnnnnnnnnnnnnnnnnnnnnnnnnnnnnnnnnnnnnnnnnnnnnnnnnnnnnnnnnnnnnnnnnnnnnnnnnnnnnnnnnnnnnnnnnnnnnnnnnnnnnnnnnnnnnnnnnnnnnnnnnnnnnnnnnnnnnnnnnnnnnnnnnnnnnnnnnnnnnnnnnnnnnnnnnnnnnnnnnnnnnnnnnnnnnnnnnnnnnnnnnnnnnnnnnnnnnnnnnnnnnnnnnnnnnnnnnnnnnnnnnnnnnnnnnnnnnnnnnnnnnnnnnnnnnnnnnnnnnnnnnnnnnnnnnnnnnnnnnnnnnnnnnnnnnnnnnnnnnnnnnnnnnnnnnnnnnnnnnnnnnnnnnnnnnnnnnnnnnnnnnnnnnnnnnnnnnnnnnnnnnnnnnnnnaggattcatactggggagaagccttttgaatgtggggagtgtggaaaatctttcagcatcagttctcagcttgccactcatcagagaatccatactggagagaagccctatgaatgtaaggtttgtagtaaagcgttcacccagaaggctcaccttgcacagcatcagaaaacccatacaggagagaaaccatatgagtgcaaggaatgcggtaaagccttcagccagaccacacacctcattcaacatcagagagttcacactggtgagaaaccctataaatgtatagaatgtgggaaggcctttggtgataactcatcctgtactcaacatcaaagactgcacactggccaaagaccttatgaatgtattgagtgtggaaaggcattcaagacaaaatcctcccttatttgtcatcgcagaagtcatactggagaaaaaccttatgaatgtagtgcgtgtggcaaagcctttagtcatcgtcaatcccttagtgtacatcagagaattcattctggaaagaaaccatatgaatgtaaggaatgtaggaaaaccttcatccaaattggacaccttaatcaacataagagggttcatactggagagagatcttataactataagaaaagcagaaaagtcttcaggcaaactgcacacttagctcatcatcagcgaattcatactggagagtcgtcaacatgcccctctttaccttccacgtcaaatcctgtggatctgtttcccaaatttctctggaatacatcctccctcccatcaccata

SEQ ID NO: 24267 - DNA, 649 bp, Macaca Mulatta
  misc_feature (1)...(649): n = A,T,C or G
aaatgtttaatatcaatataaaatgagatcagagtttacaagcagatttcagaacaccaacattgatttccaaaatggtttctctcctttcagaagcctaaagatgaacatatacaaaacttaggcgtttttataaaaagcannnnnnnnnnnnnnnnnnnnnnnatacatctacagttgacaaacatgcaaaataactaatttccaaatcaaaggtctctagcagaaacatccaaattaaaaatgaagcatttaaatttacttactggccatgaaatccagcaagaaaccaccctttctcccacacttcagaaaaaccaccaattccttcctagaggattgatggcattaacagtacttggctctcccttgtcagcttccagacatccccgattcaatcttgtaaattaatattacagttccaattactgaaaatgccccaccatcttcttcactgcattacagcttagcaaggcacctaccaacaatgcagtttgggaaatgagccatgaagaacataatggcctgagagttaaccatacatcctaggtctgccaattgaatgaggacattactgggactgtaaaattccaggagacattcttttattctcctctccaagttactagcattgtcagtattcgaaaga

SEQ ID NO: 24268 - DNA, 1748 bp, Macaca Mulatta
  misc_feature (1)...(1748): n = A,T,C or G
agactaagaaagcactgtgcgtcaccatgaccctgggggccgtcctcgtgggagctgcgctggccgctggcctgctctggaagttcnnnnnnnnnnnnnnnnnnnnnnnnnnnnnnnnnnnnnnnnnnnnnnnnnnnnnnnnnnnnnnnnnnnnnnnnnnnnnnnnnnnnnnnnnnnnnnnnnnnnnnnnnnnnnnnnnnnnnnnnnnnnnnnnnnnnnnnnnnnnnnnnnnnnnnnnnnnnnnnnnnnnnnnnnnnnnnnnnnnnnnnnnnnnnnnnnnnnnnnnnnnnnnnnnnnnnnnnnnnnnnnnnnnnnnnnnnnnnnnnnnnnnnnnnnnnnnnnnnnnnnnnnnnnnnnnnnnnnnnnnnnnnnnnnnnnnnnnnnnnnnnnnnnnnnnnnnnnnnnnnnnnnnnnnnnnnnnnnnnnnnnnnnnnnnnnnnnnnnnnnnnnnnnnnnnnnnnnnnnnnnnnnnnnnnnnnnnnnnnnnnnnnnnnnnnnnnnnnnnnnnnnnnnnnnnnnnnnnnnnnnnnnnnnnnnnnnnnnnnnnnnnnnnnnnnnnnnnnnnnnnnnnnnnnnnnnnnnnnnnnnnnnnnnnnnnnnnnnnnnnnnnnnnnnnnnnnnnnnnnnnnnnnnnnnnnnnnnnnnnnnnnnnnnnnnnnnnnnnnnnnnnnnnnnnnnnnnnnnnnnnnnnnnnnnnnnnnnnnnnnnnnnnnnnnnnnnnnnnnnnnnnnnnnnnnnnnnnnnnnnnnnnnnnnnnnnnnnnnnnnnnnnnnnnnnnnnnnnnnnnnnnnnnnnnnnnnnnnnnnnnnnnnnnnnnnnnnnnnnnnnnnnnnnnnnnnnngtgaaaccagtatgtctgcccaacccaggcatgatgctggagccggaacagcactgctggatttctgggtggggggccacccaggagaaagnnnnnnnnnnnnnnnnnnnnnnnnnnnnnnnnnnnnnnnnnnnnnnnnnnnnnnnnnnnnnnnnnnnnnnnnnnnnnnnnnnnnnnnnnnnnnnnnnnnnnnnnnnnnnnnnnnnnnnnnnnnnnnnnnnnnnnnnnnnnnnnnnnnnnnnnnnnnnnnnnnnnnnnnnnnnnnnnnnnnnnnnnnnnnnnnnnnnnnnnnnnnnnnnnnnnnnnnnnnnnnnnnnnnnnnnnnnnnnnnnnnnnnnnnnnnnnnnnnnnnnnnnnnnnnnnnnnnnnnnnnnnnnnnnnnnnnggcagatgactaatcctcatggtctttgtccttgacgtcgttctacgagaaaacaaagcggctggttttgcttccccgtgcgtgatttactcttacagatgattcagaggtcacttcatttttattaaacagtgaacttgcctggctttggcactctctgccattctgtgtagtctgcagtggctccactgcccagcctgttctccttaaccccttgtccacaaggggtgatggccggctggttgtggacactggtggtcaagtgtgaaggagaggggtggaggctgccccattgagatcttcctattgagtcctttccaggggccactttcggatgagcacggagctgctgcctctccgctgctggacgacttcagatggaaaaggagagacgtggaaagggagacagccaggtggcacctgcagcggctgccctctggggccacttgggtagtgtccccagcctagttctccacagggggttttggatgattggttcttagtgccttagcagccccggat

SEQ ID NO: 24269 - DNA, 741 bp, Macaca Mulatta
  misc_feature (1)...(741): n = A,T,C or G
atttacaaaaggaaaatttcgtatccacaaagggtatataaagaccccttaggaaaggggaaagaatttacagggaagatatttattggttcccgggaaattcggaaaaagnnnnnnnnnnnnnnnnnnaaaccgttcgaccaacaggcttaaggccctaaattttttaacagagcagtaaagtacatttttcattcaaaagggttatgggacgtttcattacttaccaccggccggacaaacaggaaagatttgttgcaaaaataaagtctgaaaaaaaagagtgctcccctgggtaggagagcaaaactagtatgaagcatatgtaaggatgtccagtaaaatttgcatagactctcaaaagtaaaaagaaggattttttaaagatgcatttctcttcaccataaaaacattaagaaggccaggcgtggtggctcacgcttgtaatcccagcactgtgacaggccgaagcgggtggatcacctgagttcaggagttcaagaccagtctggtnnnnnnnnnnnnnnnnnnnnnnnnncnnnnnnnnnnnnnnnnnnnnnnnnntttagtggtgcatnnnnnnnnnnnnnnnncnnnnnnnnnnnnnnnnnnnnnnnnnacctgaaccccannnnnnnnnnnnnnnnnnnnnnnnnnnnacnnnnnnnnnnnnnnnnnnnnnnnnnnnnatnnnnnnnnnnnnnnnnnnnnnnnnnnnnnnnnnnnnnnnnnnttcatccc

SEQ ID NO: 24270 - DNA, 290 bp, Macaca Mulatta
cctgataataaagaaacgaaataagctacacaattgagattaagtctgaggcagttcattgaggcagctctgctataaaagattgcttgataaataattatttttgtaaacaagttggattaacttactggtctttttgcttggatatgaatttaaggtcttcatgtttaaaaagacatttactttgttatttagtgacacttttccatctttttttttggttattgttaaacagaaccttaagtttatgtttgaggtatgtactgtataggaacctattttattattaa

SEQ ID NO: 24271 - DNA, 300 bp, Macaca Mulatta
gacttaggagttttgattttgataagaaactgggataattttctgaacttttttccctctgtatcacatttatttactatttttaaaaactttatttgacctttaacacttgggataatatttattataaatgataagaaaaatcttagaggtttttctacccgcagtgtcatggaattttctctgaaaactaatgcttaaagtttcctagagaaattggtcagaatgatctgtcagaaccgtttgaaaacttcttcaagagcagtcgcatatatagtaggattttacattttcctgctg

SEQ ID NO: 24272 - DNA, 2638 bp, Macaca Mulatta
  misc_feature (1)...(2638): n = A,T,C or G
ttttcaggatatgtacgtgtaagcaggattcgaagcagttaagaatgtctctgccaagtcgacaaacagctattattgttaaccctcctccaccagagtatataaataccaagaaaaatgggcgattgacaaatcaacttcagtatctacaaaaagttgtcctaaaggatttatggaagcatagtttttcatggccttttcaacgtcctgtggatgctgtgaaactaaagttgcctgnnnnnnnnnnnnnnnnnnnnnnnnnnnnnnnnnnnnnnnnnnnnnnnnnnnnnnnnnnnnnnnnnnnnnnnnnnnnnnnnnnnnnnnnnnnnnnnnnnnnnnnnnnnnnnnnnnnnnnnnnnnnnnnnnnnnnnnnnnnnnnnnnnnnnnnnnnnnnnnnnnnnnnnnnnnnnnnnnnnnnnnnnnnnnnnnnnnnnnnnnnnnnnnnnnnnnnnnnnnnnnnnnnnnnnnnnnnnnnnnnnnnnnnnnnnnnnnnnnnnnnnnnnnnnnnnnnnnnnnnnnnnnnnnnnnnnnnnnnnnnnnnnnnnnnnnnnnnnnnnnnnnnnnnnnnnnnnnnnnnnnnnnnnnnnnnnnnnnnnnnnnnnnnnnnnnnnnnnnnnnnnnnnnnnnnnnnnnnnnnnnnnnnnnnnnnnnnnnnnnnnnnnnnnnnnnnnnnnnnnnnnnnnnnnnnnnnnnnnnnnnnnnnnnnnnnnnnnnnnnnnnnnnnnnnnnnnnnnnnnnnnnnnnnnnnnnnnnnnnnnnnnnnnnnnnnnnnnnnnnnnnnnnnnnnnnnnnnnnnnnnnnnnnnnnnnnnnnnnnnnnnnnnnnnnnnnnnnnnnnnnnnnnnnnnnnnnnnnnnnnnnnnnnnnnnnnnnnnnnnnnnnnnnnnnnnnnnnnnnnnnnnnnnnnnnnnnnnnnnnnnnnnnnnnnnnnnnnnnnnnnnnnnnnnnnnnnnnnnnnnnnnnnnnnnnnnnnnnnnnnnnnnnnnnnnnnnnnnnnnnnnnnnnnnnnnnnnnnnnnnnnnnnnnnnnnnnnnnnnnnnnnnnnnnnnnnnnnnnnnnnnnnnnnnnnnnnnnnnnnnnnnnnnnnnnnnnnnnnnnnnnnnnnnnnnnnnnnnnnnnnnnnnnnnnnnnnnnnnnnnnnggatgttttcgaaacgcatttttcaaagatcccagttgaacctgttgagagtatgcctttatgttacatcaaaacagatatcacagaaaccactggtagagagaacactaatgaagcctcctctgaaggaaactcttctggtgattctgaagatgaacgagttcagcgtcttgcaaagcttcaggagcagnnnnnnnnnnnnnnnnnnnnnnnnnnnnnnnnnnnnnnnnnnnnnnnnnnnnnnnnnnnnnnnnnnnnnnnnnnnnnnnnnnnnnnnnnnnnnnnnnnnnnnnnnnnnnnnnnnnnnnnnnnnnnnnnnnnnnnnnnnnnnnnnnnnnnnnnnnnnnnnnnnnnnnnnnnnnnnntcagccaaagaaaaggaaacaacagtacattggtcaaaaatctgaagatgaagataatgctaaacctatgaactatgatgagaaaaggcagttaagtttgaatataaacaaactccctggagataaactcgggcgagtagttcatataatacagtcaagagagccttctctgagcaattccaatcctgatgagatagagatagactttgaaacactgaaagcatcaacactaagagaattagaaaaatatgtttccgcgtgtctaagaaagagaccattaaaacctcctnnnnnnnnnnnnnnnnnnnnnnnnnnnnnnnnnnnnnnnnnnnnnnnnnnnnnnnnnnnnnnnnnnnnnnnnnnnnnnnnnnnnnnnnnnnnnnnnnnnnnnnnnnnnnnnnnnnnnnnnnnnnnnnnnnnnnnnnnnnnnnnnnnnnnnnnnnnnnnnnnnnnnnnnnnnnnnnnnnnnnnnnnnnnnnnnnnnnnnnnnnnnnnnnnnnnnnnnnnnnnnnnnnnnnnnnnnnnnnnnnnnnnnnnnnnnnnnnnnnnnnnnnnnnnnnnnnnnnnnnnnnnnnnnnnnnnnnnnnnnnnnnnnnnnnnnnnnnnnnnnnnnnnnnnnnnnnnnnnnnnnnnnnnnnnnnnnnnnnnnnnnnnnnnnnnnnnnnnnnnnnnnnnnnnnnnnnnnnnnnnnnnnnnnnnnnnnnnnnnnnnnnnnnnnnnnnnnnnnnnnnnnnnnnnnnnnnnnnnnnnnnnnnnnnnnnnnnnnnnnnnnnnnnnnnnnnnnnnnnnnnnnnnnnnnnnnnnnnnnnnnnnnnnnnnnnnnnnnnnnnnnnnnnnnnnnnnnnnnnnnnnnnnnnnnnnnnnnnnnnnnnnnnnnnnnnnnnnnnnnnnnnnnnnnnnnnnnnnnnnnnnnnnnnnnnnnnnnaggatataaagattaagaatgcagattcatggaaaagtttgggcaaatctgtgaaaccatcaggtgtcatgaaatcctcagatgagctcttcaaccaatttagaaaagcagccatagaaaaggaagtaaaagctcggacacaggaactcatacggaagcatttggaacaaaatacaaaggaaccaaaagtatcgcaagaaaaccagag

SEQ ID NO: 24273 - DNA, 779 bp, Macaca Mulatta
agagtgcctttacttattaaatcaaagcaaatgtctaacaattaagaatatacttaactgggctccttttcgtttgctgatggtaacctccggggattctctgtttcagagggcccccccaacaggaaacttcgcagtgatgcaccaggtaccatgccttcagcttcgcagctgtgtgttgtctcagtatccatttcctttctgcccagtgcgcccctctgcccaccccgatttttaaacccttgcacatttccacgaaattcctgcaaaatctgaaggcttggatatcttagtgcaaagctgtctttcattgaaaccaagatcaggatgacaaattgacctcatctcttgacccactgtccttcctgcctctggccagtgcatgtgacatgacacccaacagtgtgcccttatcactgcatcttgacgagatgtcagaggctgtgtgtggcttggatttttcttcatgccaaaagccactcttacactgtcagggcactcagcagtgctgtcctcccttgtccagtgaagatactccactgagtgaatatgacagttccactatctgggcacattcctagagaatgtatttggcttctagttggctggtctgggtcacaagtcagaaatcacaaagttcatggtaactgcagcgcagcaaccagtcctcccacgattcagctttcacaggcttgtctgcaaaggaaatgagctcactgcgatgtctgacaaatgtcgggggctgcacgtggcttgaatgatgtctaactacaaactgc

SEQ ID NO: 24274 - DNA, 511 bp, Macaca Mulatta
atgtcacacctcagccggcagagaatttacagtggggaaaacccctttgcctgtaagctatgctatttttcagccgcaaatcaaacctcactgagcatgagcattttcacatgagagagaaaccttttgaatgtaacaagtgtggaaaagcctttagccaaaaggagtatgtcattaaacatcagaactcccatgccggtgagaagctttttgaatgtattgaatgtggaaaatcctttagccagaaggaaaacctccttatgcaccagaaaattcacactggagaaaaatcttttgaaagtaaagattgcaggaaagctttcattcagaagacaaacctcatcagacaccagagaactcacacaggagagaagccctttgtatgtaaggagtgtggaaaaacctttagtggtaaatccaaccttactgagcatgacaaaatgcaaattggagagaagacttttaaacgtagtgaatgtggaacaacctttgtttagaagaagtacctcat

SEQ ID NO: 24275 - DNA, 196 bp, Macaca Mulatta
gactctctgacacaacatgtgtatatcaaaatggctcatgctttgaaggctacaaattactattctataatgcaatctttactggacttttatatgcctagccacccctactatacttgtaaactggtggcagcagctgtgttaacatatcacttactattttagtattttggtcatataaaatattggtggaaat

SEQ ID NO: 24276 - DNA, 166 bp, Macaca Mulatta
ggatgtgcattctctagtcatcaagagactgagtctagttgttccttaagtcagaacagcagattcagctctgacattctgattcgaatgacactgttcaggaatcggaatcctgtcgattagactggacagcttgtggcaagtgaatttgcctgtaacaagccac

SEQ ID NO: 24277 - DNA, 3502 bp, Macaca Mulatta
  misc_feature (1)...(3502): n = A,T,C or G
agctgatcacctgcctttccagaccggagacaggcggcaagtttgaagtcgacacccggaggccagtttgtcccccttccnnnnnnnnnnnnnnnnnnnnnnnnnnnnnnnnnnnnnnnnnnnnnnnnnnnnnnnnnnnnnnnnnnnnnnnnnnnnnnnnnnnnnnnnnnnnnnnnnnnnnnnnnnnnnnnnnnnnnnnnnnnnnnnnnnnnnnnnnnnnnnnnnnnnnnnnnnnnnnnnnnnnnnnnnnnnnnnnnnnnnnnnnnnnnnnnnnnnnnnnnnnnnnnnnnnnnnnnnnnnnnnnnnnnnnnnnnnnnnnnnnnnnnnnnnnnnnnnnnnnnnnnnnnnnnnnnnnnnnnnnnnnnnnnnnnnnnnnnnnnnnnnnnnnnnnnnnnnnnnnnnnnnnnnnnnnnnnnnnnnnnnnnnnnnnnnnnnnnnnnnnnnnnnnnnnnnnnnnnnnnnnnnnnnnnnnnnnnnnnnnnnnnnagtcatctcgtcggagttcccaaacctggggttcctcagactcctgtgaacaagatcgatgaacactttgttgcagattcaagagcccagacccagccctcatctatcggtagcactacaacttccacaccagcagctgtccccgtgcagcagactaagagaggcactatgggctggcagaaggctgggcacccaccctccgacggccaacagagagcaancacaacagggctctctcaggaccttgcttggagatggtgttggcagacagcagccacgggccaaacaagtatgcaatgtggaggtgggccttcagacccaggagagaccacctgccatggcggccaagcacagcagcagcggacactgtgttcagaactttcctccatccctagcttcaaaacccagcctggtccagcagaaaccgaccgcgtacgtgcggccgatggacggccaagatcaggcccctgatgagtctcctaagctgaagtcgccttcggaaaccagcgtgcactgcacatcgtacagaggagtccccgccagcaagccggagccggccagagccaaggccaagctctccaagttcagcatccccaagcaggtggaggtgagtnnnnnnnnnnnnnnnnnnnnnnnnnnnnnnnnnnnnnnnnnnnnnnnnnnnnnnnnnnnnnnnnnnnnnnnnnnnnnnnnnnnnnnnnnnnnnnnnnnnnnnnnnnnnnnnnnnnnnnnnnnnnnnnntcagcttgtatcctctggacacaataatccannnnnnnnnnnnnnnnnnnnnnnnnnnnnnnnnnnnnnnnnnnnnnnnnnnnnnnnnnnnnnnnnnnnnnnnnnnnnnnnnnnnnnnnnnnnnnnnnnnnnnnnnnnnnnnnnnnnnnnnnnnnnnnnnnnnnnnnnnnnnnnnnnnnnnnnnnnnnnnnnnnnnnnnnnnnnnnnnnnnnnnnnnnnnnnnnnnnnnnnnnnnnnnnnnnnnnnnnnnnnnnnnnnnnnnnnnnnnnnnnnnnnnnnnnnnnnnnnnnnnnnnnnnnnnnnnnnnnnnnnnnnnnnnnnnnnnnnnnnnnnnnnnnnnnnnnnnnnnnnnnnnnnnnnnnnnnnnnnnnnnnnnnnnnnnnnnnnnnnnnnnnnnnnnnnnnnnnnnnnnnnnnnnnnnnnnnnnnnnnnnnnnnnnnnnnnnnnnnnnnnnnnnnnnnnnnnnnnnnnnnnnnnnnnnnnnnnnnnnnnnnnnnnnnnnnnnnnnnnnnnnnnnnnnnnnnnnnnnnnnnnnnnnnnnnnnnnnnnnnnnnnnnnnnnnnnnnnnnnnnnnnnnnnnnnnnnnnnnnnnnnnnnnnnnnnnnnnnnnnnnnnnnnnnnnnnnnnnnnnnnnnnnnnnnnnnnnnnnnnnnnnnnnnnnnnnnnnnnnnnnnnnnnnnnnnnnnnnnnnnnnnnnnnnnnnnnnnnnnnnnnnnnnnnnnnnnnnnnnnnnnnnnnnnnnnnnnnnnnnnnnnnnnnnnnnnnnnnnnnnnnnnnnnnnnnnnnnnnnnnnnnnnnnnnnnnnnnnnnnnnnnnnnnnnnnnnnnnnnnnnnnnnnnnnnnnnnnnnnnnnnnnnnnnnnnnnnnnnnnnnnnnnnnnnnnnnnnnnnnnnnnnnnnnnnnnnnnnnnnnnnnnnnnnnnnnnnnnnnnnnnnnnnnnnnnnnnnnnnnnnnnnnnnnnnnnnnnnnnnnnnnnnnnnnnnnnnnnnnnnnnnnnnnnnnnnnnnnnnnnnnnnnnnnnnnnnnnnnnnnnnnnnnnnnnnnnnnnnnnnnnnnnnnnnnnnnnnnnnnnnnnnnnnnnnnnnnnnnnnnnnnnnnnnnnnnnnnnnnnnnnnnnnnnnnnnnnnnnnnnnnnnnnnnnnnnnnnnnnnnnnnnnnnnnnnnnnnnnnnnnnnnnnnnnnnnnnnnnnnnnnnnnnnnnnnnnnnnnnnnnnnnnnnnnnnnnnnnnnnnnnnnnnnnnnnnnnnnnnnnnnnnnnnnnnnnnnnnnnnnnnnnnnnnnnnnnnnnnnnnnnnnnnnnnnnnnnnnnnnnnnnnnnnnnnnnnnnnnnnnnnnnnnnnnnnnnnnnnnnnnnnnnnnnnnnnnnnnnnnnnnnnnnnnnnnnnnnnnnnnnnnnnnnnnnnnnnnnnnnnnnnnnnnnnnnnnnnnnnnnnnnnnnnnnnnnnnnnnnnnnnnnagtgtgacaacgaagacgactacagggagatcaagaaggcccagggagagaaagacagctcttcaagactggccacctccaccggtaatactttgtctgcaaaccactgcaacatgaacatcaacannnnnnnnnnnnnnnnnnnnnnnnnnnnnnnnnnnnnnnnnnnnnnnnnnnnnnnnnnnnnnnnnnnnnnnnnnnnnnnnnnnnnnnnnnnnnnnnnnnnnnnnnnnnnnnnnnnnnnnnnnnnnnnnnnnnnnnnnnnnnnnnnnnnnnnnnnnnnnnnnnnnnnnnnnnnnnnnnnnnnnnnnnnnnnnnnnnnnnnnnnnnnnnnnnnnnnnnnnnnnnnnnnnnnnnnnnnnnnnnnnnnnnnnnnnnnnnnnnnnnnnnnnnnnnnnnnnnnnnnnnnnnnnnnnnnnnnnnnnnnnnnnnnnnnnnnnnnnnnnnnnnnnnnnnnnnnnnnnnnnnnnnnnnnnnnnnnnnnnnnnnnnnnnnnnnnnnnnnnnnnnnnnnnnnnnnnnnnnnnnnnnnnnnnnnnnnnnnnnnnnnnnnnnnnnnnnnnnnnnnnnnnnnnnnnnnnnnnnnnnnnnnnnnnnnnnnnnnnnnnnnnnnnnnnnnnnnnnnnnnnnnnnnnnnnnnnnnnnnnnnnnnnnnnnnnnnnnnnnnnnnnnnnnnnnnnnnnnnnnnnnnnnnnnnnnnnnnnnnnnnnnnnnnnnnnnnnnnnnttaccgatgcctggctctcctgtactggcggatgtttcgactcaaaagggaccacgctgtaaagtattcaaaagcactaattgactatttcaag

SEQ ID NO: 24278 - DNA, 2221 bp, Macaca Mulatta
  misc_feature (1)...(2221): n = A,T,C or G
gtttgaggaaccactggccaacttgctaaatgaacaacatcggacagtgaaggagctatttgaacagctgaagatgaagaaatcttcagccaaacagctgcaggaagtagagaaggttaaaccccagagtgagaaagttcatcagactctgattctggacccagcacagaggaagagactccagcagcagatgcagcagnnnnnnnnnnnnnnnnnnnnnnnnnnnnnnnnnnnnnnnnnnnnnnnnnnnnnnnnnnnnnnnnnnnnnnnnnnnnnnnnnnnnnnnnnnnnnnnnnnnnnnnnnnnnnnnnnnnnnnnnnnnnnnnnnnnnnnnnnnnnnnnnnnnnnnnnnnnnnnnnnnnnnnnnnnnnnnnnnnnnnnnnnnnnnnnnnnnnnnnnnnnnnnnnnnnnnnnnnnnnnnnnnnnnnnnnnnnnnnnnnnnnnnnnnnnnnnnnnnnnnaatgaatttccctgtttgccaaagcaagtggcttggatcctggccacaagcaaggttttcatgtacccagagttacttccagtgtgttccctgaaggcaaagaatccccaggataagatcgtcttcaccaaggctgaggacannnnnnnnnnnnnnnnnnnnnnnnnnnnnnnnnnnnnnnnnnnnnnnnnnnnnnnnnnnnnnnnnnnnnnnnnnnnnnnnnnnnnnnnnnnnnnnnnnnnnnnnnnnnnnnnnnnnnnnnnnnnnnnnnnnnnnnnnnnnnnnnnnntaagttttataagaagaccaaacagctgccagtcttagtaaaatgctgtgaagagatccagccacatcagtggaagccacctgtagagagagaagaacaccggctcccattctggttaaaggnnnnnnnnnnnnnnnnnnnnnnnnnnnnnnnnnnnnnnnnnnnnnnnnnnnnnnnnnnnnnnnnnnnnnnnnnnnnnnnnnnnnnnnnnnnnnnnnnnnnnnnnnnnnnnnnnnnnnnnnnnnnnnnnnnnnnnnnnnnnnnnnnnnnnnnnnnnnnnnnnnnnnnnnnnnnnnnnnnnnnnnnnnnnnnnnnnnnnnnnnnnnnnnnnnnnnnnnnnnnnnnnnnnnnnnnnnnnnnnnnnnnnnnnnnnnnnnnnnnnnnnnnnnnnnnnnnnnnnnnnnnnnnnnnnnnnnnnnnnnnnnnnnnnnnnnnnnnnnnnnnnnnnnnnnnnnnnnnnnnnnnnnnnnnnnnnnnnnnnnnnnnnnnnnnnnnnnnnnnnnnnnnnnnnnnnnnnnnnnnnnnnnnnntgggggtcagtggaggtgagagttttgagtctcctgcagcactgcctgctatgccncctgagggcaggacaagcttccctctgtctgagtcccagactttgctctcttctgcccctgtgcccaaggtaatgctgccctcccttgccccttctaagtttcggaagccatatgtgagacgcagaccctcaaagagaaggggaatcaaggcctctccctgtatgaaacctgcccctgttatccaccaccctgcatctgttatcttcactgttcctgctaccactgtgaagattgtgagccttggtagtggctgtaacatgatccagcctgtcaatgcggctgtggcccagagtccccagactattcccattaccaccctcttggttaaccctacttccttcccctgtcaattgaaccagccccttgtggcctcctctgtctcacccttaattgtttctggcaattctgtgaatcttcctataccaaccacccctgaagataaggcccacgtgaatgtggacattgcttgtgctgtggctaatggggaaaatgcctttcagggcctagaacccaaattagagccccaggaactatctcctctctctgctactgttttccccaaagtggaacatagcccagggcctccaccagcagatgcagagtgccaagaaggattgtcagagaacagtgcctgtcgctggactgttgtgaaaacagaggagggaagacaagctctggagccgctgcctcagggcatccaggagtctctaaacaactcttcctctggggatttagaggaagttgtcaagatggaacctgaagatgctacagaggaaatcagtggatcccctgagcgtgacatttgtgatgacatcaaagaggaacatgctgtggaattggacactggcgtcgcaagcgaggagttgaacagtgctagagaggtaa

SEQ ID NO: 24279 - DNA, 526 bp, Macaca Mulatta
  misc_feature (1)...(526): n = A,T,C or G
tgagagctctttggggccctgcgttgtgcagactctattcccatagctcagaagctgggagtccacacggctgagccaaactgacaggccagnnnnnnnnnnnnnncgcctcctctgccctgcccaccagcctgtgatttggtggcgtctttgttgtccaaaaatatctcctcccgctgactgccccagagcctgaaagtctcacccgtggagcccaccttggaattaaggggatgcctcagccacaaatgtgacccaagatagagtgttgtcctcagggaggtcggatctggaacacatattggaattggggccaactccaatatagagtggataagaccttataatgtaaagagcacataaggtaaagggctttagagtcagacagacctagattcaaatctgccatttaattagctgcatgtcaccttagggtacagcgcttaacacaatccgcctcaatttcttcatctgtcaaatggagccaattctgcctggctacagaattattgcgaggataaaatca

SEQ ID NO: 24280 - DNA, 629 bp, Macaca Mulatta
atataattgtcaactaactgaattcctgaagttgtcccaaatctgtcagacagtgcctgctccatcagccgggagaaactggaatctggaaacacagaggggagagtctggggccactggctcctgtgtgtcaacacagctgaggagccaatttgtgctacctctgactcttattccaacatccatgccaagcctcctggggtgccagctcccctgccaagcctttgcctcctttccaatggcttgccttgctctggcccctctgaggaccactctccttaagtctgctgcaaatataggttcaggcttgctccctcagaaggaaggatgcagctctatctcataagaagccttcctgccccacaggccttgcgcagggagctgagttctctctcctcttttccattgacgctgtgtgggcaacttctcaactcccagttgtttcatgggatcccaaaaaaccttcagatcgacacagtggtctcaccagagttgtccactatgtgcaggtaggagtccccaggcccaccaatgacgtaacacctgggatttttgcttaatgtcccctcctctaagtctcctcatgtgcctggagctgagagagtcacaacagaatgcaattccccttc

SEQ ID NO: 24281 - DNA, 708 bp, Macaca Mulatta
  misc_feature (1)...(708): n = A,T,C or G
aagactcttgagctgaactgggctgtgtttaccccaaactcttccccacctcgggtccccaagccgctgggagatgtcccaggctgggggtccgcacgtggcgggaagagatggtcttccatccgctctgaaatcatgtttcttagagaaatgcctcggatgccgccgacgcggtgctgctgccgccgcttcgggtttggcccctcagaacccctccttttctgagcgcttccctcttaggcctcagggcagtttgatctgtggggagaaagagcagccatcgctgagcctgccttttaaaatatatgtgtatttccctagccccactctaagaaatctacgttcatgagtttgccctctgccctcccgcttcttccccttctcccctctaaaccttctcccatctcttccaaaatcttttcccagaaaggcaggcttcaaccagccactccagctttgtgtcttctctcaattacatagcaatttctccttcccaccatcatggggaagctggctctgcttttgccctttgtcatcaccaacacaacagatagaatttaannnnnnnnnnnnnnnnnnnnnnnnnnnnnnnnnnnnnnnnnnnnnnnnnnnnnnnnnnnnnnnnnnnnnnnnnnnnnnnnnnnnnatacacacaatatgtattcctagcaaaataaaatctatagggtacttggttatccagtgcag

SEQ ID NO: 24282 - DNA, 773 bp, Macaca Mulatta
  misc_feature (1)...(773): n = A,T,C or G
gggtttgtcctcagaagccgtagttgaagaaagatttgagtatacacagaagtggagccatacattatggctaattttttacgttaagtgcagaagtctgaacacagcatgaatgcttctgcctgacgagaccacaaagcagcaagagttagggataaatggaggtagccatgagtagaactgctgtagggcttcaggaggctacgcagacctgatcaactggaaagtttccaaagtaaaagattaaaaactttcagactgttcttacccctacctgtatttcacaaatagcctgaggatccaactaattttaaggcaaattgggaccagacatggtgcctcaagcctgtggtcccactatttgggagacctgggcgggagtnnnnnnnnnnnnnnnnnnnnngnnnnnnnnnnnnntnnnnnnnnnnnnnnnnnnnnnnnnnnngaattacaaaaattggctgggcgtggtggcacgtgcctgtggtcccagctgnnnnnnnnnnnnnnnnnnnnnngtcacttgaacgtgggagccagagactgcagtgagctgagatcgcgccactgcactctagcctgggcgacagaatgagactccgtctcaatcaatcaatcaatcaatcaataaagcaaattgggatgtggtcccagcattttgggaagccgagacgggcgcatcacctgaggtcaggattcccgaccagcctggtcaacatggtgaaactctgtctctactgnnnnnnnnnnnnnnnnnnnnnntggtggtgtgc

SEQ ID NO: 24283 - DNA, 179 bp, Macaca Mulatta
ggtgctggtctgaggttggtgaccaacatgtgggacagaacctttccattggccaaggctgtgactataaggccatcatagaacacgagatcctgcatgctttgggattttaccacgagcagtcaagaacggaccgggatgattatgtgaacatctggtgggacgaaattctttcaggt

SEQ ID NO: 24284 - DNA, 1087 bp, Macaca Mulatta
  misc_feature (1)...(1087): n = A,T,C or G
acggaatgcgagctgctcctctcagtgctgctcttcgcgcagccagtgcgcggcagccccttccgcgtgcgtgccctgcgtcctggggacctgccaccttcccccgacgatgtgaagcgccgtgtcaagtcccctggcggccccggcagccatgtgcgccagaaggcagtgcgtaggcccagttccatgtacagcacaggcggcaaacgaaaggacaacccaattgaggatgagctcgtcttccgtgttggnnnnnnnnnnnnnnnnnnnnnnnnnnnnnnnnnnnnnnnnnnnnnnnnnnnnnnnnnnnnnnnnnnnnnnnnnnnnnnnnnnnnnnnnnnnnnnnnnnnnnnnnnnnnnnnnnnnnnnnnnnnnnnnnnnnnnnnnnnnnnnnnnnnnnnnnnnnnnnnnnnnnnnnnnnnnnnnnnnnnnnnnnnnnnnnnnnnnnnnnnnnnnnnnnnnnnnnnnnnnnnnnnnnnnnnnnnnnnnnnnnnnnnnnnnnnnnnnnnnnnnnnnnnnnnnnnnnnnnnnnnnnnnnnnnnnnnnnnnnnnnnnnnnnnnnnnnnnnnnnnnnnnnnnnnnnnnnnnnnnnnnnnnnnnnnnnnnnnnnnnnnnnnnnnnnnnnnnnnnnnnnnnnnnnnnnnnnnnnnnnnnnnnnnnnnnnnnnnnnnnnnnnnnnnnnnnnnnnnnnnnnnnnnnnnnnnnnnnnnnnnnnnnnnnnnnnnnnnnnnnnnnnnnnnnnnnnnnnnnnnnnnnnnnnggtgtacagtgccgatggagagttcctcttcaagtttggctcccatggcgaaggcaatgggcagttcaacgcccccacaggagtagctgtggactccaatggaaacatcattgtggctgactggggcaacagccgcatccaggtnccaggtattcgacagctctggctccttcctgtcctatatcaacacatctgcagaaccactgtatggtccacagggcctggcactgacctcggatggccacgtggtggtggctgatgctggcaaccactgctttaaagcctatcgctacctccagtagctgcacagaggccctgcctggcttg

SEQ ID NO: 24285 - DNA, 1769 bp, Macaca Mulatta
  misc_feature (1)...(1769): n = A,T,C or G
ggtgatgctgtgtaaccccatctgcggcgtcagctatgctctgacggtgtggcgattcttccgcgatcgaacagaagaagaagaaatctcactaattcacttttttggagaggagtacctggagtataagaagagggtgcccacaggcctgcctttcataaagggggtcaaggtggacctgtgacgggcagtggctccggtgaccttggggcctccagccccgtgcagcctgggacaaaactgtttctggtcggccgctgcaacatggattttcttaatcgttttacatcattagtcactcttccggaatgtcactcaagaccaagcggtcagaaggcctgaggacccaaggccccactggagcagtctgtccttatgccgaatcaaggcagaacatgagtgaaagacgaataagaggcaaatcacagcaatattccacagcgccctccagagtgacctggggaggaccgaggccacacgccactgcccccgaggccagagtgtaagtaagggataaccaggactccctgggagagatggactctgtcctcagcaacacttccacagcagagcggggtagcaggtaccccttcttatcagcattaaaaatgcatttacaacctttcattntaccgaaaaacacaaaccgctttaacctctttatttctgtccctcactgcatgaacatctatacaattttaaaaatatttcctcataggatgctttggcctttcatctatttaatcatagctacatatctattttttataagtagcagtacacatnnnnnnnnnnnnnnnnnnnnnnnnnnnnnnnnnnnnnnnnnnnnnnnnnnnnnnnnnnnnnnnnnnnnnnnnnnnnnnnnnnnnnnnnnnnnnnnnnnnnnnnnnnnnnnnnnnnnnnnnnnnnnnnnnnnnnnnnnnnnnnnnnnnnnnnnnnnnnnnnnnnnnnnnnnnnnnnnnnnnnnnnnnnnnnnnnnnnnnnnnnnnnnnnnnnnnnnnnnnnnnnnnnnnnnnnnnnnnnnnnnnnnnnnnnnnnnnnnnnnnnnnnnnnnnnnnnnnnnnnnnnnnnnnnnnnnnnnnnnnnnnnnnnnnnnnnnnnnnnnnnnnnnnnnnnnnnnnnnnnnnnnnnnnnnnnnnnnnnnnnnnnnnnnnnnnnnnnnnnnnnnnnnnnnnnnnnnnnnnnnnnnnnnnnnnnnnnnnnnnnnnnnnnnnnnnnnnnnnnnnnnnnnnnnnnnnnnnnnnnnnnnnnnnnnnnnnnnnnnnnnnnnnnnnnnnnnnnnnnnagtcaatatgtttgttttgcaagtttaggagagtagttggctttgagtcacacatggaagctntaagaggtgaaacgctggcttcattctggactagacaggaacttggcctcagcgtgagatcctgccatgcagtgttacggtggcactgaagaagtatgaatgtgaaggcgtgggcttggggccagagcaccactctgctgccccaccacgcagcttgtgaggagccactaaacctttccgtgcctagacctccccatctgtggaatggggtcaataccacctacctcacaggggtgttgtgaggactgagaagaacaatgtcaaatgtttttaatacttggatgtgggggcgacatcaatgaaatctgtactgtataaaagctacacaaaaatgggcagacatttggttaattgtaccagatacctaaaatgtatgttcagaaaagcattttatcaactcagagatacgacgtgtttctag

SEQ ID NO: 24286 - DNA, 483 bp, Macaca Mulatta
ccacccgcacggggctgttcctgcacttccttgccgcggttccgcagtgcacacagctctgcggcgcgctgcgggcgctgagcctcctggctgctgagggcaaatgggcgcagatgtccgtgttccgtggagaggacttggcaaggctcgggatgcaggagtccgacatcggcccgtccctggacagaggcatcctccgccaggacagagtctctaaaggctgcgactcctccatccacctcagcttccagcagtttttcactacgctgttctgcaccctggagaaggaggaggaggaggacaaggacggccacgcctgagacattggggacgtgcagaagctgctttccagagaagaaagactcaagaaccccgacctgatccaagcagggcacttcttattcggcttcgccaacgagaagagagccaaggatttggagaccacttttggctgcctgatgtcaccggagatcaaacaggaat

SEQ ID NO: 24287 - DNA, 92 bp, Macaca Mulatta
gaagattttatttctaatgaaaaatgccacatagttttctactcaaagatctttttcaatgtttttctttttcctgattaacttagaaaatg

SEQ ID NO: 24288 - DNA, 544 bp, Macaca Mulatta
ctagtgggtgaatcacagtgctttccctgtaaaatgtggtacccgatgtcgtatttgagattctatgaaatgtttaaatcttaacatcactccaattattaatgaaccaaatcatacggtaagttactgtctgcattgaaatataatatcaaagccttttgaaatctgtaaacataaaattcctctcattttcaaatatttaaagccagttttatgttcctaaaaactcattttcttctttctagtactactgtttctactgaatataatgaaaatggcaataaaataatattacataaactgtaaagttcctttgatcatatgttgttaattctcttctatagttttctccttagaaaatgataagtggacacatgactcattttagccagattttagcccggacgtccttcagattgatcactgaaacataggtaaagacaaatgtcagaaaagatagtaaattggactggatattctgaagcatgatctaaataggtgcaaatagaggctacatttattaaaagaaacagaatttttataa

SEQ ID NO: 24289 - DNA, 1346 bp, Macaca Mulatta
  misc_feature (1)...(1346): n = A,T,C or G
atgcctagttcagtggttctctagtgtgatccatagactaatagcagagcattacctgcgtacttgataatgcacattgcaggccccacccaaaacctgttgaatcagaagctctgagagtggggcctaccattctgtggtttaacaagcccatcaggtgattctaatttacactacagtttgagacccaccgacctagaacatatcctccagagacttggcttaattggtctggctaaatatagctgaacattgttaccttttnnnnnnnnnnnnnnnnnnnnnnnnnnnnnnnnnnnnnnnnnnnnnnnnnnnnnnnnnnnnnnnnnnnnnnnnnnnnnnnnnnnnnnnnnnnnnnnnnnnnnnnnnnnnnnnnnnnnnnnnnnnnnnnnnnnnnnnnnnnnnnnnnnnnnnnnnnnnnnnnnnnnnnnnnnnnnnnnnnnnnnnnnnnnnnnnnnnnnnnnnnnnnnnnnnnnnnnnnnnnnnnnnnnnnnnnnnnnnnnnnnnnnnnnnnnnnnnnnnnnnnnnnnnnnnnnnnnnnnnnnnnnnnnnnnnnnnnnnnnnnnnnnnnnnnnnnnnnnnnnnnnnnnnnnnnnnnnnnnnnnnnnnnnnnnnnnnnnnnnnnnnnnnnnnnnnnnngacttccaaaatcaccctatccaacaaaatcttattcctcagtattaattcctctcattgggaagaaatttgtagttgaaactatttaatttgaatttaatttctgtaattgggaaggagggtaataatgaacaaaaagtttgagaaaaaatgctttaaggggttttacaggcatactacagtccaggactgtggtgttctatgtgctatgtatagtcatattagtagctatttgttgcaagatacttgaagccaaatgtttgcagtataggttcctggctactctttaagctgtgatttcactctgtctatcatgggcagtattagaaaacatactggttttcactatctggttttcaaacactatcattattttacctggattgtagtggagaattgagcatatcaatgcatgcattggaaagaaaaaaattttgttgaaatttggaaatgttcagctaaatcccagatatactgtgggatgagttatctcagggtannnnnnnnnnnnnnnnnnnnnnnnnnnnnnnnaatttttccctcacagtcagtagctttctttgatatttaacaataagtatatagtgatatacttgaagtttatgtccagaatgtcattggaatattacaatgagcataaataagcttaggactacatgaaagatgctatctcgtatatgctttaaatagagaagtgatttctttta

SEQ ID NO: 24290 - DNA, 170 bp, Macaca Mulatta
ggaagcaagaaaagtagcgctagaaaagataagggagaagataaaaagaagctctggtccaatgagtccaagaacaaactggtgcctgaagaagtgacttcaactgtcacgagaagtcgaagaatttccagacgtccatctgattggtgggtggtaaaatcagaggagag

SEQ ID NO: 24291 - DNA, 190 bp, Macaca Mulatta
ctggcagcgaggaggcagaagaaggtgccgagagcagccaggagccagtggcacacacagtgtcggaacccaaggtggacatcccgcgcgactcaggctgctttgagggctcggagagcgggcgcgatgaggcagagctggcaggcactgaggagcagctgcagggcctctccctggccggggcaccttg

SEQ ID NO: 24292 - DNA, 2286 bp, Macaca Mulatta
  misc_feature (1)...(2286): n = A,T,C or G
nagggcttccagcggctgaaggctgcccacgcggccctagaggaggagtacctgaaggcctgccgggagcaacaccctgcccagccgcttgctggctccaaggggacacctggaagatttgatcctggcagnnnnnnnnnnnnnnnnnnnnnnnnnnnnnnnnnnnnnnnnnnnnnnnnnnnnnnnnnnnnnnnnnnnnnnnnnnnnnnnnnnnnnnnnnnnnnnnnnnnnnnnnnnnnnnnnnnnnnnnnnnnnnnnnnnnnnnnnnnnnnnnnnnnnnnnnnnnnnnnnnnnnnnnnnnnnnnnnnnnnnnnnnnnnnnnnnnnnnnnnnnnnnnnnnnnnnnnnnnnnnnnnnnnnnnnnnnnnnnnnnnnnnnnnnnnnnnnnnnnnnnnnnnnnnnnnnnnnnnnnnnnnnnnnnnnnnnnnnnnnnnnnnnnnnnnnnnnnnnnnnnnnnnnnnnnnnnnnnnnnnnnnnnnnnnnnnnnnnnnnnnnnnnnnnnnnnnnnnnnnnnnnnnnnnnnnnnnnnnnnnnnnnnnnnnnnnnnnnnnnnnnnnnnnnnnnnnnnnnnnnnnnnnnnnnnnnnnnnnnnnnnnnnnnnnnnnnnnnnnnnnnnnnnnnnnnnnnnnnnnnnnnnnnnnnnnnnnnnnnnnnnnnnnnnnnnnnnnnnnnnnnnnnnnnnnnnnnnnnnnnnnnnnnnnnnnnnnnnnnnnnnnnnnnnnnnnnnnnnnnnnnnnnnnnnnnnnnnnnnnnnnnnnnnnnnnnnnnnnnnnnnnnnnnnnnnnnnnnnnnnnnnnnnnnnnnnnnnnnnnnnnnnnnnnnnnnnnnnnnnnnnnnnnnnnnnnnnnnnnnnnnnnnnnnnnnnnnnnnnnnnnnnnnnnnnnnnnnnnnnnnnnnnnnnnnnnnnnnnnnnnnnnnnnnnnnnnnnnnnnnnnnnnnnnnnnnnnnnnnnnnnnnnnnnnnnnnnnnnnnnnnnnnnnnnnnnnnnnnnnnnnnnnnnnnnnnnnnnnnnnnnnnnnnnnnnnnnnnnnnnnnnnnnnnnnnnnnnnnnnnnnnnnnnnnnnnnnnnnnnnnnnnnnnnnnnnnnnnnnnnnnnnnnnnnnnnnnnnnnnnnnnnnnnnnnnnnnnnnnnnnnnnnnnnnnnnnnnnnnnnnnnnnnnnnnnnnnnnnnnnnnnnnnnnnnnnnnnnnnnnnnnnnnnnnnnnnnnnnnnnnnnnnnnnnnnnnnnnnnnnnnnnnnnnnnnnnnnnnnnnnnnnnnnnnnnnnnnnnnncggttcctggctcagagtttgaggggcacaaacggatttctgaacagctccttcccagcaagacaatcagnnnnnnnnnnnnnnnnnnnnnnnnnnnnnnnnnnnnnnnnnnnnnnnnnnnnnnnnnnnnnnnnnnnnnnnnnnnnnnnnnnnnnnnnnnnnnnnnnnnnnnnnnnnnnnnnnnnnnnnnnnnnnnnnnnnnnnnnnnnnnnnnnnnnnnnnnnnnnnnnnnnnnnnnnnnnnnnnnnnnnnnnnnnnnnnnnnnnnnnnnnnnnnnnnnnnnnnnnnnnnnnnnnnnnnnnnnnnnnnnnnnnnnnnnnnnnnnnnnnnnnnnnnnnnnnnnnnnnnnnnnnnnnnnnnnnnnnnnnnnnnnnnnnnnnnnnnnnnnnnnnnnnnnnnnnnnnnnnnnnnnnnnnnnnnnnnnnnnnnnnnnnnnnnnnnnnnnnnnnnnnnnnnnnnnnnnnnnnnnnnnnnnnnnnnnnnnnnnnnnnnnnnnnnnnnnnnnnnnnnnnnnnnnnnnnnnnnnnnnnnnnnnnnnnnnnnnnnnnnnnnnnnnnnnnnnnnnnnnnnnnnnnnnnnnnnnnnnnnnnnnnnnnnnnnnnnnnnnnnnnnnnnnnnnnnnnnnnnnnnnnnnnnnnnnnnnnnnnnnnnnnnnnnnnnnnnnnnnnnnnnnnnnnnnnnnnnnnnnnnnnnnnnnnngtggtgctgccacaggggacccactgggaccgcctcccgctgatacccttcagtgtcccctgtgtggtcgagttggttctcccccagaggcaaatggtccaggctcagccacctctggnggggcagagaaggccaccaagaggagaaaagcaccttcaactcccagccccaagcagaggagcaagcaggcggggtcgtcgccacgcccgccccccggactgtggtatctggcgacagcgcccccagcaccagcccctccggcctttgcctacatctcctcggttcccatcatgccttatccacctgccgctgtgta

SEQ ID NO: 24293 - DNA, 794 bp, Macaca Mulatta
  misc_feature (1)...(794): n = A,T,C or G
gaggtccagctggtgcagtctggggctgaggtgaagaagcctggggcctcagtgaagatctcctgcaaggcttctggatacaccttcaccagactactgccatgcactgggtgcgacaggcccctggaaaagggcttgagtggatgggaggtgttgatcctgaatatggtgaaacaaactacgcacagaagttccagggcagagtcaccatgaccgcggacacgtctacagacacagcctacatggagctgagcagcctgagatctgaggacacggccgtgtattactgtgcgagagatggatgtctggggccggggaactnnnnnnnnnnnnnnnnnngcctccaccaagggcccatcggtcttccccctggcgccctcctccaggagcacctccgagagcacagcggccctgggctgcctggtcaaggactacttccctgaacccgtgaccgtgtcgtggaactcaggctccctgaccagcggcgtgcacaccttcccggctgtcctacagtcctcagggctctactccctcagcagcgtggtgaccgtgccctccagcagcttgggcacccagacctacgtctgcaacgtaaaccacaagcccagcaacaccaaggtggacaagagagttgagataaaaacatgtggtggtggcagcaaacctcccacgtgcccaccgtgcccagcacctgaactcctggggggaccgtcagtcttcctcttccccccaaaacccaaggacaccctcatgatctcccggacccctgaggtcacgtgcgtggttggtagacg

SEQ ID NO: 24294 - DNA, 302 bp, Macaca Mulatta
gctggtttctgttggccagtttaggccggaaaagaatcatccattgcagatcagagcctttgctaaattgctgaataagaagatggttgagtcatctccttctcttaaacttgccctcattggaggttgtcgtaacaaagatgatgaacttagggtaaaccaactgagaaggctctctgaggatttaggagttcaagaatatgtggaatttaaaataaacattccatttgatgaattaaagaattatttgtctgaagcaacaattggtctgcataccatgtggaacgagcattttgggattg

SEQ ID NO: 24295 - DNA, 469 bp, Macaca Mulatta
ctgaccaaatgcttattgtgtaagataaaccacttgaatcatggaggatccaagttgagatttgaaatctgtgacgtttttacaagggtaaaatgttaccagtattttaattactgttatacacagctttatgatatcaaagactcattgcttaattctaagacttttgaattttcattttttaaaaagatgtacaaaacagtttaaaataaactttaattcatatataaagcggggccttttctttttttaatgcattgactttttgtgtagtcaggaaatataattgagctctgaaataatagcttcatgtgccaatggtgtattaggagaaagatgctagcagaaagctgacttcctggctcttctggttataaaaatacagatttttatcagctacccagttactgtgtgtaacccaactcctgaatctaccacaatttgataaccaatttggaaggacagacct

SEQ ID NO: 24296 - DNA, 1408 bp, Macaca Mulatta
  misc_feature (1)...(1408): n = A,T,C or G
agatatcaacgaatgccgtcaccccggtacctgccctgatgggagatgcgtcaattccctcggctcctacacttgtctggcctgtgaggagggctaccggggccagagtgggagctgtgtagnnnnnnnnnnnnnnnnnnnnnnnnnnnnnnnnnnnnnnnnnnnnnnnnnnnnnnnnnnnnnnnnnnnnnnnnnnnnnnnnnnnnnnnnnnnnnnnnnnnnnnnnnnnnnnnnnnnnnnnnnnnnnnnnnnnnnnnnnnnnnnnnnnnnnnnnnnnnnnnnnnnnnnnnnnnnnnnnnnnnnnnnnnnnnnnnnnnnnnnnnnnnnnnnnnnnnnnnnnnnnnnnnnnnnnnnnnnnnnnnnnnnnnnnnnnnnnnnnnnnnnnnnnnnnnnnnnnnnnnnnnnnnnnnnnnnnnnnnnnnnnnnnnnnnnnnnnnnnnnnnnnnnnnnnnnnnnnnnnnnnnnnnnnnnnnnnnnnnnnnnnnnnnnnnnnnnnnnnnnnnnnnnnnnnnnnnnnnnnnnnnnnnnnnnnnnnnnnnnnnnnnnnnnnnnnnnnnnnnnnnnnnnnnnnnnnnnnnnnnnnnnnnnnnnnnnnnnnnnnnnnnnnnnnnnnnnnnnnnnnnnnnnnnnnnnnnnnnnnnnnnnnnnnnnnnnnnnnnnnnnnnnnnnnnnnnnnnnnnnnnnnnnnnnnnnnnnnnnnnnnnnnnnnnnnnnnnnnnnnnnnnnnnnnnnnnnnnnnnnnnnnnnnnnnnnnnnnnnnnnnnnnnnnnnnnnnnnnnnnnnnnnnnnnnnnnnnnnnnnnnnnnnnnnnnnnnnnnnnnnnnnnnnnnnnnnnnnnnnnnnnnnnnnnnnnnnnnnnnnnnnnnnnnnnnnnnnnnnnnnnnnnnnnnnnnnnnnnnnnnnnnnnnnnnnnnnnnnnnnnnnnnnnnnnnnnnnnnnnnnnnnnnnnnnnnnnnnnnnnnnnnnnnnnnnnnnnnnnnnnnnnnnnnnnnnnnnnnnnnnnnnnnnnnnnnnnnnnnnnnnnnnnnnnnnnnnnnnnnnnnnnnnnnnnnnnnnnnnnnnnnnnnnnnnnnnnnnnnnnnnnnnnnnnnnnnnnnnnnnnnnnnnnnnnnnnnnnnnnnnnnnnnnnnnnnnnnnnnnnnnnnnnnnnnnnnnnnnnnnnnnnnnnnnnnnnnnnnnnnnnnnnnnnnnnnnnnnnnnnnnnnnnnnnnnnnnnnnnnnnnnnnnnnnnnnnnnnnnnnnnnnnnnnnnnnnnnnnnnnnnngtgaacgagtgtgagcttatgctggcggtgtgtggggccgcactctgtgagaatgtggagggctccttcctgtgcctctgcgccagtgacctggaggagtacgatgcccaggaggggcactgccgcccgcggggggctggaggt

SEQ ID NO: 24297 - DNA, 793 bp, Macaca Mulatta
gggagcttccgggtttcctggggtactacgatggcgatgagtttcgagtggccgtggcagtatcgcttcccacccttctttacgttacaaccgaatgtggacactcggcagaagcagctggccgcctggtgctcgctggtcctgtccttctgccgcctgcacaaacagtccagcatgacggtgatggaagctcaggagagcccgctcttcaacaacgtcaagctacagcgaaagcttcctgtggagtcgatccagattgtattagaggaactgaggaagaaagggaacctcgagtggttggataagagcaagtctagcttcctgatcatgtggcggaggccagaagaatgggggaaactcatctatcagtgggtttccaggagtggccagaacaactccgtctttaccctgtatgaactaactaacggggaagacacagaggatgaggagttccatgggctggatgaggccactctactgcgggctctgcaggcactacagcaggaacacaaggccgagatcatcaccgtcagcgatggccgaggcgtcaagttcttctagcagggacctgtctccctttacttcttacctcccacctttccaggggctttcaaaaaggagacagacccaggtgtcccccaaaagaactgggatctgttgactcccaccaggacttcaaaagggctccaagttccttgaagggctgggggaccctggggggaaagggggttttcctccataacccccaataattgttcttggttccatttggggaataaggggggtgaaaggc

SEQ ID NO: 24298 - DNA, 1647 bp, Macaca Mulatta
  misc_feature (1)...(1647): n = A,T,C or G
ttgagcctcttcggctgtacaaacattattctttctcagaggagaacccagggggctgtgaagatgagtacctcgtcaaccccacctgccaggttctggttaaggatttcacctttgagggcttcagccgcctccgcttcctcaacttgggccgcatgattgattgggtccctgtggagtccctgctgcggccactcaactccctggcagccttggacctctcaggcattcagacgagcgatgccgccttcctcacgcagtggaaagacagcctggtgtccctcgtactctacaatatggacctgtctgacgaccacatccgggtcatcgtgcagctgcacaagctgcgnnnnnnnnnnnnnnnnnnnnnnnnnnnnnnnnnnnnnnnnnnnnnnnnnnnnnnnnnnnnnnnnnnnnnnnnnnnnnnnnnnnnnnnnnnnnnnnnnnnnnnnnnnnnnnnnnnnnnnnnnnnnnnnnnnnnnnnnnnnnnnnnnnnnnnnnnnnnnnnnnnnnnnnnnnnnnnnnnnnnnnnnnnnnnnnnnnnnnnnnnnnnnnnnnnnnnnnnnnnnnnnnnnnnnnnnnnnnnnnnnnnnnnnnnnnnnnnnnnnnnnnnnnnnnnnnnnnnnnnnnnnnnnnnnnnnnnnnnnnnnnnnnnnnnnnnnnnnnnnnnnnnnnnnnnnnnnnnnnnnnnnnnnnnnnnnnnnnnnnnnnnnnnnnnnnnnnnnnnnnnnnnnnnnnnnnnnnnnnnnnnnnnnnnnnnnnnnnnnnnnnnnnnnnnnnnnnnnnnnnnnnnnnnnnnnnnnnnnnnnnnnnnnnnnnnnnnnnnnnnnnnnnnnnnnnnnnnnnnnnnnnnnnnnnnnnnnnnnnnnnnnnnnnnnnnnnnnnnnnnnnnnnnnnnnnnnnnnnnnnnnnnnnnnnnnnnnnnnnnnnnnnnnnnnnnnnnnnnnnnnnnnnnnnnnnnnnnnnnnnnnnnnnnnnnnnnnnnnnnnnnnnnnnnnnnnnnnnnnnnnnnnnnnnnnnnnnnnnnnnnnnnnnnnnnnnnnnnnnnnnnnnnnnnnnnnnnnnnnnnnnnnnnnnnnnnnnnnnnnnnnnnnnnnnnnnnnnnnnnnnnnnnnnnnnnnnnnnnnnnnnnnnnnnnnnnnnnnnnnnnnnnnnnnnnnnnnnnnnnnnnnnnnnnnnnnnnnnnnnnnnnnnnnnnnnnnnnnnnnnnnnnnnnnnnnnnnnnnnnnnnnnnnnnnnnnnnnnnnnnnnnnnnnnnnnnnnnnnnnnnnnnnnnnnnnnnnnnnnnnnnnnnnnnnnnnnnnnnnnnnnnnnnnnnnnnnnnnnnnnnnnnnnnnnnnnnnnnnnnnnnnnnnnnnnnnnnnnnnnnnnnnnnnnnnnnnnnnnnnnnnnnnnnnnnnnnnnnnnnnnnnnnnnnnnnnnnnnnnnnnnnnnnnnnnnnnnnnnnnnnnnnagcaacctgttggagagcaaggccgatgggatcgaggtttcctacaatgcctgcggcgtcctctcccacatcatgtttgatggacccgaggcctggggcgtctgtgagccccagcgcgaggaggtggaggaacgcatgtgggccgccatccagagctgggacatcaactctccggagaaacatcaattacaggt

SEQ ID NO: 24299 - DNA, 467 bp, Macaca Mulatta
  misc_feature (1)...(467): n = A,T,C or G
agtgtacacagcagcagcaaaaccgagggaggaccctcctctggggccccctgtcctcagcacattccaggcagctgtgccctgacccacaggtacccgtggggatgagaggaggcccaggcctgtgctgccagagccggcagtgtgagctgtaggcagggatggggagggactgtcgctgtgatcagagtgggttaagctgaccaggaacacccatttannnnnnnnnnnnnnnnnnnnnnnnnnnntaaaggaaaagaggacctgtcagataggcagccccatgctacgtgattctttannnnnnnnnnnnnnnnnnnnnaattgtataatttttaaatatctgagttttnnnnnnnnnnnnnnnnnnnnnnnnncttgttatggccttaagaaggggttagtgcatctttcaggggtcactctgccatggggataaaatagctgtttcacaaacagttttattt

SEQ ID NO: 24300 - DNA, 407 bp, Macaca Mulatta
gacagggttggggacagagaccaagggggggttggtttcttcttgccacggtgagaagtcttcagcagcatcctcttccgcctgggagcagcagaggggtgagtggcaaggcaccttgagcgagatcctaggatccgccatggcagccccaacccagccctacctggaaggcagagaagccaaagcccgtgggcttgccttgtgcacggaggtagagagctccagccgccaggccaatctttgctccagcaacaagcacagcccccacacctgccgccacaggtggggctttgggcgccagctctgcctgctacaaacagggagagtactgacctggtgggatctgtcccaccaccttccccaggctcacaggttgtggggatgccatgaagggctctgcctcccca

SEQ ID NO: 24301 - DNA, 454 bp, Macaca Mulatta
tggaaaggtggtagagactcagaagctttccttgttttctctaggcctgctcccagttttcttaacagtttcttttgttgctttctctctcctttgttgctttccatggcagtaatcctcctagagtccaagcagtctgttgtatggagcagggtgtgtgggttttctgggcccatcattatggctgcttcagagtcagaagaaagccatagggcagtaggggagctcctattgcctagcccttctccctttgtggctcccactctagctgcctatttttgctcatcagctggtgagtcagtatgggccaggagttctccctccctaagcccttgctactttatgggttagctttgcaggtttggtggcttgaggggtgggggcaactcaccactgccaggtaactccctgaagggtgggagtggattatcttctaggctcttcccggcggtag

SEQ ID NO: 24302 - DNA, 442 bp, Macaca Mulatta
gaccaaaagagagtaaaatacgctgcagatcttttgagcaatattcgctttggtaccatctctgcacaagacctggtcaattatgttcaatccgtcccaagaatgatgcaagatgctgattgtcacaaacttctcgtagatgctatgaactaccacttgcttccatatcatcaaaacacattacaatctaggcgaacaagaatccgaggcggctgccgagtcctcgtcaccattgggggacgcccaggccttactgagaagtcccttagcagagacattttgtatagagaccctgaaaatgggtggagcaagcttacagaaatgccagccaaaagttttaatcagtgtgtggctgtgatggatggatttctttatgtagccggtggtgaagaccagaatgatgcaagaaatcaagccaagcatgcagtcagcaatttctgca

SEQ ID NO: 24303 - DNA, 234 bp, Macaca Mulatta
  misc_feature (1)...(234): n = A,T,C or G
tccatcgggcgatgtccacagcaacatcttcaaacatgtacaaaatcgattggctttaaacaccctccctccaaattatgcccaattatccccacacataaaaaatcaaaactttaaactaacccccttcccccccaccacaacaaccctcttaaaaataattggctttttagaaacaccagaaaaactcagaaattggcnnnnnnnnnnnnnnnnnnnnnnnnnnnnnnnntt

SEQ ID NO: 24304 - DNA, 465 bp, Macaca Mulatta
  misc_feature (1)...(465): n = A,T,C or G
gaagggacaacggagaacattgcagcccaggctctggagcacattcactccaatgaggtgatcatgaccattggcttctcccgaacagtagaggccttcctccaagaggctgcccgaaagaggaaattccatgtcattgtagcagagtgcgctcctttctgccagnnnnnnnnnnnnnnnnnnnnnnnnnnnnnnnnnnnnnnnnnnnnnnnnnnnnnnnnnnnnnnnnnnnnnnnnnnnnnnnnnnnnnnnnnnnnnnnnnnnnnnnnnnnnnnnnnnnnnnnnnnnnnnnnnnnnnnnnnnnnnnnnnnnnnnnnnnnnnnnnnnnnnnnnnnnnnnnnnnnnnnnnnnnnnnnnnnnnnnnnnnnnnnnnnnnnnnnnnnnnnnnnnnnnnnnagttccccaatgaagaagactcatttcataagtttgtggctcctgaagaagtcctgccattcacagaag

SEQ ID NO: 24305 - DNA, 1368 bp, Macaca Mulatta
gtggtctctgcggcagcatatatctgcacttgtactgtgggacttggggagagattttcgatgcactgtggggaaactttatccatcctgccttgaagagtctccatggaaaccaccaacttaccttttttcaacggatgggacagaagagtttgaactggatggagaaatggtcgcactaccacctgtatagttgggaagttcagggagtgcacgcctgagttatgtgctttgtcattttctttgctaaacaaaagaggctatgaaagaactaaatatgactacataaaaatctatctttgataaattttatttttatgccctacttaatatttgcatcagtataatatatatcagtgagtcttacagaaagatatgcttccataatatgaaatagattattcaataattgagaaactttatgtgtaatcatgagagtataagaatctggattatctaacattgttagccctgtgtatgtacagttcaaaaagttcatttataaaagtagtttcctgttcttagtgtggtatatcacaaattgtgctgaggttattttagtatgtgtatttcattcccgtgcttctgttctgaagtcctggaatacagttttcagtgtaattaattcaactgcacttaacactaatgtccatgttggtatagaaacgtctaaatcctatactctagttgaggaagatcttccataattttatggtattacacagggaaagctatgactgcaggatcagtctaactatactattaggtgcatgtattctcttttcactaacttatacttgtctatctagaatacaggtcttccggtcagctggtcatttaccaggtgtggacttacgttgctgggcttgcagtaagaattgccagcccctcattgtgcgggtctgcgtggagctttaatcagtaaaagcctccactttctgtattatgttaacattggctcatgcatataactacctgctgctgatgtagttctccatcttcaagatttagagtgggttaaccaggtcattacatcttaatttaataacaagcattactgtagagtgattgtgtatagatctgttagctgtcagggtgtgttttttttaacctgttgtgtgcgtgtgggggttaggattagtaaggtgaactgttcaggaattctctgcactagctgtgcagaagagcagataactagcgctgctctggcattaatcccaggaaccactagcagtagtggggcgccgccaatctaacatgagcacaggtgcttcatgacaaacattactagcatgttcaactgcatcatgttctggcactgtattttgaatgacattaatttattaaataaattgtatatattcaata

SEQ ID NO: 24306 - DNA, 407 bp, Macaca Mulatta
tccaagggctcctctgtctgggtgtcttcatcatctgctacttcctgggcgccgccgctttctccttccttgggtggggagctccatatactcctgtaactcctaaagagggaggcagcactgggtgatgcccaggctgaagagccctcagcattcctgccctggaccttcatgccagcccctttccctcccctgaacctggttctgcattccccaccacctcccaggatggcagggaagtgagaggtgggcctttggtcccgcccccatcccctctagattccacccctgaagtctcatcgctttaagcactgtcctttccaggcgcttcttttcgtgtgatgaggccctgtgaagaaggaacaggatatacagatggggggagctggagacagttatgatgaggt

SEQ ID NO: 24307 - DNA, 728 bp, Macaca Mulatta
tggatgtgcaacacagatgtttcttgcttgtacttttggaaccacagaatgttttctcttggctgcaatggcttatgatcgctacgtagccatctacaaccctctcctgtattcagtgaacatgtcacccggagtctacgtgccactcatcactgcttcctacattgctggcattttacatgctactatccatacagtggctacatttagcctgtccttctgtggctccaatgaaattaggcacgtctcttgtaatatgcctcctctccttgctatttcttgttctgacactcacgtaaaccagcttctactcttctactttgtgggctctattgagatagtcactatcctgattgtcctgatctcctatggtttcattcttctggccattctgaagatgcattctgctgaagggaggagaaaagtcttctccacatatggagctcacctaactggagtgacaatttatcatgggacaatcttcttcatgtatgtgagaccaagttccagctacacttcagaccatgacatgatagtgtcaatattttacaccattgtgattcccatgctaaatcccatcatctacagtttgaggaacaaagatgtaaaggaggcaatcaaaagaccgcttgtgagaaactggttcatacataagttacagttttaaaattgagtaaagttgtaaacaatattgggtgtcagtccacacctctatggtcagaaagtaa

SEQ ID NO: 24308 - DNA, 2173 bp, Macaca Mulatta
  misc_feature (1)...(2173): n = A,T,C or G
tctgcaaggcaagtctcatgaacccatgcaggtacatgacttgcacctgtttttagcttatttaatgacgggcttttgggaacaactgcctgcgtgctgagagacagcttcttataaacaaggagagttttgtgtgtgcgagatctctaagccagcgtgggagggagtgcctcaggataagttattatattcattttgttggtttctcccctgccccgttcttggcagaggcattatgttggaagaaaccagtataaggtacactgcttttgtctgnnnnnnnnnnnnagttgtttcccttcactttcagtcttccacacacaaaaaatacctcacagatagagcttcaccaaatcacagattcaggaggaatttggctttcacactggactcagatgtcttcttcagtgtgttggaaatcactggcttcacacaggcccaactccagctggtcagggcagagtgatcgtaactaaaggtcagcggagaatagatcagattcagtgcttttaccttatgcatttcagcatcctggctccccagggtggcaggagctgagggagggccacacactgggaagatttcaagaccactctgtgcactgaagaggtaaaacttgtgctgcaagtcacatcgctgaggcgggaggtcaataccccttggcattttgattagaagannnnnnnnnnnnnnnnnnnnnnnnnnnnnnnnnnnnnnnnnnnnnnnnnnnnnnnnnnnnnnnnnnnnnnnnnnnnnnnnnnnnnnnnnnnnnnnnnnnnnnnnnnnnnnnnnnnnnnnnnnnnnnnnnnnnnnnnnnnnnnnnnnnnnnnnnnnnnnnnnnnnnnnnnnnnnnnnnnnnnnnnnnnnnnnnnnnnnnnnnnnnnnnnnnnnnnnnnnnnnnnnnnnnnnnnnnnnnnnnnnnnnnnnnnnnnnnnnnnnnnnnnnnnnnnnnnnnnnnnnnnnnnnnnnnnnnnnnnnnnnnnnnnnnnnnnnnnnnnnnnnnnnnnnnnnnnnnnnnnnnnnnnnnnnnnnnnnnnnnnnnnnnnnnnnnnnnnnnnnnnnnnnnnnnnnnnnnnnnnnnnnnnnnnnnnnnnnnnnnnnnnnnnnnnnnnnnnnnnnnnnnnnnnnnnnnnnnnnnnnnnnnnnnnnnnnnnnnnnnnnnnnnnnnnnnnnnnnnnnnnnnnnnnnnnnnnnnnnnnnnnnnnnnnnnnnnnnnnnnnnnnnnnnnnnnnnnnnnnnnnnnnnnnnnnnnnnnnnnnnnnnnnnnnnnnnnnnnnnnnnnnnnnnnnnnnnnnnnnnnnnnnnnnnnnnnnnnnnnnnnnnnnnnnnnnnnnnnnnnnnnnnnnnnnnnnnnnnnnnnnnnnnnnnnnnnnnnnnnnnnnnnnnnnnnnnnnnnnnnnnnnnnnnnnnnnnnnnnnnnnnnnnnnnnnnnnnnnnnnnnnnnnnnnnnnnnnnnnnnnnnnnnnnnnnnnnnnnnnnnnnnnnnnnnnnnnnnnnnnnnnnnnnnnnnnnnnnnnnnnnnnnnnnnnnnnnnnnnnnnnnnnnnnnnnnnnnnnnnnnnnnnnnnnnnnnnnnnnnnnnnnnnnnnnnnnnnnnnnnnnnnnnnnnnnnnnnnnnnnnnnnnnnnnnnnnnnnnnnnnnnnnnnnnnnnnnnnnnnnnnnnnnnnnnnnnnnnnnnnnnnnnnnnnnnnnnnnnnnnnnnnnnnnnnnnnnnnnnnnnnnnnnnnnnnnnnnnnnnnnnnnnnnnnnnnnnnnnnnnnnnnnnnnnnnnnnnnnnnnnnnnnnnnnnnnnnnnnnnnnnnnnnnnnntctttttcttcttttcccctacccctatcttgggacattcagaaactgcctgggtggtttgagaagagacaacccagtttgacctgcaatataaggatccattcgtaatctctctcactgatgttatttccccatctgctgtcttggttcatctcaccacagaagggcatttagtcctaaccagccatcggctgcatatggcagcaggatggcacttcccatttctctgtggttagtgctcaagtgaaaacctctttcagctgagtcctctgagcttctgctgttgagtcctgggtggctgatggaatgattgaggaggtctggtcaccctcaagcgccatcatcaccttgtttctgtgggctt

SEQ ID NO: 24309 - DNA, 459 bp, Macaca Mulatta
tgtgtctgtcgtcacacttgtcaccttggacgtcactgggacatccccactgccacatttgtttttaaacaaccacattctctctggggacccattgcctgacacctgcagcaaccttgggaggcagctctgcatcctacacctttgtctcattgcttttctctgcagtgactctgcttttgctctgttaggaacttgaacacaaaaattaaatttgcttaaaagcccagttcctatgaaaaagatcagtgccccctttggaagaacctggcaggaccaccatggccacagctgctgagcgaccattctgtgtggaagagaaggttttgcgattggaaaaaagctttacctccagacatgttaccactcacagatacttttgtgctacttacagaaggagtttgccccctttttaatggcagtaaaaagaaaagggagctctttctttaaatgctattt

SEQ ID NO: 24310 - DNA, 777 bp, Macaca Mulatta
ggagaagacgaggagctggagcacttgaggttgcttgaaccacattgctttcctttgtctttggttccgacaaaattctgtccatcacctcctgccttgaaagatggatttgttcaagatgaaggtacaacgtttcctgtggggaaaaatgtagtgtacacttgcaatgaaggatactctcttattggaaacccagtggccagatgtggagaagatttacggtggcttgttggggaaatgcattgtcagaaaattgcctgtgttctacctgtactgatggatggcatacagagtcacccccaaaaacctttctacacagttggtgagaaggtgactgtttcctgttcaggtggcatgtccttagaaggtccttcaacatttctctgtggctccagccttaagtggagtcctgagatgaagaatacccgctgtgtacaaaaagacaatcctttaacacaagcagtgcctgaatgtcagcgctggaaagaactgcaaaattcaagatgtgtttgtaaaatgccctatgaatgtggaccttccttggatgtatggtgctccagatgagaaaagccaaaggatccggcccgtggaccgttttgcaaaagcaatgttccccccctgtccgaataaaaaattacccccctttccgggtaagggaaaagctgccacttctgccctggccccaacctggaaaaaagcttggggggggccctggcccaccgggggggggaaaaatggggaagccttatgaaccgcgcaaaagaggttaccgacccc

SEQ ID NO: 24311 - DNA, 2023 bp, Macaca Mulatta
  misc_feature (1)...(2023): n = A,T,C or G
aagactaattaggctgctgttgtaccattttaagcaggaggnnnnnnnnnnnnnnnnnnnnnnnnnnnnnnnnnnnnnnnnnnnnnnnnnnnnnnnnnnnnnnnnnnnnnnnnnnnnnnnnnnnnnnnnnnnnnaggataagataaagagtcagcgaatgagaatcagcacagagttttcaaagctgcacaacttcctggttgaagaagaggacctgtttcttcagagactgaacaaagaagaagaagagtcaaagaagaagctgaatgagaacacattaaaactcaatcaaatgatcgcttcattgaagaagctcatcttagaggtgggggagaagagccaggcccccaccctggagctgcttcannagaatccaaaagaagtgttgaccaggnaggagtgagatccaggatatgaattattctcttgaagctgtaaaggtgaagacagtgtgccagataccattgatgaagganatgctaaagcagttccaagngtggctgtaaacctagctgaagacacagctcatcccaaactcgtcttctcccaggaagggagatacgtgaaaaatacagcatcagccagttcttggccagtgttttctacagcatggaactacttcgctggatggagaaatcctcagaagaccgcttatgtagagagatttcagcacttaccctgtgttctgggaaaaaacgttttcacctcagggaaacattactgggaagttgagagnnnnnnnnnnnnnnnnnnnnnnnnnnnnnnnnnnnnnnnnnnnnnnnnnnnnnnnnnnnnnnnnnnnnnnnnnnnnnnnnnnnnnnnnnnnnnnnnnnnnnnnnnnnnnnnnnnnnnnnnnnnnnnnnnnnnnnnnnnnnnnnnnnnnnnnnnnnnnnnnnnnnnnnnnnnnnnnnnnnnnnnnnnnnnnnnnnnnnnnnnnnnnnnnnnnnnnnnnnnnnnnnnnnnnnnnnnnnnnnnnnnnnnnnnnnnnnnnnnnnnnnnnnnnnnnnnnnnnnnnnnnnnnnnnnnnnnnnnnnnnnnnnnnnnnnnnnnnnnnnnnnnnnnnnnnnnnnnnnnnnnnnnnnnnnnnnnnnnnnnnnnnnnnnnnnnnnnnnnnnnnnnnnnnnnnnnnnnnnnnnnnnnnnnnnnnnnnnnnnnnnnnnnnnnnnnnnnnnnnnnnnnnnnnnnnnnnnnnnnnnnnnnnnnnnnnnnnnnnnnnnnnnnnnnnnnnnnnnnnnnnnnnnnnnnnnnnnnnnnnnnnnnnnnnnnnnnnnnnnnnnnnnnnnnnnnnnnnnnnnnnnnnnnnnnnnnnnnnnnnnnnnnnnnnnnnnnnnnnnnnnnnnnnnnnnnngacatatggatgtagcagccatattggactcagaacacaggaatggtggaaaggtagaagaaacatagtttttgttgccaatgtgaaattgttgaaatttccttaatcctgagcttcttatatgggataattatgcccttattgtctaggacaatnttagttgtatttggttacttgcagcctgaagtaccctaactggcactaaagggacatagtgtgaacatcccacagtataggcttatgtcatgtttgtgaaatttgacaaaggcatagaatctttttctatccagtcaggcattgcctgttctttccagtaactactgattcccccacttttctgtcttagaaaattgtgggaatcccccctcactctgcccatgttgcactctctgttcccaaccatgtctctgccctcagctattaactgtactgtgtatttgtcaagttcctatattgtatgtacagggttattcatgtcatcatgagaatgttggaacgcttgttaagtacttaccttttgctagcctcttcatatgctgttgcatatgattctcatcacaactcagtgagatggaaagtaaaatcctatttgtacaaatgagaaaaccgaactctttagagtaactagctcagtattggctaactggtaaatggcagtgttgggactaaaatcca

SEQ ID NO: 24312 - DNA, 388 bp, Macaca Mulatta
  misc_feature (1)...(388): n = A,T,C or G
gttcatccacgactgggtgtacagcggtgtgttcagagacgcttatggcgagttcatgattcaggtgaaccatgagtacctcagcttccgagnagataagtcgtactggacacatggctacgtgctcatctccaaagaggtggaggactgtgttcccgtgtttctgaagcacattgcccacgacgtgtacgtctgtgggaagaccattaacctgctgaagctctgctgcccccggngcattacctctgttggtccgacgtccccgtcccccggatctcagtgattttctccctcgaggagttgaaggagattgagaaggactgtgccgtctacgtcgggcgcatggagagagtggcccgccacagctctgtcagcaaggaggagaagg

SEQ ID NO: 24313 - DNA, 1176 bp, Macaca Mulatta
  misc_feature (1)...(1176): n = A,T,C or G
agaataccaggagcgatatggttctcgccctgtctgggctgactaccgccgcaaccacaagggtggtgtacccccacagcggactcggaaaacatgtatnnnnnnnnnnnnnnnnnnnnnnnnnnnnnnnnnnnnnnnnnnnnnnnnnnnnnnnnnnnnnnnnnnnnnnnnnnnnnnnnnnnnnnnnnnnnnnnnnnnnnnnnnnnnnnnnnnnnnnnnnnnnnnnnnnnnnnnnnnnnnnnnnnnnnnnnnnnnnnnnnnnnnnnnnnnnnnnnnnnnnnnnnnnnnnnnnnnnnnnnnnnnnnnnnnnnnnnnnnnnnnnnnnnnnnnnnnnnnnnnnnnnnnnnnnnnnnnnnnnnnnnnnnnnnnnnnnnnnnnnnnnnnnnnnnnnnnnnnnnnnnnnnnnnnnnnnnnnnnnnnnnnnnnnnnnnnnnnnnnnnnnnnnnnnnnnnnnnnnnnnnnnnnnnnnnnnnnnnnnnnnnnnnnnnnnnnnnnnnnnnnnnnnnnnnnnnnnnnnnnnnnnnnnnnnnnnnnnnnnnnnnnnnnnnnnnnnnnnnnnnnnnnnnnnnnnnnnnnnnnnnnnnnnnnnnnnnnnnnnnnnnnnnnnnnnnnnnnnnnnnnnnnnnnnnnnnnnnnnnnnnnnnnnnnnnnnnnnnnnnnnnnnnnnnnnnnnnnnnnnnnnnnnnnnnnnnnnnnnnnnnnnnnnnnnnnnnnnnnnnnnnnnnnnnnnnnnnnnnnnnnnnnnnnnnnnnnnnnnnnnnnnnnnnnnnnnnnnnnnnnnnnnnnnnnnnnnnnnnnnnnnnnnnnnnnnnnnnnnnnnnnnnnnnnnnnnnnnnnnnnnnnnnnnnnnnnnnnnnnnnnnnnnnnnnnnnnnnnnnnnnnnnnnnnnnnnnnnnnnnnnnnnnnnnngggaagagagccagagggactaggagatatgtgtatgtaggtttatatgatgggatatcaccctgaagagttgtgtcttttgtagccaatgacaaatccaggaaataatgttgctgatagggataaatcttgaggctgagggagggcaggacagatgggtatgggaaaccccaacccctatatattgtaaatagatgggctgggctaaacattgttgctgtttcagacttacaccaactcagcttttacacaataaagctctactgt

SEQ ID NO: 24314 - DNA, 317 bp, Macaca Mulatta
ttacattggtaggaaacttcctgcctaacattcctgatgcgaaagtcacagagattacccacttgggagaagaatcttataaataaaatttgttgccagttatttgttagttttaaaattttctgtggcttctgtgagtcacggaggttaatgcaatacatttggtttcagggagatacgtctggggactataagaaagctcttctgctgctctgtggaggagaagactaatgtgtcacggggaagagctccctgctgtgtgcctctgccgccccactgccttccttcagcacctctagctgcatttgtatgccagg

SEQ ID NO: 24315 - DNA, 706 bp, Macaca Mulatta
tgtgtgtaacgcgcatgtctggactatagcaagttcttaggcatgtcaataggcgtgacaatggttggagaaggtatccttagtctgttggagcatggagaagagtacacattttctctaccttgtgcatatgctcggtcaattttgactgttccttgggtagaactgggtggcaaagtcagtgtcaactgtgcaaaaactggatattcagccagcatcacttttcataccaagccattttatggtggcaaactgcatcgggttacagctgaagtaaagcacaacatcaccaacactgtggtatgcaaagtgcaaggggaatggaatagtgttcttgagttcacatatagcaatggagaaacaaagtatgtggacttgactaaattgacagtgacgaagaaaagagtgagacctctggagaagcaggatccgtttgaatcccggcgattgtggaaaaatgtgacagactctctgagagaatctgaaattgataaggccacagagcataagcataccctggaagaacgtcagaggactgaagaaaggcatcgtacggaaacaggcacaccttggaaaacaaaatattttactaaagagggagatggctgggtttatcataaaccactttggaaaataattccaacaacacaaacagcagagtgacacgtactgtctaaaactcgaacaaatgaggttcttctctgtt

SEQ ID NO: 24316 - DNA, 769 bp, Macaca Mulatta
tgaaagccatcgaatgtggcgattcagtaggcagatagagtgacttggaatcacttttcaccttgtcattttttggccagtacagatgatggctttgtgtataatttggatgcaggttcagataagccaatttttacacttaatgcgcacaatgatgaaatctctggtcttgatcttagcagtcaaatcaagggctgtctcgtgacagcttcagttgacaaatatgtgaagatctgggacatcttaggagataggccaagtctagttcattctagggacatgaaaatgggagttctcttatgatattcatgttgccctgatttgccatttatttatgcctttggaggtcaaaaagaagggctttgggtctgggatataagcacagtctcttcggtaaatgaagcatttggaagacgagagaggcttgttcttgggagtgcaagaaattcatctattagtggcccttttggcagcaggagctcagacacacccatggagtcttaatgaagatcatctaatttcctctttaccttaactggaaattttgaaaagttggcctaaaaatgttccatgtgtggcagcaaccatgcagagtgactgagacacaattcatttctgattgcctgacattcctttctgcaactgtggtggcaccacaaacagagccggtctttgtgcttgctcttcaaatggatggtttgtaaggctcttgttgcatttcttaaaaaagagtaataaaaaggatttttaaaaagtaattccttaaaca

SEQ ID NO: 24317 - DNA, 811 bp, Macaca Mulatta
tcctatagactcagcattggtgagtccatcaccaaccgacgagattccactacaaccttcagtagcaccatgagcttggccaaacttctacaagaacgaggcatctctgccaaagtgtaccacagcccaatttcagagaaccccctccagcctctccctaaatccctggctatcccttccacaccaccaaattcaccatctcactcaccttgcccttctcctttgccctttgagcctcgagtgcatctctctgaaaattttttggcctctcgaccagctgagacatttctccaggagatgtatggcttgagaccctcccggaaccctcctgatgttggccagttgaagatgaatttagtggacaggctgaagagactggggatagccagagtggtcaagaaccctggtgcccaagagaatggaagatgccaggaggcagaaattggtcttcaaaaaccagattctgctgtttatttaaattcaggtagcagtttattaggtggactaaggaggaatcagagtcttccagtcataatgggtagctttgctgccccagtttgcacatcctcacccaaaatgggtgtcctgaaggaggactgaggttcaccagttaactgacctcttatacaaattagcacatgagggatagatacgcactgaaacatgtagtctggtctgagatgagagaaaaggaatgttgcacaagggttgtgaatgtgaaagggggaatggaggaatggaaataacttttagggagccctaatggaggaagtcgggcaaattgaaagtataagggaatgggccatgagtg

SEQ ID NO: 24318 - DNA, 259 bp, Macaca Mulatta
catcagccatgagggtcttgcagccatcagagacgtggacatgtaaacacgcagccatcagccatgagggtcttgtatctcctcttctcgttcctcttcatattcctgatgcctcttccaggtgtttttggtggtataggcgatcctgttacctgccttaagaatggagccatatgtcatccagtcttttgccctagaaggtataaacaaattggcacctgtggtctccctggaacaaaatgctgcaaaaagccatgag

SEQ ID NO: 24319 - DNA, 138 bp, Macaca Mulatta
agggagacgggcatgaagggggccgtcctcatcaatggcctgccccgggacctgcgctgcttccggaaggtgtcctgctacatcatgcaggatgacatgctgctgccacacctcactgtgcaggaagccatgatggtg

SEQ ID NO: 24320 - DNA, 654 bp, Macaca Mulatta
  misc_feature (1)...(654): n = A,T,C or G
ttattattttcctaatcactaagagaactttccaatctaaaaactaaacaaatcatgtataaggtcttgtgcctaagcacatttaattattttattcaaatcatttatttccctctgttgttctgactatccaaagctacaccatcaattttatgatttttctgttctcaaatactgctgggacaacttcacgttttgatttaagcatttaataaataggttgtatgtatttttttctctgcatgtttttagatcagcaggtcaaaaggtacaagattgttacttctatcaaatttttatggaaaaaaatgagaaagttggagttcccacaattcagcagttgttagaatggtctttcatcaacagtaacctgaaatttgcagaggcaccatcatgtctgattattcagatgcctcgatttggaaaagactttaaacnnnnnnnnnnnnnnnnnnnttctctggaattaaatataaccgatttacttgaagacactcccagacagtgccggatatgtggagggcttgcaatgtatgagtgtagagaatgctacgatgatccggacatctcagctggaaaaatcaagcagttttgtaaaacctgcaacactcaagtccaccttcatcccaagaggctgaaatcataaatataacc

SEQ ID NO: 24321 - DNA, 2038 bp, Macaca Mulatta
  misc_feature (1)...(2038): n = A,T,C or G
nggctctattggtgtaaattcaaaaagaaactatgaaacagttccatgtgattctaccattagtaaagttattcctgggaatgggaaattgttgttgggctccaatcaaaatgaaattgtctctctaaaaggagacatttataactttcgactttggaattttaccatgaatgccaaaatcctctccaatctcagctgtaacatgaaagggaatgtagtcgactggcaaaatgacttctggaatatcccaaaccttgctctgaaagctgaaagcaacctaagctgtggnnnnnnnnnnnnnnnnnnnnnnnnnnnnnnnnnnnnnnnnnnnnnnnnnnnnnnnnnnnnnnnnnnnnnnnnnnnnnnnnnnnnnnnnnnnnnnnnnnnnnnnnnnnnnnnnnnnnnnnnnnnnnnnnnnnnnnnnnnnnnnnnnnnnnnnnnnnnnnnnnnnnnnnnnnnnnnnnnnnnnnnnnnnnnnnnnnnnnnnnnnnnnnnnnnnnnnnnnnnnnnnnnnnnnnnnnnnnnnnnnnnnnnnnnnnnnnnnnnnnnnnnnnnaggttggtgctttgggcccttctagtttacaatgctaccaataatactaatttagaaggaaaaatcattcagcagaagctcctaaaaaataatgagtccttggatgaaggcttaaggctacatacagtgaacgtgagacaactgggnnnnnnnnnnnnnnnnnnnnnnnnnnnnnnnnnnnnnnnnnnnnnnnnnnnnnnnnnnnnnnnnnnnnnnnnnnnnnnnnnnnnnnnnnnnnnnnnnnnnnnnnnnnnnnnnnnnnnnnnnnnnnnnnnnnnnnnnnnnnnnnnnnnnnnnnnnnnnnnnnnnnnnnnnnnnnnnnnnnnnnnnnnnnnnnnnnnnnnnnnnnnnnnnnnnnnnnnnnnnnnnnnnnnnnnnnnnnnnnnnnnnnnnnnnnnnnnnnnnnnnnnnnnnnnnnnnnnnnnnnnnnnnnnnnnnnnnnnnnnnnnnnnnnnnnnnnnnnnnnnnnnnnnnnnnnnnnnnnnnnnnnnnnnnnnnnnnnnnnnnnnnnnnnnnnnnnnnnnnnnnnnnnnnnnnnnnnnnnnnnnnnnnnnnnnnnnnnnnnnnnnnnnnnnnnnnnnnnnnnnnnnnnnnnnnnnnnnnnnnnnnnnnnnnnnnnnnnnnnnnnnnnnnnnnnnnnnnnnnnnnnnnnnnnnnnnnnnnnnnnnnnnnnnnnnnnnnnnnnnnnnnnnnnnnnnnnncagatggattttgagagtggacaagtagatccactggcgtctgtaattttgcctccaaacttacttgagaatttaagtcaagaagattctgtattagtcagaagagcacagtttactttcttcaacaaaactggacttttccagnnnnnnnnnnnnnnnnnnnnnnnnnnnnnnnnnnnnnnnnnnnnnnnnnnnnnnnnnnnnnnnnnnnnnnnnnnnnnnnnnnnnnnnnnnnnnnnnnnnnnnnnnnnnnnnnnnnnnnnnnnnnnnnnnnnnnnnnnnnnnnnnnnnnnnnnnnnnnnnnnnnnnnnnnnnnnnnnnnnnnnnnnnnnnnnnnnnnnnnnnnnnnnnnnnnnnnnnnnnnnnnnnnnnnnnnnnnnnnnnnnnnnnnnnnnnnnnnnnnnnnnnnnnnnnngaccttccaagaagtgcctcacagttagatgccagaaacactaaagtcctcactttcatcagctatannnnnnnnnnnnnnnnnnnnnnnnnnnnnnnnnnnnnnnnnnnnnnnnnnnnnnnnnnnnngaaattgcgaagggattatccctccaaaatcttgatgaacctgagtgcagccctgctgttcctgaatctcctcttcctcctagatggatggatcacctccttcaatgtggatggactttgcattgctgttgcagtcctgttgcatttcttccttctggcaacctttacctggatggggctagaagcaattcacatgtacatagcgctagttaaagtatttaacacttacattcgccgat

SEQ ID NO: 24322 - DNA, 211 bp, Macaca Mulatta
ttaccttgtaccacttttacaatagaaaagatatagggtacactgactcaaaagaatatagtacagacattaaagataacagtatacctttacatgtattaacatggaaatgtaaaaacagctcacattgtgtgcttcctctttgtcaaccagtgttcaaaggacttggcattgtttttacttttgtattgaagcccttttgtattttctt

SEQ ID NO: 24323 - DNA, 952 bp, Macaca Mulatta
  misc_feature (1)...(952): n = A,T,C or G
atgcaccgcgccagcagagactacaccaagtacatgcgtgtctcggaggagatgggcggcggccccggagctccgcacgagggccccctgcannnnnnnnnnnnnnnnnnnnnnnnnnnnnnnnnnnnnnnnnnnnnnnnnnnnnnnnnnnnnnnnnnnnnnnnnnnnnnnnnnnnnnnnnnnnnnnnnnnnnnnnnnnnnnnnnnnnnnnnnnnnnnnnnnnnnnnnnnnnnnnnnnnnnnnnnnnnnnnnnnnnnnnnnnnnnnnnnnnnnnnnnnnnnnnnnnnnnnnnnnnnnnnnnnnnnnnnnnnnnnnnnnnnnnnnnnnnnnnnnnnnnnnnnnnnnnnnnnnnnnnnnnnnnnnnnnnnnnnnnnnnnnnnnnnnnnnnnnnnnnnnnnnnnnnnnnnnnnnnnnnnnnnnnnnnnnnnnnnnnnnnnnnnnnnnnnnnnnnnnnnnnnnnnnnnnnnnnnnnnnnnnnnnnnnnnnnnnnnnnnnnnnnnnnnnnnnnnnnnnnnnnnnnnnnnnnnnnnnnncccataaagtgagtctgtcctcttggtaccatgatcggggttgggccaagatctccaacatgacttttagcaatggaaaactaatagttaatcaggatggcttttattacctgtatgccaacatttgctttcgacatcatgaaacttcgggagacctagctacagagtatcttcagctaatggtgtacgtcactaaaaccagcatcaaaatcccaagttctcataccctgatgaaaggaggaagcaccaaatattggtcagggaattctgaattccatttttattctataaacgttggtggattttttaagttacggtctggggaggaaatcagcgtcgaggtctccaacccctccctactggatccggatcaggatgcaacgtactttggggcttttaaagttcgcgatatagattga

SEQ ID NO: 24324 - DNA, 73 bp, Macaca Mulatta
atgaattgtgtctggctgggcagaagtgctgcaccacaggctgtggtcggatctgccgagacattcctaaggg

SEQ ID NO: 24325 - DNA, 453 bp, Macaca Mulatta
accaccccagtcccaaatccagtcttgtagccctcacccagccctggattgcttctctaagccggtgttcccatgcacagggccattcaggaagggctgggggagtgtgtgtggcaataaagcttgaaggcattgtgggagcatgagcctgtgtcctggggtacagcttgggaagagtggggacttctggaaccaaaggagctagtaggaccaaggaaagaagctccagagttgggggctcccagcagagaatgacccagagcccaagggccagaatacctggctgagcagacttagagatctgccactgaccccagcgtggcctgggcccagcctggctccctccctccctgtctccatggaggctggttgtggtgggcctcattccaggaaagggccaggaccaaaatgaccattttctctcagcccagtgccagtcttttccccagggag

SEQ ID NO: 24326 - DNA, 1804 bp, Macaca Mulatta
  misc_feature (1)...(1804): n = A,T,C or G
ccttacagtttcctgcccggctctgaacgcccctgcagatggcagaaagtttggaagcaagtacttagtggatcatgaagtccattttgcctgcaaccctgggttccggctggtcgggcccagcagcgtggtgtgtcttcccaatggcacctggacaggggagcagccccgctgtagaggtantatcagtgaatgctccagccagccttgtcaaaatggtggtacgtgtgtagaaggagtcaaccagtacagatgcatttgtcctccaggaaggaccgggaaccgctgtcagcatcaggcccagactgngccgcccccgagggcagcgtggccggcgactctgccttcagccgcgcgccgcgctgtgcgcaggtggagcgggctcagcactgcagctgcgaggccggattccacctgagcggcgccgccggcgacagcgtctgcnnnnnnnnnnnnnnnnnnnnnnnnnnnnnnnnnnnnnnnnnnnnnnnnnnnnnnnnnnnnnnnnnnnnnnnnnnnnnnnnnnnnnnnnnnnnnnnnnnnnnnnnnnnnnnnnnnnnnnnnnnnnnnnnnnnnnnnnnnnnnnnnnnnnnnnnnnnnnnnnnnnnnnnnnnnnnnnnnnnnnnnnnnnnnnnnnnnnnnnnnnnnnnnnnnnnnnnnnnnnnnnnnnnnnnnnnnnnnnnnnnnnnnnnnnnnnnnnnnnnnnnnnnnnnnnnnnnnnnnnnccagtgtgagcggaacccctgccctatggacagcaggccctgccgccatctgcccaagaccatctccttccattacctctctctgccttccaacctgaagacgcccatcacgctcttccgcatggccaccgcctctgcccccggccgagctgggcccaacagcctgcgctttgggatcgtgggtggcagcagccgcggccactttgtgatgcagcgctcagaccggcagactggggagctcatcctcgtgcagaccctggcggggcctcagacgctggaggtggacgtcgacatgtcggaatacctggaccgctccttccaggccaaccacgtgtccaaggtcaccatnnnnnnnnnnnnnnnnnnnnnnnnnnnnnnnnnnnnnnnnnnnnnnnnnnnnnnnnnnnnnnnnnnnnnnnnnnnnnnnnnnnnnnnnnnnnnnnnnnnnnnnnnnnnnnnnnnnnnnnnnnnnnnnnnnnnnnnnnnnnnnnnnnnnnnnnnnnnnnnnnnnnnnnnnnnnnnnnnnnnnnnnnnnnnnnnnnnnnnnnnnnnnnnnnnnnnnnnnnnnnnnnnnnnnnnnnnnnnnnnnnnnnnnnnnnnnnnnnnnnnnnnnnnnnnnnnnnnnnnnnnnnnnnnnnnnnnnnnnnnnnnnnnnnnnnnnnnnnnnnnnnnnnnnnnnnnnnnnnnnnnnnnnnnnnnnnnnnnnnnnnnnnnnnnnnnnnnnnnnnnnnnnnnnnnnnnnnnnnnnnnnnnnnnnnnnnnnnnnnnnnnnnnnnnnnnnnnnttctagtcgtgcgggggggcctagtcatgcctctgcgtatgtagcataagaagtggagtctcctcccatgacccacagcacgttgttcttacctgccttttcctctgtgacatgcctgcctgccttctcatcagagagccacaggagggccttaaaccccacgcagatccttctagaccaaggacccattgttaaaagcatggattctgcctgagttacttcccttttgagaaatcatatctcaaatacataacctggtaatataactggaaaaataaaagcaattgctccttcc

SEQ ID NO: 24327 - DNA, 957 bp, Macaca Mulatta
  misc_feature (1)...(957): n = A,T,C or G
tcctgcgacggcttcttcaccaactataactggcgggaggagcacttggagcggatgctggggcaggctggcgagcgccgggctgacgtgtacgtgggtgtggacgtgtttgctcgggggaacgtggtcggaggccgattcgacacagacaannnnnnnnnnnnnnnnnnnnnnnnnnnnnnnnnnnnnnnnnnnnnnnnnnnnnnnnnnnnnnnnnnnnnnnnnnnnnnnnnnnnnnnnnnnnnnnnnnnnnnnnnnnnnnnnnnnnnnnnnnnnnnnnnnnnnnnnnnnnnnnnnnnnnnnnnnnnnnnnnnnnnnnnnnnnnnnnnnnnnnnnnnnnnnnnnnnnnnnnnnnnnnnnnnnnnnnnnnnnnnnnnnnnnnnnnnnnnnnnnnnnnnnnnnnnnnnnnnnnnnnnnnnnnnnnnnnnnnnnnnnnnnnnnnnnnnnnnnnnnnnnnnnnnnnnnnnnnnnnnnnnnnnnnnnnnnnnnnnnnnnnnnnnnnnnnnnnnnnnnnnnnnnnnnnnnnnnnnnnnnnnnnnnnnnnnnnnnnnnnnnnnnnnnnnnnnnnnnnnnnnnnnnnnnnnnnnnnnnnnnnnnnnnnnnnnnnnnnnnnnnnnnnnnnnnnnnnnnnnnnnnnnnnnnnnnnnnnnnnnnnnnnnnnnnnnnnnnnnnnnnnctctgcccaggcctctgcagctgcacagcccctgctacacctgggctgcctgggaggcttcctggtgtggtgtctggaccccacggccttgggtcatactgcggctggtctaggtggggtctgttgtggtccttccacggtgtcaatggcctgaagtcccttgcttttgggaggtctctcacccccaggccacatagggccaatggtgggggttccctaaatgttgggcagcgctgagggctgctgggatgctctgtgaccccagctggagcccacaccta

SEQ ID NO: 24328 - DNA, 3930 bp, Macaca Mulatta
  misc_feature (1)...(3930): n = A,T,C or G
tggaacatggaagcaaccaagctttaagaagcacagctttggagatactccatgagtctgcaccgctttcaggggaactagcacttaagaccttgtgtaacaaaatggacactggggacacagctctaggacaaaaggctacctcaaggtctggagaaactgataaagcatcaggtagatggagacaggaacaatcggctgttattaagatgagcacttttggcagtcaagaaggacagcggcaaccacaaatagagcctgagcaaatcggaaacacagcatcagcacaactgtttggttctgggaaactggcctcccctagtgaagtggtgcagcaagtcacagagaagcaatatcgacagcatcgtccgagtccttactcannnnnnnnnnnnnnnnnnnnnnnnnnnnnnnnnnnnnnnnnnnnnnnnnnnnnnnnnnnnnnnnnnnnnnnnnnnnnnnnnnnnnnnnnnnnnnnnnnnnnnnnnnnnnnnnnnnnnnnnnnnnnnnnnnnnnnnnnnnnnnnnnnnnnnnnnnnnnnnnnnnnnnnnnnnnnnnnnnnnnnnnnnnnnnnnnnnnnnnnnnnnnnnnnnnnnnnnnnnnnnnnnnnnnnnnnnnnnnnnnnnnnnnnnnnnnnnnnnnnnnnnnnnnnnnnnnnnnnnnnnnnnnnnnnnnnnnnnnnnnnnnnnnnnnnnnnnnnnnnnnnnnnnnnnnnnnnnnnnnnnnnnnnnnnnnnnnnnnnnnnnnnnnnnnnnnnnnnnnnnnnnnnnnnnnnnnnnnnnnnnnnnnnnnnnnnnnnnnnnnnnnnnnnnnnnnnnnnnnnnnnnnnnnnnnnnnnnnnnnnnnnnnnnnnnnnnnnnnnnnnnnnnnnnnnnnnnnnnnnnnnnnnnnnnnnnnnnnnnnnnnnnnnnnnnnnnnnnnnnnnnnnnnnnnnnnnnnnnnnnnnnnnnnnnnnnnnnnnnnnnnnnnnnnnnnnnnnnnnnnnnnnnnnnnnnnnnnnnnnnnnnnnnnnnnnnnnnnnnnnnnnnnnnnnnnnnnnnnnnnnnnnnnnnnnnnnnnnnnnnnnnnnnnnnnnnnnnnnnnnnnnnnnnnnnnnnnnnnnnnnnnnnnnnnnnnnnnnnnnnnnnnnnnnnnnnnnnnnnnnnnnnnnnnnnnnnnnnnnnnnnnnnnnnnnnnnnnnnnnnnnnnnnnnnnnnnnnnnnnnnnnnnnnnnnnnnnnnnnnnnnnnnnnnnnnnnnnnnnnnnnnnnnnnnnnnnnnnnnnnnnnnnnnnnnnnnnnnnnnnnnnnnnnnnnnnnnnnnnnnnnnnnnnnnnnnnnnnnnnnnnnnnnnnnnnnnnnnnnnnnnnnnnnnnnnnnnnnnnnnnnnnnnnnnnnnnnnnnnnnnnnnnnnnnnnnnnnnnnnnnnnnnnnnnnnnnnnnnnnnnnnnnnnnnnnnnnnnnnnnnnnnnnnnnnnnnnnnnnnnnnnnnnnnnnnnnnnnnnnnnnnnnnnnnnnnnnnnnnnnnnnnnnnnnnnnnnnnnnnnnnnnnnnnnnnnnnnnnnnnnnnnnnnnnnnnnnnnnnnnnnnnnnnnnnnnnnnnnnnnnnnnnnnnnnnnnnnnnnnnnnnnnnnnnnnnnnnnnnnnnnnnnnnnnnnnnnnnnnnnnnnnnnnnnnnnnnnnnnnnnnnnnnnnnnnnnnnnnnnnnnnnnnnnnnnnnnnnnnnnnnnnnnnnnnnnnnnnnnnnnnnnnnnnnnnnnnnnnnnnnnnnnnnnnnnnnnnnnnnnnnnnnnnnnnnnnnnnnnnnnnnnnnnnnnnnnnnnnnnnnnnnnnnnnnnnnnnnnnnnnnnnnnnnnnnnnnnnnnnnnnnnnnnnnnnnnnnnnnnnnnnnnnnnnnnnnnnnnnnnnnnnnnnnnnnnnnnnnnnnnnnnnnnnnnnnnnnnnnnnnnnnncaccctggcaggatgttgaagggtgtcagcagttcatccctgaaggaaaagaaattgtctcctggggacagggttgtgtatgactatgacgtctgtcggaaaccctataagaagtgggaggactctgaaacaccaaagcaaggctacagggacatttcctgcttgagttctttaaaacatggtggagaatatttcatggatcctgcggtgccattgcagggagtaccaagcatgtttggaactacctgtgaaaacaggaaacgccggaaagagaagagcgtaggggatgaagaggacacccccatgatctgcagcagcatcgtaagcactcccatgggcatcatggcttccgattatgaccccaaactgcagatgcaggaaggagtcaggagtggatttgccgtggctggacacgaaaacctttctcatggtcacacggaacgctttgacccatgtcggccccaactgcagcctggaagtccatctcttgtgtcagaggagtcaccttcagccattgattcggacaagatgtcagacctagggggcaggaannnnnnnnnnnnnnnnnnnnnnnnnnnnnnnnnnnnnnnnnnnnnnnnnnnnnnnnnnnnnnnnnnnnnnnnnnnnnnnnnnnnnnnnnnnnnnnnnnnnnnnnnnnnnnnnnnnnnnnnnnnnnnnnnnnnnnnnnnnnnnnnnnnnnnnnnnnnnnnnnnnnnnnnnnnnnnnnnnnnnnnnnnnnnnnnnnnnnnnnnnnnnnnnnnnnnnnnnnnnnnnnnnnnnnnnnnnnnnnnnnnnnnnnnnnnnnnnnnnnnnnnnnnnnnnnnnnnnnnnnnnnnnnnnnnnnnnnnnnnnnnnnnnnnnnnnnnnnnnnnnnnnnnnnnnnnnnnnnnnnnnnnnnnnnnnnnnnnnnnnnnnnnnnnnnnnnnnnnnnnnnnnnnnnnnnnnnnnnnnnnnnnnnnnnnnnnnnnnnnnnnnnnnnnnnnnnnnnnnnnnnnnnnnnnnnnnnnnnnnnnnnnnnnnnnnnnnnnnnnnnnnnnnnnnnnnnnnnnnnnnnnnnnnnnnnnnnnnnnnnnnnnnnnnnnnnnnnnnnnnnnnnnnnnnnnnnnnnnnnnnnnnnnnnnnnnnnnnnnnnnnnnnnnnnnnnnnnnnnnnnnnnnnnnnnnnnnnnnnnnnnnnnnnnnnnnnnnnnnnnnnnnnnnnnnnnnnnnnnnnnnnnnnnnnnnnnnnnnnnnnnnnnnnnnnnnnnnnnnnnnnnnnnnnnnnnnnnnnnnnnnnnnnnnnnnnnnnnnnnnnnnnnnnnnnnnnnnnnnnnnnnnnnnnnnnnnnnnttatgggaatctgtcccatgctcctgtgtcgggagtggcagcctccacggtatcaccgtccagggagaggaagaaatgctttctggtgcggcaagcttccttcagtggctcnccagaaatcgcccagggtgaggccggcatggatcagagtgtgaagcaggagcagctggagcacttgcatgctggcctccggtccgggtggcaccatggcccgcctgctgtgctgcctcctcttcagcaagaggacccagggaagcaggtggtgggtccttgtcccccgctgagctcagggccactgcacctggcccaaccccagatcatgcacatggacagtcaggaatctttgagaaatcccttgatccaaccaacatcctatatgacaagcaaacacttacctgaacagccacacttatttccacatcaagagacaattccattttctccaatccagaatgccttgtttcagtttcaatatcctacagtttgtatggttcatttaccagctcagcagcctccctggtggcaggcgcatttcccacatccctttgctcagccccctcagaagagctatggcaagccctcttttcagacagaaatccattcgagctatcccttagagcaggtggcagggaacacgggaaagaaacctgctgagtatgcacacacgaaagag

SEQ ID NO: 24329 - DNA, 1071 bp, Macaca Mulatta
  misc_feature (1)...(1071): n = A,T,C or G
gagactgcttgggctgtgccaagacaggcagtgggaagacagcagcgtttgtccttcccatcttgcagaagctttctgaggatccctatggcatcttctgcctcgtcctgacacctaccaggnnnnnnnnnnnnnnnnnnnnnnnnnnnnnnnnnnnnnnnnnnnnnnnnnnnnnnnnnnnnnnnnnnnnnnnnncagggagctggcgtatcagatcgcagagcagttccgggtcctggggaagcctctagggctgaaagactgcatcatcgtcggtggcatgnnnnnnnnnnnnnnnnnnnnnnnnnnnnnnnnnnnnnnnnnnnnnnnnnnnnnnnnnnnnnnnnnnnnnnnnnnnnnnnnnnnnnnnnnnnnnnnnnnnnnnnnnnnnnnnnnnnnnnnnnnggtgatggacgaggcagaccggctgctggaacagggctgcactgacttcaccgtcgacctggaggccatcctggcggctgtgccggcccgcaggcagacactgctgttcagcgccacgctgaccgacacactccgggagctacagggcctggccaccaaccagcccttcttctgggaggcacaggccccgtgagcaccgtggagcagctggaccagcgctacctgctggtgcccgagaaggtcaaggacgcctacctggtccacctgatccagcgcttccaggatgagcatgaggactggtccattatcatcttcaccaacacgnnnnnnnnnnnnnnnnnnnnnnnnnnnnnnnnnnnnnnnnnnnnnnnnnnnnnnnnnnnnnnnnnnnnnnnnnnnnnnnnnnnnnnnnnngcagaaagaacgctttgccgccctagccaagttcaagtccagcatctaccggatcctgatcgcaacagacgtggcctcccgnnnnnnnnnnnnnnnnnnnnnnnnnnnnnnnnnnnnnnnnnnnnnnnnnnnnnnnnnnnnnnnnnnnnnnnnnnnnnnnnnnnnnnnnnnnnnnagggcggcagggtcaggccatcacgctggtgacacagtacgacatccacctggtgcacgccattgaggagcagatca

SEQ ID NO: 24330 - DNA, 77 bp, Macaca Mulatta
agagttgtctctgtgggaagtttgtcctccgtccattgcgaccatgccgcagatactcaacttcaggcagctctggg

SEQ ID NO: 24331 - DNA, 2920 bp, Macaca Mulatta
  misc_feature (1)...(2920): n = A,T,C or G
atgccggcaacccccaacttccacgcaaatctcagctccaccggctgctggattccccgccagccaatgcccgtggcctgggcctttgtgcggaagacctcggccctcctgtgactgctgctcctgggcacctcnnnnnnnnnnnnnnnnnnnnnnnnnnnnnnnnnnnnnnnnnnnnnnnnnnnnnnnnnnnnnnnnnnnnnnnnnnnnnnnnnnnnnnnnnnnnnnnnnnnnnnnnnnnnnnnnnnnnnnnnnnnnnnnnnnnnnnnnnnnnnnnnnnnnnnnnnnnnnnnnnnnnnnnnnnnnnnnnnnnnnnnnnnnnnnnnnnnnnnnnnnnnnnnnnnnnnnnnnnnnnnnnnnnnnnnnnnnnnnnnnnnnnnnnnnnnnnnnnnnnnnnnnnnnnnnnnnnnnnnnnnnnnnnnnnnnnnnnnnnnnnnnnnnnnnnnnnnnnnnnnnnnnnnnnnnnnnnnnnnnnnnnnnnnnnnnnnnnnnnnnnnnnnnnnnnnnnnnnnnnnnnnnnnnnnnnnnnnnnnnnnnnnnnnnnnnnnnnnnnnnnnnnnnnnnnnnnnnnnnnnnnnnnnnnnnnnnnnnnnnnnnnnnnnnnnnnnnnnnnnnnnnnnnnnnnnnnnnnnnnnnnnnnnnnnnnnnnnnnnnnnnnnnnnnnnnnnnnnnnnnnnnnnnnnnnnnnnnnnnnnnnnnnnnnnnnnnnnnnnnnnnnnnnnnnnnnnnnnnnnnnnnnnnnnnnnnnnnnnnnnnnnnnnnnnnnnnnnnnnnnnnnnnnnnnnnnnnnnnnnnnnnnnnnnnnnnnnnnnnnnnnnnnnnnnnnnnnnnnnnnnnnnnnnnnnnnnnnnnnnnnnnnnnnnnnnnnnnnnnnnnnnnnnnnnnnnnnnnnnnnnnnnnnnnnnnnnnnnnnnnnnnnnnnnnnnnnnnnnnnnnnnnnnnnnnnnnnnnnnnnnnnnnnnnnnnnnnnnnnnnnnnnnnnnnnnnnnnnnnnnnnnnnnnnnnnnnnnnnnnnnnnnnnnnnnnnnnnnnnnnnnnnnnnnnnnnnnnnnnnnnnnnnnnnnnnnnnnnnnnnnnnnnnnnnnnnnnnnnnnnnnnnnnnnnnnnnnnnnnnnnnnnnnnnnnnnnnnnnnnnnnnnnnnnnnnnnnnnnnnnnnnnnnnnnnnnnnnnnnnnnnnnnnnnnnnnnnnnnnnnnnnnnnnnnnnnnnnnnnnnnnnnnnnnnnnnnnnnnnnnnnnnnnnnnnnnnnnnnnnnnnnnnnnnnnnnnnnnnnnnnnnnnnnnnnnnnnnnnnnnnnnnnnnnnnnnnnnnnnnnnnnnnnnnnnnnnnnnnnnnnnnnnnnnnnnnnnnnnnnnnnnnnnnnnnnnnnnnnnnnnnnnnnnnnnnnnnnnnnnnnnnnnnnnnnnnnnnnnnnnnnnnnnnnnnnnnnnnnnnnnnnnnnnnnnnnnnnnnnnnnnnnnnnnnnnnnnnnnnnnnnnnnnnnnnnnnnnnnnnnnnnnnnnnnnnnnnnnnnnnnnnnnnnnnnnnnnnnnnnnnnnnnnnnnnnnnnnnnnnnnnnnnnnnnnnnnnnnnnnnnnnnnnnnnnnnnnnnnnnnnnnnnnnnnnnnnnnnnnnnnnnnnnnnnnnnnnnnnnnnnnnnnnnnnnnnnnnnnnnnnnnnnnnnnnnnnnnnnnnnnnnnnnnnnnnnnnnnnnnnnnnnnnnnnnnnnnnnnnnnnnnnnnnnnnnnnnnnnnnnnnnnnnnnnnnnnnnnnnnnnnnnnnnnnnnnnnnnnnnnnnnnnnnnnnnnnnnnnnnnnnnnnnnnnnnnnnnnnnnnnnnnnnnnnnnnnnnnnnnnnnnnnnnnnnnnnnnnnnnnnnnnnnnnnnnnnnnnnnnnnnnnnnnnnnnnnnnnnnnnnnnnnnnnnnnnnnnnnnnnnnnnnnnnnnnnnnnnnnnnnnnnnnnnnnnnnnnnnnnnnnnnnnnnnnnnnnnnnnnnnnnnnnnnnnnnnnnnnnnnnnnnnnnnnnnnnnnnnnnnnnnnnnnnnnnnnnnnnnnnnnnnnnnnnnnnnnnnnnnnnnnnnnnnnnnnnnnnnnnnnnnnnnnnnnnnnnnnnnnnnnnnnnnnnnnnnnnnnnnnnnnnnnnnnnnnnnnnnnnnnnnnnnnnnnnnnnnnnnnnnnnnnnnnnnnnnnnnnnnnnnnnnnnnnnnnnnnnnnnnnnnnnnnnnnnnnnnnnnnnnnnnnnnnnnnnnnnnnnnnnnnnnnnnnnnnnnnnnnnnnnnnnnnnnnnnnnnnnnnnnnnnnnnnnnnnnnnnnnnnnnnnnnnnnnnnnnnnnnnnnnnnnnnnnnnnnnnnnnnnnnnnnnnnnnnnnnnnnnnnnnnnnnnnnnnnnnnnnnnnnnnnnnnnnnnnnnnnnnnnnnnnnnnnnnnnnnnnnnnnnnnnnnnnnnnnnnnnnnnnnnnnnnnnnnnnnnnnnnnnnnnnnnnnnnnnnnnnnnnnnnnnnnnnnnnnnnnnnnnnnnnnnnnnnnnnnnnnnnnnnnnnnnnnnnnnnnnnnnnnnnnnnnnnnnnnnnnnnnnnnnnnnnnnnnnnnnnnnnnnnnnnnnnnnnnnnnnnnnnnnnnnnnnnnnnnnnnnnnnnnnnnnnnnnnnnnnnnnnnnnnnnnnnnnnnnnnnnnnnnnnnnnnnnnnnngacgggaagatttctgggggaggtggatggtgctgtcatgacccagctgctcagcatgggggtgttcannnnnnnnnnnnnnnnnnnnnnnnnnnnnnnnnnnnnnnnnnnnnnnnnnnnnnnnnnnnnnnnnnnnnnnnnnnnnnnnnnnnnnnnnnnnnnnnnnnnnnnnnnnnnnnnnnnnnnnnnnnnnnnnnnnnngttcctgctggagtggagcgtctggggctcctggtacgacagaggggccgag

SEQ ID NO: 24332 - DNA, 203 bp, Macaca Mulatta
  misc_feature (1)...(203): n = A,T,C or G
tctcagtcaaagactggggatgaatgcgngagatggtcctggatgaccaggggcaagatgctgccaaattcagagggaatttaaaatgccagaaggaggtgacaagcaaccacaggtttaaatgaagacaagccgaaacaacacaaactgtttctatctaagatatttgacttaaaaatattgaaataaacttttgcggcttt

SEQ ID NO: 24333 - DNA, 457 bp, Macaca Mulatta
  misc_feature (1)...(457): n = A,T,C or G
tattattgtgaggcctcgattttcatccttgcaaccagtgttcagagctcacagagcttatcatgtttattatataacaataagacataagccaaaacaacttgctgctgggcttttaaacatagcaacagcagaaatcttttctgggcttgaggaagagccacttcaaatgtctactaatttcagcaattttctggtctatggaatgaaaagtctaaaacnnnagccctctgctccaccatcggacaacatgacgcaagggggcaggtggggaggaaagcggcacgctccctggttgttgggattcacaagctgcctttcaaaggactattgcctgggtgacgaatgctgttggaggaggaaagcgaaaggcatgaaacggggacccttcaaagtggccaccatggtaatgtcactcagtggcacagggcttgttcctccattttgttctcttttc

SEQ ID NO: 24334 - DNA, 331 bp, Macaca Mulatta
tctaattaatagaagatggcaaagcccagccacagcagctacgtccttcagcagctaaacaaccaaagagaatggggttttctctgtgactgttgtattgcaattgatgacatttactttcaagcacacaaggcagttctagctgcctgtagctcctattttagaatgtttttcatgaaccatcaacatagtactgcacaactgaatctcagcaacatgaaaattagtgcagaatgttttgatctcattttgcaatttatgtatttaggaaaaattatgacagctccctccagttttgagcagtttaaagtggcaatgaactacctacagc

SEQ ID NO: 24335 - DNA, 334 bp, Macaca Mulatta
  misc_feature (1)...(334): n = A,T,C or G
gtgaccagtgcagtggaggccctactgtcagctgactcagcctcccgcaagcaggaggtgcaggcatgggatggggaagtacggcaggtgtctaagcatgccttcagcctcaagcagttggacaaccctgctcgaatccctccctgngtggctggaagtgctctaagtgtgacatgagagagaacctgtggctcaacctgacggatggctccatcctctgtgggcgacgctacttcgacggcagtgggggcaacaaccacgctgtggagcactaccgggagacgggctacccattagctgtcaagctgggcaccatcacccctgatggagctgn

SEQ ID NO: 24336 - DNA, 529 bp, Macaca Mulatta
  misc_feature (1)...(529): n = A,T,C or G
aaaaacgacttgccctgacccgcattgtcggcgctgcgcgcaagcgcagtcagctactggacccggccggtgtgaagtttcacacccaagaggatgaagggcacctacctggcttaacagaacgactcccagnnnnnnnnnnnnnnnnnnnnnnnnnnnnnnnnnnnnnnnnnnnnnnnnnnnnnnnnnnnnnnnnnnnnnnnnnnnnnnnnnnnnnnnnnnnnnnnnnnnnnnnnnnnnnnnnnnnnnnnnnnnnnnnnnnnnnnnnnnnnnnnnnnnnnnnnnnnnnnnnnnnnnnnnnnnnnnnnnnnnnnnnnnnnnnnnnnnnnnnnnnnnnnnnnnnnnnnnnnnnnnnnnnnnnnnnnnnnnnnnnnnnnnnnnnnnnnnnnnnnnnnnnnnnnnnnnnnnnnncagatcatgtctaccatgaacgaagcagcccaccggctatccaaaagtgggacgagcctctatgcagtgctggagcttaagaagggtgcctcacctgaagacgtcaaaaaatcctaca

SEQ ID NO: 24337 - DNA, 1195 bp, Macaca Mulatta
  misc_feature (1)...(1195): n = A,T,C or G
aagacgtcggcggtattgcagtctatgtccttggaggtgaccagggccactgcaggcatggtgctannnnnnnnnnnnnnnnnnnnnnnnnnnnnnnnnnnnnnnnnnnnnnnnnnnnnnnnnnnnnnnnnnnnnnnnnnnnnnnnnnnnnnnnnnnnnnnnnnnnnnnnnnnnnnnnnnnnnnnnnnnnnnnnnnnnnnnnnnnnnnnnnnnnnnnnnnnnnnnnnnnnnnnnnnnnnnnnnnnnnnnnnnnnnnnnnnnnnnnnnnnnnnnnnnnnnnnnnnnnnnnnnnnnnnnnnnnnnnnnnnnnnnnnnnnnnnnnnnnnnnnnnnnnnnnnnnnnnnnnnnnnnnnnnnnnnnnnnnnnnnnnnnnnnnnnnnnnnnnnnnnnnnnnnnnntgaagattagtgcattagaaggatatagaggccaaagagtaaaggtgtttggctgggtccacaggctgcgtaggcaaggnnggaaagaatttaatgtttctggtgttgcgagatggtacaggttatcttcagtgtgtcttggcagatgagttgnnnnnnnnnnnnnnnnnnnnnnnnnnnnnnnnnnnnnnnnnnnnnnnnnnnnnnnnnnnnnnnnnnnnnnnnnnnnnnnnnnnnnnnnnnnnnnnnnnnnnnnnnnnnnnnnnnnnnnnnnnnnnnnnnnnnnnnnnnnnnnnnnnnnnnnnnnnnnnnnnnnnnnnnnnnnnnnnnnnnnnnnnnnnnnnnnnnnnnnnnnnnnnnnnnnnnnnnnnnnnnnnnnnnnnnnnnnnnnnnnnnnnnnnnnnnnnnnnnnnnnnnnnnnnnnnnnnnnnnnnnnnnnnnnnnnnnnnnnnnnnnnnnnnnnnnnnnnnnnnnnnnnnnnnnnnnnnnnnnnnnnnnnnnnnnnnnnnnnnnnnnnnnnnnnnnnnnnnnnnnnnnnnnnnnnnnnnnnnnnnnnnnnnnnnnnnnnnnnnnnnnnnnnnnnnnnnnnnnnnnnnnnnnnnnnnnnnnnnnnnnnnnnnnnnnnnnnnnnnnnnnnnnnnnnnnnnnnnnnnnnnnnnnnngtacactcacgtggaagctgagtgtcctttcctgacctttgatgacctcctgaaccggttggaggacttggtttgtgatgtggtagatcgaatattgaagtctcctgcagggagcatagtgtatgagctcaaccc

SEQ ID NO: 24338 - DNA, 1625 bp, Macaca Mulatta
  misc_feature (1)...(1625): n = A,T,C or G
ggagccctcgctgcgaaaggtgnaggtggtgtggcggtacctgctgaacgtgtatccagatggactgacaggccgagagcggatggactacatgaaacgcaagagccgcgagtatgagcagctcaagagcgagtgggcccagcgagcgagccctgaggacctggagttcatccgcagcacagtcctcaaggatgtactgcgcactgaccgggcccacccctactatgcggggcctgaggatggcccacatctacgggcgctgcacgacctgctcaccacttatgccgttacccacccacaggtgtcctactgccagggcatgagtgaccttgcctcacccatccttgccgtcatggaccatgagggccatgcctttgtttgcttttgtggcatcatgaagcgcctggccgccaacttccaccctgatggccgcgccatggccaccaagtttgcacacttgaagctgttgctgcgacacgctgaccctgacttttaccaatacctgcaagaggcaggtgctgatgacctcttcttctgttaccgctggctgctgctggagctcaagcgtgagtttgcctttgatgacgccctccgcatgcttgaggtcacctggagttcgctgccccctgatcctcctgnnnnnnnnnnnnnnnnnnnnnnnnnnnnnnnnnnnnnnnnnnnnnnnnnnnnnnnnnnnnnnnnnnnnnnnnnnnnnnnnnnnnnnnnnnnnnnnnnnnnnnnnnnnnnnnnnnnnnnnnnnnnnnnnnnnnnnnnnnnnnnnnnnnnnnnnnnnnnnnnnnnnnnnnnnnnnnnnnnnnnnnnnnnnnnnnnnnnnnnnnnnnnnnnnnnnnnnnnnnnnnnnnnnnnnnnnnnnnnnnnnnnnnnnnnnnnnnnnnnnnnnnnnnnnnnnnnnnnnnnnnnnnnnnnnnnnnnnnnnnnnnnnnnnnnnnnnnnnnnnnnnnnnnnnnnnnnnnnnnnnnnnnnnnnnnnnnnnnnnnnnnnnnnntcatctccaccatccacccaggagccctctcccactggtgatatggctgtaggatcccccttgatgcgagaggtaggctccccgaaagaccctggaaagtccctgccacctgtaccaccaatgggcctgcccccaccccaggagtttggccgggggaacccattcatgctgttcctctgcctggccatcctgctggagcaccgcgaccacatcatgcgcaatgggctggattataacgagctggccatgcactttgaccgcctcgtgcgaaaacaccacctggggcgtgtcctgcgccgggccagggctctctttgctgattacctgcagtcagaggtgtgggactcggaggagggggctgaggccacagctgcatcttgatcaggctttctccagccctccattggctctaccagatctccattctttgccatgagggccaacacatgagaccccacctccctccctgcctgccagccctagacctgttggagcatagatcccttcctccccaggtctaagtatgtggagctctgcttaggcactgccccacagaggccacgcctctttattctgtttctgttgttttgtttttaacaactatactttgcacacatga

SEQ ID NO: 24339 - DNA, 966 bp, Macaca Mulatta
  misc_feature (1)...(966): n = A,T,C or G
ggggcgggcggccgcggggcttactgggaaggggggggaagcccggtcacctttcaaggacccagaagtagggttttggcctagataacggggcagagatgtggttcgagattctccccggactcgccgccatgggcgtgtgcttgcttattccaggactggctactgcgtacatccagaggttcactaacgggggcaaggaaaaaaggattgctcattttgggtatcactggaatctgatggaaagagataggcgcatctctggagttaatcgtcactatgtgtcaaagggtttggagaacattgattaaggaagcattttcctgattgatgaaaaaagtaactcagttatggccatctacccctgctagaaggttattcaagtgtattatgtaacatggcaatgtgttaatgtagttgccttaattaataaataacaacccaaccatctttagccaatgcacgtaagatgtaatattctccttttctccgccccctcccctctattctccctttcacagaaaagaatttttctctaaaaaacacaaatttccagtttttggggccacctcccgagtgtgccccccggaaataaacggggtcaaaaatgttagaacaacaaaattgggagtcctaataaaaaactcggatttttcctcctcaaagaggaaaaaaatccctctgggttttcactttaaaatactcactgctgggccctctgggtaaatttcccctccagctctaannnnnnnnnnnnnnnnnnngccccgcgtgggggacgaatcacctaaaataggtatttcctcagaacaactacataacgcacataaaatgtggagaatttctaagagacagagccttatataaccgggggattaaaaatgccaaaagaaatgggaagtaccctaaataattgagcgccttccaaatattctacaaatttagcatacccccctacctttagac

SEQ ID NO: 24340 - DNA, 204 bp, Macaca Mulatta
actccagaactacccatttgccgcgttctcgccgccgcaggctcccgggacgatggtgccccgcctgctgctgcgtgcctggccccggggccctgcggttggtccgggagcccccagtcggcccctcagcgccggctccgggcccggccagtacctgcagcgcagcatcgtgcccaccatgcactaccaggacagcctgcccag

SEQ ID NO: 24341 - DNA, 457 bp, Macaca Mulatta
gaccaactcctactaaaccattaaacagacgctctgtactagaaaagaatcttataaaagtaactgttgcaccatttaatccaacagtttgtgattctttgcttgataaggatgagactgattcatccaaagatactgaaaaactctcttcccttggagaagagatgagagaagatggtcttagcccaagtgaacgcaaactttgtactgaatctgaaggggtcagccccaataactctgcctgggatgggccccagctctcttcttcaaacaataactttcaacaagctgtctctgataaaaatatgcctgacagtgagaaccctacatctgtattctctcggatctcagaccattcagagactccttctaatatggagtcatcctgcagaagtggtggttcacacaagtcaagttgtgagatgagatctccagttgtttccagctcatcgaacaa

SEQ ID NO: 24342 - DNA, 497 bp, Macaca Mulatta
agatggtctgttagttcaaacagtggtaggaatgctctataaccccttctcaggttactggcattggagtgaaaataccagccttaactatgcagctcatgctgtgaaatctggggtccaggaacacccaatgtctgctgagtttgctttcaagggagaagcagaagagctccaagctaatgcctgcaccaatccagctgtgcatgaagagctgaagaaatgaattgtttctgaggactatcgtaatgtggcttagatatctgatgttttcaaatataagaaatatataatttatcctttgagagagaatcatgaggaaaagaaggtcaataaaaagggctaaaaccttgatcagaagtttttgttatttcatctaatagctactttcaagggatactaagaataaaaagttttgtcaagatactatgtgatcgaggagtttaagttcctcaatctttgttgtataattagggtatgcatattcatttcatcgtaca

SEQ ID NO: 24343 - DNA, 1584 bp, Macaca Mulatta
  misc_feature (1)...(1584): n = A,T,C or G
tgagttccgactctgagatggccatttttggggaggctgctcctttcctccgaaagtctgaaaaggagcgaattgaagctcagaacaagccttttgatgccaagacatcagtcttcgtggtggaccccaaggagtcctttgtgaaagcaacagtgcagagcagggaaggggggaaggtgacagccaagaccgaagctggagctnnntaacggtgaaagacgaccaagtcttccccatgaaccctcccaaatatgacaagatcgaggacatggccatgatgactcacctgcatgaacctgctgtgctgtacaacctcaaagagcgctatgcagcctggatgatctacnnnnnnnnnnnnnnnnnnnnnnnnnnnnnnnnnnnnnnnnnnnnnnnnnnnnnnnnnnnnnnnnnnnnnnnnnnnnnnnnnnnnnnnnnnnnnnnnnnnnnnnnnnnnnnnnnnnnnnnnnnnnnnnnnnnnnnnnnnnnnnnnnnnnnnnnnnnnnnnnnnnnnnnnnnnnnnnnnnnnnnnnnnnnnnnnnnnnnnnnnnnnnnnnnnnnnnnnnnnnnnnnnnnnnnnnnnnnnnnnnnnnnnnnnnnnnnnnnnnnnnnnnnnnnnnnnnnnnnnnnnnnnnnnnnnnnnnnnnnnnnnnnnnnnnnnnnnnnnnnnnnnnnnnnnnnnnnnnnnnnnnnnnnnnnnnnnnnnnnnnnnnnnnnnnnnnnnnnnnnnnnnnnnnnnnnnnnnnnnnnnnnnnnnnnnnnnnnnnnnnnnnnnnnnnnnnnnnnnnnnnnnnnnnnnnnnnnnnnnnnnnnnnnnnnnnnnnnnnnnnnnnnnnnnnnnnnnnnnnnnnnnnnnnnnnnnnnnnnnnnnnnnnnnnnnnnnnnnnnnnnnnnnnnnnnnnnnnnnnnnnnnnnnnnnnnnnnnnnnnnnnnnnnnnnnnnnnnnnnnnnnnnnnnnnnnnnnnnnnnnnnnnnnnnnnnnnnnnnnnnnnnnnnnnnnnnnnnnnnnnnnnnnnnnnnnnnnnnnnnnnnnnnnnnnnnnnnnnnnnnnnnnnnnnnnnnnnnnnnnnnnnnnnnnnnnnnnnnnnnnnnnnnnnnnnnnnnnnnnnnnnnnnnnnnnnnnnnnnnnnnnnnnnnnnnnnnnnnnnnnnnnnnnnnnnnnnnnnnnnnnnnnnnnnnnnnnnnnnnnnnnnnnnnnnnnnnnnnnnnnnnnnnnnnnnnnnnnnnnnnnnnnnnnnnnnnnnnnnnnnnnnnnnnnnnnnnnnnnnnnnnnnnnnnnnnnnnnnnnnnnnnnnnnnnnnnnnnnnnnnnnnnnnnnnnnnnnnnnnnnnnnnnnnnnnnnnnnnnnnnnnnnnnnnnnnnnnnnnnnnnnnnnnnnnnnnnnnnnnnnnnnnnnnnnnnnnnnnnnnnnnnnnnnttcaacagcctggagcagctgtgcatcaacttcaccaacgagaaactgcaacagtttttcaaccaccacatgttcgtgctggagcaggaggagtacaagaaggaaggtatcgagtgggagttcattgacttcgggatggacctggctgcctgcatcgagctcatcgagaa

SEQ ID NO: 24344 - DNA, 695 bp, Macaca Mulatta
tctgtggctggcgttggatccaccctgggtctccagccagggctgcagagagggtagagccgtttcttaggccagcgtggagtgggacaggaggtgccgagagaggactgaggtggcttgggacatggaagcactgcagccttccagcccggcatccagcactgcagccgccgcggcggcccaagagctccgaccctttcacgcgcgcgcatgtggaggaatggcggcggcggaacaaaacgaccctcacttacgtggccgctgtcgccgtggccatgctgggggcgtcctacgctgccgtacccctttatcggctctattgtcagactactggacttggaggatcagcagttgcaggtcatgcctcagaccagattgaaaacatggtgcctgttaaggatcgaatccttaaaattagctttaatgcagatgtgcatgcaagtctccagtggaactttagacctcagcaaacagaaatatatattattccttgaagacctcaaatatacaagaggacaattcataactaattgtggatattagaacattggttcttcattgacatatgcaagtggtgccaggagagactgcactggcgttttacagagctaagaatcctactgacaaaccaataattggaatttctacatacaatgttgttccatttgaagctggacagttttccataaaataca

SEQ ID NO: 24345 - DNA, 760 bp, Macaca Mulatta
gtttgaacaggcttcgctgcctctcatgttggctaccacccctatgggctcagcactgacaaggcttaaagagagcttcttctcattccccgggggagcctgaaatgtgggggaagcctctttattctccatgctaccttcaggaaaataaagggggtagaggctgtggcttttctcctcttgcagtgttttcagggcctagaacagagaaggcacacattgtcccagcatatttacattttaagatgccctggagaggacaatgtttgctctaaaggagagcatttctgatgggggcatttctgccaccctgagggaaaggttgtcccagacaggccatctccgcctcggttggcttcacttcccatgcagggagggggcaggaacacattttggaagttaccactcaccccacaacccaacacgaatgagtcattggtttatgacctgctcccccggaggtgtcctcaaaggctcccttggtcttgggaacacaggctcagagctagtcagagccagcacatcaaagcactgcatatccaggaagaagagcttctcctcatcctcatcatcaccgacaccatcctggttgtcatccctgagctgtgttaagtaggcacttcccccaagagagttaaaggggcactcttgtgagatactgaagaggagccttcccccagccccaggcttccttgtaccttttgcctcttcattccgcctgctgcgttctgggaaatgatgggactggcaggctgtactg

SEQ ID NO: 24346 - DNA, 206 bp, Macaca Mulatta
atttgttattcaaggatttgatttcgcttgaagtgaattgtaatcattatccaaattcactagtataaattaaacaatggattaataaatctttaagacttttaagcccccttaacattttgttctatagaataagctgtttacatttggataatattagttttttgtgcaggtatacaagttacctcaaacttaaaacagtccag

SEQ ID NO: 24347 - DNA, 119 bp, Macaca Mulatta
cctcactactaacaattcctcctcgactacctcctccaccacttccaaagcatcaccaccaataactcatcattccatagtgaatggacagtcttcagttctaaatgcaagacgagaca

SEQ ID NO: 24348 - DNA, 342 bp, Macaca Mulatta
  misc_feature (1)...(342): n = A,T,C or G
aaagaacagaatctaaagtttgtagggcagccatcgacacattttacgttaatgttaaagaacaagtcatcaannnnnnnnnnnnnnnnnnnnnnnnnnnnnnnnnnnnnnnnnnnnnnnnnnnnnnnnnnnnnnnnnnnnnnnnnnnnnnnnnnnnnnnnnnnnnnnnnnnnnnnnnnnnnnnnggttagagccacagctgaaacaactacaaacaaaatatgatgaacttagagagagaaagtcttcccttaggaatgcagcatatttcttatctaatttaaaacagctttatcaagattattcggatgttcaagcaaaagaaccaaacataaaggaaac

SEQ ID NO: 24349 - DNA, 172 bp, Macaca Mulatta
aagggcggagctgaattctcctcagcccagacactgagagcatcgcgagggcggagctgtgttctcctctgcacagacctcgggggtaccgtgaagacagagcagcgttctaccctgcccagaccctggcgtggggggcaccgcgagggcggagctgcgttgtgctcggcac

SEQ ID NO: 24350 - DNA, 754 bp, Macaca Mulatta
  misc_feature (1)...(754): n = A,T,C or G
tccagatgggagaggtcactgagccctgctgcccctgccagcatcgcctcctctttctctctcccaatcttcctgcctgggaaagcagcagacattctcaggactgcggagggatgggggaggcccagagcccagggccgtctagggagtggtgttcagtgggcatcagcccccaggactccggcggggggggtctctgcattggggtttctctcttgtgccctcagaaacccgatgaaggcaatggatccaggcacattctacttccaatttaaaaacctatgggaagccaacaatcggaacgaaacctggcttgtgcttcaccgtggaagttaaaaagcagcactcaactgtatcctgggagacgggcgtattccgaaaccaggtcgatcttgagacccattgccatgcagaaaggtgcttcctctcctggttctgcgaggacatacttgtctcctaacacagactaccaggtcacctggtacacatcttggagcccttgcctagattgtgcaggggaggtggccaagttcctggccaggcacaacaatgtgatgctcaccatctataccgnccgcctctactactcccagtatccgaattaccagcaggggctccgcagcctgagtgagaaaggagtctctgtgaagattatggactacgaagattttaactattgttgggaaaagtttgtgtacgaagatggtgagccattcaagccttgcaagggactataaaccagcttcgaattctg

SEQ ID NO: 24351 - DNA, 2444 bp, Macaca Mulatta
  misc_feature (1)...(2444): n = A,T,C or G
gggcggcccgccctcccccgacggttagatctccactggctgtgtcgcccagccgcaggcccgtctctaagggagccagacctcggacaccttgcctgaagtttcggccatacctatctccctggacgggctactcttccctcggccctgccagggacaggaccccctagacgaaaagacgcaggaccaacagtcgctgtcggacgtggagggcgcatattccagagctgaagctacaaggggtactggaggcagcagttctagacccccagaaaaggacagcggactgctggacagtgtcttggacactctgttggcgccctcaggtcccgggcagagccaacccagccctcccgcctgcgaggtcaccagctcttggtgcctgtttggccccgaacttcctgaagatccaccggctgcccctgccacccctgccacccagagggtgttgtctccgctcatgagccggtccgggggcaaggctggagacagctccgagacggcagctgcccataaggtgctgccccggggcctgtcaccatcccggcagctgctgctcccggcctctgggagccctcattggtccggggccccagtgaagccgtctccgctgcccactgcggtggaggttgaggaggaggatggctccgagtccgaggactctgcgggtccgcttctgaagggcaaacctcgggctctgggtggcgcggcggctggaggaggagccgcggctgtcccgccgggggcggccgcaggaggcgtcgctctggttcccaaggaagattcccgcttctcagcgccnnnnnnnnnnnnnnnnnnnnnnnnnnnnnnnnnnnnnnnnnnnnnnnnnnnnnnnnnnnnnnnnnnnnnnnnnnnnnnnnnnnnnnnnnnnnnnnnnnnnnnnnnnnnnnnnnnnnnnnnnnnnnnnnnnnnnnnnnnnnnnnnnnnnnnnnnnnnnnnnnnnnnnnnnnnnnnnnnnnnnnnnnnnnnnnnnnnnnnnnnnnnnnnnnnnnnnnnnnnnnnnnnnnnnnnnnnnnnnnnnnnnnnnnnnnnnnnnnnnnnnnnnnnnnnnnnnnnnnnnnnnnnnnnnnnnnnnnnnnnnnnnnnnnnnnnnnnnnnnnnnnnnnnnnnnnnnnnnnnnnnnnnnnnnnnnnnnnnnnnnnnnnnnnnnnnnnnnnnnnnnnnnnnnnnnnnnnnnnnnnnnnnnnnnnnnnnnnnnnnnnnnnnnnnnnnnnnnnnnnnnnnnnnnnnnnnnnnnnnnnnnnnnnnnnnnnnnnnnnnnnnnnnnnnnnnnnnnnnnnnnnnnnnnnnnnnnnnnnnnnnnnnnnnnnnnnnnnnnnnnnnnnnnnnnnnnnnnnnnnnnnnnnnnnnnnnnnnnnnnnnnnnnnnnnnnnnnnnnnnnnnnnnnnnnnnnnnnnnnnnnnnnnnnnnnnnnnnnnnnnnnnnnnnnnnnnnnnnnnnnnnnnnnnnnnnnnnnnnnnnnnnnnnnnnnnnnnnnnnnnnnnnnnnnnnnnnnnnnnnnnnnnnnnnnnnnnnnnnnnnnnnnnnnnnnnnnnnnnnnnnnnnnnnnnnnnnnnnnnnnnnnnnnnnnnnnnnnnnnnnnnnnnnnnnnnnnnnnnnnnnnnnnnnnnnnnnnnnnnnnnnnnnnnnnnnnnnnnnnnnnnnnnnnnnnnnnnnnnnnnnnnnnnnnnnnnnnnnnnnnnnnnnnnnnnnnnnnnnnnnnnnnnnnnnnnnnnnnnnnnnnnnnnnnnnnnnnnnnnnnnnnnnnnnnnnnnnnnnnnnnnnnnnnnnnnnnnnnnnnnnnnnnnnnnnnnnnnnnnnnnnnnnnnnnnnnnnnnnnnnnnnnnnnnnnnnnnnnnnnnnnnnnnnnnnnnnnnnnnnnnnnnnnnnnnnnnnnnnnnnnnnnnnnnnnnnnnnnnnnnnnnnnnnnnnnnnnnnnnnnnnnnnnnnnnnnnnnnnnnnnnnnnnnnnnnnnnnnnnnnnnnnnnnnnnnnnnnnnnnnnnnnnnnnnnnnnnnnnnnnnnnnnnnnnnnnnnnnnnnnnnnnnnnnnnnnnnnnnnnnnnnnnnnnnnnnnnnnnnnnnnnnnnnnnnnnnnnnnnnnnnnnnnnnnnnnnnnnnnnnnnnnnnnnnnnnnnnnnnnnnnnnnnnnnnnnnnnnnnnnnnnnnnnnnnnnnnnnnnnnnnnnnnnnnnnnnnnnnnnnnnnnnnnnnnnnnnnnnnnnnnnnnnnnnnnnnnnnnnnnnnnnnnnnnnnnnnnnnnnnnnnnnnnnnnnnnnnnnnnntacagttcctttggaaggactacgaagtcaaacccagtttgaggagatgaggtcaagctacattagagagctcatcaaggcaattggtttgaggcaaaaaggagttgtgtctagctcacagcgtttctatcaacttacaaaacttcttgataacttgcatga

SEQ ID NO: 24352 - DNA, 179 bp, Macaca Mulatta
tagaaagtgtgaagagctgagttccccacctttttttctattgatgcttcttttttaacgaactacagtttcaccgcgtgtttgcttttgggctgtgcagtgggcagggggctgctttgggtttattgggagcttttgttgcacccatgaaggagcaatcaggtcagcatattcatgca

SEQ ID NO: 24353 - DNA, 387 bp, Macaca Mulatta
  misc_feature (1)...(387): n = A,T,C or G
ggccatccattgttaagtaactggctttagcagatctgtttaagacaaatgcaaaagtgagaatgaaaagtttgcttaagactgagttcagtgtttttcattttccctttggctgaatatctcaattttcaaaccagcaggaaatatgaaaaatgcttcagtgatgtggtccattataagataagtacacaaaaatnttcttgaaaaatattgtatgattgcatagtgaaatagcaagatttgtcaatatgctattctatatgcacccctagagcaagttattagggtagggaataagccatttacattagtgcaagataaatagaaactgagtccaaatgaattttagtgctattgtttttcataaagtactatgttatctagcag

SEQ ID NO: 24354 - DNA, 419 bp, Macaca Mulatta
atgctgactgccagcctgctgagggcagtcataacctccatctgtgttggatccagcatggctcagaaggtaactcaagctcagactgaaatttctgtggtggagaaggaggatgtgaccttggactgtgtatatgaaacccgtgatactacttattacttattctggtacaagcaaccaccaagtggagaattggttttccttattcgtcagaactcttttgatgagcaaaatgaaataaatggtcgatattattcgaacttccagaaatccaccagttccttcaacctcaccatcacagcctcacagatcgtggactcagcagtatacttctgtgctctgaatgaaggggatagcgactataaattgatctttgggagtgggaccagactcctggtcaggcctgatatccagaaccc

SEQ ID NO: 24355 - DNA, 1974 bp, Macaca Mulatta
  misc_feature (1)...(1974): n = A,T,C or G
cacaggtcaaggccgaggggctggcttttgccagtctgaccggactcaagttacttcccagttccttgcagagagctgtctttgtgagacggtgtctcgggtcctggaaagatgggagcagtgctttcgaaatgaggagtgattgcgtgctcatctggcagctggttggtgtcctgcgggcgtcaggcctgagcggggaccatgctcctcccatcgtcctcactgcgtgtgacgaggcctaggccactgtgtgagtcgtcttgcgctccatgaagcctggtgtctgtgcagatgtgtgggtggcgttagggttgggggacatttctttcacactggagaacaggagtctggagctggtgctattggtgaggaggaggcccagcccgctgcgaggctcacccacactgttcccctggttgttgggaaaaccagccttggagtggtcaaggcaggagatagcccctccnnnnnnnnnnnnnnnnnnnnnnnnnnnnnnnnnnnnnnnnnnnnnnnnnnnnnnnnnnnnnnnnnnnnnnnnnnnnnnnnnnnnnnnnnnnnnnnnnnnnnnnnnnnnnnnnnnnnnnnnnnnnnnnnnnnnnnnnnnnnnnnnnnnnnnnnnnnnnnnnnnnnnnnnnnnnnnnnnnnnnnnnnnnnnnnnnnnnnnnnnnnnnnnnnnnnnnnnnnnnnnnnnnnnnnnnnnnnnnnnnnnnnnnnnnnnnnnnnnnnnnnnnnnnnnnnnnnnnnnnnnnnnnnnnnnnnnnnnnnnnnnnnnnnnnnnnnnnnnnnnnnnnnnnnnnnnnnnnnnnnnnnnnnnnnnnnnnnnnnnnnnnnnnnnnnnnnnnnnnnnnnnnnnnnnnnnnnnnnnnnnnnnnnnnnnnnnnnnnnnnnnnnnnnnnnnnnnnnnnnnnnnnnnnnnnnnnnnnnnnnnnnnnnnnnnnnnnnnnnnnnnnnnnnnnnnnnnnnnnnnnnnnnnnnnnnnnnnnnnnnnnnnnnnnnnnnnnnnnnnnnnnnnnnnnnnnnnnnnnnnnnnnnnnnnnnnnnnnnnnnnnnnnnnnnnnnnnnnnnnnnnnnnnnnnnnnnnnnnnnnnnnnnnnnnnnnnnnnnnnnnnnnnnnnnnnnnnnnnnnnnnnnnnnnnnnnnnnnnnnnnnnnnnnnnnnnnnnnnnnnnnnnnnnnnnnnnnnnnnnnnnnnnnnnnnnnnnnnnnnnnnnnnnnnnnnnnnnnnnnnnnnnnnnnnnnnnnnnnnnnnnnnnnnnnnnnnnnnnnnnnnnnnnnnnnnnnnnnnnnnnnnnnnnnnnnnnnnnnnnnnnnnnnnnnnnnnnnnnnnnnnnnnnnnnnnnnnnnnnnnnnnnnnnnnnnnnnnnnnnnnnnnnnnnnnnnnnnnnnnnnnnnnnnnnnnnnnnnnnnnnnnnnnnnnnnnnnnnnnnnnnnnnnnnnnnnnnnnnnnnnnnnnnnnnnnnnnnnnnnnnnnnnnnnnnnnnnnnnnnnnnnnnnnnnnnnnnnnnnnnnnnnnnnnnnnnnnnnnnnnnnnnnnnnnnnnnnnnnnnnnnnnnnnnnnnnnnnnnnnnnnnnnnnnnnnnnnnnnnnngcctcataggtacccgacacacacacgagtgaaaagtcggttcccaagcaaagcagcagctnnnnnnnnnnnnnnnnnnnnnnnnnnnnnnnnnnnnnnnnnnnnnnnntgtggcacatgattccgtccgccgcctccagacgggtctccaaccccaaggaccacagtgcacagctgctgatgggacgttgtcttataaccaaagcggggtttatgctaagcatgggtgagcagtatcaaagcaccaacgggtgacactgaacagagctaccaccatgaacaagggcacgtcccagggtctctccaggacactcaaggacatgaggagtttcgagtctgaagagaggagaattccgcaagagttacgtggggctggggctgatgggg

SEQ ID NO: 24356 - DNA, 65 bp, Macaca Mulatta
agttcacgcaaagtgctctggactgcatgagtgtggaggtaggacggctgcgtgccttcttgcag

SEQ ID NO: 24357 - DNA, 1393 bp, Macaca Mulatta
  misc_feature (1)...(1393): n = A,T,C or G
tggttcataatcaatgagaccccctttgttgatcaaaatccagaagcaaacttacaagttcagnnnnnnnnnnnnnnnnnnnnnnnnnnnnnnnnnnnnnnnnnnnnnnnnnnnnnnnnnnnnnnnnnnnnnnnnnnnnnnnnnnnnnnnnnnnnnnnnnnnnnnnnnnnnnnnnnnnnnnnnnnnnnnnnnnnnnnnnnnnnnnnnnnnnnnnnnnnnnnnnnnnnnnnnnnnnnnnnnnnnnnnnnnnnnnnnnnnnnnnnnnnnnnnnnnnnnnnnactcactgccacaacgacattgtcaaccttctcctggactgtggggccgacgtgaacaagtgctcagatgagggtctcacggcgctcagcatgtgtttcctcgtctactaccctgcccagtccttcaagcccaatgttgctgaacggaccatgcccgagccccagnnnnnnnnnnnnnnnnnnnnnnnnnnnnnnnnnnnnnnnnnnnnnnnnnnnnnnnnnnnnnnnnnnnnnnnnnnnnnnnnnnnnnnnnnnnnnnnnnnnnnnnnnnnnnnnnnnnnnnnnnnnnnnnnnnnnnnnnnnnnnnnnnnnnnnnnnnnnnnnnnnnnnnnnnnnnnnnnnnnnnnnnnnnnnnnnnnnnnnnnnnnnnnnnnnnnnnnnnnnnnnnnnnnnnnnnnnnnnnnnnnnnnnnnnnnnnnnnnnnnnnnnnnnnnnnnnnnnnnnnnnnnnnnnnnnnnnnnnnnnnnnnnnnnnnnnnnnnnnnnnnnnnnnnnnnnnnnnnnnnnnnnnnnnnnnnnnnnnnnnnnnnnnnnnnnnnnnnnnnnnnnnnnnnnnnnnnnnnnnnnnnnnnnnnnnnnnnnnnnnnnnnnnnnnnnnnnnnnnnnnnnnnnnnnnnnnnnnnnnnnnnnnnnnnnnnnnnnnnnnnnnnnnnnnnnnnnnnnnnnnnnnnnnnnnnnnnnnnnnnnnnnnnnnnnnnnnnnnnnnnnnnnnnnnnnnnnnnnnnnnnnnnnnnnnnnnnnnnnnnnnnnnnnnnnnnnnnnnnnnnnnnnnnnnnnnnnnnnnnnnnnnnnnnnnnnnnnnnnnnnnnnnnnnnnnnnnnnnnnnnnnnnnnnnnnnnnnnnnnnnnnnnnnnnnnnnnnnnnnnnnnnnnnnnnnnnnnnnnnnnnnnnnnnnnnnnnnnnnnnnnnnnnnnnnnnnnnnnnnnnnnnnnnnnnnnnnnnnnnnnnnnnnnnnnnnnnnnnnnnnnnnnnnagctggatctgctgccctcaagtctgaagctcagcaacgagccaggccctccccaagcctactacagcatggacacgcccctccccgaggaggggggcaggacggctctgcacatggcctgcgagcgggaggacgacaacaa

SEQ ID NO: 24358 - DNA, 278 bp, Macaca Mulatta
tagccgagaagcagcttttgtatatgccatctcatcagcaggggtagtccatgctattactcgtgcctgtagccagggtgaactgagtgtgtgcagctgtgacccctacacccgtggccgacaccatgaccagcgtggggactttgactggggtggctgcagtgacaacatccattatggtgtccgttttgccaaggccttcgtggatgccaaggagaagaggcttaaggatgcccgggccctcatgaacttacataataaccgctgtggtcgcacgg

SEQ ID NO: 24359 - DNA, 149 bp, Macaca Mulatta
gtttgataaagggagacccggcagcatctttacccatcatcagctattcttttacctcatactcaccttatgtaacagaacttataatggaatccaatgtagagctcatagcaaaaaatgacttgcgctttgtagatgctgtctataag

SEQ ID NO: 24360 - DNA, 767 bp, Macaca Mulatta
  misc_feature (1)...(767): n = A,T,C or G
ctgtgccaagggcacattcgggcctcactgtgaggggcgctgtgactgccggtggggaaccacctgccaccatgccaccggggcctgcttctgccctccagggtnnnnnnnnnnnnnnnntgcctgcggggctggtttggagaggcctgtgcccagcgctgcagctgtccactcggcgctgcctgccaccacgtcactggggcctgccgctgtccccctggcttcactggctctggctgcgannnnnnnnnnnnnnnnnnnnnnnnnnnnnnnnnnnnnnnnnnnnnnnnnnnnnnnnnnnnnnnnnnnnnnnnnnnnnnnnnnnnnnnnnnnnnnnnnnnnnnnnnnnnnnnnnnnnnnnnnnnnnnnnnnnnnnnnngatgcccgcccgggcggtatgggccaggctgtgaacagctgtgtgggtgtctcaacgggggctcctgtgatgcggccacgggggcatgccactgcccctctgggttcctcggggcggactgcagcctcacnnnnnnnnnnnnnnnnnnnnnnnnnnnnnnnnnnnnnnnnnnnnnnnnnnnnnnnnnnnnnnnnnnnnnnnnnnnnnnnnnnnnnnnnnnnnnnnnnnnnnnnnnnnnnnnnnnnnnnnnnnnnnaggctgcccccagaaccggtttggcgtgggctgtgatgtctcacctgctcctgcagaaacgggggcctgtgccacgccaccaacggcagctgctcctgtggcctgggctggacagggctgcactgtgagctgg

SEQ ID NO: 24361 - DNA, 615 bp, Macaca Mulatta
cctctttagcatccgccaattcgcagtgcattttgcatggggatgaacagtgttttatgctgggactcgagggcctggaacccctttctcttagtggatagaacatgctgtgttccacacagccttggactagcaatttatgcttcttgggagaccagccttgagtgactcaaagcaaaaaaggaagaactctcaaaagcactgccatgaagtgggattggcatagggcagtgggattaagctgcctactgtgcacaccccagaaatgacactctccaaggtccattcctggtgtgagcagtggggaggtcagagcaaacccggtaagatgcagatcacacctggcccttgtatacctattatcagtagctggccagaaaaccctaccttcaagtcactgccctgtgttaaagtgtgtggaaatgcataggtgacctgggagaggaaggtgacatatcagcccatgaactccataggccatgaatttagctttcggatcggctaggaagacagataacccgttctgagaggtcatgtgggctctctttaggacaagacaagtgagggatgcaatgaggacttgagatttggcaaaggagtgagaaaggagaaaag

SEQ ID NO: 24362 - DNA, 1655 bp, Macaca Mulatta
  misc_feature (1)...(1655): n = A,T,C or G
tctgggctgctgaggttcccgtatggaagggctgccaaacgaggtttgctgcaggaggaacttttaatcccccattccagaagtccaggcccaatggtgggcttagcctctttgaaaagctctgccttgcccccccaggtgggcgcatcctgtgtctcattcaccatgatgcttcctgaaggtgttctagaagcccgtttcccagtggctctatccagcctttccttgcatcttgctcttgaaggtgaggaagtgaaaactacagccctcccccggagagcccactctctgtcacgagcctaacccacgggaggcggaagagacatccatccgagaactgaagcggcctccgggatgaggtcggaggccccacctgattgtcctggtggtggtatccaaaatctgcagtaactaggaaggaaaccagggtctcatggtttaaaagactttgaagcaggaatgttgcatttgacgcctttaaaactacctttttgctgttgggaggagtcgggggcgagccttagcagctgcacccgccagccccatgctggtcggtgctgccctgcctctcatgccgggtgttgcttcagcccagagccagagggctgggtcccgggtcctccacaggtggccccggcggacacatggcattcctgtcccggcccccgtctctgcttttccacttccacctgcgtgtgggtttgccgccttgtcatcggtcgtgtgagtgtcgcagacctttccagagctccggttcactctttccaaacaggcctccctgtcggtggcatcgcactcccagaaccttcagtttctacgnnnnnnnnnnnnnnnnnnnnnnnnnnnnnnnnnnnnnnnnnnnnnnnnnnnnnnnnnnnnnnnnnnnnnnnnnnnnnnnnnnnnnnnnnnnnnnnnnnnnnnnnnnnnnnnnnnnnnnnnnnnnnnnnnnnnnnnnnnnnnnnnnnnnnnnnnnnnnnnnnnnnnnnnnnnnnnnnnnnnnnnnnnnnnnnnnnnnnnnnnnnnnnnnnnnnnnnnnnnnnnnnnnnnnnnnnnnnnnnnnnnnnnnnnnnnnnnnnnnnnnnnnnnnnnnnnnnnnnnnnnnnnnnnnnnnnnnnnnnnnnnnnnnnnnnnnnnnnnnnnnnnnnnnnnnnnnnnnnnnnnnnnnnnnnnnnnnnnnnnnttcgacccctgagcttgttcagacatatggtccgaattcagattaaggtggtcacccagtccgagatgtcaggaaaggccttctgcagagaaaatgtccccctacccgccatctgcagccaggtgtgtgccgcacggcagccttcccgaaacatagtatggattttaaaaatgtnnnnnnnnnnnnnnnnnnnnnnnnnnnnnnnnnnnnnnnnnnnnnnnnnnnnntgtcttgtttttaagtattgctgctatccttgttatccttcccacggtttttatcgctgatttattttgtgaaagttgtacactaatgttctgttttatgtcaaaatcaaaagtatttaatgaaatactagttctatttaatgtggttatggaaccagctggaaacacaaaacaaacagtgattgtacagcaggctgggcccaggaggtcaggttcattttgttacatatgcaataaactcacgactt

SEQ ID NO: 24363 - DNA, 409 bp, Macaca Mulatta
cgtttcttgaacaaaagttctgaagatgatgcggcctcagagagcttccttccctcggaaggtgcgtcctctgacccggtgaccctgcgtcgaaggatgctggctgccgccgcggaacggaggcttcagaagcagcagacctcctagcgctcccttgccttcctcagctgcctcctgcgccctgtgcccaaccgaccggaggaggcctgtcccagttctgcccgctgtgtggagaagcgggcttgactgcattgccgctgtataaagcatgtggtcttatagtgtttggacagctgacaaatttaatccatctttgtaatactttctatgtgacatttctcttccccttagaaacactgcaaattttaactctaggcatgatctcttctggtgttgactggactgcttg

SEQ ID NO: 24364 - DNA, 704 bp, Macaca Mulatta
  misc_feature (1)...(704): n = A,T,C or G
gttgctgcctcctttgacgatgatgacaagatcgttgggggctacacctgtgaagagaattctctcccttaccaagtgtcgctgaattctggctcccacttctgcggtggctccctcattaacaaacagtgggtggtgtcagcagctcactgctacaannnnncatccaggtgatactcgggagagcacaacatcgaagtcctggaggggactgagcagttcatcaatgcagccaagatcatccgccaccccaaatacaacaggaatactctgagcaatgacatcctgctgatcaagctctcctcacctgccatcatcaatacccacgtgtccaccatctctctgcccactgcccctccagccgcaggcaccaagtgcctcatctccggctggggcaacactctgagctctggnnnnnnnnnnnnnnnnnnnnnnnnnnnnnnnnnnnnnnnnnnnnnnnnnnnnnnnnnnnnnnnnnnnnnnnnnnnnnnnnnnnnnnnnnnnnnnnnnnnnnnnnnnnnnnnnnnnnnnnnnnnnnnnnnnnnnnnccagggtgactctggtggccctgtggtctccaacggagagctccaaggaattgtctcctggggctatggctgtgcccagaagaacaagcctggagtctacaccaaggtctacaactatgtggactggattgaagacaccatagctgccaacagcta

SEQ ID NO: 24365 - DNA, 118 bp, Macaca Mulatta
ggtcaatgtctggtctgggtccagtgttccttcccaaactgtgggaaatggaggcggctgtgtgggaacattgacccctcagttctcccagataattggtcctgtgatcagaacacag

SEQ ID NO: 24366 - DNA, 789 bp, Macaca Mulatta
ctgtgcatgggctgaccccgaaacttcccagcctctcttctcaaagcaccctcaggtgacctctcgggggttacccctcattgataccgtgtctcctcgtgtttttgtccagactccaattccagggtttcagaaccatatcgcagcatctttcctgaaatgcactcagactcagccagcaaagacgtgcctggccgtatcctgctggatatagacaatgataccgaaagcacggccctgtgaagaaagccctccccagccctccgccgcttccaccctggcacatggagcaggggcatgcaaacctcttcctttgcagacagaacagtgaaaagctttcagtggaggacaaaggagggcctcactgtgcgggacctggccttctgcacggccctaggagcacctggaggccgccacggaagctgaatgacctgtgtcttgaagaagttggctttcttcacatgggaaggaaataatgccaaaaaaatccaaaacaaagaaatacctggagtggagagagcgttcctgctgaaacgtgcataggaagcttttgcccctgctgttaacgcgggcagcacctacagcaacttggaatgagtaagaagcagtgcgttaactatctatttaatacaatgcgctcttcatgcgagtggcctgctctctgctacctggactttcattcttatgtattaggagggcggctgctgtccttcagacttgctgcagagtcattttgtgtcatatatcgtctgtgtctccccagtcccctcagaaccatgcccttggatg

SEQ ID NO: 24367 - DNA, 147 bp, Macaca Mulatta
agaccttcgaaatgtgtccactgttgatgtgaatgtggaaatgaatgctgcccccggtgttgatctgactcaacttctgaataacatgagaagccaatatgaacaacttgctgaacaaaaccgcacagatgctgaagcctgattcaa

SEQ ID NO: 24368 - DNA, 561 bp, Macaca Mulatta
  misc_feature (1)...(561): n = A,T,C or G
ctcagatattgaagccaacctataaatacagcagaagctgaagaaaagataatggctcaaaaagcaaaaggagaaagcttccctgtccctgaggacctgcccatagttgtggatgagaagtcccttgataagtagggtctgaacccacatgatccaatgttggctctgtgaacctgggacagtggctgtgtgtcagtaacccagggtgattcagaagccccatgaagcagccatcttgcctggatctctggaatggacacatctgctgagatcacaaagacgaagctggcagagcccgtgtggatattcattattacgaacgaaagaacagccaacaggagccgtgccacgtgcataccgtgagttcacagatgcctccctgcttcttctaatgtttgccagttgttacnaaatgatctagagaaaaaccggaacttgatggagaaagcgatggcttacgattcagcaggcttttcttcgagagtttaccccaaatctctatgcacagtggctcagctcactctgagaacactaggatcttcacttttcatctttctgcaa

SEQ ID NO: 24369 - DNA, 418 bp, Macaca Mulatta
  misc_feature (1)...(418): n = A,T,C or G
ggcaacagcattattgagaaaagcccctacagaagagtgtggccataggtcagctattcacagtagtgaatcatcttgcagcttgccgtctattctgaatgacaatagtggaataaaggaagccaaatctgctgtatggctcaacaacgttcctacaagggaacaagnnnnnnnnnnnnnnnnnnnnnnnnnnnnnnnnnnnnnnnnnnnnnnnnnnnnnnnnnnnnnnnnnnnnnnnnnnnnnnnnnnnnnnnnnnnnnnnnnnnnnnnnnnnnnnnnnnnnnnnnnnnnnnnnnnnnnnnnnnnnnnnnnnnnnnnnnnnnnnnnnnnnnnnncaggtttgaatattggcagcggtgcaaaggagacaaagacagctaacaaaattgcgtcggaagctaattgtcatctagtgaag

SEQ ID NO: 24370 - DNA, 741 bp, Macaca Mulatta
caactgtgcataccggaccagcccaaaggagagacacatcattgtggcctgtgaagggagcccacatgtgccagtccacttcgatgcttctgtggaggactcaacctaaggtcagagcagcgagataccccacctccctcagcctcatcctttccacagctgcctcttccctcttccctcttccttccctgctatgaaagaagtaactccagttagggctcctagtcaacacactcatgcttccttttcctgagtcccacccctgcgtgattttgggggtgaagagtgggttgtgaggtgggccccatgttaacccctccactctttctttcaataaaacacagttgcaagcacttgatttctgaagcggttctgtctaggtactgtttctggcattggcttccagcaaggggcaagaactgtaaatctgattcgctttggagaacggtgaatgaagtaattaaatgctttcccttctgacttggattttagtggcttgagaaaattcctttccttgtagattccttgatgccaaacctaaaactattaagtgtgggctgttctagacaaaagggagcaacagcctgggacactgccatgcagggtgaactgacagaggggtgaagctcaaatacagtcattctgtggcacagaaggaaggtgagtgcaacctcaggaagaccctgcttagcctcaggatgaggaaaaggagtcaatgaaatgatgatcctaaatgtccat

SEQ ID NO: 24371 - DNA, 192 bp, Macaca Mulatta
tcaagccccggttgttgcttcgtcccacagattggcctgttcgacttggaagtgaaactgcctcaccaagatcctctttggtgccctggtggtggtctcgctggtcatggttgcccttcagcactttgcaggtcgttggtacctgcagatcatccgcttcctcctcttgttttccaacatcatccccattag

SEQ ID NO: 24372 - DNA, 2879 bp, Macaca Mulatta
  misc_feature (1)...(2879): n = A,T,C or G
acaaagagcagccccgaggcccgctcaatgctctcgatgggcaccaggaagcgctccagtgggatggcctcgtccacaggtgcgttgggcatcacgtaggagcggagctcaatttgcccgcctgcggcctccaggatcagcaccttgaagaagtgtgtgggcactgccacgtggtttttgccgatgacctggtacttcacataggatttcccatcagcctctgtcctgtaggcagacccaggcacaagtgggcaggaggcctggatgaacccaaggccacctcttcaaggaagccttccctgatctgtcctttaacttctgtcagcaagcaggacgactccctcactgtgagacttctgtagcccgcctggctcctccttgaggctggaactctgtccagggtggaggttaactctccctctgttttccttatgcccaacactgggtcaggtagagtgggcgacaataaatgccgctagaagaattgagccttctgcacattcacattcatctggggggagacttaacaactgtccgtctctccccacaggggtgagcaccaagtgggcaaggaccatgacaggtgacatcccagcaccagcacgggtgccgggacannnnnnnnnnnnnnnnnnnnnnnnnnnnnnnnnnnnnnnnnnnnnnnnnnnnnnnnnnnnnnnnnnnnnnnnnnnnnnnnnnnnnnnnnnnnnnnnnnnnnnnnnnnnnnnnnnnnnnnnnnnnnnncaggccctggggaagcatgtgacatcaaccaagaggtcgcaggttttatagtgggggacacaggtcctttgcccacagcaccaaggaactaggggatgaggcaggcctggactccaccccgagcctgtggattccaaagtgagctgctcagctccacatgttgcctctcagtcccagccctctgcaggccagaaaaaccatggagcatgcccagaggtgctccgttgcttccatctgagaggcagggctgcagaggggcaagagtggaggccccgggtcaggcagatctaggttcaaactcctgagaagggtagaggaaagtgctccaagcagagcagagactgaaggtgggaaagctcggtgcaccggggacctgcaggggnnnnnnnnnnnnnnnnnnnnnnnnnnnnnnnnnnnnnnnnnnnnnnnnnnnnnnnnnnnnnnnnnnnnnnnnnnnnnnnnnnnnnnnnnnnnnnnnnnnnnnnnnnnnnnnnnnnnnnnnnnnnnnnnnnnnnnnnnnnnnnnnnnnnnnnnnnnnnnnnnnnnnnnnnnnnnnnnnnnnnnnnnnnnnnnnnnnnnnnnnnnnnnnnnnnnnnnnnnnnnnnnnnnnnnnnnnnnnnnnnnnnnnnnnnnnnnnnnnnnnnnnnnnnnnnnnnnnnnnnnnnnnnnnnnnnnnnnnnnnnnnnnnnnnnnnnnnnnnnnnnnnnnnnnnnnnnnnnnnnnnnnnnnnnnnnnnnnnnnnnnnnnnnnnnnnnnnnnnnnnnnnnnnnnnnnnnnnnnnnnnnnnnnnnnnnnnnnnnnnnnnnnnnnnnnnnnnnnnnnnnnnnnnnnnnnnnnnnnnnnnnnnnnnnnnnnnnnnnnnnnnnnnnnnnnnnnnnnnnnnnnnnnnnnnnnnnnnnnnnnnnnnnnnnnnnnnnnnnnnnnnnnnnnnnnnnnnnnnnnnnnnnnnnnnnnnnnnnnnnnnnnnnnnnnnnnnnnnnnnnnnnnnnnnnnnnnnnnnnnnnnnnnnnnnnnnnnnnnnnnnnnnnnnnnnnnnnnnnnnnnnnnnnnnnnnnnnnnnnnnnnnnnnnnnnnnnnnnnnnnnnnnnnnnnnnnnnnnnnnnnnnnnnnnnnnnnnnnnnnnnnnnnnnnnnnnnnnnnnnnnnnnnnnnnnnnnnnnnnnnnnnnnnnnnnnnnnnnnnnnnnnnnnnnnnnnnnnnnnnnnnnnnnnnnnnnnnnnnnnnnnnnnnnnnnnnnnnnnnnnnnnnnnnnnnnnnnnnnnnnnnnnnnnnnnnnnnnnnnnnnnnnnnnnnnnnnnnnnnnnnnnnnnnnnnnnnnnnnnnnnnnnnnnnnnnnnnnnnnnnnnnnnnaaggactgagacctatccccagcccctcccaggggctcatgggaagaccagcccttccaaccaccaacccgttccttttcccagtctgagccataggaagagcctagagggaatgtcatgaatcgacctccatcctgagctctccaggcctcggacaatggaaagtgggtagggggctgtgctcccagaaggaatctgggtcagaggctggtgccccatgggctccacccagagccccatggcagtctccatcctttggtgccaggacctgctgggaacaggctgagagggcagttggcccagtgcacagtgcctggcactaacagcctgaccatgggtcaggtgtctgccttgaaactgcccaaaggcagacagggtaggacgatgtctggaggctcacggttttataagccaggggtccccaacccctgggccacggactggtaccagaactgggccacacagcaggaggtgagcacaaggccagcaagggaagcttcatctgtatttacagccattccccattgatcgcatggcagcctgagctccgcctcttgtcagatcagtggcagctggagattctcacaggcattggaaccctaaggtgaactgcgcatgtgaggaggttgcacgcttcttttgaaaacctaatgcctgatctggcattatcgccgtcacctccagatagaactggaatagattggaggaaaacaagctcaggttacgcacggatcctacattactgtgagatgtatatttcactatagattacaatgtaataataat

SEQ ID NO: 24373 - DNA, 244 bp, Macaca Mulatta
  misc_feature (1)...(244): n = A,T,C or G
ggccagagcagaccttgtcctcaaggccaggccgtggggtgaacatcagcaccagncagttccggggccgtgccaacctgcacgtgtttgaggactggtgtggcagctctatccaacagctcaggaggaacctgcatttcccgctgtacccccannnncgcacaaccctgaggaagctggccgtgtcccccagatggaccaactatggcctccgcatctttggctacctgcaccctttcactga

SEQ ID NO: 24374 - DNA, 151 bp, Macaca Mulatta
agtgatgactcgagagcactgcctccagcccctcctatagattcatattgaatgatgggacaatgcttagcgcccacaccaagtgtaaactttgctaccctcaaagtccagacatgcagcctttcatcatgggaattcatatcatcgacag

SEQ ID NO: 24375 - DNA, 464 bp, Macaca Mulatta
  misc_feature (1)...(464): n = A,T,C or G
ttagattttaacactattcgtagctctagccttacattttcagcaagttcaaacaggacacaaaaccacagtcaactgaacacagagcagctctcttctaaagcatctccagtgagtgatgcagagattcaaaaatacaaagcaggcaacttatatacagcaaatcctcacactgcttggacatgggccacttttttgttgtttttaatatatctttccttcctggttgctagtttagactgaattcttaaggatttatcttgatgacttagaaaaatacacgcatcctttctcactttgtttcaggtagtgcacagtcatgaaattgagtaagtctcttaaagaaatgaaagtccacagatcccatgngtggaaggtttcaggaacccctccccaggtaacgatcaggggatcttcaacagctcaaggagtgctccaacagctccaaaataaccctcgtgttc

SEQ ID NO: 24376 - DNA, 659 bp, Macaca Mulatta
tgtactaagtctatttcatggtttgaggatttgaaggttgcttgttttcttattttgatgagccagtcatgagagagagttcatataattgtaatgatttggaatgtcagaaatccacataaatggggctgtgtgagagttctatgactttatatttgagccttttagtttttgcattaatcttactagtcctgcctacatcaggcagggctcataaattgcaaattgctgactgagtaaaaaagcatgaatcggcatactacaccctgtgggcccataacctgttttggtaaatacagttttattagaacacagctatggccattcatttatatattgtctttggctggtttcatgctacaatggcagagttaagcaactgtttcaaagacaataaggcccataaagcttaaaatatttgccatctgtctctctaacaaagagtttgtatgtgaaggaaagattgcaaggaaactgaattattgtttagaatagaaggtcaatctgcagagaaaacagagtccactcctctttactttcaggaagcttagggagagcctaaacgggtgctgagaatgtctcttttctttccaggttttctctttctttgatttgatccgctactgtgtcagtgttgcatcgtgcttcaccgcacatac

SEQ ID NO: 24377 - DNA, 70 bp, Macaca Mulatta
aggccgtgaattctggtgaactccgggcatttgactggggagtgagaccaaaattctggaaaaatgcaat

SEQ ID NO: 24378 - DNA, 455 bp, Macaca Mulatta
ccctgccccaccccctccattgctcctcctcacctttgcaaggagaaagcaggctcaggtagttttcagggctttgtgataaaacctccttaaatctgttcagaccaagcagtgtgagcttcctctcctgtcccatgttggaagatgctctgaaggggtggtagatgctggaagccagacacaaccctgcataccccactcaattggcggaagctggggctgggactggagtcagcccagctgggaggaagggctggggaggatctgcagctgaagcccaaggcagggctagtttgatgccaaggcaaagtggtgagagagaaaataggaaaggggcttttctctgaattggtaaatgggaaagaagtgagcaacttaagattgtcaccatcacaagtgtacaggattagactgtgtttatatttaactcttgcttcataggtgtaccatttaat

SEQ ID NO: 24379 - DNA, 126 bp, Macaca Mulatta
agcatgtttgctgtgactgcaagaaggatttttgctccgtttgttcagttaagcaagaaaatctccgtagatgttctacttgtcacttattacaggagacagcatttcagcgccctcagttaatgc

SEQ ID NO: 24380 - DNA, 669 bp, Macaca Mulatta
  misc_feature (1)...(669): n = A,T,C or G
ggaaattagaaaattaaggtttcttcactacttctatggtagggttgtctgaaattccctttcaggctgtgggtactggtcttaggttctagtcagaaggggttccttataaggagcacgaggaggggagtacactttcatatcatttaattttgatcctgccctctccagctgctccttcaaaagatacatcaaaagatacaaactcggccgggcacagtggctcacannnnnnnnnnnnnnnnnnggggcgcggatcacctaaggtnnnnnnnnnnnnnnnnnnnnnnnngacgnnnnnnnnnnnnnnnnnnnnnnnnnnnnnnnnnnnnnnnngggtgtnnnnnnnnnnnnnnnnnnnnnnnnnnnnnncnnnnnnnnnnnnnnnnnnnnnnnnnnnnnncgggagggnnnnnnnnnnnnnnnnnnnnnnggcgccattgcactccaacctgggcaacaagagcaaannnnnnnnnnnnnnnnnnnnnnnnnacaaagtctgcatttgatataatgccttaattactgggtctacaattaatgttgactgttttagattgtaagctcctggagaacagtattgctgtagtaggaatgttttaacagtgtcatatgaaaaagaacaaaataaatattttgattttgttatctaaaagaaaaaaaaaa

SEQ ID NO: 24381 - DNA, 826 bp, Macaca Mulatta
  misc_feature (1)...(826): n = A,T,C or G
ggcatgccagatttcctggagaagctgcacatggccactctgaaagccaagaatatggagattaaagtaaaggactacatctcggctaaacctctggaaatgagtagtgaagccaaggccaccagccagtcctctgagcgaaagaacgagggcagctgtggccctgctcagattgagtatgcctgacaggctttgggataagaagggacaggcgcttctagccctgtctcagtcctttatcactctgctccagaaaggggacatgccacatgtattagaaggcgtctgctgtaacttcagtgcaagaaaattcaataactgataccccatttcattcagagcccttattgctcttatcaaaacagaagaaggctacatttgtgggagtgttgtcatattctcaggccaactcttttgaaattcggtgtctcattgagctaatctggaacaaactgctaacctcaggccagaaggggatgacctccatttgattctctgagtagtttcctctgctgacattccaaatcccaccatcgattgtgcagcgctttggatttccttcagttctgcaggtccacctggaaagtgtagttaaagcggttgagtctctcagatgaggggccactgggagtgctcttggtaacaatcatgttgtgaataggtgtgagcgatacttggttgtgttaagtgccttgtccgcaccttgcttttatctctagggacatgaagttattnnnnnnnnnnnnnnttttaagtagagatggagtttcactctgtttcccaggctggtcttgaactcctgggccatacctggccagggacatga

SEQ ID NO: 24382 - DNA, 3140 bp, Macaca Mulatta
  misc_feature (1)...(3140): n = A,T,C or G
aggcgctgcaccagctctactatgaccccaacattgagaacaagaacctggctcagaagtggctgatgcaggcccaggtctccccacaggcctggcacttcagctggcagctactgcaacctgacaaggtaccagagatccagtactttggggccagtgctctgcacatcaagatctcnnnnnnnnnnnnnnnnnnnnnnnnnnnnnnnnnnnnnnnnnnnnnnnnnnnnnnnnnnnnnnnnnnnnnnnnnnnnnnnnngctccaagattgtactgactcggctgtgcgtggcactggcctcactggctctcagcatgatgcctgacgcttggccatgtgctgtggcagatatggtacgactcttccaggctgaggactcaccagtggatggccagggtcgctgcctagccctgctagagctactgacagtgctgcctgaggagttccagaccagccgcctaccccagtaccgcaaaggcctggtgcggaccagcctggcggtggaatgtggggctgtcttccctctgctggagcaactactacatcatcccagctcacccagctgtgtgcgtcagaaggtgctcaagtgtttctccagctgggtgcagctggaggtgccactgcaggactgtgaggcgctcattcaggctgccttcgctgctctgcaggactcggagctcttcgacagcagtgtggaggccattgtgaatgccatctcacagcctgatgcccagaggtnnnnnnnnnnnnnnnnnnnnnnnnnnnnnnnnnnnnnnnnnnnnnnnnnnnnnnnnnnnnnnnnnnnnnnnnnnnnnnnnnnnnnnnnnnnnnnnnnnnnnnnnnnnnnnnnnnnnnnnnnnnnnnnnnnnnnnnnnngggccttgctggaccaagtagagcactggcagagtttcctggcacttgtcaacatgattatgttctgcacaggcatccctggccactatcctgtcaatgagaccaccagctccctaaccctcaccttctggtacacgctgcagnnnnnnnnnnnnnnnnnnnnnnnnnnnnnnnnnnnnnnnnnnnnnnnnnnnnnnnnnnnnnnnnnnnnnnnnnnnnnnnnnnnnnnnnnnnnnnnnnnnnnnnnnnnnnnnnnnnnnnnnnnnnnnnnnnnnnnnnnnnnnnnnnnnnnnnnnnnnnnnnnnnnnnnnnnnnnnnnnnnnnnnnnnnnnnnnnnnnnnnnnnnnnnnnnnnnnnnnnnnnnnnnnnnnnnnnnnnnnnnnnnnnnnnnnnnnnnnnnnnnnnnnnnnnnnnnnnnnnnnnnnnnnnnnnnnnnnnnnnnnnnnnnnnnnnnnnnnnnnnnnnnnnnnnnnnnnnnnnnnnnnnnnnnnnnnnnnnnnnnnnnnnnnnnnnnnnnnnnnnnnnnnnnnnnnnnnnnnnnnnnnnnnnnnnnnnnnnnnnnnnnnnnnnnnnnnnnnnnnnnnnnnnnnnnnnnnnnnnnnnnnnnnnnnnnnnnnnnnnnnnnnnnnnnnnnnnnnnnnnnnnnnnnnnnnnnnnnnnnnnnnnnnnnnnnnnnnnnnnnnnnnnnnnnnnnnnnnnnnnnnnnnnnnnnnnnnnnnnnnnnnnnnnnnnnnnnnnnnnnnnnnnnnnnnnnnnnnnnnnnnnnnnnnnnnnnnnnnnnnnnnnnnnnnnnnnnnnnnnnnnnnnnnnnnnnnnnnnnnnnnnnnnnnnnnnnnnnnnnnnnnnnnnnnnnnnnnnnnnnnnnnnnnnnnnnnnnnnnnnnnnnnnnnnnnnnnnnnnnnnnnnnnnnnnnnnnnnnnnnnnnnnnnnnnnnnnnnnnnnnnnnnnnnnnnnnnnnnnnnnnnnnnnnnnnnnnnnnnnnnnnnnnnnnnnnnnnnnnnnnnnnnnnnnnnnnnnnnnnnnnnnnnnnnnnnnnnnnnnnnnnnnnnnnnnnnnnnnnnnnnnnnnnnnnnnnnnnnnnnnnnnnnnnnnnnnnnnnnnnnnnnnnnnnnnnnnnnnnnnnnnnnnnnnnnnnnnnnnnnnnnnnnnnnnnnnnnnnnnnnnnnnnnnnnnnnnnnnnnnnnnnnnnnnnnnnnnnnnnnnnnnnnnnnnnnnnnnnnnnnnnnnnnnnnnnnnnnnnnnnnnnnnnnnnnnnnnnnnnnnnnnnnnnnnnnnnnnnnnnnnnnnnnnnnnnnnnnnnnnnnnnnnnnnnnnnnnnnnnnnnnnnnnnnnnnnnnnnnnnnnnnnnnnnnnnnnnnnnnnnnnnnnnnnnnnnnnnnnnnnnnnnnnnnnnnnnnnnnnnnnnnnnnnnnnnnnnnnnnnnnnnnnnnnnnnnnnnnnnnnnnnnnnnnnnnnnnnnnnnnnnnnnnnnnnnnnnnnnnnnnnnnnnnnnnnnnnnnnnnnnnnnnnnnnnnnnnnnnnnnnnnnnnnnnnnnnnnnnnnnnnnnnnnnnnnnnnnnnnnnnnnnnnnnnnnnnnnnnnnnnnnnnnnnnnnnnnnnnnnnnnnnnnnnnnnnnnnnnnnnnnnnnnnnnnnnnnnnnnnnnnnnnnnnnnnnnnnnnnnnnnnnnnnnnnnnnnnnnnnnnnnnnnnnnnnnnnnnnnnnnnnnnnnnnnnnnnnnnnnnnnnnnnnnnnnnnnnnnnnnnnnnnnnnnnnnnnnnnnnnnnnnnnnnnnnnnnnnnnnnnnnnnnnnnnnnnnnnnnnnnnnnnnnnnnnnnnnnnnnnnnnnnnnnnnnnnnnnnnnnnnnnnnnnnnnnnnnnnnnnnnnnnnnnnnnnnnnnnnnnnnnnnnnnnnnnnnnnnnnnnnnnnnnnnnnnnnnnnnnnnnnnnnnnnnnnnnnnnnnnnnnnnnnnnnnnnnnnnnnnnnnnnnnnnnnnnnnnaaagagtaaacctggaccctcatgctgtctctgcctcctttctgctgccaccaccacctaactgaaagcctgggtccagaaggcctgggggaaggatgggaggatgcttggaccaggcctgagggaatagtaggaacaccctctagctcccaggttggaagagatattgctgtagccaagacacctaggctggagcccttcagaatactgccattgcccttggggtggggtggttgcactagtgtcatcaaccctgccatccccattaaattagtcccaacatg

SEQ ID NO: 24383 - DNA, 1735 bp, Macaca Mulatta
  misc_feature (1)...(1735): n = A,T,C or G
agctctcaaatcgactagaagtggtgaaggaatttctgagaaacaatgaggatcttagaaatggccttacagaagatatgcagaagctagacagcctccgtctacatcagaaactggattcacaggaacctgggagacagacacctgacaggaaggcctgaggtgagttcaggcagatgatggtgttaaagaaggacagaatcgccccatctctttcatgtctgttctctcatgtgaggccatcatgaacacacaacagtctaatctgaagtttgtccttattgtttcaaagagaggacactgaggtttgtgttcgttctctacaacggttcttaagtctgtgaagtaattcaacatcaactccctgtttagccaaatatacctgaagtcattggtctagaattaaatgaatcagctttataacataatcaaaaagcatttctgccttaaaatgacaccattgatgcgtggctcttaccatggcattaatagcaattgattagttaccgtaaggagaacttcttaaaatgnnnnnnnnnnnnnnnnnnnnnnnnnnnnnnnnnnnnnnnnnnnnnnnnnnnnnnnnnnnnnnnnnnnnnnnnnnnnnnnnnnnnnnnnnnnnnnnnnnnnnnnnnnnnnnnnnnnnnnnnnnnnnnnnnnnnnnnnnnnnnnnnnnnnnnnnnnnnnnnnnnnnnnnnnnnnnnnnnnnnnnnnnnnnnnnnnnnnnnnnnnnnnnnnnnnnnnnnnnnnnnnnnnnnnnnnnnnnnnnnnnnnnnnnnnnnnnnnnnnnnnnnnnnnnnnnnnnnnnnnnnnnnnnnnnnnnnnnnnnnnnnnnnnnnnnnnnnnnnnnnnnnnnnnnnnnnnnnnnnnnnnnnnnnnnnnnnnnnnnnnnnnnnnnnnnnnnnnnnnnnnnnnnnnnnnnnnnnnnnnnnnnnnnnnnnnnnnnnnnnnnnnnnnnnnnnnnnnnnnnnnnnnnnnnnnnnnnnnnnnnnnnnnnnnnnnnnnnnnnnnnnnnnnnnnnnnnnnnnnnnnnnnnnnnnnnnnnnnnnnnnnnnnnnnnnnnnnnnnnnnnnnnnnnnnnnnnnnnnnnnnnnnnnnnnnnnnnnnnnnnnnnnnnnnnnnnnnnnnnnnnnnnnnnnnnnnnnnnnnnnnnnnnnnnnnnnnnnnnnnnnnnnnnnnnnnnnnnnnnnnnnnnnnnnnnnnnnnnnnnnnnnnnnnnnnnnnnnnnnnnnnnnnnnnnnnnnnnnnnnnnnnnnnnnnnnnnnnnnnnnnnnnnnnnnnnnnnnnnnnnnnnnnnnnnnnnnnnnnnnnnnnnnnnnnnnnnnnnnnnnnnnnnnnnnnnnnnnnnnnnnnnnnnnnnnnnnnnnnnnnnnnnatatttcctttttagacgatagcaagaagaaacattgcctgaaaggcgatttttctagctcttttccaattagtacagaaatgttactgcctctgggtacagtggctcacgcctgtaatcccagcgttggtgggcggatcacttgagcccaggagtttaataccaacctgggcaagttggcgagaccccatctctacaaaaaagttaaaaattacctgggcatggtggcacacacctttagtctcagctactcaggtggctgaggtgggaggatcccttgagcccaggtggtcaaggctgtggtgagctatgatcatgccactgcactccagcctgggtaacagaacaagaccctgtctc

SEQ ID NO: 24384 - DNA, 3237 bp, Macaca Mulatta
  misc_feature (1)...(3237): n = A,T,C or G
tctgacagcaccgaggcccagcaacagcagggccgactgttcttggatccactcaacacccaaatgagcaaacaggttgactgctcgcctgctggagaaaagctttgggctctcggcaaggtgttggagagaagaatactttcattttggcaactctgggaaccggagtccatgtggaggggaccctgcctctggttaccactaactttagtcctctgccagcccctatctgtccccctgctcccggttcagcctctgtccccccctctgttccagatgcattccaggttcccctctccgtccctgccccagtcccccattcagggcttgttccagtccaagttgccacttcagttccagctccttcccctcccttagcacctgtcccggctctggctccggcgccaccgtcggtgcccacgctcatctctgactcgaaccccctttccgtttcagcctcggtcttggtgcctgtgccagcttctgctcccccttcgggcccggtccccctgtcggcttcagctcctgccccgctttcagtcccagtttcagctcctcccttggctctcatccaggctcctgtgcccccttcagctccaaccttggttctcgctcctgtccccactccggttctggctcccatgccggcatccacacctccagcggcccctgcccctccgtctgtgcccatgcccactccaaccccgtcttccggcccaccttctacccccaccctcatccccgcctttgctcccacgccggtgcctgcacccaccccagcccccatctttactccagcccccacacccatgcctgctgccacgccagctgccattcccacctctgcacccatcccggcctccttcagtttgagtcgagtgtgctttcctgcagctcaggcaccagctatgcaaaaagtacccctgtcctttcagcccgggacagtgctgaccccgagccagccgctggtatatatcccacctccaagctgtgggcagccgctcagtgtggccacactgccaaccactctaggggtctcctccactcttacgctccctgtcctgccgtcctacctgcaggacaggtgtctcccaggcgtgctagcctccccagagctccgttcttacccgtacgcattttctgtggcccggcctctgacttcggattccaagctggtgtctctggaggtgaacaggctcccttgcacttccccatccggtagcaccaccacccagcctgcacccgacggagtccctgggcctttggcagatacgtccctcgtcactgcttctgccaaggtgcttccaactccacagcctctgctgccagcccccagtgggagctcagccccaccacacccctccaagannnnnnnnnnnnnnnnnnnnnnnnnnnnnnnnnnnnnnnnnnnnnnnnnnnnnnnnnnnnnnnnnnnnnnnnnnnnnnnnnnnnnnnnnnnnnnnnnnnnnnnnnnnnnnnnnnnnnnnnnnnnnnnnnnnnnnnnnnnnnnnnnnnnnnnnnnnnnnnnnnnnnnnnnnnnnnnnnnnnnnnnnnnnnnnnnnnnnnnnnnnnnnnnnnnnnnnnnnnnnnnnnnnnnnnnnnnnnnnnnnnnnnnnnnnnnnnnnnnnnnnnnnnnnnnnnnnnnnnnnnnnnnnnnnnnnnnnnnnnnnnnnnnnnnnnnnnnnnnnnnnnnnnnnnnnnnnnnnnnnnnnnnnnnnnnnnnnnnnnnnnnnnnnnnnnnnnnnnnnnnnnnnnnnnnnnnnnnnnnnnnnnnnnnnnnnnnnnnnnnnnnnnnnnnnnnnnnnnnnnnnnnnnnnnnnnnnnnnnnnnnnnnnnnnnnnnnnnnnnnnnnnnnnnnnnnnnnnnnnnnnnnnnnnnnnnnnnnnnnnnnnnnnnnnnnnnnnnnnnnnnnnnnnnnnnnnnnnnnnnnnngccaggctggtgctgagggacagccaagcacagtgaaacgatacaccccagcccgccattgccctggggctgccagggtgccaaaaccaaggaactctctttgtggaaacccacggggccggcaaatatttatccccggtgttcagtcaatggaaaacctaccagcacccaggtcctgcctgttggctggtccccataccaccaggcgtctctgctttccattggcatttccagtgctgggcagctgacccccagtcagggggcgcccatcaagcccaccagcgttgtttcggagttttctggtgtgccatctctcagctccagcgaagccgtgcacggacttcccgaggggcagccacggcctgggggctcctttgttccagagcaggacactgttacaaagaacaaaacttgccggattgctgccaagccttacgaagaacaagtcaatcctgtcctcttgaccctcagccctcagactgggaccctggcactgtctgttcagcctagcagtggggacattcgaatgaatcaggggcctgaggaatcagagagccacctctgctctgacagcactcctaagatggaaggcccccagggggcttgtggcctgaagctggcaggagacacgaagcctaagaaccaagtgctggccacctacatgtcccatgagctggtcctggccaccccccagaacctgcctaagatgcctgagctgcctttgctacctcacgacagccaccccaaggaacttaccttggacgtggttccgagcagcaggaggggctccagcaccgagcgcccacagcttggaagccaggtggatctggggcgagtgaaaatggagaaggtggatggtgatgtggtcttcaatttagccacctgcttccgggctgatggcctcccagcggctccccaaaggggccaagctgaagttcggggtaagaccgggcaggcgcgagtgaaacaggaaagtgtaggggtctttgcttgcaagaacaagtggcagccagatgatgtgacggaattctctgccgcccaagaagatgaagtgtggcaaagagaaggacggcgaggagcagcagctgcagccccaagccaaggccatggtccggagttcccacagacccaagnagtgccagaagctgcgcagtgaccaccaggaatccatcaagaaaagccccagggggggcttcagattcatgaaaagagcacaatggagtcaggggaaagcacaagcaccggaagccgacaaagccggagtcccagtctccaggaaaacgagccgtcggccacgaggaaggt

SEQ ID NO: 24385 - DNA, 89 bp, Macaca Mulatta
ggtacaccgttctgcacagtggacatcatcaggaactcgagaaactgcccatacacaatgacccagaatccctggaatcatgcttctga

SEQ ID NO: 24386 - DNA, 1195 bp, Macaca Mulatta
  misc_feature (1)...(1195): n = A,T,C or G
ccgctcgctcccgacagggctcacgatgcgcggcgggcagggcgcggcgnnnnnnnnnnnnnnnnnnnnnnnnnnnnnnnnnnnnnnnnnnnnnnnnnnnnnnnnnnnnnnnnnnnnnnnnnnnnnnnnnnnnnnnnnnnnnnnnnnnnnnnnnnnnnnnnnnnnnnnnnnnnnnnnnnnnnnnnnnnnnnnnnnnnnnnnnnnnnnnnnnnnnnnnnnnnnnnnnnnnnnnnnnnnnnnnnnnnnnnnnnnnnnnnnnnnnnnnnnnnnnnnnnnnnnnnnnnnnnnnnnnnnnnnnnnnnnnnnnnnnnnnnnnnnnnnnnnnnnnnnnnnnnnnnnnnnnnnnnnnnnnnnnnnnnnnnnnnnnnnnnnnnnnnnnnnnnnnnnnnnnnnnnnnnnnnnnnnnnnnnnnnnnnnnnnnnnnnnnnnnnnnnnnnnnnnnnnnnnnnnnnnnnnnnnnnnnnnnnnnnnnnnnnnnnnnnnnnnnnnnnnnnnnnnnnnnnnnnnnnnnnnnnnnnnnnnnnnnnnnnnnnnnnnnnnnnnnnnnnnnnnnnnnnnnnnnnnnnnnnnnnnnnnnnnnnnnnnnnnnnnnnnnnnnnnnnnnnnnnnnnnnnnnnnnnnnnnnnnnnnnnnnnnnnnnnnnnnnnnnnnnnnnnnnnnnnnnnnnnnnnnnnnnnnnnnnnnnnnnnnnnnnnnnnnnnnnnnnnnnnnnnnnnnnnnnnnnnnnnnnnnnnnnnnnnnnnnnnnnnnnnnnnnnnnnnnnnnnnnnnnnnnnnnnnnnnnnnnnnnnnnnnnnnnnnnnnnnnnnnnnnnnnnnnnnnnnnnnnnnnnnnnnnnnnnnnnnnnnnnnnnnnnnnnnnnnnnnnnnnnnnnnnnnnnnnnnnnnnnnnnnnnnnnnnnnnnnnnnggctggtgctggtcactgatgccttccctgccttgggcctgggcaacggccggcacacgctgtgacagcaggaagtggaagtggacggtctgacggcctatgtggcaggnaggcaccaagacgctgagcggcagcatagccccaatggacgtctgtgtccggcacttcctgcaggccacaggncaggctgcagcgtggagtcggccctggaggctgcatccctgcaccccgcccagttgctggggctggagaagagtaaggggaccctggactttggtgctgacgcag

SEQ ID NO: 24387 - DNA, 704 bp, Macaca Mulatta
  misc_feature (1)...(704): n = A,T,C or G
ttcggcctctctgtatacccccagtcgccaaaagggtattcctccaaggcgataagttgggtaacgccagggtttcccannnnnnnnnnnnnnncnnnnnnnnnnnnnnnnnnnnnnnnnnnnnnnnnnnnnnnnnnnnnnnnnnnnnnnnnnnnnnnnnnnnnnnnnnnnnnnnnnngtaaatgatgaaaaactttattctgcgtcaagatacctggaaaatgaagctgcatttggggcacattatacatgaggaatgatccatatatggtgagtacaaaactcaattatagaattatttcttagctagtaccagatactccaaattacaaatgcttaagtaaaagtaaaatacgatttgccatactaaaaggctagaagtgaaatatgacagaatttaaaccagcagatataaatgcagcacctatgtgtatattgattaaaaatcaaatattggggaaaaaaaatatgagaaaagctctggccttaaacacatctcacctgaaatccaaccagaaagccagtccatgattttagcaattttaattcattgtatgaaaaaaaaaatcatgaatgctaggagaatccagtgacaaaaagggcacttttttggttaaaactacaaaagaaacttgttttgtgagaacattaaggaaacattttaatcattttcaaaatgtctagttcaacgatgttcagaaaca

SEQ ID NO: 24388 - DNA, 801 bp, Macaca Mulatta
gggggcatcctgtggtgtaggggaagcgctctaggcctggaatccttacgcgtccagttgggtttagcacgatgagctccatcggcaccgggtatgacctgtcagcctctacattctctcctgacggaagagtttttcaagttgaatatgctatgaaggctgtggagaatagtagtacagctattggaatcagatgcaaagatggtgttgtctttggggtagaaaaattagtcctttctaaactttatgaagaaggttccaacaaacgactttttaatgttgatcggcatgttggaatggcagtagcaggtttgttggcagatgctcgttctttagcagacatagcaagagaagaagcttccaactttagatctaactttggctacaacattccactaaaacatcttgcagacagagtggccatgtatgtgcatgcatatacactctacagtgctgttagaccttttggctgcagtttcatgttagggtcttacagtgtgaatgacggtgcgcaactctacatgattgacccatcaggtgtttcatacggttattggggctgtgccattggcaaagccaggcaagctgcaaagacggaaatagagaagcttcagatgaaagaaatgacctgccgtgatattgttaaaagaagttgcaaaaaataatttacaatagtacatggatgaaagttaaaggaataaaagctttttgaaacttagaacctccagcctggggtttgggtggaatttaaacttaaattggaaaaagaacatggaaaaatttggtttcccaaaaaggaat

SEQ ID NO: 24389 - DNA, 2008 bp, Macaca Mulatta
  misc_feature (1)...(2008): n = A,T,C or G
ggactgcccaccagaagcaggtgatttccgagctcagcaatgctcagctcataatgatgtcaagcaccatggccagttttatgaatggcttcctgtgtctaatgaccctgacaacccatgttcactcaagtgccaagccaaaggaacagccctggttgttgaactagcacctaaggtcttagatggtactcgttgctatacagaatctttggatatatgcatcagtggtttatgccannnnnnnnnnnnnnnnnnnnnnnnnnnnnnnnnnnnnnnnnnnnnnnnnnnnnnnnnnnnnnnnnnnnnnnnnnnnnnnnnnnnnnnnnnnnnnnnnnnnnnnnnnnnnnnnnnnnnnnnnnnnnnnnnnnnnnnnnnnnnnnnnnnnnnnnnnnnnnnnnnnnnnnnnnnnnnnnnnnnnnnnnnnnnnnnnnnnnnnnnnnnnnnnnnnnnnnnnnnnnnnnnnnnnnnnnnnnnnnnnnnnnnnnnnnnnnnnnnnnnnnnnnnnnnnnnnnnnnnnnnnnnnnnnnnnnnnnnnnnnnnnnnnnnnnnnnnnnnnnnnnnnnnnnnnnnnnnnnnnnnnnnnnnnnnnnnnnnngattcgtaactcgggctccagtgacagtacagtccagttcatcttctatcaacccatcatccaccgatggagggagacggatttctttccttgttcggcgacctgtggaggaggtnnnnnnnnnnnnnnnnnnnnnnnnnnnnnnnnnnnnnnnnnnnnnnnnnnnnnnnnnnnnnnnnnnnnnnnnnnnnnnnnnnnnnnnnnnnnnnnnnnnnnnnnnnnnnnnnnnnnnnnnnnnnnnnnnnnnnnnnnnnnnnnnnnnnnnnnnnnnnnnnnnnnnnnnnnnnnnnnnnnnnnnnnnnnnnnnnnnnnnnnnnnnnnnnnnnnnnnnnnnnnnnnnnnnnnnnnnnnnnnnnnnnnnnnnnnnnnnnnnnnnnnnnnnnnnnnnnnnnnnnnnnnnnnnnnnnnnnnnnnnnnnnnnnnnnnnnnnnnnnnnnnnnnnnnnnnnnnnnnnnnnnnnnnnnnnnnnnnnnnnnnnnnnnnnnnnnnnnnnnnnnnnnnnnnnnnnnnnnnnnnnnnnnnnnnnnnnnnnnnnnnnnnnnnnnnnnnnnnnnnnnnnnnnnnnnnnnnnnnnnnnnnnnnnnnnnnnnnnnnnnnnnnnnnnnnnnnnnnnnnnnnnnnnnnnnnnnnnnnnnnnnnnnnnnnnnnnnnnnnagagaaacttccagtcgaggccaagttgccatggttcaaacaagctcaagaactagaagaaggagctgctgtgtcagaggagccctcgnnnnnnnnnnnnnnnnnnnnnnnnnnnnnnnnnnnnnnnnnnnnnnnnnnnnnnnnnnnnnnnnnnnnnnnnnnnnnnnnnnnnnnnnnnnnnnnnnnnnnnnnnnnnnnnnnnnnnnnnnnnnnnnnnnnnnnnnnnnnnnnnnnnnnnnnnnnnnnnnnnnnnnnnnnnnnnnnnnnnnnnnnnnnnnnnnnnnnnnnnnnnnnnnnnnnnnnnnnnnnnnnnnnnnnnnnnnnnnnnnnnnnnnnnnnnnnnnnnnnnnnnnnnnnnnnnnnnnnnnnnnnnnnnnnnnnnnnnnnnnnnnnnnnnnnnnnnnnnnnnnnnnnnnnnnnnnnnnnnnnnnnnnnnnnnnnnnnnnnnnnnnnnnnnnnnnnnnnnnnnnnnnnnnnnnnnnnnnnnnnnnnnnnnnnnnnnnnnnnnnnnnnnnaagaagcagtatcaattcagcatggaaagcctgcaaggttctttgttaggcagccaagaggcctggcttctcatcccgctgtcaccaactagctctgtggcatagggcaaggtgcctgccctttatgtttccacatctgcaaagtgaactggttgtacgtgatgatctgaggtcaccatgacttgctcacgtgtcccatgattctttatttcggaggcagaagcattaaacagctgcttctgct

SEQ ID NO: 24390 - DNA, 803 bp, Macaca Mulatta
  misc_feature (1)...(803): n = A,T,C or G
gggacaaatgtnnnnnnnnnnnnnnnnnnnnnnnnnnnnnnnnnnncttaaggggacccacaagtattgccctttaacaatacttcaaagttttctgctgtaaagaaagctgtaatatatagtaaaactaaatgttgcgtgggtggcatgagttgaagaaggcaaaggcttgtaaatttacccaatgcagtttggctttttaaattattttgtgcctatttatgaataaatattacaaattctaaaagataagtgtgnnnnnnnnnnnnnnnnnnnnnnncataaaaagggacaagcatgttgattctaggttgaaaatgttataggcacttgctacttcagtaatgtctatattatataaatagtatttcagacactatgtagtctgttagattttataaagattggtagttatctgagcttaaacattttctcaattgtaaaataggtgggcacaagtattacacatcagaaaatcctgacaaaagggacacatagtgtttgtaacaccgtccaacattccttgtttgtaagtgttgtatgtaccgttgatgttgataaaaagaaagtttatatcttgattatttttgttgtctaaagctaaacaaaacttgcatgcagcagctttttgacctgtttcccgagtgcctataaatatacctaaactcccctggaaattactgaagcacctttgaaatttttttatgtcctaaaattggtcagttaaattaaataattttggttggagaaagaatttttaatattgcccataattccggaagaatttttccctttgaaaaatt

SEQ ID NO: 24391 - DNA, 349 bp, Macaca Mulatta
tttctctctttcagttgggtttgctcccagtttctgcgctaccgtggatttcagtatgtgctggaaagcgatcaccattccggtgactacaagcatttccgggagtggggctctcacgcccagaccttccaggtgcagagcatccgcaggatccagcagtgagcaggggcgcggcacggaggagcgcatgcgtgcttgtctgcaatggaggcgctctggaggctgtggcctgctctctacttctgcctccccctgtaacccgtgtgaacccagcacccatgtgaacctgtccatgcacagtcagcacaaaaaactcaaacgaataaaaaatagaaagtccggtattagc

SEQ ID NO: 24392 - DNA, 197 bp, Macaca Mulatta
agcacagaccctggattctcatgctctatgggatgtgggcctgctggtgtgtgctggggacccctggtgtggccatggttttgctccataccaccatctctttctgcgtggcccagttccggtctcagctcctgtcgtggctctgttctctcctcctgctctccacactgaggctgcagggtgtggaggaagttaag

SEQ ID NO: 24393 - DNA, 587 bp, Macaca Mulatta
ggggtcaaataagacattctgtgaaaggtaaacatcgaaactggttataagtaaaaccatcaagccaacaacagggtcttgagataatctttgaagcttattgtgctggcctgcaccagaagatgtctgcattactcattgctaaaaatgtgtagcacagaactgcactagaattaatttgtttacaagaagaaatttaagctctacgtttggttttcacatacagcagctctattgaataacatgcatctgaattttaagttgcaaaggtatctgaatagttaatttttcatgtgcatcttttgtcgaatgttttggttcaagaaagaatgtttaaagctttttaaaagacttcagttcttaatataactgtaccctcctgcatggaaaatcataaccaacatggctgcagtagacttcttagtggtatccagcaccacttgcagagggctgctttatcatattgtacttgggtgtaggactctagtgttcttgggtgtattgcatgggctgcattatctacagcattgtacaataacaactagaaaaggcagtatacttcactgatgcttggcctggaatatcac

SEQ ID NO: 24394 - DNA, 269 bp, Macaca Mulatta
agcttcgcatccttagctgtacgtaagcgctacagctacttgactgagcctggaatgagtgagtttcctaacacatttactaatctatgtggattttcataagaagagacattttttctatacaaagcaaattttatcatttggaaagtcaatggtaaaagaaaaattgcctgcaggaaaaccctatcatacaaacctaagtaatattttgtgcctagttgaagatgcgaggtaaacacacccctagctcgtattcaaaacagttttta

SEQ ID NO: 24395 - DNA, 879 bp, Macaca Mulatta
ccaggatgctggatgatgtgagatctcagccactgagatctaaaatatgtttaaagcatgtgaaacagtagtggaggttaacgaaagctcttcctgctgtaaatatttacatgtaagctattttatttattcgagtgttcttagatagaatttccccataatagaaagattatcaggtcctaagaacacaaaaaagtccaagctaaatgcattttgtgactgcaagaataaaacaagattctttctttgtgtttcagtggtactctgaccagaaccacggcttatccggcctgtccacgaaccacttatacacccacatgacccactttctaaagcagtgtttttctttgtcggactaaaaacgatgcagatgcaagcctgtatcagaatctgaaaactttatataaatccctcagacgatttgcttgttttattttttatgttgtaaaatgctggtataaacaaatgaatgctgttctgaaggctggtaaaaaaatgatgaggactaagaagttcaggataaatattgtttacattttctggtactctgtgaaagaagagaaaagggagtcatgcattttgctttggacacagtgttttatcacctgttcatttaaagaaaaataataaagtcagaagttcaagggctattgtgctgtctgtattcactgatttcaggttccaggttctatcacagaaagaagtgtttgtgcaaagcaagggcatgaatattagggtggtcgtggaggagaagaatctagaagcagttctggatttctgtcatgagaactccaaatactagaaccaacagctcagagtaggcaaaagcattgttcagaaaatgcaagtgaatcacataggagatgtttgcactctatg

SEQ ID NO: 24396 - DNA, 146 bp, Macaca Mulatta
cagcatcaccatgaacggagaggccatcgcctgcgctgagggctgccaggccattgttgacaccggcacctctctgctgaccggcccaaccagccccattgccaacatccagagcgacatcggagccagcgagaactcagacggcg

SEQ ID NO: 24397 - DNA, 939 bp, Macaca Mulatta
  misc_feature (1)...(939): n = A,T,C or G
tggagcgggtcaatgagactgtagtgagagagttcatcttcctcggcttctcatccctggccaggctgctgcagctgctctttgttatcttcctgctcctctacctgttcactctgggcacnnnnnnnnnnnnnnnnnnnnnnnnnnnnnnnnnnnnnnnnnnnnnnnnnnnnnnnnnnnnnnnnnnnnnnnnnnnnnnnnnnnnnnnnnnnnnnnnnnnnnnnnnnnnnnnnnnnnnnnnnnnnnnnnnnnnnnnnnnnnnnnnnnnnnnnnnnnnnnnnnnnnnnnnnnnnnnnnnnnnnnnnnnnnnnnnnnnnnnnnnnnnnnnnnnnnnnnnnnnnnnnnnnnnnnnnnnnnnnnnnnnnnnnnnnnnnnnnnnnnnnnnnnnnnnnnnnnnnnnnnnnnnnnnnnnnnnnnnnnnnnnnnnnnnnnnnnnnnnnnnnnnnnnnnnnnnnnnnnnnnnnnnnnnnnnnnnnnnnnnnnnnnnnnnnnnnnnnnnnnnnnnnnnnnnnnnnnnnnnnnnnnnnnnnnnnnnnnnnnnnnnnnnnnnnnnnnnnnnnnnnnnnnnnnnnnnnnnnnnnnnnnnnnnnnnnnnnnnnnnnnnnnnnnnnnnnnnnnnnnnnnnnnnnnnnnnnnnnnnnnnnnnnnnnnnnnnnnnnnnnnnnnnnnnnnnnnnnnnnnnnnnnnnnnnnnnnnnaagatacaagaccttgtctacctgtccctcccatctcattgtggtaactgttcactatggttgtgcttctttcatatacttaagcccaagaccaattactcttcaagggaagacaccctaatatctgtgtcatataccatccttaccccattgttcaatccaatgatttatagtctgagaaataaggaattcaaatcagccctacgaagaacaatcagccaaactttatatcctcttaatta

SEQ ID NO: 24398 - DNA, 1155 bp, Macaca Mulatta
  misc_feature (1)...(1155): n = A,T,C or G
tgaagcaaatcctagaaaatttaacctcgatgcaactgaattgagtataagaannnnnnnnnnnnnnnnnnnnnnnnnnnnnnnnnngacatgaaagatcagatgtctttttcatctgtgcaggcattagctgaaaggaaaaatagacaggnnnnnnnnnnnnnnnnnnnnnnnnnnnnnnnnnnnnnnnnnnnnnnnnnnnnnnnnnnnnnnnnnnnnnnnnnnnnnnnnnnnnnnnnnnnnnnnnnnnnnnnnnnnnnnnnnnnnnnnnnnagttgatcgtggaacagcaggatgagcagttggagctggtctctggcagcatcggggtgctgaagaacatgtcccagcgcatcggaggggagctggaggaacaggcagtnnnnnnnnnnnnnnnnnnnnnnnnnnnnnnnnnnnnnnnnnnnnnnnnnnnnnnnnnnnnnnnnnnnnnnnnnnnnnnnnnnnnnnnnnnnnnnatcggcgccagtggtgtgccatagccatcctctttgcagtcctgttggttgtgctgatcctcttcttagtgctgtgacggcggggcctctgggtgcgagttcctcctgcatatgaaccgaggggaggaggagaagctaagcacgtgtgacattgccgtctactcacattnnnnnnnnnnnnnnnnnnnnnnnnnnnnnnnnnnnnnnnnnnnnnnnnnnnnnnnnnnnnnnnnnnnnnnnnnnnnnnnnnnnnnnnnnnnnnnnnnnnnnnnnnnnnnnnnnnnnnnnnnnnnnnnnnnnnnnnnnnnnnnnnnnnnnnnnnnnnnnnnnnnnnnnnnnnnnnnnnnnnnnnnnnnnnnnnnnnnnnnnnnnnnnnnnnnnnnnnnnnnnnnnnnnnnnnnnnnnnnntgctgttgctcattccatgcatctttggcagctcttttcttctgctcagacccttccctgtgctcagacagtgcgccgctgtcccatcaaaagaaacctgtcaggaatgcaagcttctgggtatgtttcgtttcccattgctgtagcatttcttagcccctgagagctgatgattattgaggacagaaggctcagaaacagtttgtgacagaaaatgcagtgtttcatttttcagggataaatgctaagataaaattgcttttccaggtca

SEQ ID NO: 24399 - DNA, 851 bp, Macaca Mulatta
  misc_feature (1)...(851): n = A,T,C or G
cggctgtccagacgtgccatgggcgcgcagctgccaggcgatgtgtaagtgaacatctgggaggtgggtgactgatgaagggcgacagtgtgtcggtcattgtcagctgtgcgtttaagatttttcaatggcagaaacccatgagttacaggaggctttaannnnnnnnnnnnnnnnnnnnnnnnnnnnnnnnnnnnnnnnnnnnnnnnnnnnnnnnnnnnnnnnnnnnnnnnnnnnnnnnnnnnnnnnnnnnnnnnnnnnnnnnnnnnnnnnnnnnnnnnnnnnnnnnnnnnnnnnnnnnnnnnnnnnnnnnnnnnnnnnnnnnnnnnnnnnnnnnnnnnnnnnnnnnnnnnnnnnnnnnnnnnnnnnnnnnnnnnnnnnnnnnnnnnnnnnnnnnnnnnnnnnnnnnnnnnnnnnnnnnnnnnnnnnnnnnnnnnnnnnnnnnnnnnnnnnnnnnnnnnnnnnnnnnnnnnnnnnnnnnnnnnnnnnnnnnnnnnnnnnnnnnnnnnnnnnnnnnnnnnnnnnnnnnnnnnnnnnnnnnnnnnnnnnnnnnnnnnnnnnnnnnnnnnnnnnnnnnnnnnnnnnnnnnnnnnnnnnnnnnnnnnnnnnnnnnnnnnnnnnnnnnnnnnnnnnnnnnnnnnnnnnnnnnnnnnnnnnnnnnnnnnnnnnnnnnnnnnnnnnnnnnnnnnnnnnnnnnnnnnnnnnnnnnnnnnnnnnnnnnnnnnnagcaatgggcatgcaataatatcaagtaccatgacattccatacattgagagtgaggggccttgaggctgtaggatgacaacactttgactgtggaggtgctagtttgaatacatgcgacaaaag

SEQ ID NO: 24400 - DNA, 663 bp, Macaca Mulatta
atgtgtctactagtggttaattggataaactggcagcatccctggcctgttgtcatgcagtcatttcctgttaattctgggagccaatgatttcacaactcaaggaaagcagtcctaaaggtttaaaatcagatcatgaatatctgggacagggtttagatcatgacgctacacagataccatgatgagagtatataaaaaaaatttaggaaagcacctggttcctttctccctatgcctgccttctgctccctccccagctggtttgggctcaaattgttcctggagacaagggtttatgttagggtattgatagattagagcaggtggttgaagagatcttctctggtcagacttggaagaatttccaaaactgagcttagccccaagacttccctagggttggtgtactttatgatccagatgctaaacctcttagaatgcaaatatgcttcaacacttaagtagcatacactgccctacaaacctcaaagaacactttttcccaagttcttatttttatttttgaaagtactcacacggcacttactatgctccaaacactcctctaagcactttacaaatattaactcattcagttcctagacagacaggatgaagtaggtattgttaccgttcccattttacaggtgagagatttga

SEQ ID NO: 24401 - DNA, 741 bp, Macaca Mulatta
  misc_feature (1)...(741): n = A,T,C or G
gaagaattgagctattgcatgtgactgcctctaaatggcctgcatttctctttctttgctggtaggactcacagaaaacactggacttccccggaagctgcttgaaaaacacgacccctggccagcctatgtcacctatacctcccagacagtgaaacgactcattgagaaaagcaaaactagagaactggaatgcatgcatgcccttgaagaaagctcctgggcatctaggcagaataaaccttccagcgtcattcagccaaaaaggagaaagtcgtccaagtcttccggcaaagctgtgttcagggacatgctgtcagaatccacgttatcaatgtggggtgcttattcggtatcggccatggcttctaccatgatcccagaacccacacgcttacatacggattccagagactgtccagctgaaaactataacaagatcatctttgcccgaaagcctgtgatgaggatgctctctacagttcgctactgaccaacaaggagaaacatgcaaatgtttagctaggggtccctgcagccatcccccaagaacatacagcaattaagctccatttaccactcatttcatggtgtcctttaaatctgaacttgctcttgctcatgcagagcttggttgagagaaaccagattagaatgtgagctgtangtgggtgggtgagtgtgtgccctcccacactgctctctgatggggttgggcagtccctggctctagtctctgcc

SEQ ID NO: 24402 - DNA, 236 bp, Macaca Mulatta
cagctggtggtgcatgtgggggtgtcaggcatggcgaccacagtcacactggagaaatgtggacacaacaagggctacaagggaatggacaactgccgcttctgccccggctcccagtgctgcgtggaggatgggcctgaaagcattgactccatcatcgacatggacgctgtgtgcaagcgagtcaccacgttgggcctggatgtgtcggtgaccatctcacaggatgctggcag

SEQ ID NO: 24403 - DNA, 1213 bp, Macaca Mulatta
  misc_feature (1)...(1213): n = A,T,C or G
acaagagtgaggttgctcatcggtttaaagatttgggagaagaacatttcaaaggcttnnnnnnnnnnnnnnnnnnnnnnnnnnnnnnnnnnnnnnnnnnnnnnnnnnnnnnnnnnnnnnnnnnnnnnnnnnnnnnnnnnnnnnnnnnnnnnnnnnnnnnnnnnnnnnnnnnnnnnnnnnnnnnnnnnnnnnnnnnnnnnnnnnnnnnnnnnnnnnnnnnnnnnnnnnnnnnnnnnnnnnnnnnnnnnnnnnnnnnnnnnnnnnnnnnnnnnnnnnnnnnnnnnnnnnnnnnnnnnnnnnnnnnnnnnnnnnnnnnnnnnnnnnnnnnnnnnnnnnnnnnnnnnnnnnnnnnnnnnnnnnnnnnnnnnnnnnnnnnnnnnnnnnnnnnnnnnnnnnnnnnnnnnnnnnnnnnnnnnnnnnnnnnnnnnnnnnnnnnnnnnnnnnnnnnnnnnnnnnnnnnnnnnnnnnnnnnnnnnnnnnnnnnnnnnnnnnnnnnnnnnnnnnnnnnnnnnnnnnnnnnnnnnnnnnnnnnnnnnnnnnnnnnnnnnnnnnnnnnnnnnnnnnnnnnnnnnnnnnnnnnnnnnnnnnnnnnnnnnnnnnnnnnnnnnnnnnnnnnnnnnnnnnnnnnnnnnnnnnnnnnnnnnnnnnnnnnnnnnnnnnnnnnnnnnnnnnnnnnnnnnnnnnnnnnnnnnnnnnnnnnnnnnnnnnnnnnnnnnnnnnnnnnnnnnnnnnnnnnnnnnnnnnnnnnnnnnnnnnnnnnnnggcggaccttgccaagtatatgtgtgaaaatcaagattcaatctccagtaaactgaaggaatgctgtgataaacctctgttggaaaaatgcccactgccttgccgaagtggaaaatgatgagatgcctgctgacttgccttcattagctgctgattatgttgagagtaaggatgtttgcaaaaactatgctgaggcaaaggatgtcttcctgggcatgtntttttgtatgaatatgcaagaaggcatcctgattactctgtcatgctgctgctgagacttgccaaggcatatgaagccactctagagaagtgctgtgccgctgcagatcctcatgaatgctatgccaaagnnnnngatgaatttcaacctcttgtggaagagcctcagaatttagtcaaacaaaattgtgaactttttgagcagcttggagaatacaaattccagaatgcg

SEQ ID NO: 24404 - DNA, 800 bp, Macaca Mulatta
gggctgtctgtcacatccagagccggcgagccgctaggtccccagagacgccgccgtggtacgcgcgggcgccgtgggggcgcatctcgccgcgtccggtttggacatcgttcgggggcctgaggaagatgaacgagcgccagctctattaccaggtttgaaacttcgccatggttgtgtcttctgcactcatgatatggaaaggcttgatcgtgctcaccggcagcgagagccccatggtggtggtgctgagtggcagtatggagccggcctttcacagaggagacctcctgttcctcacaaatttccgggaggacccaatcagagctggtgaaatagttgtttttaaagttgaaggacgagacattcgaatagttcacagagtaatcaaagttcatgaaaaagataacggagacatcaaatttctgactaaaggagataataatgaagttgacgatagaggcttgtacaaagaaggccagaactggctggaaaagaatgacgtggtgggaagagcaagagggtttttaccatatgtttggtatggtcacccatattaaagaatgaactattacaaaatttcaagtgatgcttcctttttgggctaataatggggtggacctaatgttgtttaactaaaaagcgctgaaattccccaacaatgtagtaaaacaagttttccctgtgggaacctgtaatttggaaaagtgatatttccggttttggaaaacaaatatataaaaagcccctatattaattattttaggaagaaaagggttcccccaattattattactgat

SEQ ID NO: 24405 - DNA, 778 bp, Macaca Mulatta
ggggcggagtttttgttttcagaagatgctgggtttgttttattcagcggcagtggtgcttccccgaatctcagaatgcctgttaaaagatcactgaaattggatgatctgttagaagaaaattcatttgatccttcaaaaatcacaaggaagaaaagttttataacttattctccaacaactggaacttgtcaaatgagtctatttgcttctcccacaagctctgaagaacaaaagcacagaaatggactatcaaatgaaaagagaaaaaaattgaatcaccccagtttaactgaaagcaaagaatcgacaacaaaagacaatgatgaattgatgatgttgctatctaaagttgagaaattgtcagaagaaatcatggcgataatgcaaaatttaagtagtatacgggctttggagggcagtagagagcttgaaaatctcattggaatctcctgtgcatcacgtttcttaaaaaaagaaatgcagaaaaccaaagaactaatgacaaaagtaattaaacaaaaactgtttgaaaggagttcaggacttcctcacaaacgcattaagaagaaatgcacttaccatgagcacaaacttttgcatctgcctgatcatatttaaaagaacagagaaatatttgtaattaatctgccccgtaaataccagctcgtagcagtcagcaagtgcatgtctagataaaatttcttgcagctaatttaaactttctacccacaccagtaggataacctcaatggtaataatacatttcttcctgaac

SEQ ID NO: 24406 - DNA, 178 bp, Macaca Mulatta
acaccagggcaggcaaagcgcagaggtaggagctgctgagcagtgtttcttagttttggtgccatcaaccgggctagtacttcctaaaatgggactctgaggacttctgccaatcctggtaccattcttccttctgggggatgtccagaaacctgggcacgctgaagggatctttggc

SEQ ID NO: 24407 - DNA, 517 bp, Macaca Mulatta
tggtttccagaacatctttccttctccaagtccagtgttctctgtgctcagggaacagccaccccggcccgcacacaggcgagtgtgttctggtgcagaagccgcagcaatcgccggttacagcaaaaagtgacctcctctgttggttccccagttgccatggggactgaggaccatggctcagtgcagcagcagccactcaaagcaggttggcaatggaggagaacgaccctgggggtacctcagagaggcagcattagaggaaagggccagggagcacgcaagaggctgaggaggcatgtcagcgtctcacggggttgtgcaccagcccttctctgggagggttcccacagaaagttccagggccccgggtcagggctgagcactgagtcccagctctctgctcatcccaccaggtggctcttatacaagtgctccacctcttcatgcctcaaggtcgtccagggtggagtcacagcgcctcaccaatgggctgatgggcaactagggcaacgct

SEQ ID NO: 24408 - DNA, 433 bp, Macaca Mulatta
  misc_feature (1)...(433): n = A,T,C or G
aggataagccagagacatgggaaaaccaatggaaatgtttcaaagttcttctctttaatcacttctgtatccagctgcctttgatttgtggaacctattattttacagagtatttcaatattccttatgattgggaaagaatgccaagatggtatnnnnnnnnnnnnnnnnnnnnnnnnnnnnnnnnnnnnnnnnnnnnnnnnnnnnnnnnnnnnnnnnnnnnnnnnnnnnnnnnnnnnnnnnnnnnnnnnnnnnnnnnnnnnnnnnnnnngttttaggctccatttggaatggaagctgaatatgcacatcctttggagactctaattcttggaactggatttttcattggtatcgtgcttttgtgtgatcatgtaattcttctttgggcatgggtgaccattcgtttattagaaactattgatgtccatag

SEQ ID NO: 24409 - DNA, 2839 bp, Macaca Mulatta
  misc_feature (1)...(2839): n = A,T,C or G
atttagacatatgtcgccaacattctgattgcagtgaatccatactttgacatacctaaaatatattcttcagaaacaataaagtcatatcaaggaaaatctcttgggacaagaccacctcatgtctttgcaattnnnnnnnnnnnnnnnnnnnnnnnnnnnnnnnnnnnnnnnnnnnnnnnnnnnnnnnnnnnnnnnnnnnnnnnnnnnnnnnnnnnnnnnnnnnnnnnnnnnnnnnnnnnnnnnnnnnnnnnnnnnnnnnnnnnnnnnnnnnnnnnnnnnnnnnnnnnnnnnnnnnnnnnnnnnnnnnnnnnnnnnnnnnnnnnnnnnnnnnnnnnnnnnnnnnnnnnnnnnnnnnnnnnnnnnnnnnnnnnnnnnnnnnnnnnnnnnnnnnnnnnnnnnnnnnnnnnnnnnnnnnnnnnnnnnnnnnnnnnnnnnnnnnnnnnnnnnnnnnnnnnnnnnnnnnnnnnnnnnnnnnnnnnnnnnnnnnnnnnnnnnnnnnnnnnnnnnnnnnnnnnnnnnnnnnnnnnnnnnnnnnnnnnnnnnnnnnnnnnnnnnnnnnnnnnnnnnnnnnnnnnnnnnnnnnnnnnnnnnnnnnnnnnnnnnnnnnnnnnnnnnnnnnnnnnnnnnnnnnnnnnnnnnnnnnnnnnnnnnnnnnnnnnnnnnnnnnnnnnnnnnnnnnnnnnnnnnnnnnnnnnnnnnnnnnnnnnnnnnnnnnnnnnnnnnnnnnnnnnnnnnnnnnnnnnnnnnnnnnnnnnnnnnnnnnnnnnnnnnnnnnnnnnnnnnnnnnnnnnnnnnnnnnnnnnnnnnnnnnnnnnnnnnnnnnnnnnnnnnnnnnnnnnnnnnnnnnnnnnnnnnnnnnnnnnnnnnnnnnnnnnnnnnnnnnnnnnnnnnnnnnnnnnnnnnnnnnnnnnnnnnnnnnnnnnnnnnnnnnnnnnnnnnnnnnnnnnnnnnnnnnnnnnnnnnnnnnnnnnnnnnnnnnnnnnnnnnnnnnnnnnnnnnnnnnnnnnnnnnnnnnnnnnnnnnnnnnnnnnnnnnnnnnnnnnnnnnnnnnnnnnnnnnnnnnnnnnnnnnnnnnnnnnnnnnnnnnnnnnnnnnnnnnnnnnnnnnnnnnnnnnnnnnnnnnnnnnnnnnnnnnnnnnnnnnnnnnnnnnnnnnnnnnnnnnnnnnnnnnnnnnnnnnnnnnnnnnnnnnnnnnnnnnnnnnnnnnnnnnnnnnnnnnnnnnnnnnnnnnnnnnnnnnnnnnnnnnnnnnnnnnnnnnnnnnnnnnnnnnnnnnnnnnnnnnnnnnnnnnnnnnnnnnnnnnnnnnnnnnnnnnnnnnnnnnnnnnnnnnnnnnnnnnnnnnnnnnnnnnnnnnnnnnnnnnnnnnnnnnnnnnnnnnnnnnnnnnnnnnnnnnnnnnnnnnnnnnnnnnnnnnnnnnnnnnnnnnnnnnnnnnnnnnnnnnnnnnnnnnnnnnnnnnnnnnnnnnnnnnnnnnnnnnnnnnnnnnnnnnnnnnnnnnnnnnnnnnnnnnnnnnnnnnnnnnnnnnnnnnnnnnnnnnnnnnnnnnnnnnnnnnnnnnnnnnnnnnnnnnnnnnnnnnnnnnnnnnnnnnnnnnnnnnnnnnnnnnnnnnnnnnnaatagcaacaaagatactaaacaaaaagcaggaaaacttagcttcatcagcgtgggaaacaagtttaannnnnnnnnnnnnnnnnnnnnnnnnnnnnnnnnnnnnnnnnnnnnnnnnnnnnnnnnnnnnnnnnnnnnnnnnnnnnnnnnnnnnnnnnnnnnnnnnnnnnnnnnnnnnnnnnnnnnnnnnnnnnnnnnnnnnnnnnnnnnnnnnnnnnnnnnnnnnnnnnnnnnnnnnnnnnnnnnnnnnnnnnnnnnnnnnnnnnnnnnnnnnnnnnnnnnnnnnnnnnnnnnnnnnnnnnnnnnnnnnnnnnnnnnnnnnnnnnnnnnnnnnnnnnnnnnnnnnnnnnnnnnnnnnnnnnnnnnnnnnnnnnnnnnnnnnnnnnnnnnnnnnnnnnnnnnnnnnnnnagtttgcagaatttgatcagatcatgaagtctgaccctgaccacttagcagagttggttaaaagagtcaatcactggctcacatgcagtcgctggaagaaagttcagtggtgctcactctcagtcatcaaannnnnnnnnnnnnnnnnnnnnnnnnnnnnnnnnnnnnnnnnnnnnnnnnnnnnnnnnnnnnnnnnnnnnnnnnnnnnnnnnnnnnnnnnnnnnnnnnnnnnnnnnnnnnnnnnnnnnnnnnnnnnnnnnnnnnnnnnnnnnnnnnnnnnnnnnnnnnnnnnnnnnnnnnnnnnnnnnnnnnnnnnnnnnnnnnnnnnnnnnnnnnnnnnnnnnnnnnnnnnnnnnnnnnnnnnnnnnnnnnnnnnnnnnnnnnnnnnnnnnnnnnnnnnnnnnnnnnnnnnnnnnnnnnnnnnnnnnnnnnnnnnnnnnnnnnnnnnnnnnnnnnnnnnnnnnnnnnnnnnnnnnnnnnnnnnnnnnnnnnnnnnnnnnnnnnnnnnnnnnnnnnnnnnnnnnnnnnnnnnnnnnnnnnnnnnnnnnnnnnnnnnnnnnnnnnnnnnnnnnnnnnnnnnnnnnnnnnnnnnnnnnnnnnnnnnnnnnnnnnnnnnnnnnnnnnnnnnnnnnnnnnnnnnnnnnnnnnnnnnnnnnnnnnnctgaagtggaggcacagctggcccgacagaaggaggaggaatcccagcagcaagcggttctggagcaggagcgcagggaccgggagctggctctgaggattgcccagagtgaagccgagctcatcagtgatgaggcccaggccgacctggc

SEQ ID NO: 24410 - DNA, 532 bp, Macaca Mulatta
cttgactctgctctttccaaaccataaagcactagttatataggatacatagggaaaaattcccagaacacaaatgatcaagcaattgatcattacgttcaggaacagagatcatttcccttcatctccaaatacaaaatttagaaaaacacaactgcttgccacacttacatgaattactgcctattgaagtttttttttcaattgagtgaaaaataacagatggctattataggaaagcgtacgtatgctcagaattttaggctctagtaaatactgtcacccaatctcagccaagctgaaaactaaccctgcaaaatgtggcacaaccataactctctgtcctagggactcaggaagcttctatctctaggatttttctagatattttctgaacctcattcttccaaaatagatcacaattgttaaatgagatacttgttaagtgccattataatgtttgatgcataagatatatccaaataatgttcaagttagaaaattatgaaaagttatccatttccatgcttct

SEQ ID NO: 24411 - DNA, 305 bp, Macaca Mulatta
ggctaatgaatcctttcagcgttttcttgaaaatcatgagaaaatgacttctacaaccagatacaagtaagatgttgaatgttgcatggcttatatttactacattgttgtttgtgtcgtacttttttgccatgtgcagtagctgatccagagctcattaaataaaactagataattatgaatgtggaagcttcatgaggtaccaaataaatctgtagttaaatgtagaatttaacttgtagaaatactaagttttttagagactggaagaaggggagaaagattgaattcaataatcaagttgg

SEQ ID NO: 24412 - DNA, 1177 bp, Macaca Mulatta
  misc_feature (1)...(1177): n = A,T,C or G
tagatcccagaactgaggccccaggatgacagaacaggagaccctggccctgctggaagtgaagaggtcggattccccagagaagagctcaccccaggccttggttcccaatggccggcagccagaaggggaaggtggggccgaatccccaggagctgagtccgtcagagtggggtcttcagctgggtctcccacagccatagagggggctgaggatggtctagacagcacagtaagcgaggctgccaccttgccctgggggaccggccctcagcccagtgctccgttcccggatccccctggctggcgggacattgaaccagagccccctgagtcagagccacttaccaagctagaggagctgcccgaagacgatgccaacctgctgcctgagaaagcggcccgtgccttcgtgcctattgacctacagtgcattgagcggcggccccaannnnnnnnnnnnnnnnnnnnnnnnnnnnnnnnnnnnnnnnnnnnnnnnnnnnnnnnnnnnnnnnnnnnnnnnnnnnnnnnnnnnnnnnnnnnnnnnnnnnnnnnnnnnnnnnnnnnnnnnnnnnnnnnnnnnnnnnnnnnnnnnnnnnnnnnnnnnnnnnnnnnnnnnnnnnnnnnnnnnnnnnnnnnnnnnnnnnnnnnnnnnnnnnnnnnnnnnnnnnnnnnnnnnnnnnnnnnnnnnnnnnnnnnnnnnnnnnnnnnnnnnnnnnnnnnnnnnnnnnnnnnnnnnnnnnnnnnnnnnnnnnnnnnnnnnnnnnnnnnnnnnnnnnnnnnnnnnnnnnnnnnnnnnnnnnnnnnnnnnnnnnnnnnnnnnnnnnnnnnnnnnnnnnnnnnnnnnnnnnnnnnnnnnnnnnnnnnnnnnnnnnnnnnnnnnnnnnnnnnnnnnnnnnnnnnnnnnnnnnnnnnnnnnnnnnnnnnnnnnnnnnnnnnnnnnnnnnnnnnnnnnnnnnnnnnnnnnnnnnnnnnnnnnnnnnnnnnnnnnnnnnnntgatctactggctgaccttcgccgtgggccgctccttccgcggcttcggctatggcctgacgtttctgccgctgctgtcaatgctgatgtggaacctctactacatgttcgtggtggagccggagcgcatgctcactgccacggagagccgcctggactacccggaccacgcccggtcgg

SEQ ID NO: 24413 - DNA, 861 bp, Macaca Mulatta
ctttataaagttgctggatacaagaaaaataacttgtacttttatatctgacttttaaaaacctagttttctaaggccttttcctcctcatgttaagcattttgaaactactgttgttatttcttaagtgttataggatgtagctttcaaattatatttgtactatgtacacagtgtaaacaaggacaaaagaaagtattgtttcctatgttatgtctgaggtctccgtgatttaaagtttggctttttatttttaaagtgtcatttctttatttaggatttgatgttctaatcattaatacattttaagttttccagagaactaaatagtaatagtttcatagaagagaattctttattcacttaaatatcatttctcaagtgagtgagttaccctctacttttacccttctacccaaactggaagccactaggtgctatcaattatttatattcgttgtttacatccatgaaattggctgaataattactcctctgcctggcgtagacatgcactttggggaaaaaatgggtttatcatcctataatgaagaatactggcacaggcagtgctcactcgaaaacttcaagtaatttctagttggttttggaatgcttgttaaagttcctttatagctttattttcctgatttgttttggtttagatcaaagtgcaaattaattttaacttagctaatgaactggtcaccaggacagttggagggggtacaggccaaggttaaatggtccaagtttcaaaaatgttaatggataatccataattaattaaacaaggtttaactgttactgaagtttacaagtttttattgtcacgaacatgaaatacaaacacaatggctt

SEQ ID NO: 24414 - DNA, 639 bp, Macaca Mulatta
  misc_feature (1)...(639): n = A,T,C or G
ggcagctgctgcccctggggcacctgcccgatcctgcagcctggccactcctccagggccagccttccctgactcagtggccacctctactgccccgaggccatgtaggccgtacttaggcctctgtggacacactgctggggacagcgcctgagctctcagggggacgaggaacaccaccatgccccggggcttcgcctggctgcgcnnnnnnnnnnnnnnnnnnnnnnnnnnnnnnnnnnnnnnnnnnnnnnnnnnnnnnnnnnnnnnnnnnnnnnnnnnnnnnnnnnnnnnnnnnnnnnnnnnnnnnnnnnnnnnnnnnnnnnnnnnnnnnnnnnnnnnnnnnnnnnnnnnnnnnnnnnnnnnnnnnnnnnnnnnnnnnnnnnnnnnnnnnnnnnnnnnnnnnnnnnnnnnnnnnnnnnnnnnnnnnnnnnnnnnnnnnnnnnnnnnnnnnnnnnnnnnnnnnnnnnnnnnnnnnnnnnnnnnnnnnnnnnnnnnnnnnnnnnnnnnnnnnnnnnnnnnnnnnnnnnnnnnnnnnnnnnnnnnnnnnnnnnnnnnnnnnnnnnnnnnnnnnnnnnnnnggatgtggaggtcagcccaaaggtggaatccgtgttgtccctcctgaatgccccaggg

SEQ ID NO: 24415 - DNA, 773 bp, Macaca Mulatta
gggaatcgcagccgcacgtggctgcgattgaggaggagatgcatactgacgccaaaatccgcgctgaaattggaacagggtgcagccctcggggtcccggctgcagcctccggcactttgcctgcgaacagaacctgctgtcgcggccagatggctctgcttccttcctgcaaggtgacacctctgtcctggcgggtgtgtacggtccggccgaggtgaaggtcagcaaagagatcttcaacaaggccacactcgaagtgatcctgaggccgaagatcgggctgcctggtgttgcagagaagagccgggagcggctgatcaggaacacgtgcgaggcggtggtcctgggcacattgcacccccgcacctccatcactgtggtgctgcaggttgtcagcgatgctggctctctcctggcctgttgtctgaatgccgcctgcatggcattggtggatgcaggtgtgcccatgcgggctctcttctgtggggtcacctgcgccctagactctgatgggactctcgtactggatcctacatccaagcaagaaaaggaggcccgggcagtcctgacctttgccctggacagcgtggaacggaagctgctgatgtccagcacccaaggggctcctctcggactcttgactccagcagtgcctggctgcggccccagcccgctttgcaacacgtcttccgcttcttccggggaatcccttgcaaaagggctttattcccaaaacctgaggccaacctgggggcaaagggcccgctcccaa

SEQ ID NO: 24416 - DNA, 1132 bp, Macaca Mulatta
  misc_feature (1)...(1132): n = A,T,C or G
ggaagcaatgttatggaagatcaggatttgttggaaattggaatccttaattctgggcaccgacaaagaattctattttttatccagctccttccaaaggtgagnnnnnnnnnnnnnnnnnnnnnnnnnnnnnnnnnnnnnnnnnnnnnnnnnnnnnnnnnnnnnnnnnnnnnnnnnnnnnnnnnnnnnnnnnnnnnnnnnnnnnnnnnnnnnnnnnnnnnnnnnnnnnnnnnnnnnnnnnnnnnnnnnnnnttttaaaaatcaatttgattggccacaggaaacgtattttggcatctctgggagacaggctgcacgacgatcccccacagaagccccctcggtccatcaccctcnnnnnnnnnnnnnnnnnnnnnnnnnnnnnnnnnnnnnnnnnnnnnnnnnnnnnnnnnnnnnnnnnnnnnnnnnnnnnnnnnnnnnnnnnnnnnnnnnnnnnnnnnnnnnnnnnnnnnnnnnnnnnnnnnnnnnnnnnnnnnnnnnnnnnnnnnnnnnnnnnnnnnnnnnnnnnnnnnnntcagacaggagactggggagaaccttccattaccttgcgacctccgaatgaagccacagcctccactccggtacagtactggcagcatcacccagagaagcttatcttccagtcatgtgattacaaagctttnnnnnnnnnnnnnnnnnnnnnnnnnnnnnnnnnnnnnnnnnnnnnnnnnnnnnnnnnnnnnnnnnnnnnnnnnnnnnnnnnnnnnnnnnnnnnnnnnnnnnnnnnnnnnnnnnnnnnnnnnnnnnnnnnnnnnnnnnnnnnnnnnnnnnnnnnnnnnnnnnnnnnnnnnnnnnnnnnnnnnnnnnnnnnnnnnnnnnnnnnnnnnnnnnnnnnnnnnnnnnnnnnnnnnnnnnnnnnnnnnnnnnnnnnnnnnnnnnnnnnnnnnnnnnnnnnnnnnnnnnnnnnnnnnnnnnnnngaatttagcctacgaaatcatcctaaccctgggacaggcattcgaagtcgcttaccagctagcactacaagcaagaaaagggggacactcctccacacttccggaaagctttgaaaacaaaccctccaaacccatccccaagccccgcgttagcattcgcaagtccgtg

SEQ ID NO: 24417 - DNA, 291 bp, Macaca Mulatta
atgcagatcatcaccacggccctggtgtgcttgctgctagctgggatgtggccgcaagacgtggacagcaagagcatgcaggtacccttctccagatgttgcttcttatttgtggagaaagagatttccctgcgggcaatccagtgttacagaaataccagctccagctgctccaatgagggcttaatattcaagctgaagagaggcaacgaggcctgcgccttgaaccaggctagatgggttcagaatcacattaaaaagctgagccactgcctgccaaaaagaaaatga

SEQ ID NO: 24418 - DNA, 165 bp, Macaca Mulatta
aagatgtttttgtaactaagaccaaaattgaagatagagctgctttattttcttggtttaaatcttcctttatttttgtagtgatgagatgctgattgtgtacagaagaatttgagaggggatttttaaaaagtgacttaacacacccagaaaggcagctaacag

SEQ ID NO: 24419 - DNA, 582 bp, Macaca Mulatta
ggccttctctcagctacttggcctactgccgtggtcttggtgccaccctcctctggtggtcagctcagggcttcctctgcccatgcagtccccagctgccactgctgagggcctcagcggccccctctttggggcctacacgttccccaccttcaagtttcagcctcgccacgatagcatggactggaggcgcattagcaccctggatgtagaccgcgtggcccgggagctggatgtggccactctgcaggagaacattgctggcatcaccttctgcaacttggaccgggaggtatgcaaccgctgtgggcagcctgtggacccggcactgctcaaggtgctgcgcctggcacagcttatcatcgagtacctgctgcactgccaggattgcctgagtgccagcattgcccagctggaggcacggctgcagaccagcctgggccagcagcagcgtggtcagcaggagctgggccgccaggctgatgagctcaagggtgtgcgggaggaaagccgccggcgtcgcaagatgatcagcaccctgcagcagctgctaatgcagacaggcgcccacagctaccacac

SEQ ID NO: 24420 - DNA, 786 bp, Macaca Mulatta
  misc_feature (1)...(786): n = A,T,C or G
agcctgattactgtgtgaagcaggccctgtaggccatcatcactgaccagcccatgatctgcacccctcttctcatgtacatcgtgaccttcatgaagaggtaactgggagggttccctcactgaccaggtctctccatgcttgcccgatgtcttagttgaaacttcaagtttgctaacagctgtgactttcctttttcagcatcctcccatttgaagcagttgtgtgcatgtatcggttcctaggagcggacaagtgtatgtacccctttattgctcaaagaaagcaagccacaaacaataatgaagcaaaaaatggaatctaagaatctttttgtatggaatattacttctatcagaagatgatccagatgtttcagtccaatgcacatcagcattgctgacattttatggattcttgacttgtgttgtttctttttttaatcaacttttaaaaaaaataaagtgtaaattaaccgactagagtacttggaaaatgtgatcagtaaaagtgaacttaggttgttgccaacagggtccttttaggcagaacccaaaaaccagtcaaatctttagagaagcactgtgtgacatcttcaggttaccattatttttttaatgagcaggaagtctagaaatgataactagactgtatatttcatgtgtgtgatttttcagaattcccatagagtttactcattcttgttattanactccagccagttgacatcttcgcaatttcaaggactgatagtgctatattttctcatgttttctaagtttccgt

SEQ ID NO: 24421 - DNA, 441 bp, Macaca Mulatta
atggccgggcccctgcgcgccccgctgctcctgctggccatcctggccgtggctctggcagtgagccccgcggccggagcgagtcccgggaagccgccgcgcctagtgggcggccccatggacgccagcgtggaggaggagggtgtgcggcgtgccctggactttgccgtcagcgagtacaacaaagccagcaacgacatgtaccacagccgcgcgctgcaggtggtgcgcgcccgcaagcagatcgtagctggggtgaactacttcttggacgtggagttgggccgaaccacatgtaccaagacccagcccaacttggacaactgccccttccatgaacagccacatctgaagaggaaagcattctgctctttccagatctacactgtgccttggcagggcacaatgaccttgtcgaaatccacctgtcaggacgcctag

SEQ ID NO: 24422 - DNA, 789 bp, Macaca Mulatta
ggtatggaagctgacccccttgcacagtcaaatctgcatataacttttgagttaactactaatagcctgccgttgaccggaagccttaccgataacataaacagtcagttaacacatattttgtatatgtcttatatagtatattcttacaagctagagaaaaaatgctattaagaaaatcataaggaagagaaaatatatttattatgattaaatggaagtggatcatcgtaaaggtcttcgtccttgtcgatttcatgttgagtaggctgaggaagaggaggagggagggttggtcttgctgtcttagaggtggcagaggtgaaagaggtgaaagaccacatatacatggactcatgtagttcaaatctgtgttgttcaagggccaactatatttctctcgtagttggcttgccttttcatgtttttagttttgattaatgcatggattttaccatcatttttctttaacaagaaagggatataagtttactctagcatgtgattaacagacagtccgagattttacagagcttattttctgaggagttcattgtattacataatttcatttgccattttgtctttacatagtaggtagggatatgttccctcccttccccatcatgtaaaatgaaataactcaagactaatgttattgtggccataaaaacttgaaaacagaatgaaggattcctgtaatgaataacttaggggcatccatttttctggttgacctttttgccctaaaatgatgtggaaaattgtaaacctatggaattccgggtg

SEQ ID NO: 24423 - DNA, 1239 bp, Macaca Mulatta
gggggagaagctgtgggagcttctgtgccctctgcttagaacagcactgtccaacattaccgttgaaacttacaatgactggggagcttgtatagcaacatcttgtgaaagcagagatccccggaaacttcactggctttttgaactgctgttggaatcaccattgagtggtgaaggaggatcctttgtagatgcatgtcgactttatgtactacaaggtggccttgcccagcaagagtggagagtgcctgaactattgcacagactactgaagtatttggagcctaaactcacccaggtttacaaaaatgtcagagaaagaataggaagcgtgctgacctacatattcatgattgatgtttctttgccaaataccgcaccaaccacatcgcctcatgtccctgagtttactgctcgaattctggagaaattgaaacctctcatggatgtggatgaagaaattcagaaccatgttatggaagaaaatggaattggtgaagaagatgaacgaactcagggcattaaactcttgaaaaccatattgaaatggctgatggcaagtgcaggaagatccttttctacagcagtcacagaacaacttcagcttctacctttgttttttaagattgccccagtggaaaatgacaatagctacgatgaactgaaaagagatgcaaagttatgtttatcgttaatgtctcaggggttgctttaccctcatcaagtgcctttggtacttcaggtgctaaaacaaacagcaagaagcagttcttggcatgcacgatacacaatactgacctacctccagaccatggtattttataacctctttattttcctaaacaatgaagatgcagttaaagatatcaggtggctggttataagtcttttggaggacgaacaactagaggttcgagaaatggctgctactaccttaagcggtctgctacagtgtaacttccttaccatggacagtcctatgcagattcatattgagcaactttgcaaaacaaaactaactaagaaaagaagcgagaacctggtctgtaggagatacattcctttgacagttggccaaagccatctggggtctagattgggcatttgtcattcaggcctatgaggtccccaggagttcaagcctcgaattcggggctttatggtcccacctatgggtgacgcacaaccgtgtatttgaggattcgtaatggggaatcagcttatttgaagaagttacca

SEQ ID NO: 24424 - DNA, 1437 bp, Macaca Mulatta
  misc_feature (1)...(1437): n = A,T,C or G
gcctgaagatattgaggcttttaaaaattatacattggattcctcgccagcacctaccccacaggcggccccagcaccaacccctgctgccactgcttcgccacctataccttctgctcaggctcctggtagctcatatccccctcacatgcaggnnnnnnnnnnnnnnnnnnnnnnnnnnnnnnnnnnnnnnnnnnnnnnnnnnnnnnnnnnnnnnnnnnnnnnnnnnnnnnnnnnnnnnnnnnnnnnnnnnnnnnnnnnnnnnnnnnnnnnnnnnnnnnnnnnnnnnnnnnnnnnnnnnnnnnnnnnnnnnnnnnnnnnnnnnnnnnnnnnnnnnnnnnnnnnnnnnnnnnnnnnnnnnnnnnnnnnnnnnnnnnnnnnnnnnnnnnnnnnnnnnnnnnnnnnnnnnnnnnnnnnnnnnnnnnnnnnnnnnnnnnnnnnnnnnnnnnnnnnnnnnnnnnnnnnnnnnnnnnnnnnnnnnnnnnnnnnnnnnnnnnnnnnnnnnnnnnnnnnnnnnnnnnnnnnnnnnnnnnnnnnnnnnnnnnnnnnnnnnnnnnnnnnnnnnnnnnnnnnnnnnnnnnnnnnnnnnnnnnnnnnnnnnnnnnnnnnnnnnnnnnnnnnnnnnnnnnnnnnnnnnnnnnnnnnnnnnnnnnnnnnnnnnnnnnnnnnnnnnnnnnnnnnnnnnnnnnnnnnnnnnnnnnnnnnnnnnnnnnnnnnnnnnnnnnnnnnnnnnnnnnnnnnnnnnnnnnnnnnnnnnnnnnnnnnnnnnnnnnnnnnnnnnnnnnnnnnnnnnnnnnnnnnnnnnnnnnnnnnnnnnnnnnnnnnnnnnnnnnnnnnnnnnnnnnnnnnnnnnnnnnnnnnnnnnnnnnnnnnnnnnnnnnnnnnnnnnnnnnnnnnnnnnnnnnnnnnnnnnnnnnnnnnnnnnnnnnnnnnnnnnnnnnnnnnnnnnnnnnnnnnnnnnnnnnnnnnnnnnnnnnnnnnnnnnnnnnnnnnnnnnnnnnnnnnnnnnnnnnnnnnnnnnnnnnnnnnnnnnnnnnnnnnnnnnnnnnnnnnnnnnnnnnnnnnnnnnnnnnnnnnnnnnnnnnnnnnnnnnnnnnnnnnnnnnnnnnnnnnnnnnnnnnnnnnnnnnnnnnnnnnnnnnnnnnnnnnnnnnnnnnnnnnnnnnnnnnnnnnnnnnnnnnnnnnnnnnnnnnnnnnnnnnnnnnnnnnnnnnnnnnnnnnnnnnnnnnnnnnnnnnnnnnnnnnnnnnnnnnnnnnnnnnnnnnnnnnnnnnnnnnnnnnnnnnnnnnnnnnnnnnnnnnnnnnnggtttgatgtggctagcatgatgtctgttacactcagttgtgatcaccgggtggtggatggagcagttggagcccagtggcttgctgagtttagaaagtaccttgaaaaaacctgtcaccatgttgttgta

SEQ ID NO: 24425 - DNA, 129 bp, Macaca Mulatta
caccgtggtgctgggcgcctatgacctgaggcggcgggagaggcggtcccgccagacgttttccatcagcagcatgagtgagaaccgctatgacccccagcagaacctgaacgacctggtgctgcttca

SEQ ID NO: 24426 - DNA, 273 bp, Macaca Mulatta
acaacaaggaaatcctgtaagagtcccaaaaaacccaaagctgtaaaacccaagaaagtagctaaaagccctgctaaaactaaggctataaaacccaaggcggccaaggctaaggtgacgaagccaaagactgccaaacccaagaaagcggcacccaagaaaaagtaaattcggttggaaacttctactaacccaacggctcttttaagagccacctacacacttcgggaaaagagctgtagtacactgatgagggtaccccaagcaaatgca

SEQ ID NO: 24427 - DNA, 924 bp, Macaca Mulatta
  misc_feature (1)...(924): n = A,T,C or G
gttcgaatgcaagcactgaaatgtttctcagttttagcttttgaaaacccccaggtatcgatgaccctggtaaatgngttttggttgatggagaattgttaccacagatttttgtgaagatgttacagagggataagcctattgagatgcagctcacatcagcaaaatgnnnnnnnnnnnnnnnnnnnnnnnnnnnnnnnnnnnnnnnnnnnnnnnnnnnnnnnnnnnnnnnnnnnnnnnnnnnnnnnnnnnnnnnnnnnnnnnnnnnnnnnnnnnnnnnnnnnnnnnnnnnnnnnnnnnnnnnnnnnnnnnnnnnnnnnnnnnnnnnnnnnnnnnnnnnnnnnnnnnnnnnnnnnnnnnnnnnnnnnnnnnnnnnnnnnnnnnnnnnnnnnnnnnnnnnnnnnnnnnnnnnnnnnnnnnnnnnnnnnnngcttgatcatgatttaaaacatgctcacgaactccgccaggctgcattcaagctctatgcctctcttggagcaaatgatgaagacatccggaagaaggtgagtctgggagaggggcgtcccccagtcctgacagccagcaggcagggagtgacgtcaacctgaaagtcgtggtgaagagcactaacagtgactgtttgaatatattaaagcagagtgactaaaggcataattgaagaatgaatgggacccggatttggggggttgtttgtttgtttttagaacatagagtggcatggccgtgctggaatgacaagtaactggcgtgcttttttttgtgtcattaatatgaattattatgttgcacatttttgcatgtgttctgataaaaatcaattctagcactgtgaagcttcagacaccttgaaagtcctaacattagaattgtaaatgttatttatggaaataccttccaatgctattgagaattcaaatc

SEQ ID NO: 24428 - DNA, 3336 bp, Macaca Mulatta
  misc_feature (1)...(3336): n = A,T,C or G
gagctgaggaactgcgtgtggagtcagcccagtctggatgcacaggaggatgccggcggcacagtgagtgaggcctggtgccagagctgtgtggacccctcattggccatggagcagcaggctcagaggccctctccccagccctgcttgcctgccttggagaggacagaggcctaggcccacgggggagggcgttggcagacagatgccctccaggccctggggcctccttaacggcnnnnnnnnnnnnnnnnnnnnagggtggaagatgccggccaaggggcgctacttcctcaacgagggcgaggagggtcctgaccaagatgcgctctacgagaagtaccggctcaccagccagcatgggccgctgctgctcacgctcctgctggtggccgccactgcctgcgtggccctcatcgtcatcgccttcagccaggggnnnnnnnnnnnnnnnnnnnnnnnnnnnnnnnnnnnnnnnnnnnnnnnnnnnnnnnnnnnnnnnnnnnnnnnnnnnnnnnnnnnnnnnnnnnnnnnnnnnnnnnnnnnnnnnnnnnnnnnnnnnnnnnnnnnnnnnnnnnnnnnnnnnnnnnnnnnnnnnnnnnnnnnnnnnnnnnnnnnnnnnnnnnnnnnnnnnnnnnnaggtgcccttcttcctgttcatcgtctttgtggtgtacacgctgctgcccttcagcatgcggggcgctatcgctgtgggggccgtctccaccgcctcccacctcctggtgctcggcgctttgatgggaggcttcacgacacccagtgtccgggtggggctgcagnnnnnnnnnnnnnnnnnnnnnnnnnnnnnnnnnnnnnnnnnnnnnnnnnnnnnnnnnnnnnnnnnnnnnnnnnnnnnnnnnnnnnnnnnnnnnnnnnnnnnnnnnnnnnnnnnnnnnnnnnnnnnnnnnnnnnnnnnnnnnnnnnnnnnnnnnnnnnnnnnnnnnnnnnnnnnnnnnnnnnnnnnnnnnnnnnnnnnnnnnnnnnnnnnnnnnnnnnnnnnnnnnnnnnnnnnnnnnnnnnnnnnnnnnnnnnnnnnnnnnnnnnnnnnnnnnnnnnnnnnnnnnnnnnnnnnnnnnnnnnnnnnnnnnnnnnnnnnnnnnnnnnnnnnnnnnnnnnnnnnnnnnnnnnnnnnnnnnnnnnnnnnnnnnnnnnnnnnnnnnnnnnnnnnnnnnnnnnnnnnnnnnnnnnnnnnnnnnnnnnnnnnnnnnnnnnnnnnnnnnnnnnnnnnnnnnnnnnnnnnnnnnnnnnnnnnnnnnnnnnnnnnnnnnnnnnnnnnnnnnnnnnnnnnnnnnnnnnnnnnnnnnnnnnnnnnnnnnnnnnnnnnnnnnnnnnnnnnnnnnnnnnnnnnnnnnnnnnnnnnnnnnnnnnnnnnnnnnnnnnnnnnnnnnnnnnnnnnnnnnnnnnnnnnnnnnnnnnnnnnnnnnnnnnnnnnnnnnnnnnnnnnnnnnnnnnnnnnnnnnnnnnnnnnnnnnnnnnnnnnnnnnnnnnnnnnnnnnnnnnnnnnnnnnnnnnnnnnnnnnnnnnnnnnnnnnnnnnnnnnnnnnnnnnnnnnnnnnnnnnnnnnnnnnnnnnnnnnnnnnnnnnnnnnnnnnnnnnnnnnnnnnnnnnnnnnnnnnnnnnnnnnnnnnnnnnnnnnnnnnnnnnnnnnnnnnnnnnnnnnnngcggccctgaagatgcgggcgtcagtgcgcatgacccggtacctcgagtcctggggggcagcgcggccctttgcgcatctcaaccaccgcgagagcgtgagcagtggcgagacccccgtccccaacgggcggaggcctaannnnnnnnnnnnnnnnnnnnnnnnnnnnnnnnnnnnnnnnnnnnnnnnnnnnnnnnnnnnnnnnnnnnnnnnnnnnnnnnnnnnnnnnnnnnnnnnnnnnnnnnnnnnnnnnnnnnnnnnnnnnnnnnnnnnnnnnnnnnnnnnnnnnnnnnnnnnnnnnnnnnnnnnnnnnnnnnnnnnnnnnnnnnnnagtaccgcctggcacccatcccccgggcccgccacgactttgcctgcgccggcctgatttttgtctgcatcctgctcgtccacgtcctgctcatgcccagnnnnnnnnnnnnnnnnnnnnnnnnnnnnnnnnnnnnnnnnnnnnnnnnnnnnnnnnnnnnnnnnnnnnnnnnnnnnnnnnnnnnnnnnnnnnnnnnnnnnnnnnnnnnnnnnnnnnnnnnnnnnnnnnnnnnnnnnnnnnnnnnnnnnnnnnnnnnnnnnnnnnnnnnnnnnnnnnnnnnnnnnnnnnnnnnnnnnnnnnnnnnnnnnnnnnnnnnnnnnnnnnnnnnnnnnnnnnnnnnnnnnnnnnnnnnnnnnnnnnnnnnnnnnnnnnnnnnnnnnnnnnnnnnnnnnnnnnnnnnnnnnnnnnnnnnnnnnnnnnnnnnnnnnnnnnnnnnnnnnnnnnnnnnnnnnnnnnnnnnnnnnnnnnnnnnnnnnnnnnnnnnnnnnnnnnnnnnnnnnnnnnnnnnnnnnnnnnnnnnnnnnnnnnnnnnnnnnnnnnnnnnnnnnnnnnnnnnnnnnnnnnnnnnnnnnnnnnnnnnnnnnnnnnnnnnnnnnnnncagcggcacccctagctgttcctggagggacctgaagaccatgaccaatttctacctggtcctgttctacatcaccctgctcacgctctccagacagnnnnnnnnnnnnnnnnnnnnnnnnnnnnnnnnnnnnnnnnnnnnnnnnnnnnnnnnnnnnnnnnnnnnnnnnnnnnnnnnnnnnnnnnnnnnnnnnnnnnnnnnnnnnnnnnnnnnnnnnnnnnnnnnnnnnnnnnnnnnnnnnnnnnnnnnnnaggactggtaccatcagtcctatgactgcgtctgtgtcatgtttgcctccgtgccggacttcaaagtgttctacacagagtgcgatgtcaacaaagaagggctggagtgcctgcgcctgctcaatgagatcattgccgacttcgacgannnnnnnnnnnnnnnnnnnnnnnnnnnnnnnnnnnnnnnnnnnnnnnnnnnnnnnnnnnnnnnnnnnnnnnnnnnnnnnnnnnnnnnnnnnnnnnnnnnnnnnnnnnnnnnnnnnnnnnnnnnnnnnnnnnnnnnnnnnnnnnnnnnnnnnnnnnnnnnnnnnnnnnnnnnnnnnnnnnnnnnnnnnnnnnnnnnnnnnnnnnnnnnnnnnnnnnnnnngcataaaccatgggcctgtgattgctggagtgattggggcccgaaaacctcagtatgacatctggggaaacacagtcaacgtggtcagccgaatggagagcac

SEQ ID NO: 24429 - DNA, 180 bp, Macaca Mulatta
ggagctccccacaccaagtgagaatagcatgccaccaggcctctcaactcccacagcctcgcaggagggggtcggtcctgttccagatcccagccagcccacccgtcggcggatccacctctccagcctagagcgacagcggttgtcctcccttaaccttacccctgacccggaaatgga

SEQ ID NO: 24430 - DNA, 937 bp, Macaca Mulatta
  misc_feature (1)...(937): n = A,T,C or G
cagattacaggcctctgctcaccaaaaggctttagccaaggaccagacaaatgagggcaaagagcttgctgagcaaggagaacctgattcctccactctaagcttagccgaaaagttggccttgtttaacaaattatcccagccagtctcaaaagcgatttctacccggaacagaatagacatgagacagaggagaatgaacgctcgctatcaaactcagccagtcacgctgggagaggtggagcaggtgnnnnnnnnnnnnnnnnnnnnnnnnnnnnnnnnnnnnnnnnnnnnnnnnnnnnnnnnnnnnnnnnnnnnnnnnnnnnnnnnnnnnnnnnnnnnnnnnnnnnnnnnnnnnnnnnnnnnnnnnnnnnnnnnnnnnnnnnnnnnnnnnnnnnnnnnnnnnnnnnnnnnnnnnnnnnnnnnnnnnnnnnnnnnnnnnnnnnnnnnnnnnnnnnnnnnnnnnnnnnnnnnnnnnnnnnnnnnnnnnnnnnnnnnnnnnnnnnnnnnnnnnnnnnnnnnnnnnnnnnnnnnnnnnnnnnnnnnnnnnnnnnnnnnnnnnnnnnnnnnnnnnnnnnnnnnnnnnnnnnnnnnnnnnnnnnnnnnnnnnnnnnnnnnnnnnnnnnnnnnnnnnnnnnnnnnnnnnnnnnnnnnnnnnnnnnnnnnnnnnnnnnnnnnnnnnnnnnnnnnnnnnnnnnnnnnnnnnnnnnnnnnnnnnnnnnnnnnnnnnnnnnnnnnnnnnnnnnnnnnnnnnnnnnnnnnnnnnnnnnnnnnnnnnnnnnnnnnnnnnnnnnnnnnnnnnnnnnnnnnnnnnnnnnnnnagcggcagagttcggggagcccacttccgagcagacggggacagctgctgggaaaactgttgctcaaaccgcagccccggtgtcctggaagccccaggattgtacggaacagccac

SEQ ID NO: 24431 - DNA, 285 bp, Macaca Mulatta
  misc_feature (1)...(285): n = A,T,C or G
ttctgggttgtctantaggaatttcgtgtgattaaaaatatatatattttgctcccagtggccccatgtccaaagaaaagggtctaagaaggaagtaaaaacgggttattttatgtttagatatttgcttaaatatttatttgttgggaaatgtggtacagaaataactgacaccttcatgccaaaaatcttaaaaaggtgaaaggggctgaacttcagggagcagaatcagagatatgtgcacttacttctgaactccacccctccccactctctggaaatgtg

SEQ ID NO: 24432 - DNA, 1199 bp, Macaca Mulatta
  misc_feature (1)...(1199): n = A,T,C or G
gcggcggcgaggaaggaggggtgcttcaggtgcctgcgacctccgcgcctcccgcccggaagtgcccgaggggccgcgatggagctggggcagccgggcnnnnnnnnnnnnnnnnnnnnnnnnnnnnnnnnnnnnnnnnnnnnnnnnnnnnnnnnnnnnnnnnnnnnnnnnnnnnnnnnnnnnnnnnnnnnnnnnnnnnnnnnnnnnnnnnnnnnnnnnnnnnnnnnnnnnnnnnnnnnnnnnnnnnnnnnnnnnnnnnnnnnnnnnnnnnnnnnnnnnnnnnnnnnnnnnnnnnnnnnnnnnnnnnnnnnnnnnnnnnnnnnnnnnnnnnnnnnnnnnnnnnnnnnnnnnnnnnnnnnnnnnnnnnnnnnnnnnnnnnnnnnnnnnnnnnnnnnnnnnnnnnnnnnnnnnnnnnnnnnnnnnnnnnnnnnnnnnnnnnnnnnnnnnnnnnnnnnnnnnnnnnnnnnnnnnnnnnnnnnnnnnnnnnnnnnnnnnnnnnnnnnnnnnnnnnnnnnnnnnnnnnnnnnnnnnnnnnnnnnncagcaggtgcgactcatctaccaagggcagctgctaggcgacgacacccagaccctgggcagccttcacctccctcccaactgcgttctccactgccacgtgtccacgagggtcgnnnnnnnnnnnnnnnntgcccgccggggtccgagcccggcccctccgggctggaaatcggcagnnnnnnnnnnnnnnnnnnnnnnnnnnnnnnnnnnnnnnnnngtactgccagatccagtaccggcccttctttcccctgaccgccactctgggcctggccggcttcaccctgctcctcagtctcctggccttcgccatgtaccgcccgtagtgcctccgcgggcgtttggcagcgtcgccggcccctctggaccttgctccccgcgccgcagcgggagctgctgcctgcccagacccgtctctccggcctgcctcttcccgctgccctggagcccagccctgcgccgcagaagactccaggggctggcagaggccccgccctgcgaccaccggggctcggggccacctcccggggctgctggccctcagtccgcactgggagtgggctcctcggggtcgggcatctgctgtcgctgcctcggccccgggcagagcaaggccgcccccggggcccgtcttagcgttctgccggaggacccagc

SEQ ID NO: 24433 - DNA, 1025 bp, Macaca Mulatta
  misc_feature (1)...(1025): n = A,T,C or G
gggctccagaggttggaatcgggtctggctctggaattgctactgctgtctctgtcactcctggcgatcagcattcaaggtcacttggtacatatgaccgtggtctccggcagcaatgttactctgaacatctctgagagcctgcctgagaactacaaacaactaacctggttttatactttcgaccagaagattgtagaatgggattccagaaaatctaagtactttgaatccaaatttaaaggcagggtcagacttgatcctcaaagtggtgcactgtacatctctaaggtccagaaagaggacaacagcacctacgtcatgagggtgttgaaaaaggatgggtatgagcaagaatggaagatcaagctgcaggtgcttgaccctgtacccaagcctgtcatcaaaattgagaagagagaagatgtggatgacaactgttatctgaaactgtcatgtgtcatacctggcgagtctgtaaactacacctggtatggggaactcccgaaggagatccagaacagtgttcttgaaaccacccttaaggcacacaaacactccaggtgttatacttgccaagtcagcaattccgtgagcagcaagaatggcacgttctgcttcagtccaccctgtaccgcggcccggtcctttggagtagaatggatctgcaagttggttggtggtcacagtgcccatcattcttggcctgttacttatctgagatgagctcttttaactcaagtgaaacttcaaggccagaggatcttgcctgttggtaaccatgctcctcaccaggacagaaactatataggatgaatggaagcatgctgctgaattatcaacgaggattttcaagttaacttttaagaactggctattatttaattttatatctcttggaggttttctagtaaacatatagacatagagatacacacatgtttttcccaccaaaaattgtgacaacaccgtgaacgttgtannnnnnnnnnnnnnnnnnncatttgatataattgtcaactaac

SEQ ID NO: 24434 - DNA, 160 bp, Macaca Mulatta
caatggttcacagtgctggagcgctaccacccaaccacctgcaccatctctgacctcatcatcggcaactcgtactccttccgggtcttctcagaaaacctgtgtggactcagcgcctcagccaccatcaccaaggagctcgcccacatccagaaggcag

SEQ ID NO: 24435 - DNA, 505 bp, Macaca Mulatta
  misc_feature (1)...(505): n = A,T,C or G
acatcatcctgaagttgacttcctgtagccagcccccagccgcagccctgaagctgcgggaacaccgagcaccctcatccttcagcctcgacctgggtgcaggcatcctgggccagctgcctgcggaccgcttccttccacagcgagaactgcactaccttcggttgtactttaattattgttttgccttgttgctgtgacctccctaagacactgaagatacttctcgggaaaggatcatcgccgttgaaatgaaaagagnnnnnnnnnnnnnnnnnnnnnnnnnnnnnnnnnnnnnnnnnnnnnnnnnnnnnnnnnnnnnnnnnnnnnnnnnnnnnnnnnnnnnnnnnnnnnnnnnnnnnnnnnnnnnnnnnnnnnnnnnnnnnnnnnnnnnnnnnnnnnnnnnnnnnnnnnnnnnnnnnnnnnnnnnnnnnnnnnnnnnnnnnnnnnnnnnnnnnnnnnnnnnnnnnnnnnnnnnnnnnnnnnnnnnnnnnnnnnnnnnnnn

SEQ ID NO: 24436 - DNA, 1409 bp, Macaca Mulatta
ttaggaacttgaggggtgtcagagcccctgatgtgctttcccttaggaagatgaggactctgaacacctctgccatggacgggactgggctggtggtggagagggacttctctgttcgtatcctcactgcctgtttcctgtcgctgctcatcctgtccacgctcctggggaacacgctggtctgtgctgccgttatcaggttccgacacctgcggtccaaggttaccaacttctttgtcatctccttggccgtgtcagatctcttggtggccgtcttggtcatgccctggaaagcagtggctgagattgctggcttctggccctttgggtccttctgtaacatctgggtggcctttgacatcatgtgctccaccgcgtccatcctcaacctctgtgtgatcagcgtggacaggtactgggctatctccagccctttccggtatgagagaaagatgacccccaaggcagccttcatcctgatcagtgtggcatggaccttgtctgtactcatctccttcatcccagtgcagctcagctggcacaaggcaaaacccaccagcccctctgatgggaatgccacttccctggctgagaccatagacaactgtgattccagcctcagcaggacatatgccatctcatcctctgtaataagtttttacatccctgtggccatcatgattgtcacgtacaccaggatctacaggattgctcagaaacaaatacggcgcattgcggccttggagagggcagcagtccatgccaagaattgccagaccaccacaggtaatggaaagcctgtcgaatgttctcaaccggaaagttcttttaagatgtccttcaaaagagaaactaaagtcctgaagactctgtcagtgatcatgggcgtgtttgtgtgctgttggctacctttcttcatcctgaactgcattttgccgttctgcgggtctggggagacgcagcccttctgcatcgattccatcacctttgacgtgtttgtgtggtttgggtgggctaattcatccttgaaccccatcatttatgcctttaatgctgattttcggaaggcattttcaaccctcttaggatgctacagactttgcccggcgacaaataatgccatagagacggtgagtatcaataacaatggggccgcgatgttttccagccatcacgagccacgaggttctatctccaaggagtgcaatctggtttacctgatcccacatgctgtgggctcctctgaggacctgaaaaaggaggaggcagctggaatcgccagacccttggagaagctgtccccagccctatcggtcatattggactatgacactgacgtctctctggagaagatccaacccatcacacaaaacggacagcacccaacttgaactcccagatgaatcctg

SEQ ID NO: 24437 - DNA, 182 bp, Macaca Mulatta
  misc_feature (1)...(182): n = A,T,C or G
agtgttccatcgagtgtgggagtgggacacaacagagggaggtgatttgtgttagaaagaatgcagacacctttgaagtgttggacccctctgaatgttctttcctggnaaaaccccccagccagcaatcctgccacctcaagccttgcggagccaaatggtttagcaccgaatggagcatg

SEQ ID NO: 24438 - DNA, 3858 bp, Macaca Mulatta
  misc_feature (1)...(3858): n = A,T,C or G
aggagtccttgaagattccagaatcctcctctgacaaggtccctggtgannnnnnnnnngagggcacgatcaataattctcagtcttcctcctataatggtgctttagagagtacagcccgccacgatgaagaaagtcactctctttcacccccaggagaagatactgtgatggccgattccttcgagatcaaggttaacctgatgactgtagaagctttagaggagggagactattttgaagccatcccattaaaagcctcgaaatttaacagcgacctagtagattttgcttctaccagccaggctttcaacgaagttccttcacctcatgagacaaaacctgacgaggatgctgaggcttttgagaatcatgctgaaaaacgaggtaaaaggatcactaaatctgctcacaaaaagaaagattctccagagcctcaaggtaagacggacaaacatgaacctcaccaggactccggagaagaagctgaaggctgtccttcagaaccagaagagacgccggcggataaaaagcccagaggtgcatgaaaaggccaagagaaagtccacccgtcctcatgatgannnnnnnnnnnnnnnnnnnnnnnnnnnnnnnnnnnnnnnnnnnnnnnnnnnnnnnnnnnnnnnnnnnnnnnnnnnnnnnnnnnnnnnnnnnnnnnnnnnnnnnnnnnnnnnnnnnnnnnnnnnnnnnnnnnnnnnnnnnnnnnnnnnnnnnnnnnnnnnnnnnnnnnnnnnnnnnnnnnnnnnnnnnnnnnnnnnnnnnnnnnnnnnnnnnnnnnnnnnnnnnnnnnnnnnnnnnnnnnnnnnnnnnnnnnnnnnnnnnnnnnnnnnnnnnnnnnnnnnnnnnnnnnnnnnnnnnnnnnnnnnnnnnnnnnnnnnnnnnnnnnnnnnnnnnnnnnnnnnnnnnnnnnnnnnnnnnnnnnnnnnnnnnnnnnnnnnnnnnnnnnnnnnnnnnnnnnnnnnnnnnnnnnnnnnnnnnnnnnnnnnnnnnnnnnnnnnnnnnnnnnnnnnnnnnnnnnnnnnnnnnnnnnnnnnnnnnnnnnnnnnnnnnnnnnnnnnnnnnnnnnnnnnnnnnnnnnnnnnnnnnnnnnnnnnnnnnnnnnnnnnnnnnnnnnnnnnnnnnnnnnnnnnnnnnnnnnnnnnnnnnnnnnnnnnnnnnnnnnnnnnnnnnnnnnnnnnnnnnnnnnnnnnnnnnnnnnnnnnnnnnnnnnnnnnnnnnnnnnnnnnnnnnnnnnnnnnnnnnnnnnnnnnnnnnnncaggactagtcacagtgactccagcatttacattcgacgacatactaataggtcttcggaatcgnnnnnnnnnnnnnnnnnnnnnnnnnnnnnnnnnnnnnnnnnnnnnnnnnnnnnnnnnnnnnnnnnnnnggaaggccaacagctcaggagaagccatgtcactggggagccacagcccgcagagcgactctctgacacagcttgtccagcagccggatatgatgtattttattctcttcctgtggcnnnnnnnnnnnnnnnnnnnnnnnnnnnnnnnnnnnnnnnnnnnnnnnnnnnnnnnnnnnnnnnnnnnnnnnnnnnnnnnnnnnnnnnnnnnnnnnnnnnnnnnnnnnnnnnnnnnnnnnnnnnnnnnnnnnnnnnnnnnnnnnnnnnnnnnnnnnnnnnnnnnnnnnnnnnnnnnnnnnnnnnnnnnnnnnnnnnnnnnnnnnnnnnnnnnnnnnnnnnnnnnnnnnnnnnnnnnnnnnnnnnnnnnnnnnnnnnnnnnnnnnnnnnnnnnnnnnnnnnnnnnnnnnnnnnnnnnnnnnnnnnnnnnnnnnnnnnnnnnnnnnnnnnnnnnnnnnnnnnnnnnnnnnnnnnnnnnnnnnnnnnnnnnnnnnnnnnnnnnnnnnnnnnnnnnnnnnnnnnnnnnnnnnnnnnnnnnnnnnnnnnnnnnnnnnnnnnnnnnnnnnnnnnnnnnnnnnnnnnnnnnnnnnnnnnnnnnnnnnnnnnnnnnnnnnnnnnnnnnnnnnnnnnnnnnnnnnnnnnnnnnnnnnnnnnnnnnnnnnnnnnnnnnnnnnnnnnnnnnnnnnnnnnnnnnnnnnnnnnnnnnnnnnnnnnnnnnnnnnnnnnnnnnnnnnnnnnnnnnnnnnnnnnnnnnnnnnnnnnnnnnnnnnnnnnnnnnnnnnnnnnnnnnnnnnnnnnnnnnnnnnnnnnnnnnnnnnnnnnnnnnnnnnnnnnnnnnnnnnnnnnnnnnnnnnnnnnnnnnnnnnnnnnnnnnnnnnnnnnnnnnnnnnnnnnnnnnnnnnnnnnnnnnnnnnnnnnnnnnnnnnnnnnnnnnnnnnnnnnnnnnnnnnnnnnnnnnnnnnnnnnnnnnnnnnnnnnnnnnnnnnnnnnnnnnnnnnnnnnnnnnnnnnnnnnnnnnnnnnnnnnnnnnnnnnnnnnnnnnnnnnnnnnnnnnnnnnnnnnnnnnnnnnnnnnnnnnnnnnnnnnnnnnnnnnnnnnnnnnnnnnnnnnnnnnnnnnnnnnnnnnnnnnnnnnnnnnnnnnnnnnnnnnnnnnnnnnnnnnnnnnnnnnnnnnnnnnnnnnnnnnnnnnnnnnnnnnnnnnnnnnnnnnnnnnnnnnnnnnnnnnnnnnnnnnnnnnnnnnnnnnnnnnnnnnnnnnnnnnnnnnnnnnnnnnnnnnnnnnnnnnnnnnnnnnnnnnnnnnnnnnnnnnnnnnnnnnnnnnnnnnnnnnnnnnnnnnnnnnnnnnnnnnnnnnnnnnnnnnnnnnnnnnnnnnnnnnnnnnnnnnnnnnnnnnnnnnnnnnnnnnnnnnnnnnnnnnnnnnnnnnnnnnnnnnnnnnnnnnnnnnnnnnnnnnnnnnnnnnnnnnnnnnnnnnnnnnnnnnnnnnnnnnnnnnnnnnnnnnnnnnnnnnnnnnnnnnnnnnnnnnnnnnnnnnnnnnnnnnnnnnnnnnnnnnnnnnnnnnnnnnnnnnnnnnnnnnnnnnnnnnnnnnnnnnnnnnnnnnnnnnnnnnnnnnnnnnnnnnnnnnnnnnnnnnnnnnnnnnnnnnnnnnnnnnnnnnnnnnnnnnnnnnnnnnnnnnnnnnnnnnnnnnnnnnnnnnnnnnnnnnnnnnnnnnnnnnnnnnnnnnnnnnnnnnnnnnnnnnnnnnnnnnnnnnnnnnnnnnnnnnnnnnnnnnnnnnnnnnnnnnnnnnnnnnnnnnnnnnnnnnnnnnnnnnnnnnnnnnnnnnnnnnnnnnnnnnnnnnnnnnnnnnnnnnnnnnnnnnnnnnnnnnnnnnnnnnnnnnnnnnnnnnnnnnnnnnnnnntccaagcagaaggctgttgggagcttggagcgattccatctggaaggccaagagccctgtggaaaatgagctaattaatgagctccctggcatcaatgaaagcacaaaggtacagataataaagattatgtgtgtgatagtttataaccctgggcaccatgcagtcctcgcctaaattagatgctcaaagagcccgggaagagccgaccaaaatgtgaatcatttcattttatgggtctagaccttgttcagaaaaacctctgcaggattcttttctcacctattacaacttgtaatattgtttaaaacatccactggcaagatgcataaaagtcgtttggttcaggttggcagtcaactgattttttgaaaaggaaaaagaaatctcatttgagtatgggcttctatggatgaaggtggatatagaaaatggatgtggaagtctgcaggacaaaccaccccattgcttgtaattttttttttaatttaaaagaaacgcaataaggcttttaacaagaactagcagtccccgaaatctcgctgcttagaagta

SEQ ID NO: 24439 - DNA, 1177 bp, Macaca Mulatta
  misc_feature (1)...(1177): n = A,T,C or G
gggcctttcgctgcctgactgccgccatcatgggtcgcatgcatgctcccgggaagggcctgtcccagtcggctttgccctatcgacgcagcgtccccacttggttgaagttgacatctgacgacgtgaaggagcagatttacaaactggcccagaagggcctgactccttcacaaatcggtgtgatcctgagagattcacatggcgttgcacaagcacgttttgtgacaggcaataaaatcttaagaattcttaagtctaacggacttgctcctgatcttcctgaacatctctaccatttaattaagaaagcacctgctgcttcgaaagcatccttcacacgacacacaaaggataccgaatgctataactcccgtcttgattccctaatataaatagcctcgtatcccgcgccttctgcgcttcgatcatccatcagtaaccagcgtcgaaggtccgctcccctaccgccacctggcgagaatccccgactcgtaaccgcaccgtttccctccttcctctattgcaccccccgcttgtgccacttggcgtccgtgctatccaattgcgcaaatccccactccaccttcatgcgccttcccgtgctcttcacacccctctccacaccctaatggctcgccttccagaacgccgtcgactgtactcactccttcagtctcgatgcgtacggcgtactccccccccttgatgagccgcccatcgatacnctcgtggcactacctcctagccccttaacgatatagcggcgcctgtagcgagcgcgcagagacgtcttaccctatcccacgatatctcgccatcggaacgtaatccctgagcggtattctctgccgctggtacacagcgccccctttgtatcgctctccccctctgtgtgcccccgcatattgcactcctccgcgctggcgatacgagaccacgcgtcccaactattctcgtgccggttatccttgtgctcagagctacgacagcnccacgccccctatgttaccatttcgcgccccccctttcccgttttgtgtccgtcgagtgctnccccgccccgtgtgccgcgcaattgcacacctataatgcgctcgcgccgccgcgtatactgtacatagttacccactcgcgttgtatatcccacctactacatgctgcgtgtcagcatatg

SEQ ID NO: 24440 - DNA, 2519 bp, Macaca Mulatta
  misc_feature (1)...(2519): n = A,T,C or G
gtgatgctgccagtgtgatccagtttggaaagtcggccaagcgaacacctgagtccactcagattgggcagtacgggaatgggttaaaatcggctcaatgcgcattgggaaggattttatcctgttcaccaagaaggaagacaccatgacctgcctcttcctgtctcgcacctttcatgaggaagaaggcattgatgaagtngtgatagtcccactgcccacctggaatgctcggacccgggagcctgtcacagacaatgtagagaaatttgccattgagacagaactcatctacaagtactctcccttccgcactgaggaggaagtgatgacccaatttatgaagattcctggggacannnnnnnnnnnnnnnnnnnnnnnnnnnnnnnnnnnnnnnnnnnnnnnnnnnnnnnnnnnnnnnnnnnnnnnnnnnnnnnnnnnnnnnnnnnnnnnnnnnnnnnnnnnnnnnnnngaagccagagcggcgctcattccgtgcctatgccgctgtgctctatattgatccccggatgaggatcttcatccatgggcacaaggtgcagaccaagaggctctcgtgctgcctgtacaagcccagnnnnnnnnnnnnnnnnnnnnnnnnnnnnnnnnnnnnnnnnnnnnnnnnnnnnnnnnnnnnnnnnnnnnnnnnnnnnnnnnnnnnnnnnnnnnnnnnnnnnnnnnnnnnnnnnnnnnnnnnnnnnnnnnnnnnnnnnnnnnnnnnnnnnnnnnnnnnnnnnnnnnnnnnnnnnnnnnnnnnnnnnnnnnnnnnnnnnnnnnnnnnnnnnnnnnnnnnnnnnnnnnnnnnnnnnnnnnnnnnnnnnnnngagcacttaaagaacctaaggaactgaattttgtttttggggtcaacattgaacaccgggtcggggaaaacatgttcatctacaactgtagccggctgatcaaaatgtatgannnnnnnnnnnnnnnnnnnnnnnnnnnnnggcatgcggcggggttgttggggttgttgacgtgccctacctagtcctggagcctacacacaacaaacaggactttgctgatgccaaggagtaccggcacctgctccgagcaatgggggaacacctggcgcagtattggaaggacattgccannnnnnnnnnnnnnnnnnnnnnnnnnnnnnnnnnnnnnnnnnnnnnnnnnnnnnnnnnnnnnnnnnnnnnnnnnnnnnnnnnnnnnnnnnnnnnnnnnnnnnnnnnnnnnnnnnnnnnnnnnnnnnnnnnnnnnnnnnnnnnnnnnnnnnnnnnnnnnnnnnnnnnnnnnnnnnnnnnnnnnnnnnnnnnnnnnnnnnnnnnnnnnnnnnnnnnnnnnnnnnnnnnnnnnnnnnnnnnnnnnnnnnnnnnnnnnnnnnnnnnnnnnnnnnnnnnnnnnnnnnnnnnnnnnnnnnnnnnnnnnnnnnnnnnnnnnnnnnnnnnnnnnnnnnnnnnnnnnnnnnnnnnnnnnnnnnnnnnnnnnnnnnnnnnnnnnnnnnnnnnnnnnnnnnnnnnnnnnnnnnnnnnnnnnnnnnnnnnnnnnnnnnnnnnnnnnnnnnnnnnnnnnnnnnnnnnnnnnnnnnnnnnnnnnnnnnnnnnnnnnnnnnnnnnnnnnnnnnnnnnnnnnnnnnnnnnnnnnnnnnnnnnnnnnnnnnnnnnnnnnnnnnnnnnnnnnnnnnnnnnnnnnnnnnnnnnnnnnnnnnnnnnnnnnnnnnnnnnnnnnnnnnnnnnnnnnnnnnnnnnnnnnnnnnnnnnnnnnnnnnnnnnnnnnnnnnnnnnnnnnnnnnnnnnnnnnnnnnnnnnnnnnnnnnnnnnnnnnnnnnnnnnnnnnnnnnnnnnnnnnnnnnnnnnnnnnnnnnnnnnnnnnnnnnnnnnnnnnnnnnnnnnnnnnnnnnnnnnnnnnnnnnnnnnnnnnnnnnnnnnnnnnnnnnnnnnnnnnnnnnnnnnnnnnnnnnnnnnnnnnnnnnnnnnnnnnnnnnnnnnnnnnnnnnnnnnnnnnnnnnnnnnnnnnnnnnnnnnnnnnnnnnnnnnnnnnnnnnnnnnnnnnnnnnnnnnnnnnnnnnnnnnnnnnnnnnnnnnnnnnnnnnnnnnnnnnnnnnnnnnnnnnnnnnnnnnnnnnnnnnnnnnnnnnnnnnnnnnnnnnnnnnnnnnnnnnnnnnnnnnnnnnnnnnnnnnnnnnnnnnnnnnnnnnnnnnnnnnnnnnnnnnnnnnnnnnnnnnnnnnnnnnnnnnnnnnnnnnnnnnnnnnnnnnnnnnnnnnnnnnnnnnnnnnnnnnggtggagaaaggcagtgaggatgtgcggctgatgaagcccccttctccggaacatcagagccttgacacgcagcaggagggcggggaggaggaggcaggccctgtggcccaacaggccatagctgtggcagagccctccacttccgaatgcctccgcattgagcctgacaccactgccctgagcaccaatcatgagaccatcgacctgctcgtccagatcctccgg

SEQ ID NO: 24441 - DNA, 1398 bp, Macaca Mulatta
  misc_feature (1)...(1398): n = A,T,C or G
gatgtataacataaaccagtcaacagataccaaggaagcagcagccatcgaggccagaagaaatcgagaaaaagagcgacaaaaccgattcttcaatgtgcggaaccgagtcatgggggtnngtggatgtccaggccctgaacaaccaggtgggagaccgaaagcgtcgggaagcagcagaaagaagcaaggaggcagcttatggtanggtaccagccaggtgcagtatgatgtggtagtccagatgttagannnnnnnnnnnnnnnnnnnnnnnnnnnnnnnnnnnnnnnnnnnnnnnnnnnnnnnnnnnnnnnnnnnnnnnnnnnnnnnnnnnnnnnnnnnnnnnnnnnnnnnnnnnnnnnnnnnnnnnnnnnnnnnnnnnnnnnnnnnnnnnnnnnnnnnnnnnnnnnnnnnnnnnnnnnnnnnnnnnnnnnnnnnnnnnnnnnnnnnnnnnnnnnnnnnnnnnnnnnnnnnnnnnnnnnnnnnnnnnnnnnnnnnnnnnnnnnnnnnnnnnnnnnnnnnnnnnnnnnnnnnnnnnnnnnnnnnnnnnnnnnnnnnnnnnnnnnnnnnnnnnnnnnnnnnnnnnnnnnnnnnnnnnnnnnnngtcctaagctgagtacagcacccaggggaccagaactgtgtggggaggtccaattatccatagggttggtgctgaaatgttaggttgtgcagaccccaacctccctgacttccttcagtaactgacagtgtagcattgttcttgattagtttggcactctattacctggaggcagcacagtgcagacagatctaatggctctgccgcttactagctggtttgggcaaatgaattttcccttctgtgcttcagtttcttcatctttaaaatgagaataataatctataacacatagagtagctactattatgatattatctgtggccacatccttttcttccattagaagaagcccttcaagggcaaggaccatgtcttaatctgcttgcactgttcacccttcacatcaaccctgttacagcactctgttctgttggactacttattttagttgtagctaattgttaaagtatttgtttaatatctgtcttctccctaaaatgtcagactactgaagatgaaccatctctttcatgtctacccatctcccatacagtgtctgacaggtcttaggaacagcaaggagctcagtgtggctgaagcagaaacaaattgtcagtacctttgctcatgccatgccctcagcctggaatgccctttgctcttttagcctgtatacaaaatgtatttcaaggatcacctcttcctggaaaccttcctcttttccaccacccaaaatcctcttaataccctgtgtacatccctgccattgatcttgccagattgtggtcta

SEQ ID NO: 24442 - DNA, 3913 bp, Macaca Mulatta
  misc_feature (1)...(3913): n = A,T,C or G
gtatagatagtcacatgctacttcaacagcccctcatctattgccactttgctaacagagggaaggacccacattacatgccagtgaaggactgggaagtgctgaagatgattcttacggaaaccttagacaactacaacgaactaaatgctgccatgcacctagttttatttgaagatgccatgcaacatgtgtgngtgtcgcatcagccggatcttacgaacccctcagggctgtgctctcttggttggagtggggggcagtggcaagcagagcttgtccaggctggcagcttacctttgtggccttgaggtctttcagatcactctgaccgagggctatggaatccaggaacttcgggtnnnnnnnnnnnnnnnnnnnnnnnnnnnnnnnnnnnnnnnnnnnnnnnnnnnnnnnnnnnnnnnnnnnnnnnnnnnnnnnnnnnnnnnnnnnnnnnnnnnnnnnnnnnnnnnnnnnnnnncaggagaaatcccagatctgttcagcgatgaagatgtggacaagataatttctggaattcataatgaagttcatgctctgggcatggtggactccagagaaaactgttggaaattctttttggccagggtgcgactacagctcaannnnnnnnnnnnnnnnnnnnnnnnnnnnnnnnnnnnnnnnnnnnnnnnnnnnnnnnnnnnnnnnnnnnnnnnnnnnnnnnnnnnnnnnnnnnnnnnnnnnnnnnnnnnnnnnnnnnnnnnnnnnnnnnnnnnnnnnnnnnnnnnnnnnnnnnnnnnnnnnnnnnnnnnnnnnnnnnnnnnnnnnnnnnnnnnnnnnnnnnnnnnnnnnnnnnnnnnnnnnnnnnnnnnnnnnnnnnnnnnnnnnnnnnnnnnnnnnnnnnnnnnnnnnnnnnnnnnnnnnnnnnnnnnnnnnnnnnnnnnnnnnnnnnnnnnnnnnnnnnnnnnnnnnnnnnnnnnnnnnnnnnnnnnnnnnnnnnnnnnnnnnnnnnnnnnnnnnnnnnnnnnnnnnnnnnnnnnnnnnnnnnnnnnnnnnnnnnnnnnnnnnnnnnnnnnnnnnnnnnnnnnnnnnnnnnnnnnnnnnnnnnnnnnnnnnnnnnnnnnnnnnnnnnnnnnnnnnnnnnnnnnnnnnnnnnnnnnnnnnnnnnnnnnnnnnnnnnnnnnnnnnnnnnnnnnnnnnnnnnnnnnnnnnnnnnnnnnnnnnnnnnnnnnnnnnnnnnnnnnnnnnnnnnnnnnnnnnnnnnnnnnnnnnnnnnnnnnnnnnnnnnnnnnnnnnnnnnnnnnnnnnnnnnnnnnnnnnnnnnnnnnnnnnnnnnnnnnnnnnnnnnnnnnnnnnnnnnnnnnnnnnnnnnnnnnnnnnnnnnnnnnnnnnnnnnnnnnnnnnnnnnnnnnnnnnnnnnnnnnnnnnnnnnnnnnnnnnnnnnnnnnnnnnnnnnnnnnnnnnnnnnnnnnnnnnnnnnnnnnnnnnnnnnnnnnnnnnnnnnnnnnnnnnnnnnnnnnnnnnnnnnnnnnnnnnnnnnnnnnnnnnnnnnnnnnnnnnnnnnnnnnnnnnnnnnnnnnnnnnnnnnnnnnnnnnnnnnnnnnnnnnnnnnnnnnnnnnnnnnnnnnnnnnnnnnnnnnnnnnnnnnnnnnnnnnnnnnnnnnnnnnnnnnnnnnnnnnnnnnnnnnnnnnnnnnnnnnnnnnnnnnnnnnnnnnnnnnnnnnnnnnnnnnnnnnnnnnnnnnnnnnnnnnnnnnnnnnnnnnnnnnnnnnnnnnnnnnnnnnnnnnnnnnnnnnnnnnnnnnnnnnnnnnnnnnnnnnnnnnnnnnnnnnnnnnnnnnnnnnnnnnnnnnnnnnnnnnnnnnnnnnnnnnnnnnnnnnnnnggtcaatacattaagtcctaagaagctcaagagaagacactctgtggagatgttcttctcacggcagcatttatgtcttatgtcggaccctttacaaagcagtatcgccaggagctggtgcactgcgagtgggttccctttcttcaacagaaggnnnnnnnnnnnnnnnnnnnnnnnnnnnnnnnnnnnnnnnnnnnnnnnnnnnnnnnnnnnnnnnnnnnnnnnnnnnnnnnnnnnnnnnnnnnnnnnnnnnnnnnnnnnnnnnnnnnnnnnnnnnnnnnnnnnnnnnnnnnnnnnnnnnnnnnnnnnnnnnnnnnnnnnnnnnnnnnnnnnnnnnnnnnnnnnnnnnnnnnnnnnnnnnnnnnnnnnnnnnnnnnnnnnnnnnnnnnnnnnnnnnnnnnnnnnnnnnnnnnnnnnnnnnnnnnnnnnnnnnnnnnnnnnnnnnnnnnnnnnnnnnnnnnnnnnnnnnnnnnnnnnnnnnnnnnnnnnnnnnnnnnnnnnnnnnnnnnnnnnnnnnnnnnnnnnnnnnnnnnnnnnnngaatttcacaagaactttcgccttgtcnctcactcaaaattggcaaatcctcactacaagccggaattacaagctcagacaactctcctcaatttcacagtcacagaagatggtctagaagcccagctgctggcagaggttgtcagtattgagaggccagatttggagaaacttaannnnnnnnnnnnnnnnnnnnnnnnnnnnnnnnnnnnnnnnnnnnnnnnnnnnnnnnnnnnnnnnnnnnnnnnnnnnnnnnnnnnnnnnnnnnnnnnnnnnnnnnnnnnnnnnnnnnnnnnnnnnnnnnnnnnnnnnnnnnnnnnnnnnnnnnnnnnnnnnnnnnnnnnnnnnnnnnnnnnnnnnnnnnnnnnnnnnnnnnnnnnnnnnnnnnnnnnnnnnnnnnnnnnnnnnnnnnnnnnnnnnnnnnnnnnnnnnnnnnnnnnnnnnnnnnnnnnnnnnnnnnnnnnnnnnnnnnnnnnnnnnnnnnnnnnnnnnnnnnnnnnnnnnnnnnnnnnnnnnnnnnnnnnnnnnnnnnnnnnnnnnnnnnnnnnnnnnnnnnnnnnnnnnnnnnnnnnnnnnnnnnnnnnnnnnnnnnnnnnnnnnnnnnnnnnnnnnnnnnnnnnnnnnnnnnnnnnnnnnnnnnnnnnnnnnnnnnnnnnnnnnnnnnnnnnnnnnnnnnnnnnnnnnnnnnnnnnnnnnnnnnnnnnnnnnnnnnnnnnnnnnnnnnnnnnnnnnnnnnnnnnnnnnnnnnnnnnnnnnnnnnnnnnnnnnnnnnnnnnnnnnnnnnnnnnnnnnnnnnnnnnnnnnnnnnnnnnnnnnnnnnnnnnnnnnnnnnnnnnnnnnnnnnnnnnnnnnnnnnnnnnnnnnnnnnnnnnnnnnnnnnnnnnnnnnnnnnnnnnnnnnnnnnnnnnnnnnnnnnnnnnnnnnnnnnnnnnnnnnnnnnnnnnnnnnnnnnnnnnnnnnnnnnnnnnnnnnnnnnnnnnnnnnnnnnnnnnnnnnnnnnnnnnnnnnnnnnnnnnnnnnnnnnnnnnnnnnnnnnnnnnnnnnnnnnnnnnnnnnnnnnnnnnnnnnnnnnnnnnnnnnnnnnnnnnnnnnnnnnnnnnnnnnnnnnnnnnnnnnnnnnnnnnnnnnnnnnnnnnnnnnnnnnnnnnnnnnnnnnnnnnnnnnnnnnnnnnnnnnnnnnnnnnnnnnnnnnnnnnnnnnnnnnnnnnnnnnnnnnnnnnnnnnnnnnnnnnnnnnnnnnnnnnnnnnnnnnnnnnnnnnnnnnnnnnnnnnnnnnnnnnnnnnnnnnnnnnnnnnnnnnnnnnnnnnnnnnnnnnnnnnnnnnnnnnnnnnnnnnnnnnnnnnnnnnnnnnnnnnnnnnnnnnnnnnnnnnnnnnnnnnnnnnnnnnnnnnnnnnnnnnnnnnnnnnnnnnnnnnnnnnnnnnnnnnnnnnnnnnnnngtcccatgggaagatctccgttatctctttggtgagatcatgtatggaggccacaacacagatgactggg

SEQ ID NO: 24443 - DNA, 759 bp, Macaca Mulatta
  misc_feature (1)...(759): n = A,T,C or G
tgttgcccaggctggaatgtagttgtgccatcttggctcactgcaacctctgccgcccgggttcaagaaattctcctgcctcagcctcccgagtagctgggattacagnnnnnnnnnnnnnnnnnnnnnnnnnnnnnnnnnnnnnnnnnnnnnnnnnnnnnnnnnnnnnnnnnnnnnnnnnnnnnnnnnnnnnnnnnnnnnnnnnnnnnnnnnnnnnnnnnnnnnnnnnnnnnnnnnnnnnnnnnnnnnnnnnnngtgtgcttgtgaagttcataataggtgctcatggctgtgaagtgcctgtggaagacagggaggatccttattcctgtaaactactcaacatcacaaatccagnnnnnnnnnnnnnnnnnnnnnnnnnnnnnnnnnnnnnnnnnnnnnnnnnnnnnnnnnnnnnnnnnnnnnnnnnnnnnnnnnnnnnnnnnnnnnnnnnnnnnnnnnnnnnnnnnnnnnnnnnnnnnnnnnnnnnnnnnnnnnnnnnnnnnnnnnnnnnnnnnnnnnnnnnnnnnnnnnnnnnnnnnnnnnnnnnnnnnnnnnnnnnnnnnnnnnnnnnnnnnnnnnnnnnnnnnnnnnnnnnnnnnnnnnnnnnnnnnnnnnnnnnnnnnnnnnnnnnnnnnnnnnnnnagagctttgaaggtacaatcgtgtgggagagccaagacctccacggccttgtgtcaagaaatctccacaaagtgacagtgaatgatggagggggagttctcagagtcattacag

SEQ ID NO: 24444 - DNA, 433 bp, Macaca Mulatta
atgccggagttatcatctaaaggtgctacgatttccaagaaaggctttaagaaagcagtcgttaagacgcagaagaaagaaggcaaaaaacgcaagagaacccgtaaggagagctattctatttacatctacaaggtgctgaaacaggtccatccagatactggaatctcttccaaagccatgagtatcatgaattccttcgtcactgatatctttgagcgtatagcgagtgaggcatcacgcttggctcactacaacaaacgctccaccatttcctctagagagatccagacggcagtgcggttactactgccgggagagctggctaaacatgctgtgtctgagggcaccaaagctgtcactaagtacaccagctccaagtaagccggccaagtaaacgtctttacaacccaaaggctcttttcagagccac

SEQ ID NO: 24445 - DNA, 397 bp, Macaca Mulatta
cagcctctgaccctggagcagcacaagggcttcatgattgagcctgattggcccctgtaccctccgccgtcgcacgctcatgaggacagcccgccaccctacaaaaagaagctggacctgaccaagctgtaggcctccgctggccccatcattgccaactgcaggggccccttgggcctcacttgccgtgagcccaggagtccaagggtagggtggctccagccttgagcccctccacccccaaatctttcctctcttcccagtcccaccccttgccccacagagtcctggggacgcagtgtcccagctgggaggagggagggattgaacgctggttcttccttgtccccgctttctccggggcttgttactttttgtcttctattctgtggctttc

SEQ ID NO: 24446 - DNA, 411 bp, Macaca Mulatta
ggccaagatttgcagaacttgtggaaaaactgggtgatttgcttcaagcaaatgtacaacaggatggtaaagactacatcccaatcaatgccatactgacaggaaatagtgggtttacatactcaactcctgccttctctgaggacttcttcaaggaaggtatttcggctccgaagtttaattcagaaagctctgatgatgtcagatatgtaaatgctttcaagttcatgagcctggaaagaatcaaaacctttgaagaacttttaccaaatgccacctccatgtttgatgactaccagggggacagcagcactctgttggcctctcccatgctgaagcgcttcacctggactgacagcaaacccaaggcctcgctcaagattgacttgagagtaaccagtaaaagtaagg

SEQ ID NO: 24447 - DNA, 668 bp, Macaca Mulatta
  misc_feature (1)...(668): n = A,T,C or G
gggaacgccactcatggtcaaaggctttcgggatgccgcagaggaaggagggacagcagtgaccggtgggcaaacggtggtcaacccttggattataatcggtggagttgccactgtggtatgccagccaaatgagttcataatgccggacagtgccgtcgttggggacgtgctggtgttaaccaaaccattaggaacccaggttgctgtcaatgcccaccaatggctggataatcctgaaagatggaataaagtaaagatggtggtctccagagaagaggtggagctggcctatcaggaagccatgttcaatatggctaccctcaacagaactgctgcagggttaatgcacccattttatgcccatgccgccaccgatatcacaggctttggcatttctgggacactcccagaaaccttgcaaaaacaacaaaaaaagaaggggccctttgtttttcaaaaactgccgggaatttccaaaatggctgcccctcaccagggccatggaacggttgggcctttttaaaggacccccactaaaaccctggggggatattgatttttctccaaaaaaaagggcggtccttttttctcaaaaaaatccccaggacgaaagggtcacaccgnnnnnnnnnnnnnnnnnnnnnnccaacccctgattattaaac

SEQ ID NO: 24448 - DNA, 1286 bp, Macaca Mulatta
  misc_feature (1)...(1286): n = A,T,C or G
ggnnnnnnnnnnnnnnnnnnnnnnnnnnnnnnnnnnnnnnnnnnnnnnnnnnnnnnnnnnnnnnnnnnnnnnnnnnnnnnnnnnnnnnnnnnnnnnnnnnnnnnnnnnnnnnnnnnnnnnnnnnnnnnnnnnnnnnnnnnnnnnnnnnnnnnnnnnnnnnnnnnnnnnnnnnnnnnnnnnnnnnnnnnnnnnnnnnnnnnnnnnnnnnnnnnnnnnnnnnnnnnnnnnnnnnnnnnnnnnnnnnnnnnnnnnnnnnnnnnnnnnnnnnnnnnnnnnnnnnnnnnnnnnnnnnnnnnnnnnnnnnnnnnnnnnnnnnnnnnnnnnnnnnnnnnnnnnnnnnnnnnnnnngccagaagcataaacagaaaagaaagatttaagagtattcacactcaacaggttttagaataatttaaatatcaaaaattgattctattatacttacacattaggtataatttatcatttatctgaaattacatgtagcagattacatagtctgtaatcctcagagggaaacttctttaaacaagaagttaaaacagctctatatgaataagtttaaacagctgtatatgaatttatacttttatatttataaatttataacttcataaaaatttataaacatttcttctttataattgtaatttaatagattatctcagaaaaacctctctgaatgataacccttccttactactggggtgatgtgtaaatatttgttgggggacagggtctcactttgtcacccaggctgaagttcagtggtgcgatctcagcttactgcagcctctacttcctgggttcaagtgatcnnnnnnnnnnnnnnnnnntagtaggtgggactacaggtgtccaccaccatgcttggctaatnnnnnnnnnnnnngnnnnnnnnnnnnnnnnnnnnnnnnnannnnnnnnnnnnnnnnnnnnnnnnnnnnaatgatccatccannnnnnnnnnnnnnnnnnnnnnnnnnnnnnnnnnaagccactgtgcctggccttgatgtgtgaatatttgaaaggtcataaacagtggttttggctatactgtactacaccgttatacatcagtaagaactcatcttggaaccccgttttgcagtttttaaaaattaaagacctaccctcaaagggtttgatggtgaaaaaaagttttattttttccaatgaagtatgtaaatgaaaggttttccttaaaccagtggtttgggtaatacagaaagcctttcctcaactttacgaagggggttttatggtccccaaataaagcccct

SEQ ID NO: 24449 - DNA, 420 bp, Macaca Mulatta
tgcacccccgccctcctatggggccacacacagcacatttcaaccccccaggcccccaccccctgtccgggactactgaccatgtgcctcccactgaatggcagtttccaggacctccactccactcatctctggcctgagtgacagtgtcaaggaaccctgctcctctccgtcctgcctcaggcctaagaagcactctcctttgttcccagtgctgtcaaatcctcttcccttcccaattgcctctcaggggtagtgaagctgcagactgacagtttcaaggatacccaaattcccctaaaggttccctctccacccgttctgcctcagtggtttcaaatctctcctttcagggctttatttgaatggacagttcaacctcttactctcttttgtggttttgaggcacccacaccccca

SEQ ID NO: 24450 - DNA, 145 bp, Macaca Mulatta
ggtggactttctcaaggaaaagtgttttgctgggtctgtggtttggaccattgatttggatgacttctcaaggtccttctgcaatgaaaggaaatacctgctcataagcaagctgaagtgacacctgagcctgtcctcaggtgca

SEQ ID NO: 24451 - DNA, 114 bp, Macaca Mulatta
tgagattgagcgtgaaagcggaggaggttgccactttttatgggaggatgttggatcatgaatacacaacaaaggaggttttccggaagaacttctttaatgattggcgaaagg

SEQ ID NO: 24452 - DNA, 2779 bp, Macaca Mulatta
  misc_feature (1)...(2779): n = A,T,C or G
aaaatgtatgcttcctaaatgtggaagaattttttcagaagcttatttactgtatgatcatgaagcacaacattataatacgtacacttgcaagttcacaggttgtggcaaagtttatcgttctcagggtgagctggaaaagcatctggatgatcacagtactcctcctgaaaaagtgctgcctcctgaagcccaacttaattcatctggagattccattcagccttctgaagtgaatcagaacacagcagagaatactgagaaagaaagatctgtgcttccttcagaaaataacattgaaaacagcttactagcagatagaagtgatgcttgggataaaagcaaagcagaatcaactgtgaccaaacaagaccagatttctgcctctgagctcaggcaagttaatggaccgttgtcaaatggtttggaaaactctgctactactcctctgcttcaatccagtgaagtagctgtgtccattaaggtgtctctcaatcaggggattgaggataactttggaaagcaagaaaactcaactgtggaaggcaatggtgaatctctggttacagacttacatacaccagttgaagatacttgtaatgatttatgtcatccaggtttccaggagagaaaagaacaagattgctttaatgaagcccaggttactcagaattctttagtanattcagaaactctcanaataggtgaccttaccccacaaaacttagaaagacaagtgaacaacttgatgaccttttctgtgcaaaatcaggcaggatttcaaaacaatttaccaacttccaaatttgaatgtggagantatgttnaaacatcatccatcttaataaatttacctcttaaaacttaaaaaggattgcatttgtttcgncacagcccatctaagtaattcttaaggaccccatcagtgctccaaaagctcaggtcagaaattaactgcccggtcgaggaagtactcgacctataactcttcccagatnnnnnnnnnnnnnnnnnnnnnnnnnnnnnnnnnnnnnnnnnnnnnnnnnnnnnnnnnnnnnnnnnnnnnnnnnnnnnnnnnnnnnnnnnnnnnnnnnnnnnnnnnnnnnnnnnnnnnnnnnnnnnnnnnnnnnnnnnnnnnnnnnnnnnnnnnnnnnnnnnnnnnnnnnnnnnnnnnnnnnnnnnnnnnnnnnnnnnnnnnnnnnnnnnnnnnnnnnnnnnnnnnnnnnnnnnnnnnnnnnnnnnnnnnnnnnnnnnnnnnnnnnnnnnnnnnnnnnnnnnnnnnnnnnnnnnnnnnnnnnnnnnnnnnnnnnnnnnnnnnnnnnnnnnnnnnnnnnnnnnnnnnnnnnnnnnnnnnnnnnnnnnnnnnnnnnnnnnnnnnnnnnnnnnnnnnnnnnnnnnnnnnnnnnnnnnnnnnnnnnnnnnnnnnnnnnnnnnnnnnnnnnnnnnnnnnnnnnnnnnnnnnnnnnnnnnnnnnnnnnnnnnnnnnnnnnnnnnnnnnnnnnnnnnnnnnnnnnnnnnnnnnnnnnnnnnnnnnnnnnnnnnnnnnnnnnnnnnnnnnnnnnnnnnnnnnnnnnnnnnnnnnnnnnnnnnnnnnnnnnnnnnnnnnnnnnnnnnnnnnnnnnnnnnnnnnnnnnnnnnnnnnnnnnnnnnnnnnnnnnnnnnnnnnnnnnnnnnnnnnnnnnnnnnnnnnnnnnnnnnnnnnnnnnnnnnnnnnnnnnnnnnnnnnnnnnnnnnnnnnnnnnnnnnnnnnnnnnnnnnnnnnnnnnnnnnnnnnnnnnnnnnnnnnnnnnnnnnnnnnnnnnnnnnnnnnnnnnnnnnnnnnnnnnnnnnnnnnnnnnnnnnnnnnnnnnnnnnnnnnnnnnnnnnnnnnnnnnnnnnnnnnnnnnnnnnnnnnnnnnnnnnnnnnnnnnnnnnnnnnnnnnnnnnnnnnnnnnnnnnnnnnnnnnnnnnnnnnnnnnnnnnnnnnnnnnnnnnnnnnnnnnnnnnnnnnnnnnnnnnnnnnnnnnnnnnnnnnnnnnnnnnnnnnnnnnnnnnnnnnnnnnnnnnnnnnnnnnnnnnnnnnnnnnnnnnnnnnnnnnnnnnnnnnnnnnnnnnnnnnnnnnnnnnnnnnnnnnnnnnnnnnnnnnnnnnnnnnnnnnnnnnnnnnnnnnnnnnnccagtacatttgagggtgccgagatgctttctcatgtttcaacaggttgtgtctctgatacaccacaagtaaatgcaacagtgatgccaaatccaactgtgccacccctgttgcagactgtatgccatccaaacaccttgctgaccaaccagaataggacatcaaactcccaaaacttcctccattgaggaatgtagcagcttgcctgtttttccaacgaatgacttactactgaagactgttgaaaatggtttgtgctctagttcatttcctaattctggtgggccatcacaaaattttaccagtaacagttctcgtgtttctgttataagtggtcctcagaacacaagatccagtcatttaaataaaaagggaaacagtgcttctaagagaagaaagaaagttgctcctccactaattgcacctaattcttcccaaaacttggtaacaagtgacttaacaacaatcggactcatagcaaagagtgttgaaatcccaactactaaccttcactcaaatgtaattccaagttgtgaacctcagagtttggtggaaaatctaacacagaagttaaataatgttaacaatcagttatttatgactgatgtaaaagagaatttcaaa

SEQ ID NO: 24453 - DNA, 138 bp, Macaca Mulatta
cccccacaaggaatttgctgtgaccatgagacctacagaagccagcgagaggtgcctcctgcgggggtcctataccctccgggctggggagagtgccctggagctgtggggtgggcccgaaccagggacccagctgta

SEQ ID NO: 24454 - DNA, 5063 bp, Macaca Mulatta
  misc_feature (1)...(5063): n = A,T,C or G
ttacagtggagaagaattagaatgtaacctgaaagatcttagaccagcaacagattatcatgtgaggnnnnnnnnnnnnnnnnnnnnnnnnnnnnnnnnnnnnnnnnnnnnnnnnnnnnnnnnnnnnnnnnnnnnnnnnnnnnnnnnnnnnnnnnnnnnnnnnnnnnnnnnnnnnnnnnnnnnnnnnnnnnnnnnnnnnnnnnnnnnnnnnnnnnnnnnnnnnnnnnnnnnnnnnnnnnnnnnnnnnnnnnnnnnnnnnnnnnnnnnnnnnnnnnnnnnnnnnnnnnnnnnnnnnnnnnnnnnnnnnnnnnnnnnnnnnnnnnnnnnnnnnnnnnnnnnnnnnnnnnnnnnnnnnnnnnnnnnnnnnnnnnnnnnnnnnnnnnnnnnnnnnnnnnnnnnnnnnnnnnnnnnnnnnnnnnnnnnnnnnnnnnnnnnnnnnnnnnnnnnnnnnnnnnnnnnnnnnnnnnnnnnnnnnnnnnnnnnnnnnnnnnnnnnnnnnnnnnnnnnnnnnnnnnnnnnnnnnnnnnnnnnnnnnnnnnnnnnnnnnnnnnnnnnnnnnnnnnnnnnnnnnnnnnnnnnnnnnnnnnnnnnnnnnnnnnnnnnnnnnnnnnnnnnnnnnnnnnnnnnnnnnnnnnnnnnnnnnnnnnnnnnnnnnnnnnnnnnnnnnnnnnnnnnnnnnnnnnnnnnnnnnnnnnnnnnnnnnnnnnnnnnnnnnnnnnnnnnnnnnnnnnnnnnnnnnnnnnnnnnnnnnnnnnnnnnnnnnnnnnnnnnnnnnnnnnnnnnnnnnnnnnnnnnnnnnnnnnnnnnnnnnnnnnnnnnnnnnnnnnnnnnnnnnnnnnnnnnnnnnnnnnnnnnnnnnnnnnnnnnnnnnnnnnnnnnnnnnnnnnnnnnnnnnnnnnnnnnnnnnnnnnnnnnnnnnnnnnnnnnnnnnnnnnnnnnnnnnnnnnnnnnnnnnnnnnnnnnnnnnnnnnnnnnnnnnnnnnnnnnnnnnnnnnnnnnnnnnnnnnnnnnnnnnnnnnnnnnnnnnnnnnnnnnnnnnnnnnnnnnnnnnnnnnnnnnnnnnnnnnnnnnnnnnnnnnnnnnnnnnnnnnnnnnnnnnnnnnnnnnnnnnnnnnnnnnnnnnnnnnnnnnnnnnnnnnnnnnnnnnnnnnnnnnnnnnnnnnnnnnnnnnnnnnnnnnnnnnnnnnnnnnnnnnnnnnnnnnnnnnnnnnnnnnnnnnnnnnnnnnnnnnnnnnnnnnnnnnnnnnnnnnnnnnnnnnnnnnnnnnnnnnnnnnnnnnnnnnnnnnnnnnnnnnnnnnnnnnnnnnnnnnnnnnnnnnnnnnnnnnnnnnnnnnnnnnnnnnnnnnnnnnnnnnnnnnnnnnnnnnnnnnnctgatagttccggtgctgacatctcagagtacaggttggaatgttgagaagatgacgaatccttagaactcatttatcatgggacagacacccgttttgaaataagagacctgttgcctgctgcacaatattgctgtagactacaggnnnnnnnnnnnnnnnnnnnnnnnnnnnnnnnnnnnnnnnnnnnnnnnnnnnnnnnnnnnnnnnnnnnnnnnnnnnnnnnnnnnnnnnnnnnnnnnnnnnnnnnnnnnnnnnnnnnnnnnnnnnnnnnnnnnnnnnnnnnnnnnnnnnnnnnnnnnnnnnnnnnnnnnnnnnnnnnnnnnnnnnnnnnnnnnnnnnnnnnnnnnnnnnnnnnnnnnnnnnnnnnnnnnnnnnnnnnnnnnnnnnnnnnnnnnnnnnnnnnnnnnnnnnnnnnnnnnnnnnnnnnnnnnnnnnnnnnnnnnnnnnnnnnnnnnnnnnnnnnnnnnnnnnnnnnnnnnnnnnnnnnnnnnnnnnnnnnnnnnnnnnnnnnnnnnnnnnnnnnnnnnnnnnnnnnnnnnnnnnnnnnnnnnnnnnnnnnnnnnnnnnnnnnnnnnnnnnnnnnnnnnnnnnnnnnnnnnnnnnnnnnnnnnnnnnnnnnnnnnnnnnnnnnnnnnaggtttatttcaatctacagaggacccagccacacctacaaggtccagagactgacggaattcacatgctactccttcagaatccaggcagcaagcgaggctggggaagggcccttctcagaaacctataccttcagcacaaccaaaagtgnnnnnnnnnnnnnnnnnnnnnnnnnnnnnnnnnnnnnnnnnnnnnnnnnnnnnnnnnnnnnnnnnnnnnnnnnnnnnnnnnnnnnnnnnnnnnnnnnnnnnnnnnnnnnnnnnnnnnnnnnnnnnnnnnnnnnnnnnnnnnnnnnnnnnnnnnnnnnnnnnnnnnnnnnnnnnnnnnnnnnnnnnnnnnnnnnnnnnnnnnnnnnnnnnnnnnnnnnnnnnnnnnnnnnnnnnnnnnnnnnnnnnnnnnnnnnnnnnnnnnnnnnnnnnnnnnnnnnnnnnnnnnnnnnnnnnnnnnnnnnnnnnnnnnnnnnnnnnnnnnnnnnnnnnnnnnnnnnnnnnnnnnnnnnnnnnnnnnnnnnnnnnnnnnnnnnnnnnnnnnnnnnnnnnnnnnnnnnnnnnnnnnnnnnnnnnnnnnnnnnnnnnnnnnnnnnnnnnnnnnnnnnnnnnnnnnnnnnnnnnnnnnnnnnnnnnnnnnnnnnnnnnnnnnnnnnnnnnnnnnnnnnnnnnnnnnnnnnnnnnnnnnnnnnnnnnnnnnnnnnnnnnnnnnnnnnnnnnnnnnnnnnnnnnnnnnnnnnnnnnnnnnnnnnnnnnnnnnnnnnnnnnnnnnnnnnnnnnnnnnnnnnnnnnnnnnnnnnnnnnnnnnnnnnnnnnnnnnnnnnnnnnnnnnnnnnnnnnnnnnnnnnnnnnnnnnnnnnnnnnnnnnnnnnnnnnnnnnnnnnnnnnnnnnnnnnnnnnnnnnnnnnnnnnnnnnnnnnnnnnnnnnnnnnnnnnnnnnnnnnnnnnnnnnnnnnnnnnnnnnnnnnnnnnnnnnnnnnnnnnnnnnnnnnnnnnnnnnnnnnnnnnnnnnnnnnnnnnnnnnnnnnnnnnnnnnnnnnnnnnnnnnnnnnnnnnnnnnnnnnnnnnnnnnnnnnnnnnnnnnnnnnnnnnnnnnnnnnnnnnnnnnnnnnnnnnnnnnnnnnnnnnnnnnnnnnnnnnnnnnnnnnnnnnnnnnnnnnnnnnnnnnnnnnnnnnnnnnnnnnnnnnnnnnnnnnnnnnnnnnnnnnnnnnnnnnnnnnnnnnnnnnnnnnnnnnnnnnnnnnnnnnnnnnnnnnnnnnnnnnnnnnnnnnnnnnnnnnnnnnnnnnnnnnnnnnnnnnnnnnnnnnnnnnnnnnnnnnnnnnnnnnnnnnnnnnnnnnnnnnnnnnnnnnnnnnnnnnnnnnnnnnnnnnnnnnnnnnnnnnnnnnnnnnnnnnnnnnnnnnnnnnnnnnnnnnnnnnnnnnnnnnnnnnnnnnnnnnnnnnnnnnnnnnnnnnnnnnnnnnnnnnnnnnnnnnnnnnnnnnnnnnnnnnnnnnnnnnnnnnnnnnnnnnnnnnnnnnnnnnnnnnnnnnnnnnnnnnnnnnnnnnnnnnnnnnnnnnnnnnnnnnnnnnnnnnnnnnnnnnnnnnnnnnnnnnnnnnnnnnnnnnnnnnnnnnnnnnnnnnnnnnnnnnnnnnnnnnnnnnnnnnnnnnnnnnnnnnnnnnnnnnnnnnnnnnnnnnnnnnnnnnnnnnnnnnnnnnnnnnnnnnnnnnnnnnnnnnnnnnnnnnnnnnnnnnnnnnnnnnnnnnnnnnnnnnnnnnnnnnnnnnnnnnnnnnnnnnnnnnnnnnnnnnnnnnnnnnnnnnnnnnnnnnnnnnnnnnnnnnnnnnnnnnnnnnnnnnnnnnnnnnnnnnnnnnnnnnnnnnnnnnnnnnnnnnnnnnnnnnnnnnnnnnnnnnnnnnnnnnnnnnnnnnnnnnnnnnnnnnnnnnnnnnnnnnnnnnnnnnnnnnnnnnnnnnnnnnnnnnnnnnnnnnnnnnnnnnnnnnnnnnnnnnnnnnnnnnnnnnnnnnnnnnnnnnnnnnnnnnnnnnnnnnnnnnnnnnnnnnnnnnnnnnnnnnnnnnnnnnnnnnnnnnnnnnnnnnnnnnnnnnnnnnnnnnnnnnnnnnnnnnnnnnnnnnnnnnnnnnnnnnnnnnnnnnnnnnnnnnnnnnnnnnnnnnnnnnnnnnnnnnnnnnnnnnnnnnnnnnnnnnnnnnnnnnnnnnnnnnnnnnnnnnnnnnnnnnnnnnnnnnnnnnnnnnnnnnnnnnnnnnnnnnnnnnnnnnnnnnnnggaaaccaacattattttgtttttggcttatttatactatattctgcatacagtactttaaatgccaattacagtgcaatctttatttattgtaaaaaatttttaaatgtacttatgtactaattttcccttgtagcatgttatatttttgtgttttatacttttgtaattttaggtcagtcttgttccttggcaacatctgtagtattattaatcttctgacattttcttgtgtttttaaaaagataagagcatctagtgcattaaatgccnnnnnnnaatccattatcagtgattgaaacgtttacatgtaccccaaaaccataatcatctcttggaagaaaatgctgagatcaatgaattattctgtgtgcctatattgatgtagtgagtactagagagttctgtgttttttattattgactataataagtagtttaattagctttgcaaactgatggcatcgaggtaaatatatttctgccaaagttctggccttccaaaactcacccccctgtttaaacatgtgctgtgacccactgtgacacagcatgtgcattttctaaaaaattccacgcaggtgtttcggggagaggtattttttaagcaatgcaaattcaactgagtacaaagccccctctnnnnnnnnnnnnnagtctcttttttgaaacacttcagaactgctgctataaagaaattctctgaattggttgaattttttttaagtaaatagtactttaggccaaaatctatatgaatatttgatcttcttgagattttcatactatcatttaaccac

SEQ ID NO: 24455 - DNA, 181 bp, Macaca Mulatta
agagtcttttatcaagtcttgtgaaactgaatagtttgaccttagctaggaattgcttccagttatatccagtgggtggtccatctcagttttctaccatctattccctcaacatagagacacaatcgaatcaataaaattccattggaattttctatcgaagctaaagtattaagtaagc

SEQ ID NO: 24456 - DNA, 555 bp, Macaca Mulatta
  misc_feature (1)...(555): n = A,T,C or G
ggaagagttttacggaagaaaattgattcttgctgatagagaagaagtggaacaagaagcagataatattttaaaggatgctgatatcagtgatgttgcgttccttgtggttggnnnnnnngacacttggagaccagaaagcttctttgacaaagtgaagaagaacagacaaaatggcatgcacacattatgtttactnnnnnnnnnnnnnnnnnnnnnnnnnnnnnnnnnnnnnnnnnnnnnnnnnnnnnnnnnnnnnnnnnnnnnnnnnnnnnnnnnnnnnnnnnnnnnnnnnnnnnnnnnnnnnnnnnnnnnnnnnnnnnnnnnnnnnnnnnnnnnnnnnnnnnnnaccgaggagacactttgtgttggcttagccagggttggagcagacgaccagaaaattgcagcaggcactttacagcaaatgtgtactgtggacttgggagaaccattgcattccttgatcatcacaggaggcagcatacatccaatagagatggagatgctaaatctcttttccataccagaaaatagctcagaatctcaaagcat

SEQ ID NO: 24457 - DNA, 1248 bp, Macaca Mulatta
  misc_feature (1)...(1248): n = A,T,C or G
gggggatcgcagagcggtttggtcgttcgttgggcttgtgtccgttcttagctcggcgattgcggctgttcctcgggcagcggaagcggcgcggcggtcggagaagtggcctaaaacttcggcgttgggtgaaagaaaatggcccgaaccaagcagactgctcgtaaatccaccggtgggaaagcgccccgcaaacagctggccacaaaagccgccaggaaaagcgctccctctaccggcggggtgaagaagcctcatcgttacaggcccgggaccgtggcgcttcgagagattcgccgttatcagaagtcgaccgagctgctcattcggaagctgcccttccagaggttggtgagggagatcgctcaggatttcaaaaccgacctgaggtttcagagcgcggccattggtgcgctgcaggaggctagtgaagcgtacctggtgggtctgttcgaagatactaatctgtgtgccatccacgctaagagagtcaccatcatgcccaaagacatccagttggctcgccggatacggggagagagagcttaagtgaaggcagtttttatggcgttttgtagtaaattctgtaaaatactttggtttaatttgtgactttttttgtaagaaattgtttataatatgttgcatttgtacttaagtcattccatctttcactcaggatgaatgcgaaaagtgactgttcacagacctcagtgatgtgagcactgttgctcaggagtgacaagttgctaatatgcagaagggatgggtgatatttcttgcttctcatgatgcatgtttctgtatgttaatgacttgttgggtagctattaaggtactagaattgataaatgtgtacagggtccttttgcaataaaactggttatgacttgatccaagtgtttaacattgnggctgttaagtctgaccatacatcactgtgatagaatgtgggctttttcagggtgaagatacaagttctaaccacagtgtaacttacaattnnnnnnnnnnnnnnnnnnnnnnnnnnnnnncctggccgccttaaaataccctatggcattttaaaacccattttaatattggaagggcaaatttttaaattaaggtttcccttccnnnnnannnnnnnnnnnnnnnnnnnnnncnnnnnnnnnnnnnnnnnnnnnnnnnnnnnnnngggccggnnnnnnnnnnnnnnnnnnnnnnntttttccaaaaaccggcaaaaaggttggtttccccaaa

SEQ ID NO: 24458 - DNA, 148 bp, Macaca Mulatta
gcttcacgcaggccatgctgagccagcccaagatggagagcctggacacccccgcggcctacagcctgggccttgcgctcctgggactgggcgtcgtgctcgtgctctccagcttctttgcactggggttcactggaaccttcctagg

SEQ ID NO: 24459 - DNA, 3154 bp, Macaca Mulatta
  misc_feature (1)...(3154): n = A,T,C or G
cagaccatctttgaaatctctgaaaactgataacaggccagaaaaatccaaatacaagccacttttgggaaaagtattttaccttgacttaccttctgtcaccatatctgaaaaactgcaaaaggacattaagaatgtgggaggnnnnnnnnnnnnnnnnnnnnnnnnnnnnnnnnnnnnnnnnnnnnnnnnnnnnnnnnnnnnnnnnnnnnnnnnnnnnnnnnnnnnnnnnnnnnnnnnnnnnnnnnnnnnnnnnnnnnnnnnnnnnnnnnnnnnnnnnnnnnnnnnnnnnnnnnnnnnnnnnnnnnnnnnnnnnnnnnnnnnnnnnnnnnnnnnnnnnnnnnnnnnnnnnnnnnnnnnnnnnnnnnnnnnnnnnnnnnnnnnnnnnnnnnnnnnnnnnnnnnnnnnnnnnnnnnnnnnnnnnnnnnnnnnnnnnnnnnnnnnnnnnnnnnnnnnnnnnnnnnnnnnnnnnnnnnnnnnnnnnnnnnnnnnnnnnnnnnnnnnnnnnnnnnnnnnnnnnnnnnnnnnnnnnnnnnnnnnnnnnnnnnnnnnnnnnnnnnnnnnnnnnnnnnnnnnnnnnnnnnnnnnnnnnnnnnnnnnnnnnnnnnnnnnnnnnnnnnnnnnnnnnnnnnnnnnnnnnnnnnnnnnnnnnnnnnnnnnnnnnnnnnnnnnnnnnnnnnnnnnnnnnnnnnnnnnnnnnnnnnnnnnnnnnnnnnnnnnnnnnnnnnnnnnagaatccaaacggatggcgataagtatggtggaacttcaattcaactccagttgaaagagaagaagaaaaaaggatactgcgaatgttgcttgcagaaatatgaagatctagaaacnnnnnnnnnnnnnnnnnnnnnnnnnnnnnnnnnnnnnnnnnnnnnnnnnnnnnnnnnnnnnnnnnnnnnnnnnnnnnnnnnnnnnnnnnnnnnnnnnnnnnnnnnnnnnnnnnnnnnnnnnaaagaataaaatacagtgttggatccctttctcctgtttctgcaaatgtcctgaaaaagactgaacaaaaggaaaaagtggaataccaacatatttctcagaaagattgccgggaagatgatataacggtgatggagcagaatttcctgtataaagagacccaggaaactgaaaaagagattctgtttatttcagagaccatcccnnnnnnnnnnnnnnnnnnnnnnnnnnnnnnnnnnnnnnnnnnnnnnnnnnnnnnnnnnnnnnnnnnnnnnnnnnnnnnnnnnnnnnnnnnnnnnnnnnnnnnnnnnnnnnnnnnnnnnnnnnnnnnnnnnnnnnnnnnnnnnnnnnnnnnnnnnnnnnnnnnnnnnnnnnnnnnnnnnnnnnnnnnnnnnnnnnnnnnnnnnnnnnnnnnnnnnnnnnnnnnnnnnnnnnnnnnnnnnnnnnnnnnnnnnnnnnnnnnnnnnnnnnnnnnnnnnnnnnnnnnnnnnnnnnnnnnnnnnnnnnnnnnnnnnnnnnnnnnnnnnnnnnnnnnnnnnnnnnnnnnnnnnnnnnnnnnnnnnnnnnnnnnnnnnnnnnnnnnnnnnnnnnnnnnnnnnnnnnnnnnnnnnnnnnnnnnnnnnnnnnnnnnnnnnnnnnnnnnnnnnnnnnnnnnnnnnnnnnnnnnnnnnnnnnnnnnnnnnnnnnnnnnnnnnnnnnnnnnnnnnnnnnnnnnnnnnnnnnnnnnnnnnnnnnnnnnnnnnnnnnnnnnnnnnnnnnnnnnnnnnnnnnnnnnnnnnnnnnnnnnnnnnnnnnnnnnnnnnnnnnnnnnnnnnnnnnnnnnnnnnnnnnnnnnnnnnnnnnnnnnnnnnnnnnnnnnnnnnnnnnnnnnnnnnnnnnnnnnnnnnnnnnnnnnnnnnnnnnnnnnnnnnnnnnnnnnnnnnnnnnnnnnnnnnnnnnnnnnnnnnnnnnnnnnnnnnnnnnnnnnnnnnnnnnnnnnnnnnnnnnnnnnnnnnnnnnnnnnnnnnnnnnnnnnnnnnnnnnnnnnnnnnnnnnnnnnnnnnnnnnnnnnnnnnnnnnnnnnnnnnnnnnnnnnnnnnnnnnnnnnnnnnnnnnnnnnnnnnnnnnnnnnnnnnnnnnnnnnnnnnnnnnnnnnnnnnnnnnnnnnnnnnnnnnnnnnnnnnnnnnnnnnnnnnnnnnnnnnnnnnnnnnnnnnnnnnnnnnnnnnnnnnnnnnnnnnnnnnnnnnnnnnnnnnnnnnnnnnnnnnnnnnnnnnnnnnnnnnnnnnnnnnnnnnnnnnnnnnnnnnnnnnnnnnnnnnnnnnnnnnnnnnnnnnnnnnnnnnnnnnnnnnnnnnnnnnnnnnnnnnnnnnnnnnnnnnnnnnnnnnnnnnnnnnnnnnnnnnnnnnnnnnnnnnnnnnnnnnnnnnnnnnnnnnnnnnnnnnnnnnnnnnnnnnnnnnnnnnnnnnnnnnnnnnnnnnnnnnnnnnnnnnnnnnnnnnnnnnnnnnnnnnnnnnnnnnnnnnnnnnnnnnnnnnnnnnnnnnnnnnnnnnnnnnnnnnnnnnnnnnnnnnnnnnnnnnnnnnnnnnnnnnnnnnnnnnnnnnnnnnnnnnnnnnnnnnnnnnnnnnnnnnnnnnnnnnnnnnnnnnnnnnnnnnnnnnnnnnnnnnnnnnnnnnnnnnnnnnnnnnnnnnnnnnnnnnnnnnnnnnnnnnnnnnnnnnnnnnnnnnnnnnnnnnnnnnnnnnnnnnnnnnnnnnnnnnnnnnnnnnnnnnnnnnnnnnnnnnnnnnnnnnnnnnnnnnnnnnnnnnnnnnnnnnnnnnnnnnnnnnnnnnnnnnnnnnnnnnnnnnnnnnnnnnnnnnnnnnnnnnnnnnnnnnnnnnnnnnnnnnnnnnnnnnnnnnnnnnnnnnnnnnnnnnnnnnnnnnnnnnnnnnnnnnnnnnnnnnnnnnnnnnnnnnnnnnnnnnnnnnnnnnnnnnnnnnnnnnnnnnnnnntttgggatatatacaaggattggcttgatctggcactgacaaccacttggagaagagaaaattcaaatataagaaatgtctatttgaatctgtggatataaggcatttgcctttgagtatgttcttataggagtaagactacctaccaccagtgacattcagttggtgctgttgcttagtacatgaatatattgtcactaaaaattaggttact

SEQ ID NO: 24460 - DNA, 196 bp, Macaca Mulatta
aggtgctggaagagaagtttgatgctttcagaaaggaagttcagagcctgggccaggccaaggtgcatgccctgaggaagctggcaggcaccctggagcggggcgcacccaggcgctatccccacatccaagcccagaggagccgcattgaggccgcttgggagaggctggaccaagcaataaaagcccgcacaga

SEQ ID NO: 24461 - DNA, 494 bp, Macaca Mulatta
  misc_feature (1)...(494): n = A,T,C or G
agtcttacaagggcagttgaaaatatacaatttaatgaagtcgatacatgagataannnnnnnnnnnnnnnnnnnnnnnnnnnnnnnnnnnnnnnnnnnnnnnnnnnnnnnnnnnnnnnnnnnnnnnnnnnnnnnnnnnnnnnnnnnnnnnnnnnnnnnnnnnnnnnnnnnnnnnnnnnnnnnnnnnnnnnnnnnnnnnnnnnnnnnnnnnnnnnnnnnnnnnnnnnnnnnnnnnnnnnnnnnnnnnnnnnnnnnnnnnnnnnnnnnnnnnnnnnnnnnnnnnnnnnnnnnnnnnnnnnnnnnnnnnnnnnnnnnnnnnnnnnnnnnnnnnnnnnnnnnnnnnnnnnnnnnnnnnnnnnnnnnnnnnnnnnnnnnnnnnnnnnnnnnnnnnnnnnnnnnnnnnnnnnnnagactgcatgcaccatttgcatgtctccagaaatgtctaaatgctgacaaaacacctagctttattcttcagatacaaactgcag

SEQ ID NO: 24462 - DNA, 516 bp, Macaca Mulatta
aaatgcttgaactaaagcttcccctatgctggagaagtatgaagaaagatatacctggaggcattagaacagcgatgggaaccattgcaactcgggtccatctttgtaacatgctgaagacaagcagaagcacatgcacgaggggcagaggagctactgtgcactgctgtgaaattttccagagcataaaacctgcgtaccctccttcacatcaactaagttcactaggacataccaagcacatgcgtgtgaatgaggatgcaaggcaagagaatggaactccagaattcacagatagaacaaatggatgagaaatatttcgtgcaaaatataaagtgtcctgaggatctgggttccattcacaagaggaaatgaaagtgataaaataaattttatcttccttttaaatgtcagcatgtcagcagaagcagcacacaaaagtctttaccattttccagtattaattttttgtaatataaatgataaaggagatgataaagaaccaatagattattg

SEQ ID NO: 24463 - DNA, 565 bp, Macaca Mulatta
  misc_feature (1)...(565): n = A,T,C or G
tttcgctcacaatgctccagtcaaggtgaaaaatgctcagggatggagccctctggcggaagccatcagctatggagatagacagatgannnnnnnnnnnnnnnnnnnnnnnnnnnnnnnnnnnnnnnnnnnnnnnnnnnnnnnnnnnnnnnnnnnnnnnnnnnnnnnnnnnnnnnnnnnnnnnnnnnnnnnnnnnnnnnnnnnnnnnnnnnnnnnnnnnnnnnnnnnnnnnnnnnnnnnnnnnnnnnnnnnnnnnnnnnnnnnnnnnnnnnnnnnnnnnnnnnnnnnnnnnnnnnnnnnnnnnnnnnnnnnnnnnnnnnnnnnnnnnnnnnnnnnnnnnnnnnnnnnnnnnnnnnnnnnnnnnnnnnnnnnnnnnnnnnnnnnnnnnnnnnnnnnnnnnnnnnnnnnnnnnnnnnnnnnnnnnnnnnnnnaggaatcagagatggaaacagaagaagaggttgatattttaatgagcagtgatatttactctgcaactttatcaacaaaatcaatttctttcacgcgtgcccagacaggatggctttttcgggaagataaaaca

SEQ ID NO: 24464 - DNA, 324 bp, Macaca Mulatta
gatgatgccattctgctgtgtacaggcccagaaaaggccaaccagggcccaaccgtgcatgatgacatggtgaagagatggcagttctaggtattggggcaaagagaacttaagtctctgcagagagcaaggagtaactcctgagagagaatcaggacaatcctgcaggtggcccgcttattgttaaatcgtccctctgttgctttatcctctaaaatatgttaagggataaattctatatatagttatgcatttgctgtcataccagacaattttttttatcatgcacacgcttctttaataaagatgagtgatctaccagaa

SEQ ID NO: 24465 - DNA, 245 bp, Macaca Mulatta
ccgctcaaattcattcagtgatgaaagagagttctctggaccttccaccccgacggggactctggagtttgaaggtggggaggtgtcactggaaggcgggaaagttaaagggaaacatgggaagctgaaattcggtacctttggtggattggggtcaaagagcaaaggtcattatgaggtgactgggagtgatgatgagacaggcaagttacaggggagtggggtgtccctggcctctaagaagt

SEQ ID NO: 24466 - DNA, 1894 bp, Macaca Mulatta
  misc_feature (1)...(1894): n = A,T,C or G
aggacactctgattgtgtggtctgaagcagaaaattatgacttggcccttagctttcaagaaaaagctggatgtgatgaaatttgggagaaaatatgtcaggtnnnnnnnnnnnnnnnnnnnnnnnnnnnnnnnnnnnnnnnnnnnnnnnnnnnnnnnnnnnnnnnnnnnnnnnnnnnnnnnnnnnnnnnnnnnnnnnnnnnnnnnnnnnnnnnnnnnnnnnnnnnnnnnnnnnnnnnnnnnnnnnnnnnnnnnnnnnnnnnnnnnnnnnnnnnnnnnnnnnnnnnnnnnnnnnnnnnnnnnnnnnnnnnnnnnnnnnnnnnnnnnnnnnnnnnnnnnnnnnnnnnnnnnnnnnnnnnnnnnnnnnnnnnnnnnnnnnnnnnnnnnnnnnnnnnnnnnnnnnnnnnnnnnnnnnnnnnnnnnnnnnnnnnnnnnnnnnnnnnnnnnnnnnnnnnnnnnnnnnnnnnnnnnnnnnnnnnnnnnnnnnnnnnnnnnnnnnnnnnnnnnnnnnnnnnnnnnnnnnnnnnnnnnnnnnnnnnnnnnnnnnnnnnnnnnnnnnnnnnnnnnnnnnnnnnnnnnnnnnnnnnnnnnnnnnnnnnnnnnnnnnnnnnnnnnnnnnnnnnnnnnnnnnnnnnnnnnnnnnnnnnnnnnnnnnnnnnnnnnnnnnnnnnnnnnnnnnnnnnnnnnnnnnnnnnnnnnnnnnnnnnnnnnnnnnnnnnnnnnnnnnnnnnnnnnnnnnnnnnnnnnnnnnnnnnnnnnnnnnnnnnnnnnnnnnnnnnnnnnnnnnnnnnnnnnnnnnnnnnnnnnnnnnnnnnnnnnnnnnnnnnnnnnnnnnnnnnnnnnnnnnnnnnnnnnnnnnnnnnnnnnnnnnnnnnnnnnnnnnnnnnnnnnnnnnnnnnnnnnnnnnnnnnnnnnnnnnnnnnnnnnnnnnnnnnnnnnnnnnnnnnnnnnnnnnnnnnnnnnnnnnnnnnnnnnnnnnnnnnnnnnnnnnnnnnnnnnnnnnnnnnnnnnnnnnnnnnnnnnnnnnnnnnnnnnnnnnnnnnnnnnnnnnnnnnnnnnnnnnnnnnnnnnnnnnnnnnnnnnnnnnnnnnnnnnnnnnnnnnnnnnnnnnnnnnnnnnnnnnnnnnnnnnnnnnnnnnnnnnnnnnnnnnnnnnnnnnnnnnnnnnnnnnnnnnnnnnnnnnnnnnnnnnnnnnnnnnnnnnnnnnnnnnnnnnnnnnnnnnnnnnnnnnnnnnnnnnnnnnnnnnnnnnnnnnnnnnnnnnnnagatgattttcagactgcccaactattggcacttgtattggaattgttaacattttgtgtggagcaccatacctaccacataaagaactacattattaataaggatatcctccggagagtgctagttcttatggcctcgaagcatgctttcttggcattatnnnnnnnnnnnnnnnnnnnnnnnnnnnnnnnnnnnnnnnnnnnnnnnnnnnnnnnnnnnnnnnnnnnnnnnnnnnnnnnnnnnnnnnnnnnnnnnnnnnnnnnnnnnnnnnnnnnnnnnnnnnnnnnnnnnnnnnnnnnnnnnnnnnnnnnnnnnnnnnnnnnnnnnnnnnnnnnnnnnnnnnnnnnnnnnnnnnnnnnnnnnnnnnnnnnnnnnnnnnnnnnnnnnnnnnnnnnnnnnnnnnnnnnnnnnnnnnnnnnnnnnnnnnnnnnnnnnnnnnnnnnnnnnnnnnnnnnnnnnnnnnnnnnnnnnnnnnnnnnnnnnnnggaagatataaaatcattaactgctcatgtaattgaaaattactggaaagcactggaagatgtagattatgtacagacatttaaaggattaaaactgagatttgaacaacaaagagaaaggcaagataatcccaaacttgacag

SEQ ID NO: 24467 - DNA, 212 bp, Macaca Mulatta
attggaaaacagtgaatatttgaatttcattcatttgaataagcattcaaatgaactgcccagtgaacttataaagacagtggatatacttaaaattcttgttgtcaggacataaaatgatgggtaaaagttgcattacctctgggactggaagctggaggagtcaactcgatggttattacagctccattgctgtaagggacagccttgac

SEQ ID NO: 24468 - DNA, 800 bp, Macaca Mulatta
  misc_feature (1)...(800): n = A,T,C or G
gggaaaaaaatgtatgtgcttgaaagtaaaatatttacaatagtagcttaactatttcactccttaaataacaatactaaagaagttcatatatcctggaataacatgtcatcttcaaaannnnnnnnnnnnntnnnnnnnnnnnnnaataacaaacagtgttaaagctgtattttttcttaataaataaaagatattacaaatatttctttagggaagctcaaatggatgttgtcttgttaacattggagcgaatataaatcttcaaaatacaataatatatactgctttgtggaaacttggctcatactattcttcaatgctcttcaaatttgaactaacccttacattccatatgatgtgatgtaggcttataagatgctaaaatctataggttttggaaatgaaatattctattttttcttttttgtacataatgggaatttcattccagattgtatttaatttatatattaatttcacagaatattaatgtttcttaacttcttaaagcatgctagtgttttatgtatatgtacacatatattcagacagggtaatttttactgctacctaacattatactaaaatattgcttaatctgtttttaattacaaaatgctaatgatttgttaaattatagtttaaagacacttggtccagggagcaaatccccctgcctttagtatgcaccactgtaagtaacctttacaaatagagttaatcccnnagacagtatttaacaaaactatgctttggtcnttttattaaaaggggatagggnataaacaaaatgtatn

SEQ ID NO: 24469 - DNA, 609 bp, Macaca Mulatta
aattactacccaacccggttccatgatctgcaccccactcccacccctaggatattttgtcgaaggaaggtgatcgatttcatcaagtcctcactgtttggccttggcagtggagtggccgagcaaccccaggtcccaaaagaaaaagccacagattcgaggcaccaataaagatttatcttgttgtctaagcatctgactcactcccctggacggggctgatcctagcctttggttccccgagagcagaggtctggggatgggctccggcctgagggaagaagggcgggaaaccaggacccttgggtcgtggagggggccatctggctgcgacgtaattccagaatcaaggaatggggcagggccaatcctccccagatctcctcccccaggcctggtctcctcacaggacgccccctccccgctcttcctgccgggtttcctcttgccttttcctgtcccccacccagtgctgggagccgtggcagaggcaagagcagtggaactgacccaggccagtggagccagggcctccgggtgtgccggacccgaagcagggtaagagccagggacccagcggcccaaaccctcctccctgggacccaagac

SEQ ID NO: 24470 - DNA, 1096 bp, Macaca Mulatta
  misc_feature (1)...(1096): n = A,T,C or G
tgttttcagatcaaactccaaccccaacgagattcctgaagaactgcgaagaggtgggcctcttcagcgagctcgactgctccctggagcatgagttcaggaaggcccaggaggaggagagcagcaagcggngaatatctcaatgcataatgcagttggtggggccatgacagggcccggaactcaccagcttagcagtgctcgtctgcccaaccacgacaccagcgttgtgattcagcaagccatgccgtcaccccagtccagctccgtcatcacccaggcaccttccaccaaccgccagatnnnnnnnnnnnnnnnnnnnnnnnnnnnnnnnnnnnnnnnnnnnnnnnnnnnnnnnnnnnnnnnnnnnnnnnnnnnnnnnnnnnnnnnnnnnnnnnnnnnnnnnnnnnnnnnnnnnnnnnnnnnnnnnnnnnnnnnnnnnnnnnnnnnnnnnnnnnnnnnnnnnnnnnnnnnnnnnnnnnnnnnnnnnnnnnnnnnnnnnnnnnnnnnnnnnnnnnnnnnnnnnnnnnnnnnnnnnnnnnnnnnnnnnnnnnnnnnnnnnnnnnnnnnnnnnnnnnnnnnnnnnnnnnnnnnnnnnnnnnnnnnnnnnnnnnnnnnnnnnnnnnnnnnnnnnnnnnnnnnnnnnnnnnnnnnnnnnnnnnnnnnnnnnnnnnnnnnnnnnnnnnnnnnnnnnnnnnnnnnnnnnnnnnnnnnnnnnnnnnnnnnnnnnnnnnnnnnnnnnnnnnnnnnnnnnnnnnnnnnnnnnnnnnnnnnnnnnnnnnnnnnnnnnnnnnnnnnnnnnnnnnnnnnnnnnnnnnnnnnnnnnnnnnnnnnnnnnnnnnnnnnnnnnnnnnnnnnnnnnnnncaggtttcaccagcaacacaacagatgcagccaacccagacaatacagccaccccagcccacaggggggcgccggcgaagggtggtggacgaggatcccgacgagaggcggcggaaatttctggaacggaaccgggcagctgccacccgctgcagacagaagaggaaggtctgggtgatgtcattggaaaagaaagcagaagaactcacccagacaaacatgcagcttcag

SEQ ID NO: 24471 - DNA, 723 bp, Macaca Mulatta
  misc_feature (1)...(723): n = A,T,C or G
ggggtttctccttcatcttgaaatcgactctgatgggatctcagagatcagttgtcactggctatagacttgtggctgccgtcgatccgcatccctggggagaattacgtgctggaactgcatgttcgtgcgactcttgggatctcatcttagacttctcgctgccgcagccatgttttcaaccatggcatccctccctcttagttccctgtcatcctcgtcaaccttctgtctaagtccttggtaagcttgcccttgcttaagaactaacaacacagctgtgctctgtttgttgttgttgagagaatctctgnnnnnnnnnnnnnnnnnnnnacagtggcgccatcttggctcactggaacctgcggcctcctannnnnnnnnnnnnnnnnnncttcagcctgnnnnnnnnnnnnnnnnnnnnnnnctcaccaccatgcccggctactttttgtatttttaagtagatacgatattcaccatgttggccgggcgtgtttcaaactcctggcgtcaggtggtccacctnnnnnnnnnnnnnnnnnnntnnnnnnnnnnnnnnnnnnnnnnnnnnnntggcctctcttttttatcagccacaaatccagtagcagcctgagggattcaagctcataaaataaagcctggatgttcttgggtggatcttcaccataaacccaaggatggcccatccccggtgtgaagaaaaccaccatcccccct

SEQ ID NO: 24472 - DNA, 529 bp, Macaca Mulatta
  misc_feature (1)...(529): n = A,T,C or G
gcaggaacaaagggatgaggactcgactgggatgcctgtctcacaagtcagactcgtgtagtgatttcacagctattcttccagacaaacccaaccgcgctctcaagngagattatccacagaagaagctacgaggtgggcagattcctttgatgtgcttctttctcataagtnnnnnnnnnnnnnnnnnnnnnnnnnnnnnnnnnnnnnnnnnnnnnnnnnnnnnnnnnnnnnnnnnnnnnnnnnnnnnnnnnnnnagaagaccaggtcaacagcaaaactggtctctaaagccccataggatctttgaggagtttgtggatgtgcaggctccacgggaggtnaggtaaacattgacttccagacccgagaagccacgaggaagaacatgcaggagccgtccctgacttgctttgaccaagcccaaggaaaagtacacagcctcatggagaaagactcttaccccaggttcctgaggtccaaaatgtacttagatctgctgtcccaaagccagaggaggctcagttag

SEQ ID NO: 24473 - DNA, 1463 bp, Macaca Mulatta
  misc_feature (1)...(1463): n = A,T,C or G
agggttacatgatgaattatcgccacagacggaaaaactggactgaacgatggtttgtactaaagcccaacataatttcttactatgtgagtgaggatctgaaagataagaaaggagacattctcttagatgaaattgctgtgtagagnnnnnnnnnnnnnnnnnnnnnnnnnnnnnnntttttctcgtaaaatgttttgataagacttttgaaatcagtgcttcagataagaagaagaaacaggagtggattcaanattcattctactattcatctgttgaagctggttagtcctccaccacacaaagaagcccgccagcgtcggaaagaactccggaagaagcagctggctgaacaagaggaactggagcgacaaatgaaggagctccaggttgccaacgaaagcaaacagcaggagctggaggctgtgcggaagnnnnnnnnnnnnnnnnnnnnnnnnnnnnnnnnnnnnnnnnnnnnnnnnnnnnnnnnnnnnnnnnnnnnnnnnnnnnnnnnnnnnnnnnnnnnnnnnnnnnnnnnnnnnnnnnnnnnnnnnnnnnnnnnnnnnnnnnnnnnnnnnnnnnnnnnnnnnnnnnnnnnnnnnnnnnnnnnnnnnnnnnnnnnnnnnnnnnnnnnnnnnnnnnnnnnnnnnnnnnnnnnnnnnnnnnnnnnnnnnnnnnnnnnnnnnnnnnnnnnnnnnnnnnnnnnnggttattggaggaagagtcttccaagagggctgaactagaaaagtggcacttggagcagcagcaggccattcagacaactgaggcggagaagcaggagttggagaatcagcgtgtcctgaaggaacaggccctgcaggaggccatggagcagctggagcagcttgagttagaacggaaacaagcacttgagcagtacgaggnnnnnnnnnnnnnnnnnnnnnnnnnnnnnnnnnnnnnnnnnnnnnnnnnnnnnnnnnnnnnnnnnnnnnnnnnnnnnnnnnnnnnnnnnnnnnnnnnnnnnnnnnnnnnnnnnnnnnnnnnnnnnnnnnnnnnnnnnnnnnnnnnnnnnnnnnnnnnnnnnnnnnnnnnnnnnnnnnnnnnnnnnnnnnnnnnnnnnnnnnnnnnnnnnnnnnnnnnnnnnnnnnnnnnnnnnnnnnnnnnnnnnnnnnnnnnnnnnnnnnnnnnnnnnnnnnnnnnnnnnnnnnnnnnggcgtagtggctcacgcctgtaaccccagcactttgggaggccaaggcaggtggatcacttgaggtcaggagtttgagaccagtctggccaacatggtgaaactttgtctctactaaaaatacaaaaattagctgggtgtggcggcaggtgcttgtaattccgctacttgggtgactgaggtgggaagattgcttgaacctgggaggcagaggttgctgagatcatgccattgcactccagtctgggcgacagagcgagactc

SEQ ID NO: 24474 - DNA, 582 bp, Macaca Mulatta
  misc_feature (1)...(582): n = A,T,C or G
gtatttcccaggtggtgaaggaccacgtgaccaagcctactgccatggcccagggccgagtggctcacctcattgagtggaagggctggagcaagccgagtgactcgcctgctgccctggaatcagccttttcctcctattcggacctcagcgagggcgaacaagaggctcgctttgcagcaggnnnnnnnnnnnnnnnnnnnnnnnnnnnnnnnnnnnnnnnnnnnnnnnnnnnnnnnnnnnnnnnnnnnnnnnnnnnnnnnnnnnnnnnnnnnnnnnnnnnnnnnnnnnnnnnacagacatggctgggcagctgcccctggggccccacctccaggacctgttcaccggccatcggttctcccggcctgtgcgccagggctccgtggagcctgagagcgactgctcgcagaccgtgtccccagacaccctgtgctctagtctgtgcagcctggaggacgggttgttgggctccccagcccggctggcctcccagctgctgggtgatgagctgcttctcgccaaactgccccccagccgggaaagtgccttccgcagcctgggcccactggagacccagga

SEQ ID NO: 24475 - DNA, 3713 bp, Macaca Mulatta
  misc_feature (1)...(3713): n = A,T,C or G
ggaagtaatttaaatgcacaagacattggtcaaaatggtttccaaaagaagactatcaaaatctgaggataaagagagcctgatcgaagatgcctccnnnnnnnnnnnnnnnnnnnnnnnnnnnnnnnnnnnnnnnnnnnnnnnnnnnnnnnnnnnnnnnnnnnnnnnnnnnnnnnnnnnnnnnnnnnnnnnnnnnnnnnnnnnnnnnnnnnnnnnnnnnnnnnnnnnnnnnnnnnnnnnnnnnnnnnnnnnnnnnnnnnnnnnnnnnnnnnnnnnnnnnnnnnnnnnnnnnnnnnnnnnnnnnnnnnnnnnnnnnnnnnnnnnnnnnnnnnnnnnnnnnnnnnnnnnnnnnnnnnnnnnnnnnnnnnnnnnnnnnnnnnnnnnnnnnnnnnnnnnnnnnnnnnnnnnnnnnnnnnnnnnnnnnnnnnnnnnnnnnnnnnnnnnnnnnnnnnnnnnnnnnnnnnnnnnnnnnnnnnnnnnnnnnnnnnnnnnnnnnnnnnnnnnnnnnnnnnnnnnnnnnnnnnnnnnnnnnnnnnnnnnnnnnnnnnnnnnnnnnnnnnnnnnnnnnnnnnnnnnnnnnnnnnnnnnnnnnnnnnnnnnnnnnnnnnnnnnnnnnnnnnnnnnnnnnnnnnnnnnnnnnnnnnnnnnnnnnnnnnnnnnnnnnnnnnnnnnnnnnnnnnnnnnnnnnnnnnnnnnnnnnnnnnnnnnnnnnnnnnnnnnnnnnnnnnnnnnnnnnnnnnnnnnnnnnnnnnnnnnnnnnnnnnnnnnnnnnnnnnnnnnnnnnnnnnnnnnnnnnnnnnnnnnnnnnnnnnnnnnnnnnnnnnnnnnnnnnnnnnnnnnnnnnnnnnnnnnnnnnnnnnnnnnnnnnnnnnnnnnnnnnnnnnnnnnnnnnnnnnnnnnnnnnnnnnnnnnnnnnnnnnnnnnnnnnnnnnnnnnnnnnnnnnnnnnnnnnnnnnnnnnnnnnnnnnnnnnnnnnnnnnnnnnnnnnnnnnnnnnnnnnnnnnnnnnnnnnnnnnnnnnagttcctcaggaaatcaagaaagcagcatcagagctgtgttattctcctctttgatgtaataaagtcagctattagatatgagaaaaccatttcagaagcctggattaagnnnnnnnnnnnnnnnnnnnnnnnnnnnnnnnnnnnnnnnnnnnnnnnnnnnnnnnnnnnnnnnnnnnnnnnnnnnnnnnnnnnnnnnnnnnnnnnnnnnnnnnnnnnnnnnnnnnnnnnnnnnnnnnnnnnnnnnnnnnnnnnnnnnnnnnnnnnnnnnnnnnnnnnnnnnnnnnnnnnnnnnnnnnnnnnnnnnnnnnnnnnnnnnnnnnnnnnnnnnnnnnnnnnnnnnnnnnnnnnnnnnnnnnnnnnnnnnnnnnnnnnnnnnnnnnnnnnnnnnnnnnnnnnnnnnnnnnnnnnnnnnnnnnnnnnnnnnnnnnnnnnnnnnnnnnnnnnnnnnnnnnnnnnnnnnnnnnnnnnnnnnnnnnnnnnnnnnnnnnnnnnnnnnnnnnnnnnnnnnnnnnnnnnnnnnnnnnnnnnnnnnnnnnnnnnnnnnnnnnnnnnnnnnnnnnnnnnnnnnnnnnnnnnnnnnnnnnnnnnnnnnnnnnnnnnnnnnnnnnnnnnnnnnnnnnnnnnnnnnnnnnnnnnnnnnnnnnnnnnnnnnnnnnnnnnnnnnnnnnnnnnnnnnnnnnnnnnnnnnnnnnnnnnnnnnnnnnnnnnnnnnnnnnnnnnnnnnnnnnnnnnnnnnnnnnnnnnnnnnnnnnnnnnnnnnnnnnnnnnnnnnnnnnnnnnnnnnnnnnnnnnnnnnnnnnnnnnnnnnnnnnnnnnnnnnnnnnnnnnnnnnnnnnnnnnnnnnnnnnnnnnnnnnnnnnnnnnnnnnnnnnnnnnnnnnnnnnnnnnnnnnnnnnnnnnnnnnnnnnnnnnnnnnnnnnnnnnnnnnnnnnnnnnnnnnnnnnnnnnnnnnnnnnnnnnnnnnnnnnnnnnnnnnnnnnnnnnnnnnnnnnnnnnnnnnnnnnnnnnnnnnnnnnnnnnnnnnnnnnnnnnnnnnnnnnnnnnnnnnnnnnnnnnnnnnnnnnnnnnnnnnnnnnnnnnnnnnnnnnnnnnnnnnnnnnnnnnnnnnnnnnnnnnnnnnnnnnnnnnnnnnnnnnnnnnnnnnnnnnnnnnnnnnnnnnnnnnnnnnnnnnnnnnnnnnnnnnnnnnnnnnnnnnnnnnnnnnnnnnnnnnnnnnnnnnnnnnnnnnnnnnnnnnnnnnnnnnnnnnnnnnnnnnnnnnnnnnnnnnnnnnnnnnnnnnnnnnnnnnnnnnnnnnnnnnnnnnnnnnnnnnnnnnnnnnnnnnnnnnnnnnnnnnnnnnnnnnnnnnnnnnnnnnnnnnnnnnnnnnnnnnnnnnnnnnnnnnnnnnnnnnnnnnnnnnnnnnnnnnnnnnnnnnnnnnnnnnnnnnnnnnnnnnnnnnnnnnnnnnnnnnnnnnnnnnnnnnnnnnnnnnnnnnnnnnnnnnnnnnnnnnnnnnnnnnnnnnnnnnnnnnnnnnnnnnnnnnnnnnnnnnnnnnnnnnnnnnnnnnnnnnnnnnnnnnnnnnnnnnnnnnnnnnnnnnnnnnnnnnnnnnnnnnnnnnnnnnnnnnnnnnnnnnnnnnnnnnnnnnnnnnnnnnnnnnnnnnnnnnnnnnnnnnnnnnnnnnnnnnnnnnnnnnnnnnnnnnnnnnnnnnnnnnnnnnnnnnnnnnnnnnnnnnnnnnnnnnnnnnnnnnnnnnnnnnnnnnnnnnnnnnnnnnnnnnnnnnnnnnnnnnnnnnnnnnnnnnnnnnnnnnnnnnnnnnnnnnnnnnnnnnnnnnnnnnnnnnnnnnnnnnnnnnnnnnnnnnnnnnnnnnnnnnnnnnnnnnnnnnnnnnnnnnnnnnnnnnnnnnnnnnnnnnnnnnnnnnnnnnnnnnnnnnnnnnnnnnnnnnnnnnnnnnnnnnnnnnnnnnnnnnnnnnnnnnnnnnnnnnnnnnnnnnnnnnnnnnnnnnnnnnnnnnnnnnnnnnnnnnnnnnnnnnnnnnnnnnnnnnnnnnnnnnnnnnnnnnnnnnnnnnnnnnnnnnnnnnnnnnnnnnnnnnnnnnnnnnnnnnnnnnnnnnnnnnnnnnnnnnnnnnnnnnnnnnnnnnnnnnnnnnnnnnnnnnnnnnnnnnnnnnnnnnnnnnnnnnnnnnnnnnnnnnnnnnnnnnnnnnnnnnnnnnnnnnnnnnnnnnnnnnnnnnnnnnnnnnnnnnnnnnnnnnnnnnnnnnnnnnnnnnnnnnnnnnnnnnnnnnctgtattcagccctccatgtccttagtagccgactgaaacagggagaacacagccagccgttggaggaactgctcannnnnnnnnnnnnnnnnnnnnnnnnnnnnnnnnnnnnnnnnnnnnnnnnnnnnnnnnnnnnnnnnnnnnnnnnnnnnnnnnnnnnnnnnnnnnnnnnnnnnnnnnnnnnnnnnnnnnnnnnnnnnnnnnnnnnnnnnnnnnnnnnnnnnnnnnnnnnnnnnnnnnnnnnnnnnnnnnnnnnnnnnnnnnnnnnnnnnnnnnnnnnnnnnnnnnnnnnnnnnnnntatctacctggagcacacagatagcattctgaaggccatagaggagattgctggtgttggtgtcccagaactgatcaactctcctaaagatgtgtcttcctccacattccctacactgaccagg

SEQ ID NO: 24476 - DNA, 519 bp, Macaca Mulatta
  misc_feature (1)...(519): n = A,T,C or G
aagctcaactatcgagtgcccagccggggccataaactgactgtgaccctgtcatgtggcagaccttccatccggaaccacggcttgggaagactacatttggttccaggcaccagtgacacttaaaggcttccgcgagtgaatgagtgcttcttaattataaaaacacaatggctgaattatctttcttcatgtggcactgaattaccncatctagtttggagctagagtttcttcctggtgagagacgaagcaactctccttctggttgtctgcctcccctcctcaggtttcctgatgggctgatggcatgtggcggtgactgtaatcattgctgaacaacatctctttgaatcaaaggttgattttcccagagggtgctgggtcaggtatttctgttaggggttgtaaagcaaagatgggtccatagacagaaactccatgaaggtggccctttctgctccttgctgtgtcctttcagaatttttcccaggaacataatgtggatgtgacttatga

SEQ ID NO: 24477 - DNA, 130 bp, Macaca Mulatta
tcatctccctcagcaaagggctctatctagacaaacatagttaattttcctgtttttgcagactcggcctttcacggagggtaggggtgtgatggtctggtttttaaaaggtatttctaaaggatactag

SEQ ID NO: 24478 - DNA, 479 bp, Macaca Mulatta
gagccctttgctgtgtgctctgtccactgtcatgagacaggagccctttgctgtgtgctctgttcagtgtcatgaggcaggtgtttgcaaagccagctctcggttccgatggggtattgctgacctacttttctaggggaaatgctctcaaacactgtaattatgcatttctaattaaataaaatgtatttatgaccacaacagccttacgctcttcctcctgcgagacggttcgccagagtgcctgttcctggggggctgggcttgctgggcttcaggccacgctgctaccctctctccactgtgcagacagtaggtgtgggcgccccgggacagcctgagttctgtttccgtgtcgtggctgtcgaggggaaacgtggtttaggacacagctatggaacgtcttgttctcgtaaaccacagagcgctgccagctccagaaggcacagtcctggggtccttagagaaagttgcagcca

SEQ ID NO: 24479 - DNA, 162 bp, Macaca Mulatta
caggagtcctggagatggagcgcttacactacatccaccacaaccaaaccgtgtcccaggagattggggaggtcctgtacaacgcagcaccactgtccatctggtggcagatccctcagtacctgctcattgggatcagcgagatttttgccagcatcccag

SEQ ID NO: 24480 - DNA, 195 bp, Macaca Mulatta
agggattactgagagctgtccataatgaaggcatgcaggtgctttctctcactgagtctccctataatgatggagaggaccattctattcagcagatttcagaatcttggctagaagagagaaaagcttacctcagtacaatctcatctctacaggatttaattaccaaaatgcaactgcaaagagaagctgagg

SEQ ID NO: 24481 - DNA, 83 bp, Macaca Mulatta
  misc_feature (1)...(83): n = A,T,C or G
agaactgctggtgaggacactggagtaatatacccatctgtggaagacactcaagaagntgtgtaccacctctttgtacacct

SEQ ID NO: 24482 - DNA, 221 bp, Macaca Mulatta
cagcactccccggtgctgccttgcccctgcctctgcagccaagttcccggaagctgtcctggctgctggcctgacccctgagactcctgcagagatcgtagccctggagcacaaggagacacgctgcaccccgatgcggagaggtgacaactggaccctgatgcttcaggacaccaaagaggaccttagccgacggtggaggggtcatgccctcaacgcct

SEQ ID NO: 24483 - DNA, 574 bp, Macaca Mulatta
acatgttctgctacttctgccaattctttgttctcctttttcaggcgggcaatttcgttgtccttttgttcgatttctttatgaagtttctcattttccttaagtgcttcatacagcaccttcctccgtttttctgccacttctttccaatattgagaggatggattttctttaatcataagatcaaatgactcctgggtgactcctccaagatttttattttcactagattctggaacaataaccccagggctggaagttgtagatgttaactggtcattccgatgtttccttttggataagcctgtggacagctcattttctcttccaacaagagatccagatgcagaaggctgaatcatcttcagagttcttctttggatagaactattctttacattctctttgatttcttcttgtttctgcttcatactgggattcattatgtagatggtgcagcacagaagataggtggagacgctcaatcctcgtagcgaacgctgtggctgcagcaccttgaaaaagaccacagctcacctacgctgatccccactgtcgctggagtgtcccgcgt

SEQ ID NO: 24484 - DNA, 1475 bp, Macaca Mulatta
  misc_feature (1)...(1475): n = A,T,C or G
ttgttccagatacatagaaagatatcgccgggaagagctgggcccgatttggggtccaggcaggttttgaggcctcctatctggtgggaggaggccgcagtgcagcaccctgcttgtcacttgggatggagacccgctttcccgcagtcatgtaccctggatcttttattgggggctggggagatgagtatctctgctgggaaagacaggggctcccagatttcaacttccagnnnnnnnnnnnnnnnnnnnnnnnnnnnnnnnnnnnnnnnnnnnnnnnnnnnnnnnnnnnnnnnnnnnnnnnnnnnnnnnnnnnnnnnnnnnnnnnnnnnnnnnnnnnnnnnnnnnnnnnnnnnnnnnnnnnnnnnnnnnnnnnnnnnnnnnnnnnnnnnnnnnnnnnnnnnnnnnnnnnnnnnnnnnnnnnnnnnnnnnnnnnnnnnnnnnnnnnnnnnnnnnnnnnnnnnnnnnnnnnnnnnnnnnnnnnnnnnnnnnnnnnnnnnnnnnnnnnnnnnnnnnnnnnnnnnnnnnnnnnnnnnnnnnnnnnnnnnnnnnnnnnnnnnnnnnnnnnnnnnnnnnnnnnnnnnnnnnnnnnnnnnnnnnnnnnnnnnnnnnnnnnnnnnnnnnnnnnnnnnnnnnnnnnnnnnnnnnnnnnnnnnnnnnnnnnnnnnnnnnnnnnnnnnnnnnnnnnnnnnnnnnnnnnnnnnnnnnnnnnnnnnnnnnnnnnnnnnnnnnnnnnnnnnnnnnnnnnnnnnnnnnnnnnnnnnnnnnnnnnnnnnnnnnnnnnnnnnnnnnnnnnnnnnnnnnnnnnnnnnnnnnnnnnnnnnnnnnnnnnnnnnnnnnnnnnnnnnnnnnnnnnnnnnnnnnnnnnnnnnnnnnnnnnnnnnnnnnnnnnnnnnnnnnnnttcgagcggagaccctgtatctggttgtcaacttcctggacaggttcctttcatgtatgtctgttctgagagggaaattgcagctcgtgggaacagcagctattcttttggcttcgnnnnnnnnnnnnnnnnnnnnnnnnnnnnnnnnnnnnnnnnnnnnnnnnnnnnnnnnnnnnnnnnnnnnnnnnnnnnnnnnnnnnnnnnnnnnnnnnnnnnnnnnnnnnnnnnnnnnnnnnnnnnnnnnnnnnnnnnnnnnnnnnnnnnnnnnnnnnnnnnnnnnnnnnnnnnnnnnnnnnnnnnnnnnnnnnnnnnnnnnnnnnnnnnnnnnnnnnnnnnnnnnnnnnnnnnnnnnnnnnnnnnnnnnnnnnnnnnnnnnnnnnnnnnnnnnnnnnnnnnnnnnnnnnnnnnnnnnnnnnnnnnnnnnnnnnnnnnnnnnngaaacccttggctgcatttaccggggtattcattaagtgaaattgtgcccttgcctgagtgagcttcataaagcgtaccttgatataccccatcgacctcagcaagcaattagggagaagtacaaggcttcaaagt

SEQ ID NO: 24485 - DNA, 563 bp, Macaca Mulatta
agctgatctcaaactcctgggttcaagccatcctccctcctcagcctcccaaaatgctgggattacaggcatgagccactgtacccagccaaaattgttttcttatttaagtgaattcgacaatttctgtgagtggctctttgcatgaacactgtgcaatgtgttggagaaatccaaagctgaccaaaacatggtccccaccttttggaacttacagtctgttctggggaacagagattcagccaaagtcaagaaacactggatgccagctagttttgtgctatagtgtctataagtacatatgtggatatgggttcattttatccctaaatatagtaccaaaccagcatttatcttctaattataaacctaatttggcctaaactttattattgcacactgcctgaacaaaacatattcatctctatgtaaattttttcgtcatggaacaagggtgtgaaatgaaaatattttaggatttattcaaaaacagactattctgttttcagcttcagaattgttctttgaatcctaaggaacctctgtcaacagttgaggttgct

SEQ ID NO: 24486 - DNA, 722 bp, Macaca Mulatta
  misc_feature (1)...(722): n = A,T,C or G
ggaatataacaatatatgatatataaaccttaaaagaaaaaaatgatctattgcagatatttgatgtagttttcttttttaaattaatcagaaaccccacttcgattgtattgtctgacacatgctgtcaatgtataataaacgggaaatgtcgattttcaataatagacttatatgcaggctgtcgttccagttacgttgtgtaagtcaactcttcaggctcattcactctcctggcttttannnnnnnnnnnnnnnnnnnagtattccctttttaaatgagctttcaggaagttgctgagaaatggggtggaatagggaactgtaatggccactgaagcacgtgaggatacccttgcaaaatgatgtgaaaggaccagtttcttgaagtccagtgtttccacggctggatacctttgtgtccaaagtcccgtcaccaaggacattaaagatatttcattccagcatcttctagagagcttggtgtgtacagatgagggtgtccactgctgctttccttcagaatccagtgcttccacagagattagcctgcagcttgtatttgacattcttcgctgtctgttgtttacctaccgtagctttttactgttcactttccccttcaactggtccagatgtgcaaggccccttccctctctgggacttttctccaaaaggcacctgaacccttcgggccttccaacttttggtcccccctcacc

SEQ ID NO: 24487 - DNA, 598 bp, Macaca Mulatta
gtgattctaacactcacagaagtgaaagcgtatctagttgatctgctggtgtccttccttggctaagtcttggccttcggttatcttgaaatgcaccagaaccggagccaaggcttccctctgaaactgttgctgatctgtagtaccaggaagaaacctcttttgttctcttctacttgctcttggcctcaagatcgtgtaacaaaacgaaggagagctctcttctttcttcctcatcctactcaaaaacttcccgagagcagtggtggctttgagggttttggcttctattacttttcacagcctggaaagttgtgtcttctgggaaagagacccggggaggccaggagtagctgagggtcttttctgtgccctgaagccgcccagaggaggcctattccaccctgggttgaggctgatctgagagggtctccctttgttcctttctggagcatttctctaacgtttattacaattaggagggggaccccacatctgtgagattctgtttcagttgaggtttacagaaaaaaaaaagtggtcagatgggttccccccataggtgagagccctgggcaactgcctgatgagtgtgtct

SEQ ID NO: 24488 - DNA, 131 bp, Macaca Mulatta
ggtgaccaagaacatggcccaggtgaccaaagctctggacaaggccctgagcaccatggacctacagaaggtctcctcagtgatggacaggttcgagcagcaggtgcagaacctggacgtccacacgtcgg

SEQ ID NO: 24489 - DNA, 1849 bp, Macaca Mulatta
  misc_feature (1)...(1849): n = A,T,C or G
aggtgcacaaaaagctttaaacaagttaaaatctaggcaacagactccctgaagtgttgactgcccaacttaatcatgactgtgattcaaaaatgttattaaataaaccaaggtnnnnnnnnnnnnnnnnnnnnnnnnnnnnnnnnnnnnnnnnnnnnnnnnnnnnnnnnnnnnnnnnnnnnnnnnnnnnnnnnnnnnnnnnnnnnnnnnnnnnnnnnnnnnnnnnnnnnnnnnnnnnnnnnnnnnnnnnnnnnnnnnnnnnnnnnnnnnnnnnnagatgtcaaacccaaggtggaggatctggacaaagatttggtaaatttttacactcaaaatggaagtctggatttttctaacagtctaacagttaatgaaatggaagacgatgaagacgatgaagaaatgtctgattcaaacagtccaccaattccctattcacaaaaacctgccccagaaggatcttgcactacagatggtnnnnnnnnnnnnnnnnnnnnnnnnnnnnnnnnnnnnnnnnnnnnnnnnnnnnnnnnnnnnnnnnnnnnnnnnnnnnnnnnnnnnnnnnnnnnnnnnnnnnnnnnnnnnnnnnnnnnnnnnnnnnnnnnnnnnnnnnnnnnnnnnnnnnnnnnnnnnnnnnnnnnnnnnnnnnngggttttctggaaattgtatcggctgtggagaaagaggatttcgatatttcacggaattttnnnnnnnnnnnnnnnnnnnnnnnnnnnnnnnnnnnnnnnnnnnnnnnnnnnnnnnnnnnnnnnnnnnnnnnnnnnnnnnnnnnnnnnnnnnnnnnnnnnnnnnnnnnnnnnnnnnnnnnnnnnnnnnnnnnnnnnnnnnnnnnnnnnnnnnnnnnnnnnnnnnnnnnnnnnnnnnnnnnnnnnnnnnnnnnnnnnnnnnnnnnnnnnnnnnnggatacaaatcaggattcactcagacannnacagatgctgctaatggaaacagtagccatggagggaagggcagtgcatccagctccactccagcccacacagggaattactctctgtcaccaagacctagctatgcatcaggagaccaaggtaccannnnnnnnnnnnnnnnnnnnnnnnnnnnnnnnnnnnnnnnnnnnnnnnnnnnnnnnnnnnnnnnnnnnnnnnnnnnnnnnnnnnnnnnnnnnnnnnnnnnnnnnnnnnnnnnnnnnnnnnnnnnnnnnnnnnnnnnnnnnnnnnnnnnnnnnnnnnnnnnnnnnnnnnnnnnnnnnnnnnnnnnnnnnnnnnnnnnnnnnnnnnnnnnnnnnnnnnnnnnnnnnnnnnnnnnnnnnnnnnnnnnnnnnnaggctatggcactttaccctatttctatggaaatgttggtgacattgttgtgagtcctctgctggtgaattgctacaagattccacagttggaaaacaaagatttggaacaattagggttgactggcagccaatttctgagcgtggaaaacatgattcttctgacgatacagtatcttgtgcggctgggnnggtcctgatcaggtacctctcagggaagaatttgagcaaattatgctgaaagctatgcaagaatttactctgagagaaagagccctgcagataggtgctcagtgtgtccctgtgtcaccaggacaactcccctggcttgctagattaattgccagcgtatctcaagacttggttcatgtgattgtgacccagaactctttggcggagggcatttcagagaccttaaggactctcagtgaaatgagacactatcaaaggctaccagattatgtggtggcaatttgtgcatcgaaaatcagaggaaatgaattttgtgtggtagtgttagg

SEQ ID NO: 24490 - DNA, 1463 bp, Macaca Mulatta
tttttttttttcgtccatctgccccacaagtgtttattgagcacctgtatgtggcagggatggttgtaggcatctgggtacagcagtgaacaaaaccgggaggcccctgccccacacaggcacatggacggggcagtgcacaagtgaccatgtggcatttcgggtggtggtgactgcggtggggaagacagcaggggctctgagggagacgaggcctgggtggggaggggcagaggcccaggcccaagggtcagagcttactcagcttctcaaactgggatggggccatgtggctgcaaggcaaagccctaatccctgaagggcctgggatgtgaagggcttctccccctgctgggaacactcggccttgccctactcagcaaggccccggctagcctgcatctgaccaccaggcagaatgtgttcaggcagccccacaaaacacccccgataccgtcgtcccgccagcccccctcacttccctgctgggctttggtgtgcagcgaaaggcacttgaagcttgcctctggggttggggtccccaaagttatggtgatggcacagggtgggtgtcatcagggagcccagcccctggtactcagtggtctcagctcagtagttgggtgcagcagcagcaaagcacagagccgcggccaagcccagggcagggtcagtagtgctccagcttgaggctcctgtacaggcagcatgtgaagatcatgccaaagacctgcacacaggcaatgccagtccccacagccccaatgaccctgaggtgctcctggatgaaggtctccaacttggtgatgaagccgccctccaccttgtaaatgttgaaggcgtggtcccgctgcccacaaccagccaccaccgtcttgcagcagctatcggggaccacgcggccacgggcttcccttaagcggatccactcactgtcccgccagtcctgtgagttgttgctgccacagcagtggaactcctgctgcagttggtccacagcgctggtcacggcctcgtgacccggctggtggtagcgcttggccatggtgtccttaaggttctccttgagctctgtgttcagctgctggtagtagacataggcgaggacaccagcgatgatctccagcagaaagatgatgaggagcaggatgaagtacaggcgcagcaggttccgacgctccttgaaggtggcacagcagcccaagaccccggtcaccatgacgacagcgcccgccaccaccaggatgtaggctgtggccaggtaggtgcccgaggccaggaggctgatgtagtcactcttgagggccagcgtccagatgcccactgccatgacagccaggccggccagccagaagcagcagttgtaggtaaacagcaggtacttgaggcaaacggtgccacatgttgtcttcttctcgttaaactcacccatcctggggctaccactcgtcggagtccgggac

SEQ ID NO: 24491 - DNA, 417 bp, Macaca Mulatta
  misc_feature (1)...(417): n = A,T,C or G
aggccgtagccatggacgccctgtctctggagcagcagctgccctacgccttcttcacccaggcgggctcccagcnnnnnnnnnnnnnnnnnnnnnnnnnnnnnnnnnnnnnnnnnnnnnnnnnnnnnnnnnnnnnnnnccacccccacaggcgcccgtccgcctgccccctggtggccccctgttgcccagcgccagcctgactcgtgggccacagccgcccccacttgcggtcacggtaccgtcctctctcccccagtcccccccagagaaccctggccagccgtcgatggggatcgacatcgcctcggngcgccggctctacagcagtaccgaactagcgccggctccccggccaaccagtctcccacctcaccagtctccaatcaaggcttctccccggggagctccccgcaa

SEQ ID NO: 24492 - DNA, 1098 bp, Macaca Mulatta
  misc_feature (1)...(1098): n = A,T,C or G
attgtttctgcacttcaagaacacaagttgaatcactcagacctgaaaaacagtctgaaaccagtatccatcaatacttggtnnnnnnnnnnnnnnnnnnnnnnnnnnnnnnnnnnnnnnnnnnnnnnnnnnnnnnnnnnnnnnnnnnnnnnnnnnnnnnnnnnnnnnnnnnnnnnnnnnnnnnnnnnnnnnnnnnnnnnnnnnnnnnnnnnnnnnnnnnnnnnnnnnnnnnnnnnnnnnnnnnnnnnnnnnnnnnnnnnnnnnnnnnnnnnnnnnnnnnnnnnnnnnnnnnnnnnnnnnnnnnnnnnnnnnnnnnnnnnnnnnnnnnnnnnnnnnnnnnnnnnnnnnnnnnnnnnnnnnnnnnnnnnnnnnnnnnnnnnnnnnnnnnnnnnnnnnnnnnnnnnnnnnnngttcagcaagtcaactcttgaggacctattttcctgagggaatgagtgaaactttaataagaaacattctctttggagcagtgagagggttgaactatctgcaccaaaatggctatattcacaggnnnnnnnnnnnnnnnnnnnnnnnnnnnnnnnnnnnnnnnnnnnnnnnnnnnnnnnnnnnnnnnnnnnnnnnnnnnnnnnnnnnnnnnnnnnnnnnnnnnnnnnnnnnnnnnnnnnnnnnnnnnnnnnnnnnnnnnnnnnnnnnnnnnnnnnnnnnnnnnnnnnnnnnnnnnnnnnnnnnnnnnnnnnnnnnnnnnnnnnnnnnnnnnnnnnnnnnnnnnnnnnnnnnnnnnnnnnnnnnnnnnnnnnnnnnnnnnnnnnnnnnnnnnnnnnnnnnnnnnnnnnnnnnnnnnnnnnnnnnnnnnnnnnnnnnnnnnnnnnnnnnnnnnnnnnnnnnnnnnnnnnnnnnnnnnnnnnnnnnnnnnnnnnnnnnnnnnnnnnnnnnnnnnnnnnnnnnnnnnnnnnnnnnnnnnnnnnnnnnnnnnnnnnnnnnnnnnnnnnnnnnnnnnnnnnnnnnnnnnnnnnnnnnnnnnnnnnnnnnnnnnnnnnnnnnnnnnnnnnnnnnnnnnnnnnnnnnnnnnggccatcagcaagcagtttattgtcccatgttttcttcaaacag

SEQ ID NO: 24493 - DNA, 790 bp, Macaca Mulatta
  misc_feature (1)...(790): n = A,T,C or G
ggggattccagcggcggacagcacccgggccgagatgtctcgctcagtggccttagccgtgctggcgctactctctctttctggcctggaggctatccagcgtactccaaagattcaggtttactcacgccatccaccagagaatggaaagccaaatttcctgaattgctatgtgtctggatttcatccatctgatattgaagttgacttactgaagaatggagagaaaatgggaaaagtggagcattcagacttgtctttcagcaaagactggtctttctatctcttgtactacactgaattcacccccaatgaaaaagatgagtatgcctgccgtgtgaaccatgtgactttgtcagggcccaggacagttaagtgggatcgagacatgtaagcagcatcatggaggtttgaagatgccgcatttggattggatgaattccaaattcctgctttcctgcctttttataattgaataatggcccttaaaaaaaaccacaggtttttcttttttggggnnnnnnnnnnnnnnnnnnnnnnnnngtggggcgcggcgcccgggaccccccctcgccctccctatccccccaccactctatcaccaatccggcgcctgttccctgccacacacggggtgcaccgaggcccgccgccttttccactggccgcagtaattccaaggcgcacccgcgccactccccataatccccccntccaataaccgatgaataacgaaaagtcccccgccgcggcgcacgcgggttagtgccccactaaggaggtccccaag

SEQ ID NO: 24494 - DNA, 769 bp, Macaca Mulatta
ttgagggagatgatcagactcctcattgttaaggaatcccactttctacctgaccatgggattcccacagcctgctaacagaataatccctcctcaccctttcccctacactggatcattaaaacagcaccaaaccccacatcgttggttcttgctttaagaggggaaaagaggaagtggtcatccccaagaggggccagggcattctatgggaggcatcaggaaatcaaaggggataaaccttcctgtgacaaagggagtgagtgacaaggtccctggaatgtctgagaagacattagaaacaacatccttctatagtatgtagttgacgtcagacagtctgaaccaaaatccttacccaatgtgagatgactcaccgcactgaaatgttaggtaactgcttacagccacataggtgtacctagtggcttcgggcagaagctgtaacttgaggaaaatcatatggaattccttaatttttttcattgttctcaggatgcttattgtgtaggcacattgtgaagttttcaatctaagtagtagggaaatactggagcccagtgttttccttaaagaatcccaattattcttatttccaaatattcaaagatttttccattttttgtgtgcagaatccaggggtttctctttggaaataaatggtcatggttgtagatcagagaacatgtagattgttattggaatagacacagttcatgcacatggacacagtgaacagaccctgctttactgctgttccagtgacaaa

SEQ ID NO: 24495 - DNA, 5071 bp, Macaca Mulatta
  misc_feature (1)...(5071): n = A,T,C or G
ggtgacactcgggccaaaccccctgtcaagcccaaaccccgggccctgtctgccaagccagccctgcctgccaaacccagcctgctggtgcctgttgggcctcggcctccccggggtcccctggctgagttgccttctgccaggaagatgaacatgctggcaggaccccaaccctatggtggcagcaagcgcccgcttccctttgcaccaaggcctgtggttgaggcctccactggaggagaagccatccaagagactgggaaagaggaggctgggaaagaggagccacccccgttgacacccccagctcgatgtgccgccccagggggcgtacggaaggcccctgcccctttccgcccagcctcagagcgcttcgcggccaccacggtggaagagatcctggccaagatggagcagcctcggaaggaggtccctgccagccctgaccgcctgtggggttcccgcctcacctttaaccacgatggcagctcgcggtatggccccaggacctatggcacgaccactgctcccagggatgaggatggcagcaccctctccaagggacggtcccaggaggagccagtaaagcctgcagccgagtgccaggaagagcacagcaggacccctgaggagaggnnnnnnnnnnnnnnnnnnnnnnnnnnnnnnnnnnnnnnnnnnnnnnnnnnnnnnnnnnnnnnnnnnnnnnnnnnnnnnnnnnnnnnnnnnnnnnnnnnnnnnnnnnnnnnnnnnnnnnnnnnnnnnnnnnnnnnnnnnnnnnnnnnnnnnnnnnnnnnnnnnnnnnnnnnnnnnnnnnnnnnnnnnnnnnnnnnnnnnnnnnnnnnnnnnnnnnnnnnnnnnnnnnnnnnnnnnnnnnnnnnnnnnnnnnnnnnnnnnnnnnnnnnnnnnnnnnnnnnnnnnnnnnnnnnnnnnnnnnnnnnnnnnnnnnnnnnnnnnnnnnnnnnnnnnnnnnnnnnnnnnnnnnnnnnnnnnnnnnnnnnnnnnnnnnnnnnnnnnnnnnnnnnnnnnnnnnnnnnnnnnnnnnnnnnnnnnnnnnnnnnnnnnnnnnnnnnnnnnnnnnnnnnnnnnnnnnnnnnnnnnnnnnnnnnnnnnnnnnnnnnnnnnnnnnnnnnnnnnnnnnnnnnnnnnnnnnnnnnnnnnnnnnnnnnnnnnnnnnnnnnnnnnnnnnnnnnnnnnnnnnnnnnnnnnnnnnnnnnnnnnnnnnnnnnnnnnnnnnnnnnnnnnnnnnnnnnnnnnnnnnnnnnnnnnnnnnnnnnnnnnnnnnnnnnnnnnnnnnnnnnnnnnnnnnnnnnnnnnnnnnnnnnnnnnnnnnnnnnnnnnnnnnnnnnnnnnnnnnnnnnnnnnnnnnnnnnnnnnnnnnnnnnnnnnnnnnnnnnnnnnnnnnnnnnnnnnnnnnnnnnnnnnnnnnnnnnnnnnnnnnnnnnnnnnnnnnnnnnnnnnnnnnnnnnnnnnnnnnnnnnnnnnnnnnnnnnnnnnnnnnnnnnnnnnnnnnnnnnnnnnnnnnnnnnnnnnnnnnnnnnnnnnnnnnnnnnnnnnnnnnnnnnnnnnnnnnnnnnnnnnnnnnnnnnnnnnnnnnnnnnnnnnnnnnnnnnnnnnnnnnnnnnnnnnnnnnnnnnnnnnnnnnnnnnnnnnnnnnnnnnnnnnnnnnnnnnnnnnnnnnnnnnnnnnnnnnnnnnnnnnnnnnnnnnnnnnnnnnnnnnnnnnnnnnnnnnnnnnnnnnnnnnnnnnnnnnnnnnnnnnnnnnnnnnnnnnnnnnnnnnnnnnnnnnnnnnnnnnnnnnnnnnnnnnnnnnnnnnnnnnnnnnnnnnnnnnnnnnnnnnnnnnnnnnnnnnnnnnnnnnnnnnnnnnnnnnnnnnnnnnnnnnnnnnnnnnnnnnnnnnnnnnnnnnnnnnnnnnnnnnnnnnnnnnnnnnnnnnnnnnnnnnnnnnnnnnnnnnnnnnnnnnnnnnnnnnnnnnnnnnnnnnnnnnnnnnnnnnnnnnnnnnnnnnnnnnnnnnnnnnnnnnnnnnnnnnnnnnnnnnnnnnnnnnnnnnnnnnnnnnngggactccttggctggtcccagaaagatctgcagagtgaatttgggatcacaggagacccacagcccagcagtttcagtccttccaactggtgtcaaggtgcttctcaggactatggccttgggggtgcaagccctagaggagacccaggtctcggagagagggactggaccnnnnnnnnnnnnnnnnnnnnnnnnnnnnnnnnnnnnnnnnnnnnnnnnnnnnnnnnnnnnnnnnnnnnnnnnnnnnnnnnnnnnnnnnnnnnnnnnnnnnnnnnnnnnnnnnnnnnnnnnnnnnnnnnnnnnnnnnnnnnnnnnnnnnnnnnnnnnnnnnnnnnnnnnnnnnnnnnnnnnnnnnnnnnnnnnnnnnnnnnnactgggagttcattacgagggattcccagggcacttactccagccgggatgcggaactccaggaccaggaatttgggaagagagattcactgggtacttacagtagtcgagatgtaagccttggggactgggaatttgggaaaagagattctctgggtgcttatgccagccaagatgccaacgagcagggtcaaaatttggggaagagggaccaccatggcaggtacagcagccaggatgccgatgagcaggactgggagtttcagaagagagatgtgtcacttggcacctatggcagccgggatgcagagccgcaggaacaggagtttgggaagagcgcttggataagggactacagcagtggtggcagctccaggacccttgacgcccaggaaagaggctttggaacaagacccttgagctctgggttcagccccgaggaagcccagcaacaggatgaggaatttgagaagaagattccaagtgtggaagacaaccttggagagggcagcagggatgctggccggccaggacagagagaatcagggggcttgttcagtcctagcactgcccacgtgccggatggggcactcgggcagagagaccagagcagctggcaaaacagtgatgctagccgggaggtgggagggcatcaggagagacagcaggcaggggctcagggccctggcagtgctggcctggaagatggggagatggggaagcgaggctgggtcggtgagtttagcctcagtgttggcccccggagagaggcagcatttagcccagggcagcaggactggagcccggacttctgcctcgaggccagtgagaggagctatcagtttggcatcattggcaacgacagagtgagtggtgctggctttagcccttctagcaagatgggaggtggtcactttgtgcctcctgggaagaccacagctggctcggtggactggactgaccagctgggtctcaggaacttggaagtgtccagctgtgtgggttccgggggctcgagtgaggccagggaggatgccgtgggacagatgggctggtcaggcggcctgagcttgagagacatgaacctggccggctgtttggaaagtggagggtctgaagagcccgggggaattggagctggggagaaggactggacttctgatgtgaatgtgaagagcaaagatttgactgaggtcgggaaaggaggaggccacagccaggccagagagagtggcgtggggcagaccgactggtcaggtgtggaggccggagagttccttaaatcaagggagcgtggagttggacaggcagactggacacctgacctcgggctgagaaacatggccccaggggcagtctgcagtccttgagagaacaaagagcttggggtgggccagatggactggggtaacaatctgggcctgagggatttggaggtgtctttaagccagagtctggaggttctcaggggctacggggatgtggggtggggcagatggactggacccnnnnnnnnnnnnnnnnnnnnnnnnnnnnnnnnnnnnnnnnnnnnnnnnnnnnnnnnnnnnnnnnnnnnngggtcagccagtgcccgagcccagcctgaggcacaatggcagcttgtcccctggcctggaggccagagaccccttggaggccagggagctgggggttggtgagacaagtgggccagagacccagggtgaagatgactcctcgtcttccttggagccacaccctgcagaccgtggagtggagacaggagaagccctcagcttcggagnnnnnnnnnnnnnnnnnnnnnnnnnnnnnnnnnnnnnnnnnnnnnnnnnnnnnnnnnnnnnnnnnnnnnnnnnnnnnnnnnnnnnnnnnnnnnnnnnnnnnnnnnnnnnnnnnnnnnnnnnnnnnnnnnnnnnnnnnnnnnnnnnnnnnnnnnnnnnnnnnnnnnnnnnnnnnnnnnnnnnnnnnnnnnnnnnnnnnnnnnnnnnnnnnnnnnnnnnnnnnnnnnnnnnnnnnnnnnnnnnnnnnnnnnnnnnnnnnnnnnnnnnnnnnnnnnnnnnnnnnnnnnnnnnnnnnnnnnnnnnnnnnnnnnnnnnnnnnnnnnnnnnnnnnnnnnnnnnnnnnnnnnnnnnnnnnnnnnnnnnnnnnnnnnnnnnnnnnnnnnnnnnnnnnnnnnnnnnnnnnnnnnnnnnnnnnnnnnnnnnnnnnnnnnnnnnnnnnnnnnnnnnnnnnnnnnnnnnnnnnnnnnnnnnnnnnnnnnnnnnnnnnnnnnnnnnnnnnnnnnnnnnnnnnnnnnnnnnnnnnnnnnnnnnnnnnnnnnnnnnnnnnnnnnnnnnnnnnnnnnnnnnnnnnnnnnnnnnnnnnnnnnnnnnnnnnnnnnnnnnnnnnnnnnnnnnnnnnnnnnnnnnnnnnnnnnnnnnnnnnnnnnnnnnnnnnnnnggccaagctgcgcccccggaatcgctcagctgaggagggggagccggccgagagcaagtcgagccagaaggagtctgcggtccagcgttcgaagtcctgcaaggtcccagggctggggaagcccctcacgttacctcccaagccagagaagtcctcagggtnggtcagaaggatcgtcgcccaactggcttcaagccctg

SEQ ID NO: 24496 - DNA, 1373 bp, Macaca Mulatta
  misc_feature (1)...(1373): n = A,T,C or G
agtggctatcaacttagtgttcatcagagatttcatactggtgagaagctttatcaatgtaaggaattcgggaagacctttannnggggttcaagcctaattaagcatgagagagtgcatactaatgagaagacttatggatgtaaagactgtgggaaggcctttggtagtggctatcaacttagtgttcatcagagatttcatactggtgagaagctttatcaatgtaaggaatnnnnnnnnnnnnnnnnnnnnnnnnnnnnnnnnnnnnnnnnnnnnnnnnnnnnnnnnnnnnnnnnnnnnnnnnnnnnnnnnnnnnnnnnnnnnnnnnnnnnnnnnnnnnnnnnnnnnnnnnnnnnnnnnnnnnnnnnnnnnnnnnnnnnnnnnnnnnnnnnnnnnnnnnnnnnnnnnnnnnnnnnnnnnnnnnnnnnnnnnnnnnnnnnnnnnnnnnnnnnnnnnnnnnnnnnnnnnnnnnnnnnnnnnnnnnnnnnnnnnnnnnnnnnnnnnnnnnnnnnnnnnnnnnnnnnnnnnnnnnnnnnnnnnnnnnnnnnnncttatggatgtaaagactgtgggaaggcctttggtagtggctatcaacttagtgttcatcagagatttcatactggtgagaagctttatcaatgtaaggaattcgggaagacctttannnggggttcaagcctaattaagcatgagagagtgcatactaatgagaagacttatggatgtaaagactgtgggaaggcctttggtagtggctatcaacttagtgttcatcagagatttcatactggtgagaagctttatcaatgtaaggaatnnnnnnnnnnnnnnnnnnnnnnnnnnnnnnnnnnnnnnnnnnnnnnnnnnnnnnnnnnnnnnnnnnnnnnnnnnnnnnnnnnnnnnnnnnnnnnnnnnnnnnnnnnnnnnnnnnnnnnnnnnnnnnnnnnnnnnnnnnnnnnnnnnnnnnnnnnnnnnnnnnnnnnnnnnnnnnnnnncttcagttgggggttcaagcctaattaagcatgagagagtgcatactaatgagaagacttatggatgtaaagactgtgggaaggcctttggtagtggctatcaacttagtgttcatcagagatttcatactggtgagaagctttatcaatgtaaggaattcgggaagacctttactcatggctcaaaacttgttcatgagagaacttgtaatgataaaccctacaaatataaagaatgtgggcaagcctttctgtggacaacttactcaaatgagaaaattgataccgatgaaaccttatgattgaaagttgtaacagaacattttgtgtgtgtttacagacaactcatcataataagaactcttactcttg

SEQ ID NO: 24497 - DNA, 508 bp, Macaca Mulatta
  misc_feature (1)...(508): n = A,T,C or G
ggccctcaggctccaggactcaggccgatactggtgcatgcgcccctacagtgggaccctgtaccccttgatgggcatccagctctatgtgtctccagntcccaaaactgagaggaacactccttataacatctggncaacatcctcaagagnggaactggcacaactggccaagcccctacctcaggccctgatgccccttttaccactggcgtgacgatgttcaccccgggactcctcaccttgcctagactcttggcctccaccagacctgcctccaagagaggctgcagcttcactgccaccagcaccaccagccagggacccaggaggaccacggggtcccagacagtgactacatctcccagcaatgccagggactcctctgctggcccagaatccatctccactaagtctgggcattttagcaccagatcgcccaccacagggctctgcctcaccagcagatctctgctcaacagactaccctccataccctccatcaggn

SEQ ID NO: 24498 - DNA, 3160 bp, Macaca Mulatta
  misc_feature (1)...(3160): n = A,T,C or G
ccccatgcaggcaatgacccaggatgcagccaggggccacgacatgcacagaggaccgcatccagcatgccctggaacgctgcctgcacggactcagcctcggccgcnnnnnnnnnnnnnnnnnnnnnnnnnnnnnnnnnnnnnnnnnnnnnnnnnnnnnnnnnnnnnnnnnnnnnnnnnnnnnnnnnnnnnnnnnnnnnnnnnnnnnnnnnnnnnnnnnnnnnnnnnnnnnnnnnnnnnnnnnnnnnnnnnnnnnnnnnnnnnnnnnnnnnnnnnnnnnnnnnnnnnnnnnnnnnnnnnnnnnnnnnnnnnnnnnnnnnnnnnnnnnnnnnnnnnnnnnnnnnnnnnnnnnnnnnnnnnnnnnnnnnnnnnnnnnnnnnnnnnnnnnnnnnnnnnnnnnnnnnnnnnnnnnnnnnnnnnnnnnnnnnnnnnnnnnnnnnnnnnnnnnnnnnnnnnnnnnnnnnnnnnnnnnnnnnnnnnnnnnnnnnnnnnnnnnnnnnnnnnncaccgtgctgttgctgaacccagtagaagtgcaggccgagttcctcgctgtagccaataagctgagcacccccggacactcgcctcacagtgcctacaccaccctgctcctgcatgccttccaggccacctttggggcccactgtgacgtcccgggcctgcactgcaggctgcagnnnnnnnnnnnnnnnnnnnnnnnnnnnnnnnnnnnnnnnnnnnnnnnnnnnnnnnnnnnnnnnnnnnnnnnnnnnnnnnnnnnnnnnnnnnnnnnnnnnnnnnnnnnnnnnnnnnnnnnnnnnnnnnnnnnnnnnnnnnnnnnnnnnnnnnnnnnnnnnnnnnnnnnnnnnnnnnnnnnnnnnnnnnnnnnnnnnnnnnnnnnnnnnnnnnnnnnnnnnnnnnnnnnnnnnnnnnnnnnnnnnnnnnnnnnnnnnnnnnnnnnnnnnnnnnnnnnnnnnnnnnnnnnnnnnnnnnnnnnnnnnnnnnnnnnnnnnnnnnnnnnnnnnnnnnnnnnnnnnnnnnnnnnnnnnnnnnnnnnnnnnnnnnnnnnnnnnnnnnnnnnnnnnnnnnnnnnnnnnnnnnnnnnnnnnnnnnnnnnnnnnnnnnnnnnnnnnnnnnnnnnnnnnnnnnnnnnnnnnnnnnnnnnnnnnnnnnnnnnnnnnnnnnnnnnnnnnnnnnnnnnnnnnnnnnnnnnnnnnnnnnnnnnnnnnnnnnnnnnnnnnnnnnnnnnnnnnnnnnnnnnnnnnnnnnnnnnnnnnnnnnnnnnnnnnnnnnnnnnnnnnnnnnnnnnnnnnnnnnnnnnnnnnnnnnnnnnnnnnnnnnnnnnnnnnnnnnnnnnnnnnnnnnnnnnnnnnnnnnnnnnnnnnnnnnnnnnnnnnnnnnnnnnnnnnnnnnnnnnnnnnnnnnnnnnnnnnnnnnnnnnnnnnnnnnnnnnnnnnnnnnnnnnnnnnnnnnnnnnnnnnnnnnnnnnnnnnnnnnnnnnnnnnnnnnnnnnnnnnnnnnnnnnnnnnnnnnnnnnnnnnnnnnnnnnnnnnnnnnnnnnnnnnnnnnnnnnnnnnnnnnnnnnnnnnnnnnnnnnnnnnnnnnnnnnnnnnnnnnnnnnnnnnnnnnnnnnnnnnnnnnnnnnnnnnnnnnnnnnnnnnnnnnnnnnnnnnnnnnnnnnnnnnnnnnnnnnnnnnnnnnnnnnnnnnnnnnnnnnnnnnnnnnnnnnnnnnnnnnnnnnnnnnnnnnnnnnnnnnnnnnnnnnnnnnnnnnnnnnnnnnnnnnnnnnnnnnnnnnnnnnnnnnnnnnnnnnnnnnnnngctgggcaccaccccatgggaggagagcaccaatgacatctcccactacctcggcatgctggacccctggtatgagcgcaatgtgctaggcctcatgcacctgccccctgaagttctgtgccagnnnnnnnnnnnnnnnnnnnnnnnnnnnnnnnnnnnnnnnnnnnnnnnnnnnnnnnnnnnnnnnnnnnnnnnnnnnnnnnnnnnnnnnnnnnnnnnnnnnnnnnnnnnnnnnnnnnnnnnnnnnnnnnnnnnnnnnnnnnnnnnnnnnnnnnnnnnnnnnnnnnnnnnnnnnnnnnnnnnnnnnnnnnnnnnnnnnnnnnnnnnnnnnnnnnnnnnnnnnnaggtcctggcagcaagcggctgggcatcgatgacgaccgggaggctgttcctctaacactacagattatttacagcaaggnnnnnnnnnnnnnnnnnnnnnnnnnnnnnnnnnnnnnnnnnnnnnnnnnnnnnnnnnnnnnnnnnnnnnnnnnnnnnnnnnnnnnnnnnnnnnnnnnnnnnnnnnnnnnnnnnnnnnnnnnnnnnnnnnnnnnnnnnnnnnnnnnnnnnnnnnnnnnnnnnnnnnnnnnnnnnnnnnnnnnnnnnnnnnnnnnnnnnnnnnnnnnnnnnnnnnnnnnnnnnnnnnnnnnnnnnnnnnnnnnnnnnnnnnnnnnnnnnnnnnnnnnnnnnnnnnnnnnnnnnnnnnnagatgtgaggtttcaccctgctacaagccggagaagagcgacctctcctcgccaacccagaggcctcccaacctgccggcccaggccgcgcctgatctctgctcccttctctgcctgcccatcatgactttcagtggagctctgccctagtgtgggcccagcaccagactggacagaagccctggggcaacctcctctgtgagccctccgggacagtccttgtctgtggagaacggagtggtcctgtgcagagacagtcccactgtgggtcctgcaatgggcagggtgtgggggtacagggtttctggggtctcagcgttctgggaaaggaacagctatcagggagagaagggccagaccccatagcctctcagattcctcgcagtagaaggagaagaatggataaattgacctctgaagtccctgaccattagcatggtctaggatgctttctagaaggaagatctgaggctctggtgctcagggggatggcttgggccttttctctcaaccttggctgagcctaccccttactttgtcaaagacttgaggaccctgtatgtctggagttcagtcccctcctctctgggggctcaggtgactgaaatgtggatgaaatatttctctacttcaagaccacctctccct

SEQ ID NO: 24499 - DNA, 869 bp, Macaca Mulatta
cattggggagacacctccccctgtaaaggatgaggagtacctatttgtcatctttgacttcctgattggcgtcctcatctttgccaccattgtgggaaatgtgggctccatgatctccaacatgaatgccacccgggcagagttccaggctaagatcgatgccgtgaaacactacatgcagttccgaaaggtcagcaaggagatggaagccaaggtcattaggtggtttgactacttgtggaccaataagaagacagtggatgagcgagaagttctcaagaatctgccagccaagctcagggctgagatagccatcaatgtccacttgtccacacttaagaaagtgcgcatcttccatgattgtgaggctggcctgctggtagagctggtattgaaactccgtcctcaagtcttcagtcctggggattacatttgtcgcaaaggggacattggcaaggagatgtacatcattaaggagggcaggctggcagtggtggctgatgatggggtgactcagtatgccctgctctcggctggaagctgctttggtgagatcagtatccttaacattaagggaagtaaaatgggcaatcgacgcacggctaatatccgcagcctgggctactcagacctcttctgcttgtccaaggatgatcttatggaagcagtgactgaataccctgatgccaagaaagtcctagaagagaggggtcgggagatcctcatgaaggaggggctgctggatgagaatgaagtggcaaccagcatggaggtggacgtgcaggagaagctagggcagctggagaccaacatggaaaccttatacactcgctttggccgcctgctggctgagtacacaggggcccagc

SEQ ID NO: 24500 - DNA, 452 bp, Macaca Mulatta
tgcttctgtcagttaacaatctttattagaggatttttagtctctctttctcagctgtgtgttaagttggtttacaatagcaaataaacctctttattatcctttctttctgaaatagcctctgcttcaagttttgtaaactgaaggttaccaggtggttttgccacggcttctcagtggtgtcttctccttggatgcagaaaactgtagctctgcgggagacggtgaatggaagtctggcttctggctgagctgggagagtaattctgtacccaaacctctctctcagatttcccacaagggaggtaggaagcacttagaacacgaggattgccatatgcaatgctcctcaaatgcagcgtgatgcgtacacggctggctcgggtaggagatagcccgctgccctacagggcttcctcccactccttcccctctccgtctggagcccaggc

SEQ ID NO: 24501 - DNA, 307 bp, Macaca Mulatta
taaaccaaagctagtcaaatgggtagcagcatgcagaacaaaaccttaaaatttatctctcactatacagtatattgtcatgtgaaagtgtggaatggaagaaatgtcgatcctgttgtaactgatgttgaacacttctatgagctttaaaataaagttcatcttatggtgtcatttctaaactgttgattttgtcactaatttaaaaaatgagatgggggagaatatgaattattctagcagaaatgaagttagtgtccagtttttcttttttactgcttctgttatctcttttctaagtgaaaat

SEQ ID NO: 24502 - DNA, 340 bp, Macaca Mulatta
gcctttatacaagctttagccagaaatctgggataatttttacaagcgctttagtaatgttataattgagacctaagttttgatagagccaaaatttttgttttagatctattaaatacattttaactccattataatatttgggtaattttcttgttattgaacaagtcaaattatacataacatgggagttattgtttgctttgtaccagaggaacctgtggtataaatggaattttactaagttggtggttaatcttagataccacttttgtttattttgccttttataaataatttaattcaaattatcaaaagcctctagtagatacacattgta

SEQ ID NO: 24503 - DNA, 287 bp, Macaca Mulatta
ctttctttttggatcttcagagaaatgtgtgtggcatggtaagaaaagtgtatatactatttctctccaggttgcaaagttgtgaggagagcaaagggcacaaccatctccctttacagttctacttttctaataaatagtctgtttaagatcatgactcttgggcctggggagtgagcctattgcaggagggaggatgcatttgtactgggatgtataatgagattagtccaaaacaaacaaaacttgggaggaagacagaggaagtaggcttgtaggttaagaag

SEQ ID NO: 24504 - DNA, 983 bp, Macaca Mulatta
  misc_feature (1)...(983): n = A,T,C or G
gataatgggctttgttagcactnnnnnnnnnnnnnnnnnnnnnnnnnnnnnnnnnnnnnnnnnnnnnnnnnnnnnnnnnnnnnnnnnnnnnnnnnnnnnnnnnnnnnnnnnnnnnnnnnnnnnnnnnnnnnnnnnnnnnnnnnnnnnnnnnnnnnnnnnnnnnnnnnnnnnnnnnnnnnnnnnnnnnnnnnnnnnnnnnnnnnnnnnnnnnnnnnnnnnnnnnnnnnnnnnnnnnnnnnnnnnnnnnnnnnnnnnnnnnnnnnnnnnnnnnnnnnnnnnnnnnnnnnnnnnnnnnnnnnnnnnnnnnnnnnnnnnnnnnnnnnnnnnnnnnnnnnnnnnnnnnnnnnnnnnnnnnnnnnnnnnnnnnnnnnnnnnnnnnnnnnnnnnnnnnnnnnnnnnnnnnnnnnnnnnnnnnnnnnnnnnnnnnnnnnnnnnnnnnnnnnnnnnnnnnnnnnnnnnnnnnnnnnnnnnnnnnnnnnnnnnnnnnnnnnnnnnnnnnnnnnnnnnnnnnnnnnnnnnnnnnnnnnnnnnnnnnnnnnnnnnnnnnnnnnnnnnnnnnnnnnnnnnnnnnnnnnnnnnnnnnnnnnnnnnnnnnnnnnnnnnnnnnnnnnnnnnnnnnnnnnnnnnnnnnnnnnnnnnnnnnnnnnnnnnnnnnnnnnnnnnnnnnnnnnnnnnnnnnnnnnnnnnnnnnnnnnnnnnnnnnnnnnnnnnnnnnnnnnnnnnnnnnnnnnnnnnnnnnnnnnnnnnnnnnnnnnnattagatagttaagaatggctacagtaagactgaattatcttatagtctggcaagcacataaagtatacttgtatgtaatgattgccagggtaacagaattgctgacatcagtctaaaaagttttgactatccaatttagatgtgtaatttctatatactttatgctgcttgtatttcaatcaaaaaacagacagtccatttggagataatgggctttgttagcact

SEQ ID NO: 24505 - DNA, 991 bp, Macaca Mulatta
  misc_feature (1)...(991): n = A,T,C or G
ttttccccattgggaaacagggttttcacccttttgggccagggctgttcttgaaattcctgaccctcagggtgatctgccccacttggccctcnnnnnnnnnnnnnnnnnnnnnnnnnnnnnnnntgcgcccagtccaaattgatttcttttgcacagttactttcatcagtaagtggtccagaatacaaaatatggtaacagagaactgttttcatacttatttcttggtacagttattaaaaataaaaacttgcattttaggattagcgaagtctnnnnnnnnnnnnnnnnnnntttggagatcacatattgaatagctgtcaaaattcaaactgactagttttgaagaacttcaaaaacgtgttcaaatgaataaagaataaaaatgatcaaaagaaaaccagagctgcctaagagtcttaaaaattattaatgtgacactctcatctctcaccaagtgtatccaaaccacttctcatttgctctttccatttaaagactcacagtagcttcactacacatatatttacactgaacatgtacagctgaccataaatatgatgagcatttatgaaaaaacttagtggtttacactgacttgtgcgctgatctagtgagtcaggagacatttttgagtttatcagtttcttgacatgctcagtgaaaaactgttgcacagaaactcaaagtcccagctggtaatcaggcccatcgtccactggaggcaaagcttctgctgaatgagaagttgatttcagagttcttatattttccccaggcaccaaaaggcactactactgcagtactgttatcctcagtaccgtactgtattgcctgttcagtcaccgcatgggctgcttcgttgggatcatggcactgattgacaaagtcacaaatctcgtgactattcaccatgaagttaattccctctgtcgtgaggaccaggaagctgtcatcagcatgatgtaacttaatcctcttagtttcg

SEQ ID NO: 24506 - DNA, 1065 bp, Macaca Mulatta
tggggagcggggagcctaatcctgctctttaagaaaaagaagtatctcaaggccgctctgtacgtgggtgacttggacccagatgtcaccgaggacattttctataagaagttcaggcctgctggccctctgcgattcacccgaatctgccgtgatccggtgacccgcagccccctgggctatggctatgttaacttcccgctttcccgcggatgcagagtgggccttgaacaccatgaattttgatttgattaatggaaagccattccgccttatgtggtctcagccagatgaccgcttaagaaagtctggagtgggaaatatattcatcaaaaacctggacaaatccatagacaatagggccctgttttacttattttctgcttttgggaacattctgtcctgcaaagtcgtatgtgatgacaacggctctaagggttatgcctatgtgcactttgacagcctggccgctgccaatagagccatctggcacatgaatggagtgcggctcaacaaccgccaggtgtatgttggcagattcaaattcccagaagagcgggcggctgaggtcagaaccagggatagagcaactttcaccaatgttttcgttaaaaacattggagacgacatagatgacgaaaaactgaaggaacttttctgtgaatatgggccaactgagagtgttaaagtaataagagatgccagtgggaaatctaaaggctttggatttgtgagatatgagacacacgaggctgcccaaaaggctgtgctagacttgcatggaaagtccatcgatggaaaagtcctctatgtagggcgagcacagaagaaaattgaacgcctggctgagttgaggcggagatttgaacggctgaggttaaaagaaaaaagtcggcccccaggggtgcctatctatattaagaacttggatgagacaatcaatgatgaaaaactgaatgaggaattttcttcctttggatcaattagtcgggccaaagtgatgatggaagtggggcaaggcaaaggagtaggtgtggtctgcttttcctcttttgaggaggctac

SEQ ID NO: 24507 - DNA, 811 bp, Macaca Mulatta
tagtgggcagagtcaatgtggggaggaaaacaagaaaaatgtagaaagaggatccttgctgcttcctgaggccacatcagggtgttgggttagccagatcctaatgcaactctcacttcaccctcctcttccccctctggacacaagatccctggggttttctcttctgacattgatgagagagtcacattcagggcaggctagggactccaggctctggacctaggcctcctcagcatggcccaggccttgcatgctgaggctctgaaatccaggaaaaatggttgaccccatgaacacttcctcaaaatctctgcagtggatgtgattctggatgcaaaaacaccaaaccccatcctccttgtttctgaggaccagaggagtgtgcagcgtgccaaggagccccaggatctaccggacaaccctgagagatttgattggcattattgtgttcttggctgtgagagcttcatgtcaggagacataactgggaggtggaggtaggggacaggaaagagtggcatataggggtgtgtagtaagaatgtgcagagaaaaggttgggtcaaaatgacacctgagaacggattctggactatggggctgactgatgggaataagtatcagactctaactgaatccagaaacaacctgaaacttcctaagccccctaggaaagtgggggtcttcctggactatgagactagagatatctcattctacaatgctgtggatggatcgcatattcatactttcctggacaactacttctcagggcctctatatcctgttttcagaattttgaccttgga

SEQ ID NO: 24508 - DNA, 310 bp, Macaca Mulatta
cagaccctcagtcatgctagtgcctgctctgtgcctgctgtgggccctggcaatggtgatccagcctgcctcagcggcccccgtgggcagcccagaactggcagagcatgaggagctgaccctgctcttccacgggaccctgcagctgggccaggccctcaatggtgtgtacaagaccacggagggacggctgacaaaggccaggaacagcctgggtctctatggccgcacagtggaactcctggggcaggaggtcagccggggccgggatgcagcccaggaacttcgggcaagcctgttggagactcag

SEQ ID NO: 24509 - DNA, 429 bp, Macaca Mulatta
agtgttgataaaatagtgttaacactacctgcttttattcaaaagtgattgaccatcttcaaccgtgaaatacttaggagggcataaaaatgtatcagtatggcatgctgcaattgaaacttaacggtgaaataagaaactgcattttgctaataaacttatgaaacaaggcagtaaaattttaatcactactgatgaaactttatttcatataagagttttaatattctgcttaaaatgtaaaatgcaagaagacttggatgatttcgtttttttcttaggaagaatagcatctaaaatacgataccaaacttcactgttagtacttgagaaaaaaatggtttcagtgagagagatatttacattaaacagattttatatagacagcacccttgtaatgcttggtaaacaatctagaattccaaccag

SEQ ID NO: 24510 - DNA, 177 bp, Macaca Mulatta
aataatcctcctctgaagtcacggagcttctcacttgcttctagtggtaattctcctatatcgcagaggagaccaagtcaaaatgctatttctttttttaatgttggacattccaaactgcaatcagtgagcaaaagaactaatttacctccagaccatcttgtggaagtcagagaa

SEQ ID NO: 24511 - DNA, 750 bp, Macaca Mulatta
  misc_feature (1)...(750): n = A,T,C or G
agacctggagtcactggtatttaagccacaggccttcctcatgtaaccagagatagaatgggctacttgcatcaacagaactccttgtgcgtgtattaaatccataaaatctctggcagtagtaaagccagcctgaagggatggcctcacatcttagaatactgagatctcaccagaacactgtaagccatataaacaaaccaacagtaggggaagagtaacagtgaaaccatctaagattgtttaaaataggcaaaagctattggggggaaaaaacaggtgaatgtgaaaataaaccagggtaaggtaaattctagaaatggcatttgaaatgaaaacctcactaagtttactctaacaataaacagattgagttttctgaagacagcaatgacctcacctagatgactgtcaagtccggggaacatcaacacattatgtgtactataatgtatacataaaattttatgtccaatttttcaaaatgaagtttctcagatgctatttctgccgttacagtgtagagtatcacataaatatcttgggctagagaaacgcagtttatatataccgttggatttttgtaataaaagtttttttcccaagacctgttattttgccagaaatgcttctagatcaaattattgccccattnnnnnnnnnnnnnnnnnnnnnnnnnnnnnnnnnnnnnnnnnnnnnnnnnnnnnnnnnnnnnnnnnnnnnnnnngcgttttcaacgtcgtgactggg

SEQ ID NO: 24512 - DNA, 548 bp, Macaca Mulatta
  misc_feature (1)...(548): n = A,T,C or G
aggagtggtaccagaaccgggaggacatgctggacctgaaacacataaacaagaccacagacctgaagatagactacttcaaacctggccacccccaggctctgcgcgnnnnnnnnnnnnnnnnnnnnnnnnnnnnnnnnnnnnnnnnnnnnnnnnnnnnnnnnnnnnnnnnnnnnnnnnnnnnnnnnnnnnnnnnnnnnnnnnnnnnnnnnnnnnnnnnnnnnnnnnnnnnnnnnnnnnnnnnnnnnnnnnnnnnnnnnnnnnnnnnnnnnnnnnnnnnnnnnnnnnnnnnnnnnnnnnnnnnnnnnnnnnnnnnnnnnnnnnnnnnnnnnatcacagagcagttcttccgcaacccagcgaagcccgcagaggaggacgtggcagagcgcgtgtttctgctggcggaggagcgcatccagctgcgctaccactgccgcgacgaccacatcacagcctccaagcgcgagttcatgcggcgcaccgaggtggacagcaaaggcaacaagatcatcatgacgcccgacatgtgcatcagcttcgaggtg

SEQ ID NO: 24513 - DNA, 827 bp, Macaca Mulatta
ggaccgcatgattgtccgagagatgtgcaaggaattcccggtgctgggggaggctcccagctagcaccttgctgtcctcccttccctgcagctccagtcagtgtgcaggggactcaggggcttggccctaagaatgttttgcactgacagtgggaggggataaggtggcagaaggaacctgagcaggaccccccacctgaagtagaacttacgagaggggccaagtgtaggattggggaccatggtctgggagctgttctggggcagggggaatatgcaagctaaaactcctctataccccggtaggcttccttttcagcatgcccccctcttcaccccacacccacgtgtacactcagagtcctgctgctgctccaggctggaccagacccccgtccccacccctcctggtctgtatcctgggcctcagcaagccatgcccctggggtgaggggaggcatctcccaccagctctattctttgccttagctttgtagtgagtgctgctcatgtgctcccctctacacccacgtgggggtcgctgcccttcactcctacccccagaggccttggccaagctgctgctttgaaagcgggatcttggagacaggccatctatcccagagccttatggaacaggatgatggcactgagaaagccaatgaccgaatctctcttctctgtgaaaatgtagagtgaaaagccatgtgtattttcctatgtgctgtagctctcctttggaaataaatcacaggcatctggaaacaggcttccctgtatgatcttgggagacagtgggagaggatgggcataagtactggggcctc

SEQ ID NO: 24514 - DNA, 876 bp, Macaca Mulatta
  misc_feature (1)...(876): n = A,T,C or G
caggactgcaccttcttcaataagaaggacatcctcaannnnnnnnnnnnnnnnnnnnnnnnnnnnnnnnnnnnnnnnnnnnnnnnnnnnnnnnnnnnnnnnnnnnnnnnnnnnnnnnnnnnnnnnnnnnnnnnnnnnnnnnnnnnnngagaatcccttcaaagaaaggatcgtggcggcgttttccgaggatggtgaggggaacctcaccttcaacgactttgtggacatgttttccgtgctctgcgagtcggctccccgagagctcaaggcaaactatgccttcaagatctatgnnnnnnnnnnnnnnnnnnnnnnnnnnnnnnnnnnnnnnnnnnnnnnnnnnnnnnnnnnnnnnnnnnnnnnnnnnnnnnnnnnnnnnnnnnnnnnnnnnnnnnnnnnnnnnnnnnnnnnnnnnnnnnnnnnnnnnnnnnnnnnnnnnnnnnnnnnnnnnnnnnnnnnnnnnnnnnnnnnnnnnnnnnnnnnnnnagcactttccacatccggatctgaggacactgccgaggctgcaggggcctggaagtccaccgtcctgccctgcggtcacatgggtgtggcctccaagttctccaggaaagcagtggcagcctctggggttcacaccacgaatatttcctgtggccctttcagcaaaaaacagccttaaccaggaagggggcgtgtgagggttaggacccttcccacagcccctctgtggcccagcccgaggacccatgacccctctccaggccctctgcaccccgccccatgccccagtcctctcccactccagaaatgctccccacccctcaaagggaaaggcagataacccaacaggaggtggtggggtctgacgtgtccaagtgctggcagaca

SEQ ID NO: 24515 - DNA, 330 bp, Macaca Mulatta
acaataaaatgtgtgcaaatactctccacagagatgagtccccacctcagtcggtatagaaaagcatgataaaggttggaaaaaatggataaaaatgttgaaagaacctccagttccttattaggcgaagatacaatatttattccttgtctcctgggataaatctcttctgcctattgtcctcccagttctcagtgctgatgcttaattttcaaaacttctatattaccaagggacctacgacatcagccaaagaaatactcagcaagtacaaaatctgttccagggagctgcttttgtgcagagggaaaattttgttcctacaggttt

SEQ ID NO: 24516 - DNA, 609 bp, Macaca Mulatta
tctccacccccagcccccatatcctggttctggcccaaggaaaatgtccattctacgaccttctcttttcctctcctctcacttctgcagctattctcacacacctaacctctaggcaacatgcactaaattcaaaagcaaggagaagcccttcccccaccatcagtccaccagccctagaacctcccttgcctctacagtcacccaataaagcccaagtccatggaaaacggctgtggctttagttttgttgcttttaaaaaaaatcaatctaccagtctctagcagtaagagggaaagttagacctcagccggggaactttccatgtccgcagatagaacagaggacaaagccataggttggatcagaagtgtccttttaggagtcagagttgggagaaggagacatcctgggactgttcatcccagttaataaagtgggcaattctcaggccattaggggattttagagcagactgacatgcaattagtcagtatttctcagcccagccaagcctgctgctagtgtgggaggggtcctgctcgccatctgtacccctggcttggagtctgctggtgccctgggggttgtggggatgaggaggcatc

SEQ ID NO: 24517 - DNA, 2341 bp, Macaca Mulatta
  misc_feature (1)...(2341): n = A,T,C or G
aagtgcaagatgaaatacagtgaaagagatgaaaatgttttaaagccagagcccatgggaaatgcagaagagcctgaaatcccttacagctattcaagagaatataatgaatatgaaaacattaagttggagagacatgttgtctcatttgatagtagcaggccaaccagtggaaagatgaactgtgatgtgtgtggattatcctgcatcagcttcaatgtcttaatggttcataagcgaagccatactggtnggtgaacgcccattccagtgtaatcagtgtggggcatcttttactcagaaaggtaacctcctccgccacattaaactgcacacaggggaaaaaccttttaagtgtcacctctgcaactatgcatgccaaagaagagatgcgctcacagggcatcttaggacacattctgnnnnnnnnnnnnnnnnnnnnnnnnnnnnnnnnnnnnnnnnnnnnnnnnnnnnnnnnnnnnnnnnnnnnnnnnnnnnnnnnnnnnnnnnnnnnnnnnnnnnnnnnnnnnnnnnnnnnnnnnnnnnnnnnnnnnnngtggagaaaccctacaaatgtgagttttgtggaaggagttacaagcagagaagttcccttgaggagcacaaggagcgctgccgtacatttcttcagagcactgacccgggagacactgnnnnnngcaagtgcggagggcaagacacatcaaaagcagagatgggaagtgaaagagctcttctactggacagattagcaagcaatggggcaaaacgaaaaagctcaatgcctcagaaattcatgggtaagaannnnnnnnnnnnnnnnnnnnnnnnnnnnnnnnnnnnnnnnnnnnnnnnnnnnnnnnnnnnnnnnnnnnnnnnnnnnnnnnnnnnnnnnnnnnnnnnnnnnnnnnnnnnnnnnnnnnnnnnnnnnnnnnnnnnnnnnnnnnnnnnnnnnnnnnnnnnnnnnnnnnnnnnnnnnnnnnnnnnnnnnnnnnnnnnnnnnnnnnnnnnnnnnnnnnnnnnnnnnnnnnnnnnnnnnnnnnnnnnnnnnnnnnnnnnnnnnnnnnnnnnnnnnnnnnnnnnnnnnnnnnnnnnnnnnnnnnnnnnnnnnnnnnnnnnnnnnnnnnnnnnnnnnnnnnnnnnnnnnnnnnnnnnnnnnnnnnnnnnnnnnnnnnnnnnnnnnnnnnnnnnnnnnnnnnnnnnnnnnnnnnnnnnnnnnnnnnnnnnnnnnnnnnnnnnnnnnnnnnnnnnnnnnnnnnnnnnnnnnnnnnnnnnnnnnnnnnnnnnnnnnnnnnnnnnnnnnnnnnnnnnnnnnnnnnnnnnnnnnnnnnnnnnnnnnnnnnnnnnnnnnnnnnnnnnnnnnnnnnnnnnnnnnnnnnnnnnnnnnnnnnnnnnnnnnnnnnnnnnnnnnnnnnnnnnnnnnnnnnnnnnnnnnnnnnnnnnnnnnnnnnnnnnnnnnnnnnnnnnnnnnnnnnnnnnnnnnnnnnnnnnnnnnnnnnnnnnnnnnnnnnnnnnnnnnnnnnnnnnnnnnnnnnnnnnnnnnnnnnnnnnnnnnnnnnnnnnnnnnnnnnnnnnnnnnnnnnnnnnnnnnnnnnnnnnnnnnnnnnnnnnnnnnnnnnnnnnnnnnnnnnnnnnnnnnnnnnnnnnnnnnnnnnnnnnnnnnnnnnnnnnnnnnnnnnnnnnnnnnnnnnnnnnnnnnnnnnnnnnnnnnnnnnnnnnnnnnnnnnnnnnnnnnnnnnnnnnnnnnnnnnnnnnnnnnnnnnnnnnnnnnnnnnnnnnnnnnnnnnnnnnnnnnnnnnnnnnnnnnnnnnnnnnnnnnnnnnnnnnnnnnnnnnnnnnnnnnnnnnnnnnnnnnnnnnnnnnnnnnnnnnnnnnnnnnnnnnnnnnnnnnnnnnnnnnnnnnnnnnnnnnnnnnnnnnnnnnnnnnnnnnnnnnnnnnnnnnnnnnnnnnnnnnnnnnnnnnnnnnnnnnnnnnnnnnnnnnnnnnnnnnnnnntaagttaaagaacagccataaaataagtatctgttaggagtaactgaagaccccattctccaagcatcagatccatttcctatcacaacattgttttaaaatgtcatctgatggcacttctgcttctatcctttaccctcccatatccagtgaaaagttgagctgctttgggccaaaccaattgtctataggagaaaatctatgccagaagaactgatggttttaaatatagaccatcaccgaaactccagaaatttgtccactgtggatgatgacatcgctttcctttggtcaaggttggcagagcaaggttataaagggggaaatggtttggcagcaccaacag

SEQ ID NO: 24518 - DNA, 998 bp, Macaca Mulatta
gggagatgagacaggattgatgaggcttgaaagagcccactgagccactctctgaatatgtgaaatgtactctgtgtcttttcctttagagtggggagggggcataatcgttttggtttctgcatttagctaccttgtaaatggtggttcgttgcagtttcaccaaatgtattggtgtgatttacagtgggaatgacagaacagattaagcattgataggctttcttttttccccgttttctttttccttctttctttttgtctttttttcccccaagaggaagaattgcttttctcttgtcagtatgatttgtaactctggaacactattcttacagaatgcctttctaacctgaaggatacccagatttcttttctttatgaacaagatgggaaaatccccctacccctcctaaaatgggattcgagctttattggggccaataatatttccttgtattacccaagacattccgggtaaagcctttgcagcaagtttttgccaaagaaaaaggacggcctgggtttccccccccttcaaacaaggaatggtggccaatgccctccaaccgggggacctagttggttgttatgaaagagaaatctccggtgagaaactttaacaaaaaattttccctttccggggacccccccggaaaacctttttgatcgcctggctaaattaggtccactcttttggccaccaatctgagggtggatctgtaaagatgcgaagaccccaactctaacgggtcaataataacacatacagcggtggtcaccgtggaccgggacattttttacggggacgatgcacaacacatttatacgctgataatatgggaggtattcattcgagggctcaaaatagataccacacttgaggcaacggtgggtccttctcactacaagagggccacgcggtgcctctgttcagctctcgaatgagcctcctataaggggcggggagcacctcataaacctatttcccgcacaaa

SEQ ID NO: 24519 - DNA, 2195 bp, Macaca Mulatta
  misc_feature (1)...(2195): n = A,T,C or G
gcccaccgctgactcagttcttcctggagtgtggaggcctggtgcgcacagacaaaaagccagccctgtgcaagagctaccagaagctggtctctgaggtctggcacaagaaacgnnnnnnnnnnnnnnnnnnnnnnnnnnnnnnnnnnnnnnnnnnnnnnnnnnnnnnnnnnnnnnnnnnnnnnnnnnnnnnnnnnnnnnnnnnnnnnnnnnnnnnnnnnnnnnnnnnnnnnnnnnnnnnnnnnnnnnnnnnnnnnnnnnnnnnnnnnnnnnnnnnnnnnnnnnnnnnnnnnnnnnnnnnnnnnnnnnnnnnnnnnnnnnnnnnnnnnnnnnnnnnnnnnnnnnnnnnnnnnnnnnnnnnnnnnnnnnnnnnnnnnnnnnnnnnnnnnnnnnnnnnnnnnnnnnnnnnnnnnnnnnnnnnnnnnnnnnnnnnnnnnnnnnnnnnnnnnnnnnnnnnnnnnnnnnnnnnnnnnnnnnnnnnnnnnnnnnnnnnnnnnnnnnnnnnnnnnnnnnnnnnnnnnnnnnnnnnnnnnnnnnnnnnnnnnnnnnnnnnnnnnnnnnnnnnnnnnnnnnnnnnnnnnnnnnnnnnnnnnnnnnnnnnnnnnnnnnnnnnnnnnnnnnnnnnnnnnnnnnnnnnnnnnnnnnnnnnnnnnnnnnnnnnnnnnnnnnnnnnnnnnnnnnnnnnnnnnnnnnnnnnnnnnnnnnnnnnnnnnnnnnnnnnnnnnnnnnnnnnnnnnnnnnnnnnnnnnnnnnnnnnnnnnnnnnnnnnnnnnnnnnnnnnnnnnnnnnnnnnnnnnnnnnnnnnnnnnnnnnnnnnnnnnnnnnnnnnnnnnnnnnnnnnnnnnnnnnnnnnnnnnnnnnnnnnnnnnnnnnnnnnnnnnnnnnnnnnnnnnnnnnnnnnnnnnnnnnnnnnnnnnnnnnnnnnnnnnnnnnnnnnnnnnnnnnnnnnnnnnnnnnnnnnnnnnnnnnnnnnnnnnnnnnnnnnnnnnnnnnnnnnnnnnnnnnnnnnnnnnnnnnnnnnnnnnnnnnnnnnnnnnnnnnnnnnnnnnnnnnnnnnnnnnnnnnnnnnnnnnnnnnnnnnnnnnnnnnnnnnnnnnnnnnnnnnnnnnnnnnnnnnnnnnnnnnnnnnnnnnnnnnnnnnnnnnnnnnnnnnnnnnnnnnnnnnnnnnnnnnnnnnnnnnnnnnnnnnnnnnnnnnnnnnnnnnnnnnnnnnnnnnnnnnnnnnnnnnnnnnnnnnnnnnnnnnnnnnnnnnnnnnnnnnnnnnnnnnnnnnnnnnnnnnnnnnnnnnnnnnnnnnnnnnnnnnnnnnnnnnnnnnnnnnnnnnnnnnnnnnnnnnnnnnnnnnnnnnnnnnnnnnnnnnnnnnnnnnnnnnnnnnnnnnnnnnnnnnnnnnnnnnnnnnnnnnnnnnnnnnnnnnnnnnnnnnnnnnnnnnnnnnnnnnnnnnnnnnnnnnnnnnnnnnnnnnnnnnnnnnnnnnnnnnnnnnnnnnnnnnnnnnnnnnnnnnnnnnnnnnnnnnnnnnnnnnnnnnnnnnnnnnnnnnnnnnnnnnnnnnnnnnnnnnnnnnnnnnnnnnnnnnnnnnnnnnnnnnnnnnnnnnnnnnnnnnnnnnnnnnnnnnnnnnnnnnnnnnnnnnnnnnnnnnnnnnnnnnnnnnnnnnnnnnnnnnnnnnnnnnnnnnnnnnnnnnnnnnnnnnnnnnnnnnnnnnnnnnnnnnnnnnnnnnnnnnnnnnnnnnnnnnnnnnnnnnnnnnnnnnnnnnnnnnnnnnnnnnnnnnnnnnnnnnnnnnnnnnnnnnnnnnnnnnnnnnnnnnnnnnnnnnnnnnnnnnnnnnnnnnnnnnnnnnnnnnnnnnnnnnnnnnnnnnnnnnnnnnnnnnnnnnnnnnnnnnnnnnnnnnnnnnnnnnnnnnnnnnnnnnnnnnnnnnnnnnnnnnnnnnnnnnnnnnnnnnnnnnnnnnnnnnnnnnnnnnnnnnnnnnnnnnnnnnnnnnnnnnnnnnnnnnnnnnnnnnnnnnnnnnnnnnnnnnnnnnnnnnnnnnnnnnnnnnnnnnnnnnnnnnnnnnnnnnnnnnnnnnnnnnnnnnnnnnnnnnngagctgactacgggcagatttcagaggagacctggaactacctgaacagcctgtacggaggcggccccgagatcgccatccgccagagcgtggtgcagccgccgggccc

SEQ ID NO: 24520 - DNA, 1926 bp, Macaca Mulatta
  misc_feature (1)...(1926): n = A,T,C or G
cctccagaggcagaggacccagaccggggccagccctgcaactcctgcagggagcagtgccccggcttcctgctccacggctggagnnnnnnnnnnnnnnnnnnnnnnnnnnnnnnnnnnnnnnnnnnnnnnnnnnnnnnnnnnnnnnnnnnnnnnnnnnnnnnnnnnnnnnnnnnnnnnnnnnnnnnnnnnnnnnnnnnnnnnnnnnnnnnnnnnnnnnnnnnnnnnnnnnnnnnnnnnnnnnnnnnnnnnnnnnnnnnnnnnnnnnnnnnnnnnnnnnnnnnnnnnnnnnnnnnnnnnnnnnnnnnnnnnnnnnnnnnnnnnctggggagaaatacaggatcaagcagctgctgcaccagctgcccccacacgacagtgaggnaggcacagtactgcacagcactggaagaggaggaaaagaaagagctccgagcctttagccagcagcggaagcgggagaatctggggcgtggcatcgtgcgcatcttcccggtgaccatcactggggccatctgtgaggagnnnnnnnnnnnnnnnnnnnnnnnnnnnnnnnnnnnnnnnnnnnnnnnnnnnnnnnnnnnnnnnnnnnnnnnnnnnnnnnnnnnnnnnnnnnnnnnnnnnnnnnnnnnnnnnnnnnnnnnnnnnnnnnnnnnnnnnnnnnnnnnnnnnnnnnnnnnnnnnnnnnnnnnnnnnnnnnnnnnnnnnnnnnnnnnnnnnnnnnnnnnnnnnnnnnnnnnnnnnnnnnnnnnnnnnnnnnnnnnnnnnnnnnnnnnnnnnnnnnnnnnnnnnnnnnnnnnnnnnnnnnnnnnnnnnnnnnnnnnnnnnnnnnnnnnnnnnnnnnnnnnnnnnnnnnnnnnnnnnnnnnnnnnnnnnnnnnnnnnnnnnnnnnnnnnnnnnnnnnnnnnnnnnnnnnnnnnnnnnnnnnnnnnnnnnnnnnnnnnnnnnnnnnnnnnnnnnnnnnnnnnnnnnnnnnnnnnnnnnnnnnnnnnnnnnnnnnnnnnnnnnnnnnnnnnnnnnnnnnnnnnnnnnnnnnnnnnnnnnnnnnnnnnnnnnnnnnnnnnnnnnnnnnnnnnnnnnnnnnnnnnnnnnnnnnnnnnnnnnnnnnnnnnnnnnnnnnnnnnnnnnnnnnnnnnnnnnnnnnnnnnnnnnnnnnnnnnnnnnnnnnnnnnnnnnnnnnnnnnnnnnnnnnnnnnnnnnnnnnnnnnnnnnnnnnntacaggccccgaggagccttcccgctttctgagaggggctccccaccgccactccatgccggagctggggctccgcagtgcccccgagccgcccccagagtcccccggccagcctaacctgcgcccagatgatagtgccttcggtcgccagagcaccccacgcgtcagcttccgcgaccctctcgtgtctgaaggaggtccaagccggaccctgagtgcacccccggcccagcgccgcaggccacgnnnnnnnnnnnnnnnnnnnnnnnnnnnnnnnnnnnnnnnnnnnnnnnnnnnnnnnnnnnnnnnnnnnnnnnnnnnnnnnnnnnnnnnnnnnnnnnnnnnnnnnnnnnnnnnnnnnnnnnnnnnnnnnnnnnnnnnnnnnnnnnnnnnnnnnnnnnnnnnnnnnnnnnnnnnnnnnnnnnnnnnnnnnnnnnnnnnnnnnnnnnnnnnnnnnnnnnnnnnnnnnnnnnnnnnnnnnnnnnnnnnnnnnnnnnnnnnnnnnnnnnnnnnnnnnnnnnnnnnnnnnnnnnnnnnnnnnnnnnnnnnnnnnnnnnnnnnncccgagacaagaactgcatcgtggcttgaaggcaggccttcctggaggtggctccattctccagtcagagtagacgatgagnnnnnnnnnnnnnnnnnnnnnnnnnnnnnnnnnnnnnnnagtcataaatcctcttcctccctcctt

SEQ ID NO: 24521 - DNA, 380 bp, Macaca Mulatta
gaattccagttggacttgacgctctggcgccctctggtggccaacttggtaacaacaacccgggactcctggtagtagtgccgggaggccgcaggaccctggtcttctggtgctgccgcccaggtgaggaccgccacctaccgcgaggagatgctggagatgacccggaagcgggtgctgcatgcggtgcacacgtctattcccgcctgcctggcaagcccaaggtaaatgcagcctaaaagcaggtgaagcattactcgcacaggctccagggtgagccctgggtccacaagggcctctcgcctcactgagccttcagctcctgagctctaaaatgcaggtagttcacaaccatcagagtgatgctgtgaagagcgtta

SEQ ID NO: 24522 - DNA, 717 bp, Macaca Mulatta
  misc_feature (1)...(717): n = A,T,C or G
nagtttctcctctcagagcaggacttggaaaggagcagagctgaggcctctcaagagctcttggctcagctcaacagagctgtccaggtcgttgtgcacacgggtgacatcactgaggacctgctgttggacttccaggnnnnnnnnnnnnnnnnnnnnnnnnnnnnnnnnnnnnnnnnnnnnnnnnnnnnnnnnnnnnnnnnnnnnnnnnnnnnnnnnnnnnnnnnnnnnnnnnnnnnnnnnnnnnnnnnnnnnnnnnnnnnnnnnnnnnnnnnnnnnnnnnnnnnnnnnnnnnnnnnnnnnnnnnnnnnnnnnnnnnnnnnnnnnnnnnnnnnnnnnnnnnnnnnnnnnnnnnnnnnnnnnnnnnnnnnnnnnnnnnnnnnnnnnnnnnnnnnnnnnnnnnnnnnnnnnnnnnnnnnnnnnnnnnnnnnnnnnnnnnnnnnnnnnnnnnnnnnnnnnnnnnnnnnnnnnnnnnnnnnnnnnnnnnnnnnnnnnnnnnnnnnnnnnnnnnnnnnnnnnnnnnnnnnnnnnnnnnnnnnnnnnnnnnnnnnnnnnnnnnnnnnnnnnnnaagtccctggacacagccctgctccagccccatgtggtggcccagagctcccaggaagttcaccgtgcccactgcctgcatcaggcgttctgtgcactgcacaagttccagcatctccatggccggccaccccagcactgggatcctg

SEQ ID NO: 24523 - DNA, 1626 bp, Macaca Mulatta
  misc_feature (1)...(1626): n = A,T,C or G
attttgttgcatgaggtccccattgaaggacagaaaaaaaagagaaagaaagttttattggaaacgaaacttcaaggcaacagtgaagtaacacaaggcattttggattatgtagtaggaaccannnnnnnnnnnnnnnnnnnnnnnnnnnnnnnnnnnnnnnnnnnnnnnnnnnnnnnnnnnnnnnnnnnnnnnnnnnnnnnnnnnnnnnnnnnnnnnnnnnnnnnnnnnnnnnnnnnnnnnnnnnnnnnnnnnnnnnnnnnnnnnnnnnnnnnnnnnnnnnnnnnnnnnnnnnnnnnnnnnnnnnnnnnnnnnnnnnnnnnnnnnnnnnnnnnnnnnnnnnnnnnnnnnnnnnnnnnnnnnnnnnnnnnnnnnnnnnnnnnnnnnnnnnnnnnnnnnnnnnnnnnnnnnnnnnnnnnnnnnnnnnnnnnnnnnnnnnnnnnnnnnnnnnnnnnnnnnnnnnnnnnnnnnnnnnnnnnnnnnnnnnnnnnnnnnnnnnnnnnnnnnnnnnnnnnnnnnnnnnnnnnnnnnnnnnnnnnnnnnnnnnnnnnnnnnnnnnnnnnnnnnnnnnnnnnnnnnnnnnnnnnnnnnnnnnnnnnnnnnnnnnnnnnnnnnnnnnnnnnnnnnnnnnnnnnnnnnnnnnnnnnnnnnnnnnnnnnnnnnnnnnnnnnnnnnnnnnnnnnnnnnnnnnnnnnnnnnnnnnnnnnnnnnnnnnnnnnnnnnnnnnnnnnnnnnnnnnnnnnnnnnnnnnnnnnnnnnnnnnnnnnnnnnnnnnnnnnnnnnnnnnnnnnnnnnnnnnnnnnnnnnnnnnnnnnnnnnnnnnnnnnnnnnnnnnnnnnnnnnnnnnnnnnnnnnnnnnnnnnnnnnnnnnnnnnnnnnnnnnnnnnnnnnnnnnnnnnnnnnnnnnnnnnnnnnnnnnnnnnnnnnnnnnnnnnnnnnnnnnnnnnnnnnnnnnnnnnnnnnnnnnnnnnnnnnnnnnnnnnnnnnnnnnnnnnnnnnnnnnnnnnnnnnnnnnnnnnnnnnnnnnnnnnnnnnnnnnnnnnnnnnnnnnnnnnnnnnnnnnnnnnnnnnnnnnnnnnnnnnnnnnnnnnnnnnnnnnnnnnnnnnnnnnnnnnnnnnnnnnnnnnnnnnnnnnnnnnnnnnnnnnnnnnnnnnnnnnnnnnnnnnnnnnnnnnnnnnnnnnnnnnnnnnnnnnnnnnnnnnnnnnnnnnnnnnnnnnnnnnnnnnnnnnnnnnnnnnnnnnnnnnnnnnnnnnnnnnnnnnnnnnnnnnnnnnnnnnnnnnnnnnnnnnnnnnnnnnnnnnnnnnnnnnnnnnnnnnnnnnnnnnnnnnnnnnnnnnnnnnnnnnnnnnnnnnnnnnnnnnnnnnnnnnnnnnnnnnnnnnnnnnnnnnnnnnnnnnnnnnnnnnnnnnnnnnnnnnnnnnnnnnnnnnnnnnnnnnnnnnnnnnnnnnnnnnnnnagattgaagacccgctagctattcttattctctttgatgaagctagatataatttattgaagggcttttatacagctcctgatgctaagttgataacattggcaagtctgcttttgcaaatagtctatggaaattatgagagtaaaaaacacaagcaaggtttcctaa

SEQ ID NO: 24524 - DNA, 781 bp, Macaca Mulatta
  misc_feature (1)...(781): n = A,T,C or G
gggagcccggtcacctttcaaggacccagaagtagggttttggcctagataacggggcagagatgtggttcgagattctccccggactcgccgccatgggcgtgtgcttgcttattccaggactggctactgcgtacatccagaggttcactaacgggggcaaggaaaaaaggattgctcattttgggtatcactggaatctgatggaaagagataggcgcatctctggagttaatcgtcactatgtgtcaaagggtttggagaacattgattaaggaagcattttcctgattgatgaaaaaagtaactcagttatggccatctacccctgctagaaggttatacagtgtattatgtaacatgcaatgtgttttgtagtgcttaataaaaataaaattgaacacaannnnnnnnnnnnnnnnnnnnnnnnnnnnnnnnnnnnnnnttattatatatgatgctggtgacaacaataaatatnnnnnnnnnnnnnnnnnnnnttgagggccgactttatagcccagaaaaaaacctttgaaaaaccacatatctttgaacccccgggatctctaaaaaaaattaaaataaaacgcggccccaaatttgttttgtgaaaagagaaatattatgcccatgaaacattatgtgtttttgttaatccccaccaaaaaaaacaaaaaatttcccgaggggatgaaaaagaagacgaaaaaatgtgaaattaatcaccaaatatggaatgtatatttaaaagaggataaaatacaggagaatatcataa

SEQ ID NO: 24525 - DNA, 574 bp, Macaca Mulatta
acccaggcccgaagaaccagcaccgcggcctggcctggccagtgtttgacctttattaagaggtgaggtggggaggagggcccgccagggtgcccgctccctcttggtgaccccccatccagagttaaggctccaagcagcaaatgacagagtaggatgcctggctccagcagcctgggcctggcagcggctcccccaagaacaccccagctgggtgggtgcctgggggcctaggtgaggctggtgttggagctgctggtagcactgcctcgcttttgcaggcagcgcacagaactggggacctgcaggcctgtcgtcacctggaagctgccacaccatacctgagggagagcagggggaggtgggaggggctccgcttcgaaccccagcgcccgtaccaccctctcttccccctgggccgcggagggcagctcaccgtgaaagcaggcagcaggggctgtgtgaacctggtcttgaaagtgtgcaacacttgtttggtgcgggcgttgtaaaaggacaggaggcctggggtgggggggcagagtgacagtgggaacggtcagaagtgggatgg

SEQ ID NO: 24526 - DNA, 745 bp, Macaca Mulatta
  misc_feature (1)...(745): n = A,T,C or G
gggtctacagcatgccgtaaataatatgtaggaccaataataaattatcaattacacatttttgtgttaactaattaaaagcatagtgtatgagtacactttaattaacttgcttctgttgcactttagttttctacctgcatatggactgcattttttcaacacagtcagtatgtagaatgggatgtattctgctgctgctgcttattaaataaagcctgagtgttcttagatggggttattctgagacgagggtcttagcctacagttctttttgaaatgaaagaaaggtgcttggttttttaattatattcatcttttcagggtaaatttgttttgctgagtttcttgtaatgctcatttttacatgctgctactagnnnnnnnnnnnnnnnnnnnnnnnnttgctgctttctaaaatattaattgccttatatttgaaagtgccattgtaatcgtaagtagactatatatttcctataatgatgtctgatatttaaataggaaatcaggcaaacaatattcacgaagtttaaccatataaactttttatttttaacttgcctgaatccctatattccaaagactgctgcatcataataaatacctccatatataatttagcataaaaagtggaaatttttaaattttcttttgtgaaaaaaattatattttgagggccccctaagagattaaaaaggttgcttttcctttaataagaaaaattggcccatatgggccataa

SEQ ID NO: 24527 - DNA, 337 bp, Macaca Mulatta
  misc_feature (1)...(337): n = A,T,C or G
ggggaacctgtacagcctgcctgcctactgccacctgcacctaccgccggaccacacagcctcgcctcctggatgctgcgccagcctggccgagggtcccaggtgaagaccggacgggccccgacagctgctgcccaggactctgaggcccccttgcctgactgtgacttgtgtgtctcccctgtccccgtggggccatggcagcccagaaccgaggctgggtgggcagatgacccaaggaacctttctgggagcgccttcccgctgggctgggaacaataaatgcagccatgtctcggcnnnnnnnnnnnnnnnnnnnnnnnnnnnnnnnnnnnnc

SEQ ID NO: 24528 - DNA, 170 bp, Macaca Mulatta
ggtcgcctgctgtttgctggatacaatgattacactatcaacgtctgggatgttctcaaagggtcccgggtctccatcctgtttggccatgaaaaccgcgttagcactctacgagtttcccccgatgggactgctttctgctcaggatcatgggatcataccctcagagt

SEQ ID NO: 24529 - DNA, 238 bp, Macaca Mulatta
atggagtcggggctgctgcggccggcgccagtgagcgaggtcatcgtcctgcattacaactacaccggcaagctccgcggtgcgcgctaccagcccggtgccggcctgcgcgccgacgccgtggtgtgcctggcggtgtgcgccttcatcgtgctagagaatctggccgtgctgttggtgcttggacgccacccgcgcttccacgcgcccatgttcctgctcctgggcagcctcacgt

SEQ ID NO: 24530 - DNA, 846 bp, Macaca Mulatta
cgcaggccacagtgggcaggcggtgcgggggtcagcatgcgggggcaccagaggcccaggctgttggctggacagtcaccctctgctctcgctacatcccttgctccctgcccatttatttaagcccccataggtgcccttcacccccaaaaccagctgtacagaatctttgatacagatctatttgctaggggtgctgccgggggtttggggtcagcatctggccccccatctcctgaccagctgattcatgaggccggtttctgtctcccacttttgtcccccagccaagctctaaagcacatgtagccgctgagacttgctgtctctacggggggaagctcctcttcccccaaactctgggagcttcccccagcctcctgcagccccgacctctcaggttagaccccgggccctggagcttagggggttgtccccgaccccagccccacacctgctccttccctaatgctttgaggttttcttggttggaagctgcagctggcccgagaaagaaaataaaaaacaacacttttgcatgagtctctcttcctccttgtctctgctacccactttgcccctgggccagtcacctgttctcctcacactcctggtcccccagactctgggcaagctcttgggaggttgggagcatgcatccttgaaacacgtgtgggctgggtcagtttctaggttggggagacccagggatggtgggcctggggaggagctctggcttggaagtcccagagcgcccatcttgatctaactttctctgggttcttggggtccagggaccttggtttcctcaactgggatgcatggtgatgatgccacccctcagag

SEQ ID NO: 24531 - DNA, 1722 bp, Macaca Mulatta
  misc_feature (1)...(1722): n = A,T,C or G
tcgtgcgcgctgagccccgtagggccggggaggcaccagctgccgcgctggggaggaggccgaggccgcagcttgagggaggcccggcgcctctgcgcctgtgtctggcagagccgctgtgagacgagacaatcctgccccgccgccgggataatcaagagttttggccggacctttgagcatacaccgagagagtgaggagccagacgacaagcacacactatggcgctgaaacggattaataaggaacttagtgatttggcccgtgaccctccagcacaatgttctgcaggtccagttggggatgatatgtttcattggcaagccacaattatgggacctaatgacagcccatatcaaggcggtgtattctttttgacaattcattttcctacagactaccccttcaaaccacctaaggttgcatttacaacaagaatttatcatccaaatattaacagtaatggcagcatttgtctcgatattctaagatcacagtggtcgccctgctttaacaatttctaaagttcttttatccatttgttcacttggctatgtgatccaaaccccagatgaccccctagtgccagagattgcacgggatctataaaacagacagagataagtacaacagaatatctcgggaatggactcagaagtatgccatgtgatgctaccttaaagtcagaataacctgcattatagctggaataaactttaaattactgttccttttttgattttcttatccggctgctcccctgtcagacctcatcnnnnnnnnnnnnnnnnnnnnnttacctccctccattcattcacatgctcatctgagaagacttaagttcttccagctttggacaataactgcttttagaaactgtaaagtagttacaagagaacagttgcccaagactcagnnnnnnnnnnnnnnnnnnnnnnnngcctgtgtattatgtggccaatgtcttcactctaacttggttatgagacttaaaccattcctcactgctctaacatgctgaagaaatcatctgagggggagggagatggatgctcagttgtcacatcaaaggatacagcattattctagcagcatccattcttgtttaagccttccactgttagagatttgaggttacatgatatactttatgctcataactgatgtggctggagaattggtattgaatttatagcatcagcagaacagaaaatgtgatgtattttatgcatgtcaataaaggaatgacctgttcttgttctacagagaatggaaattggaagtcaaacaccctttgtattccaaaatagggtctcaaacattttgtaattttcatttaaattgttaggaggcttggagctattagttaatctatcttccaatacactgtttaatatagcactgaataaatgatgcaagttgtcaatggatgagtgatcaactaatagctctgctagtaattgatttatttttcttcaataaagttgcataaaccaatgagttagctgcctggattaatcagtatgggaaacaatcttttgtaaatgcaaagctgttttttgtatatactgttgggatttgcttcattgtttgacatcaaatgatgatgtaaagttcgaaagagtggatattttgccatgttcagttaaagtgcacagtctgttacaggttgacacattgcttgacctgattttgcagaattaataagctattggatagtg

SEQ ID NO: 24532 - DNA, 1845 bp, Macaca Mulatta
  misc_feature (1)...(1845): n = A,T,C or G
agggctattcctttgttgctccttccatcctattcaagcgtaatgcagctgtcatagaccctcttcagtttcacatgggagttgaacgtcctggagtgagaaatgnnnnnnnnnnnnnnnnnnnnnnnnnnnnnnnnnnnnnnnnnnnnnnnnnnnnnnnnnnnnnnnnnnnnnnnnnnnnnnnnnnnnnnnnnnnnnnnnnnnnnnnnnnnnnnnnnnnnnnnnnnnnnnnnnnnnnnnnnnnnnnnnnnnnnnnnnnnnnnnnnnnnnnnnnnnnnnnnnnnnnnnnnnnnnnnnnnnnnnnnnnnnnnnnnnnnnnnnnnnnnnnnnnnnnnnnnnnnnnnnnnnnnnnnnnnnnnnnnnnnnnnnnnnnnnnnnnnnnnnnnnnnnnnnnnnnnnnnnnnnnnnnnnnnnnnnnnnnnnnnnnnnnnnnnnnnnnnnnnnnnnnnnnnnnnnnnnnnnnnnnnnnnnnnnnnnnnnnnnnnnnnnnnnnnnnnnnnnnnnnnnnnnnnnnnnnnnnnnnnnnnnnnnnnnnnnnnnnnnnnnnnnnnnnnnnnnnnnnnnnnnnnnnnnnnnnnnnnnnnnnnnnnnnnnnnnnnnnnnnnnnnnnnnnnnnnnnnnnnnnnnnnnnnnnnnnnnnnnnnnnnnnnnnnnnnnnnnnnnnnnnnnnnnnnnnnnnnnnnnnnnnnnnnnnnnnnnnnnnnnnnnnnnnnnnnngtacacaatgttgtcaggacaggttcccttccaatctcatgaccgaagtttgacgtgtaccagcgcagtggaaatcatgaagaaaattaaaaagggagatttctcctttgaaggagaagcctggaagaatgtatcccaagaggctaaagatttgatccaagnnnnnnnnnnnnnnnnnnnnnnnnnnnnnnnnnnnnnnnnnnnnnnnnnnnnnnnnnnnnnnnnnnnnnnnnnnnnnnnnnnnnnnnnnnnnnnnnnnnnnnnnnnnnnnnnnnnnnnnnnnnnnnnnnnnnnnnnnnnnnnnnnnnnnnnnnnnnnnnnnnncctttaacaaatacaagagagagggattttgccttcagaatgttgataaggcccctttggctaagagaagaaaaatgaaaaagactagcaccagtaccgagacgcgcagcagttccagcgagagttcccattcttcttcctctcattctcacggtaaaactacacccaccaagacactgcagcccagcaatcctgccgacagcaataacccggagaccctcttccagttctcagactcagtagcttaggcatggtaggagtgtgtcagtgatccattgcacctttattccctcagcatatgcctgaggtgatcttttatgcttttaaaaatgtttcccgttggtctcattggaatctgcctcctaatgattttttttcaggaaaacctgtttggttatcctcatctaaaagcactggacagagaatgttactgtgaatagagcacatattactttttagcaagctagcatgatgccaacaagaccattcttgaaagagcaaaggtcctgtaaatttaactagggctagatttgagctgcttgcagaataagtcacaggttttccagatgtttgccaacaagaaatgactcatactgtgatgataccttttgctttgccttgtggacaatgtgggtttttgaaatttgcacccttcaaacagtgatttatcagagaaaggggtctgttttcaaaaaagattctgtaatgaattttatgtgtggcatatacttatttcttgagagaagattttaacttattgtttttattttatggttacatatgatgataacctgctattgttaa

SEQ ID NO: 24533 - DNA, 315 bp, Macaca Mulatta
tgggggcgcttcaatcgcaggccttgcctccctcccacggtgctgaggatatgacaggccctgccttccccaggagagctcaggctggagaagccccggtgtagggggaagttctgagcaggcattgtcacccccaggtctagtgtctccacagtgcccccctggcccccagcccaggctgtgcctcccccatgtgcagccgctgggatgtgtccagggcaggacaggatgtaggtgcccaggtgctcccctattttgaacgctcgggttctgtttcagggcaggtgggctggtgtggcccccgggagaacagat

SEQ ID NO: 24534 - DNA, 1242 bp, Macaca Mulatta
ggagagcaggagtagaagtgagatgttaagatcttatggtattaaagacttattattttgttcctatatactgtgctaggatcagatagatgttatagaaatgtcttttgtttctcctgcacttcttgatgtcacagttttttgtacttcctgctgtctaagggcatgaatctcctgttggagcattctcccagacccttcgttagaagagtctatactaagttcttggtgccctctttggcagccaagggtgaaggccccatagaggagaggatccaaaggagcattgaggaggccaaaaaggaaaaggatgtggctcaggctgggagggacttcagttagcatggtgggggagaaccagtaccacagacccagtaggtaataaggtgtccagcagaggatgaaggtcagcaagataagcagggccagtctcagggcccagagacgaacacggggacaattgtcaaaggagcggcagagggcaaattcaccagcaggggcatggctccccttccttgtctgagggctggacacactgaggacaatgtggctatagcagatggccatggcagtcagtggcagcagaaagaggcagcggaaggtgaagaggttataggtggtctcttgccatcgagccttgaagctgcctttggtgacacactgagtgaaagggactgggccagctcggtggacggtatggaacaggaacagctggggcaaggcaagcaggaaactaagtccccaggctgcccccagaagtttccttacacctgaacgggatccaagcgggttgagtactgctgcctggcggtccagtccaatgaccacaggcaggaaagctgcagaatacatggccattagtttcaggaacatgagtgtccgacatgcgatgtcctcggccagccattgaacagtgatattccaggtggcatctaggggcataaccacaaaagtgactagtaagtcggcagctgctaaatgggcgaagagtgtcctgaccggagaggggcggagctggctgggttgcggccgtgtcactgaccacaggacggccaggttccctccagccgaagaaacaaacagcacaatggtcactcccactcggaccttggctgctgccgagaaggtgggcagctctgagccctccaccgccactcccgatgcagcccaggactcctcccccgctgctgacccccaaggggtgccgttgcctgcagacatggtggcctggagagaaactga

SEQ ID NO: 24535 - DNA, 909 bp, Macaca Mulatta
ggagcaagaacagcgtctcaggaacaacctcatctgaagccctcactgcacactcctagctactgccaatacaccagatacctcagcttactggagccatgcccttcacagagtcccaactcagaggaaaagggccagtgccaaggggcaccaagaacctgctcaggaagccttttgatggcaagatcaccaatccagatggtactgcttcttcagggtggcactgggcctaccccctaagggcctggaatatggcttccaggctttgctcagctgagctcctcttctataaggaaacccagtcatccctgaatcttgccacagagatgcggggttcaggagctttcagttctttagggatggactatggtccagtcccctatctaagtggtgctttgcaaatgtcttggaggagtataggacagagtaccaaaatacacagcaggtagtgtcagctctctgctaggagctcaaagcaacacaacttgtatcaaaatcacaactggcagagaagctggtggatccaatcctttcttcatctgttattatttacaactcacctctcacactctgttctttagtgtccttacctttatcctaccacacacatgggtgtttctattatccttggaagcacagacctcgggcatccccttattgcctgatgggccaacaccaacagttactgagtgcttgagaaggggcaagtttcacagaaatggccagatagggccttcctacagagcagcaagagtaggccaagcagaaagactgctgaggtaacatggatcccaggccctgtcagggcctctgccaaggaaaaaatatggacgatttacctggcaggcagtctgatctctcaggatcaccacgcatctcaggattggtctaagcttcaagtcccaacca

SEQ ID NO: 24536 - DNA, 298 bp, Macaca Mulatta
agaggcgaatctttagataacctggactcccctcggtccaattcttggagacagcccccttggctcaatcagcccacaggattctatgcctcttcctccgtgcaagactttagtcgcccaccacctcagctggtgtccacatcaaaccgcccctacatgcggaacccctcctccagcgtgcccccgccttcagccggccctgtgaagacctccaccacaggtgtggccactgcacagtcccccaccccgagaagccattccccttcaacttcacagtcaggctctcagctgcgcaaca

SEQ ID NO: 24537 - DNA, 551 bp, Macaca Mulatta
caacatctataagaaatggcttccaagactctccatgtgaagatgagtgggaaagcagattcgggggccatccaatatccgatttgccacctccagagccatatgtacaaacgaacaaaagttatcccagcaaattggcaagaaacgaaagccggagtggatccaaccgaagagaaaggggtgccccatcaatccctcccatcccgaggtgatctttggctgctcttctctacccaagctcaagagctgcttctgtcgctaagaactgcacaccctacctccccgcttcttcccttgtgccccatgtatgggcaggaggaaagatgggagggtgagtgggaatatgcgtgtgtgcgtgggaatcggtaagaaatgcacctagcttttcatattgtttattctccaggctattgcttgcttcagctgcaaccggggttcgataggcttatgtggtactaggcagagatgaattgcatcccagctttccaccaagcaaatccaaacattcactgcttatttgccacagactgtaattattaaagtccctgaga

SEQ ID NO: 24538 - DNA, 766 bp, Macaca Mulatta
  misc_feature (1)...(766): n = A,T,C or G
ggatttctatcactgtgccatccaaaacccaaacaatgtcaccacacatcaagtcaattgacgacatcgtggtgcttggcatgaatctcagcaagtttaacaaacttactcagtttttcatatgtgttgctggagtttttgtattttacctaatttatgggtatttacaggaattaatattttcagtggagggttttaagtcctatggctggtaccttaccttagtgcagtttgccttttactccatatttggcctaatagaacttcagcttattcaggacaaaaggaggagaataccaggaaaaacctacatgataatagcttttctaactgtgggtactatggggttatcaaacacttccttgggctacctgaattaccctacccaagtcatcttcaagtgctgcaaattgattcctgttatgctaggaggagtttttattcaaggaaagcgttacaatgttgcagatgtgtctgctgccatatgtatgagccttggcctgatatggtttaccctcgctgacagcacaattgcaccaaatttcaacctgacagatgctgtcattggaaatgttcaagagaaagctatgaaacttcataatgcttccaattctgaaatggtattgtattcgtattcaattggttttgtatacattttactgggattgacatgcactagtggaatangccctgcagtaacattctgtgcaaagaatccaattcggaacctatggnttatgcattccntttttttcccctcactggg

SEQ ID NO: 24539 - DNA, 159 bp, Macaca Mulatta
ggtggtggcactgggggacgtgccagatggcaccgtggtgaccgtgatggcaggcaatgacgagaactactccgctgagctgcgcaacgcctcggccgtcatgaagaaccaggtggccaggttcaacgaccttcgctttgtgggccgcagtgggcgagg

SEQ ID NO: 24540 - DNA, 563 bp, Macaca Mulatta
  misc_feature (1)...(563): n = A,T,C or G
aggtattattcccctggatattcagatacacttctgcagagggtggacagctatcaaccacttaataactaagcaaagttatattttgatactcaaattcacagcagagtagttatgagtaatagtaattaaatcttcctaaatatttgaactaagtatattctagatttatttaatgggaaatacctttagataatattttctaaatttatataatactttaaacattagtagcttgaatatatgaagaactattcctggtcattcgcatgcataggacttgctctaaaagtagattttaaaaacacgttaaagggttttaaggcattnnnnnnnnnnnnnnnnnnnnnnnnnnnnnntacatgcagacacctccaatgagatatagataagagatggcattcaaaaaccctaaattattctagccaattcgtcatagacataggcaaggaaagctggccttgctaactatatagtaggatacagaagagaaatctttgaaagaggaaactgatgacatatacaggacacttgaaggagagtatgatgctagttacataagt

SEQ ID NO: 24541 - DNA, 399 bp, Macaca Mulatta
catgaaaagttaggtcatttcctgattgtaaaaggtgttgggtgctactgtgaggagtttggagttaattcagctgccatgggcatgttttaagcacagtcacaattgaatctaggaggtttcaaccagattattctgaaataacagctaatacaaattgcaagcataattctaacatcaaagacatctcaagtttgtatgtcttcggcatacaaaccttagaataggctctgattaaaacaattaaagtatctgtaagaatctttaatactgggttcattagatcctagagcatttcagcttgtgaaaaggtatcagagaaaataatacttcctagttcttcatgttctcttctgaaaatcccccaaaattttatataatcacctcaaatttcgtgta

SEQ ID NO: 24542 - DNA, 2004 bp, Macaca Mulatta
  misc_feature (1)...(2004): n = A,T,C or G
gggaactctgcactaaactttacagcatgagctggggaaatacacagagttggcaggagtttgatcgcttttgtgaatataatccagtggaagtgtccatgttgacctgtttagcagatgtccgggaaccttgccagttgggctgtagaaaccttacttactgtactaattttaacaacaggnnnnnnnnnnnnnnnnnnnnnnnnnnnnnnnnnnnnnnnnnnnnnnnnnnnnnnnnnnnnnnnnnnnnnnnnnnnnnnnnnnnnnnnnnnnnnnnnnnnnnnnnnnnnnnnnnnnnnnnnnnnnnnnnnnnnnnnnnnnnnnnnnnnnnnnnnnnnnnnnnnnnnnnnnnnnnnnnnnnnnnnnnnnnnnnnnnnnnnnnnnnnnnnnnnnnatcagattgtgtggagattcttaaaaaatgtggagatcagaacaaattccctgaagaccacacagctgaaagtatttgtgagcttctgtcacctacagatgatctgaagaattgtatacctttggatacatacctcannnnnnnnnnnnnnnnnnnnnnnnnnnnnnnnnnnnnnnnnnnnnnnnnnnnnnnnnnnnnnnnnnnnnnnnnnnnnnnnnnnnnnnnnnnnnnnnnnnnnnnnnnnnnnnnnnnnnnnnnnnnnnnnnnnnnnnnnnnnnnnnnnnnnnnnnnnnnnnnnnnnnnnnnnnnnnnnnnnnnnnnnnnnnnnnnnnnnnnnnnnnnnnnnnnnnnnnnnnnnnnnnnnnnnnnnnnnnnnnnnnnnnnnnnnnnnnnnnnnnnnnnnnnnnnnnnnnnnnnnnnnnnnnnnnnnnnnnnnnnnnnnnnnnnnnnnnnnnnnnnnnnnnnnnnnnnnnnnnnnnnnnnnnnnnnnnnnnnnnnnnnnnnnnnnnnnnnnnnnnnnnnnnnnnnnnnnnnnnnnnnnnnnnnnnnnnnnnnnnnnnnnnnnnnnnnnnnnnnnnnnnnnnnnnnnnnnnnnnnnnnnnnnnnnnnnnnnnnnnnnnnnnnnnnnnnnnnnnnnnnnnnnnnnnnnnnnnnnnnnnnnnnnnnnnnnnnnnnnnnnnnnnnnnnnnnnnnnnnnnnnnnnnnnnnnnnnnnnnnnnnnnnnnnnnnnnnnnnnnnnnnnnnnnnnnnnnnnnnnnnnnnnnnnnnnnnnnnnnnnnnnnnnnnnnnnnnnnnnnnnnnnnnnnnnnnnnnnnnnnnnnnnnnnnnnnnnnnnnnnnnnnnnnnnnnnnnnnnnnnnnnnnnnnnnnnnnnnnnnnnnnnnnnnnnnnnnnnnnnnnnnnnnnnnnnnnnnnnnnnnnnnnnnnnnnnnnnnnnnnnnnnnnnnnnnnnnnnnnnnnnnnnnnnnnnnnnnnnnnnnnnnnnnnnnnnnnnnnnnnnnnnnnnnnnnnnnnnnnnnnnnnnnnnnnnnnnnnnnnnnnnnnnnnnnnnnnnnnnnnnnnnnnnnnnnnnnnnnnnnnnnnnnnnnnnnnnnnnnnnnnnnnnnnnnnnnnnnnnnnnnnnnnnnnnnnnnnnnnnnnnnnnnnnnnnnnnnnnnnnnnnnnnnnnnnnnnnnnnnnnnnnnnnnnnnnnnnnnnnnnnnnnnnnnnnnnnnnnnnnnnnnnnnnnnnnnnnnnnnggtaacaaataaaaagcaataacagntctgggaatacttcagaaaatcgcatgcacgtgtctgtcccacagtggaagtgtttggaacttcagcattgatcagaaatnnnnnnnnnnnnnnnnnnnnnnnnnnnnnnnnnnnnnnnnnnncagatcgaagcctgcaataaagaagcagagaagattgagtcccttatcaactctgacagtccgactttggcgtcccatgtccctctctctgccctcatcatttcccaggtacaggtctccagcagtgtgccatcagctggtgtcagggccaggccttcttaccactccttcctccttcccctcagcctgggccttgccttgcacttgttctggacgtataactg

SEQ ID NO: 24543 - DNA, 823 bp, Macaca Mulatta
  misc_feature (1)...(823): n = A,T,C or G
ggggggagataggcagccatcatgaacgacaccgtaactattcgcactagaaagttcatgaccaaccgactacttcagaggaaacaaatggtcattgacgtccttcaccctgggaaggcaacagtgcctaagacagaaattcgggaaaaactagccaaaatgtacaagaccacaccggatgtcatctttgtatttggattcagaactcattttggtggtggcaagacaactggctttggcatgatttatgactccctggattatgcaaagaaaaatgaacccaaacatggacttgcaagacatggcctgtatgagaagaaaaagaccgcaagaaagcaacgaaaggaacgcaagaacagaatgaagaaagtcagggggactgcaaaggccaatgttggtgctggcaaaaagtgagctggagattggatcacgcccgaaagagtaatggtgctgcagtaaaggctacctgtgtgccattttggaatttttcccaagccaaattatgaaaactaaaaaactttcatnnnnnnnnnnnnnnnnnnnnnnacaaatagagaatataaaagaaaaataaaaggaaaacaacccaaatatgtaaaaaaacaaaacaataaaagaatttgtgtgtggcgcgcatacgacnnnnnnnnnnnnnnnnnngtaagaaaataatctattttgggcccccgggggccccaagtaaggaataagtaaaaatgggagaaaaaacgcggattttcaaaagaagaaaaacccgggttcagaaaacaaaggggccgtggaagaattcgnnnnnnnnnnnnnnnnnngacaaaccccggag

SEQ ID NO: 24544 - DNA, 702 bp, Macaca Mulatta
aaaatgagagttgacgtgaatgacatgctggttgatttttatcaatattctggacttaacgcatatctttcatgtctaagtcatagttggcttttaaaactttttataaagcctcttgacaatgtgcattgctaacagataactataggctttgaaagtaatgctcgtagattcagtgttcacagtatgtggcctccagcatgtaacatgaggaatcctttatttcattaattaaaggcttttttacttgagccaaaacatatgtaaaggaaacaagtaccacacctcctcttacaccagtcagctcctttgtcttcagtgtttactagaaagcagcctgtgtccatgagtatggtttgctgttggtacactgaaaggcaagaaggagacaagattttctatttactcatctcatgatgtcatttgaagggcatgtccacatatcttactcagaattataataggctcaagaatcagtctcaggtcactttacccaaaaacatttgaaaatctgaaccacaatctcttgaaagtttttatcctatagattattgacaaaacattgttttctggaggcatttgtgccattaggtttccatttatcttcagttttttctttggtgtttgggatgtgttattttgttgctttatgtccttttcaatttaaaatgtttgagtttgtatatagttttgaaattggat

SEQ ID NO: 24545 - DNA, 1262 bp, Macaca Mulatta
  misc_feature (1)...(1262): n = A,T,C or G
tttgcaggtccccccgtggctgtgggaatgaacattgacattgccagcatcgatatggtttctgaagtcaatatgnnnnnnnnnnnnnnnnnnnnnnnnnnnnnnnnnnnnnnnnnnnnnnnnnnnnnnnnnnnnnnnnnnnnnnnnnnnnnnnnnnnnnnnnnnnnnnnnnnnnnnnnnnnnnnnnnnnnnnnnnnnnnnnnnnnnnnnnnnnnnnnnnnnnnnnnnnnnnnnnnnnnnnnnnnnnnnnnnnnnnnnnnnnnnnnnnnnnnnnnnnnnnnnnnnnnnnnnnnnnnnnnnnnnnnnnnnnnnnnnnnnnnnnnnnnnnnnnnnnnnnnnnnnnnnnnnnnnnnnnnnnnnnnnnnnnnnnnnnnnnnnnnnnnnnnnnnnnnnnnnnnnnnnnnnnnnnnnnnnnnnnnnnnnnnnnnnnnnnnnnnnnnnnnnnnnnnnnnnnnnnnnnnnnnnnnnnnnnnnnnnnnnnnnnnnnnnnnnnnnnnnnnnnnnnnnnnnnnnnnnnnnnnnnnnnnnnnnnnnnnnnnnnnnnnnnnnnnnnnnnnnnnnnnnnnnnnnnnnnnnnnnnnnnnnnnnnnnnnnnnnnnnnnnnnnnnnnnnnnnnnnnnnnnnnnnnnnnnnnnnnnnnnnnnnnnnnnnnnnnnnnnnnnnnnnnnnnnnnnnnnnnnnnnnnnnnnnnnnnnnnnnnnnnnnnnnnnnnnnnnnnnnnnnnnnnnnnnnnnnnnnnnnnnnnnnnnnnnnnnnnnnnnnnnnnnnnnnnnnnnnnnnnnnnnnnnnnnnnnnnnnnnnnnnnnnnnnnnnnnnnnnnnnnnnnnnnnnnnnnnnnnnnnnnnnnnnnnnnnnnnnnnnnnnnnnnnnnnnnnnnnnnnnnnnnnnnnnnnnnnnnnnnnnnnnnnnnnnnnnnnnnnnnnnnnnnnnnnnnnnnnnnnnnnnnnnnnnnnnnnnnnnnnnnnnnnnnnnntctgaggctgtgatgggacttggagaccccagaagcacaacgctagcctatgatgcctccagcatccagtaccggaaagcccgtttgcccagacatagttttggccgaaatgctctggaacgacatgtggcacaaaagaaaagtcgcctgaggagtcgcgacctcccaactgaaaatcaccatccctgacttgactgatgtcaatgccatagatcggtggtcccgcatattcttcccagtggttttttccttcttcaacatcgtctattggctttattatgtgaactaa

SEQ ID NO: 24546 - DNA, 145 bp, Macaca Mulatta
aaggtgctggggatacgtcagaagtgatggatactcaggcgggctccgtggatgaagagaatggccgacagttgggtgaagtagagctgcaatgtgggatttgtacaaaatggttcacggctgacacatttggcatagatacctc

SEQ ID NO: 24547 - DNA, 787 bp, Macaca Mulatta
  misc_feature (1)...(787): n = A,T,C or G
ggtatccaaaacatttttggagcgttttaaagccccatacacagacgtatacgaaagcacacagaacactccagctttcagcagttttggcgccaccgttaacccactttgcttgtctcatgaaaaatctctgttaaagtatgtacatgggcgacaaaaagttacttttaaagatccataaagggctgtaggctaattgtggtgtctagtaagtagcataatgagatgtgaggagttgggactttgcgtgttttgcgtattttcgtctgcattcagcttcttactctgggtttgtactcgagtgttatttctttacaaatgcccttgtaattaccactctgaagtctgctgactgtgtctcttgaacatacttaggatattctgcacattatggaaaaaggtaaattttataagtttctgctctactaactgtagatatttatgactctgcgagttatctatttttataaccacctgtggtccattgttcattttaattcacatttcttacaaagtgtggtaacagggagggagacacctagactagaagctcaatttgtacaacttcagccaatctgtgaatgtaaaaactacactgttgccttgctaggatccaccctcctataatgtggaacaactatcncgaatgaaatccaccctaggagatggagtcaaactaaacttgtggttttttcatttaactttttgactattacatgggccccatgggcatccacaccaaagaggaagtggttgtcgatgnaggtgcccggtgntgcaaaagggc

SEQ ID NO: 24548 - DNA, 890 bp, Macaca Mulatta
gctgtagcttgtatatatgtttcccttctttgaaaatgtgtgcttggaaaaattgattgcagaagctctaaaatagccatgaaatcagtagcaaattttctcttagatgtactaattaatgagatgctgctatatgtttttcttttagggaaaacataaaacagatagtaaaactccttgcaagtgttcgagctttggatcatgctatgtctgttgcaagtgaccacaatgtgaaagaatttaagtctttgattgaaggaaaatagatctgtgagactgaaaaacctatttgcttgattaccattcccaatgtgtaaattttgtatatatgtaaagtttcttaaactgtaaaatagcgattcttgttttaatacaaaaaacattatattcaatactgtgtccttaaatgatatttcttcagaatgaaaggaattcagattatttctaggagtctatgaatgtttactgcctatcatactttgtttacagaagtattttgtatggtcatttaaattaaccctctcagttaattgtcccctgtaaacgatgtgtgcagtgtaaattgtgtaattatgcatatatatatttataccaccatggatttactttcacactggaaatttgtggtgtttttctacagaggaagccttttaacagcagaaaattatccggtagcaaattgtcttagggaaattactacactgttgtaacaaaagggctggcaagtgactaaatgttcattaccttttggttagcgttgctatcactgtagctgtgctgccttaacattgagagttgagttgtggacttagtcgttgagtgaatgttgaacttttttccttgaatcagcgttagagtcaaatgtgggtttaatgtgaatgctaaatgat

SEQ ID NO: 24549 - DNA, 2802 bp, Macaca Mulatta
  misc_feature (1)...(2802): n = A,T,C or G
ggtggctctggtaggcgaggaggaaggttttctgctcaaggaatgggngaaccttttacccagctgattatgcagagccagccaatactgatgataactatggcaatagtagcggcaatacgtggaacaacacnnnnnnnnnnnnnnnnnnnnnnnnnnnnnnnnnnnnnnnnnnnnnnnnnnnnnnnnnnnnnnnnnnnnnnnnnnnnnnnnnnnnnnnnnnnnnnnnnnnnnnnnnnnnnnnnnnnnnnnnnnnnnnnnnnnnnnnnnnnnnnnnnnnnnnnnnnnnnnnnnnnnnnnnnnnnnnnnnnnnnnnnnnnnnnnnnnnnnnnnnnnnnnnnnnnnnnnnnnnnnnnnnnnnnnnnnnnnnnnnnnnnnnnnnnnnnnnnnnnnnnnnnnnnnnnnnnnnnnnnnnnnnnnnnnnnnnnnnnnnnnnnnnnnnnnnnnnnnnnnnnnnnnnnnnnnnnnnnnnnnnnnnnnnnnnnnnnnnnnnnnnnnnnnnnnnnnnnnnnnnnnnnnnnnnnnnnnnnnnnnnnnnnnnnnnnnnnnnnnnnnnnnnnnnnnnnnnnnnnnnnnnnnnnnnnnnnnnnnnnnnnnnnnnnnnnnnnnnnnnnnnnnnnnnnnnnnnnnnnnnnnnnnnnnnnnnnnnnnnnnnnnnnnnnnnnnnnnnnnnnnnnnnnnnnnnnnnnnnnnnnnnnnnnnnnnnnnnnnnnnnnnnnnnnnnnnnnnnnnnnnnnnnnnnnnnnnnnnnnnnnnnnnnnnnnnnnnnnnnnnnnnnnnnnnnnnnnnnnnnnnnnnnnnnnnnnnnnnnnnnnnnnnnnnnnnnnnnnnnnnnnnnnnnnnnnnnnnnnnnnnnnnnnnnnnnnnnnnnnnnnnnnnnnnnnnnnnnnnnnnnnnnnnnnnnnnnnnnnnnnnnnnnnnnnnnnnnnnnnnnnnnnnnnnnnnnnnnnnnnnnnnnnnnnnnnnnnnnnnnnnnnnnnnnnnnnnnnnnnnnnnnnnnnnnnnnnnnnnnnnnnnnnnnnnnnnnnnnnnnnnnnnnnnnnnnnnnnnnnnnnnnnnnnnnnnnnnnnnnnnnnnnnnnnnnnnnnnnnnnnnnnnnnnnnnnnnnnnnnnnnnnnnnnnnnnnnnnnnnnnnnnnnnnnnnnnnnnnnnnnnnnnnnnnnnnnnnnnnnnnnnnnnnnnnnnnnnnnnnnnnnnnnnnnnnnnnnnnnnnnnnnnnnnnnnnnnnnnnnnnnnnnnnnnnnnnnnnnnnnnnnnnnnnnnnnnnnnnnnnnnnnnnnnnnnnnnnnnnnnnnnnnnnnnnnnnnnnnnnnnnnnnnnnnnnnnnnnnnnnnnnnnnnnnnnnnnnnnnnnnnnnnnnnnnnnnnnnnnnnnnnnnnnnnnnnnnnnnnnnnnnnnnnnnnnnnnnnnnnnnnnnnnnnnnnnnnnnnnnnnnnnnnnnnnnnnnnnnnnnnnnnnnnnnnnnnnnnnnnnnnnnnnnnnnnnnnnnnnnnnnnnnnnnnnnnnnnnnnnnnnnnnnnnnnnnnnnnnnnnnnnnnnnnnnnnnnnnnnnnnnnnnnnnnnnnnnnnnnnnnnnnnnnnnnnnnnnnnnnnnnnnnnnnnnnnnnnnnnnnnnnnnnnnnnnnnnnnnnnnnnnnnnnnnnnnnnnngcacacaagtgtggagagtgaggcgaatctccattcttcctccagcactttttccaccacatccagcacagtctctgcacctcccccagtggtcagtgtctcctccagtctcaatagtggcagtagcctgggcctcagcctaggcagcaactccactgtcacagcctcgactcgaagctcagttgctacgacttcagnnnnnnnnnnnnnnnnnnnnnnnnnnnnnnnnnnnnnnnnnnnnnnnnnnnnnnnnnnnnnnnnnnnnnnnnnnnnnnnnnnnnnnnnnnnnnnnnnnnnnnnnnnnnnnnnnnnnnnnnnnnnnnnnnnnnnnnnnnnnnnnnnnnnnnnnnnnnnnnnnnnnnnnnnnnnnnnnnnnnnnnnnnnnnnnnnnnnnnnnnnnnnnnnnnnnnnnnnnnnnnnnnnnnnnnnnnnnnnnnnnnnnnnnnnnnnnnnnnnnnnnnnnnnnnnnnnnnnnnnnnnnnnnnnnnnnnnnnnnnnnnnnnnnnnnnnnnnnnnnnnnnnnnnnnnnnnnnnnnnnnnnngcgctgcctcctggctacagttacaccagcctgccatactatacaggggtcccgggcctccccagcaccttccagtatgggcctgctgtgttccctgtgngtggctcctacctcttccaagcagcatggtgtgaatgtcagtgtgaatgcatcggccacccctttccaacagccgagtggatatgggtctcatggatacaacactggngaagaaaatatccacccccttacaagcatttctggacggctgagagctaatttggcccaaggctgggggctatgttttgtgtgtgtgtataaatttgcactgaagtcttgtttcagaaaccagaccactgaggagagcctgctgagctgaggccatggcctgcgtggcttggggaaatgagttggtggataccttctgggcttttgaacttgcccctcccccatttccctctcccccatgtgtctgaccctgtcttacccatttcaagttcaagcggtgcagcaccttcgaagcatcaatgcacacacccgctgttgcttttgatttctggaaggcatgtagtttcaacttggaacaaaaatatttgtagtcttcaataaactgtggtatttctttagctaac

SEQ ID NO: 24550 - DNA, 1125 bp, Macaca Mulatta
  misc_feature (1)...(1125): n = A,T,C or G
acgagcgccctctggaggaccagctggaaaattggtgttgtcgtcgctgcaaattctgtcacgtttgtggaaggcaacatcaggctacaaaggtacaaaacttggtaatagaactacagctggacctctgtgtcagtgggttctgtatccctggactcaaccaatcttggattgattatatctgggaaaaaattagtagttgcctctgtactctacgtgaacagactttttcttgtcattatttgctaaacaatacagtataacaactatttacattgtattaggtatgataagtaatctagagataatttaaagtatatggcgagcagatcacttgaggccaggagttcgagaccatctgagctnnnnnnnnnnnnnnnnnnnnnnnnnnnnnnnnnnnnnnnnnnnnnnncgtggtggtggtcannnnnnnnnnnnnnnnnnnnnnnnnnnnnnnnnnnnaaatctcttgaactttggactnnnnnnnnnnnnnnnnnnnctccagcctgtggtgcagtctgtcacgnnnnnnnnnnnnnnnnnnnnnnnnnnnnnnnnnnnnnnnnnnnngtatatgggaggatgtgcattttcttatatgcaaatgctgcaccattttgtctaagggacttgagcatccatggactttggtatcctctgggggtcctggaaccaatccctcacggaaatcaagggtgactgtgcttagagtattgctttctttttcgatctctatttctgtcttccagttaagattttgtatctatattatttctctttttgcttagtctgtctttagtatttaattgggtgtcatcagttgcctattttgtgttttaattttggaacaatggcagaaaacatgatactgaataaaattccaaaaataagtcaaatctccctagtaagaatgctgatcaccaagtgcctttggcaggagtaaataatgcgtgaggaaattaaaacttacagttgtgtgctctacttacttgccagtaaatgtgaaatggggtgctaaataataggtgttgggtgaaggtaatatgatgctcatcattttgccattatattttcttacagcagctgctggagtgtaataagtgccgaaacagctatcaccct

SEQ ID NO: 24551 - DNA, 868 bp, Macaca Mulatta
  misc_feature (1)...(868): n = A,T,C or G
gggttcatagggatgttacaatataattttgtgttataaaatatgccattataattatgtaataaccaaaatttcaacctagagtgtttggggttttttggaaactgcagtctattagtacttaatggttttatacaccttccttctgacgagcagggcgtatgctacaacttttatagctgttttggtaatttaaactaattttttcatattatattgttgcatccctacttcttcagtcaggtttttttgtgcttacaatttgtgataactgtgaataactgcttaaaaatacacccaaatggaggctgaattttttcttcagcaaaagtagttttgattagaactttgtttcaggccatagagaatcatgtaaacataataggatcatgtagcagaaacttanatctaaccctctagccttctatttaacacnnnnnnnnnnnnnnnnnnnnnnnnnnnnnnnnnnnnnntgtgactatgcttacggctgcaggactctggcaatagggtttttggaagatgtaattttaaaatgggtttgcatgaactgtttgtttacatttctttaataaaaaaaaacactgcttttgtggtttccttgcaaaaaacttcattcaccctttttgcaaccaggttagccctttttatttttcaacccacaaattcccgggacctgaccccttccccaggggtttaagtataaaaatggaaaagttttggttgcggccacaatttcaacgttggagcctggaaaaactcgctttgccaatatatttcacggggtgtgcgaacactcccctgaaaacttgtcttcatacgcggcctttgaatggccactttttctgtcactccctcacacacccaa

SEQ ID NO: 24552 - DNA, 1591 bp, Macaca Mulatta
  misc_feature (1)...(1591): n = A,T,C or G
agtttacgtttaataaggaggagacctgtaagcttgtttgtacaaaaacataccatacagagaaagctgaagacaaacaaaagttagaattcttgaaaaaaagcatgttattgaattatcagcatcactgnnnnnnnnnnnnnnnnnnnnnnnnnnnnnnnnnnnnnnnnnnnnnnnnnnnnnnnnnnnnnnnnnnnnnnnnnnnnnnnnnnnnnnnnnnnnnnnnnnnnnnnnnnnnnnnnnnnnnnnnnnnnnnnnnnnnnnnnnnnnnnnnnnnnnnnnnnnnnnnnnnnnnnnnnnnnnnnnnnnnnnnnnnnnnnnnnnnnnnnnnnnnnnnnnnnnnnnnnnnnnnnnnnnnnnnnnnnnnnnnnnnnnnnnnnnnnnnnnnnnnnnnnnnnnnnnnnnnnnnnnnnnnnnnnnnnnnnnnnnnnnnnnnnnnnnnnnnnnnnnnnnnnnnnnnnnnnnnnnnnnnnnnnnnnnnnnnnnnnnnnnnnnnnnnnnnnnnnnnnnnnnnnnnnnnnnnnnnnnnnnnnnnnnnnnnnnnnnnnnnnnnnnnnnnnnnnnnnnnnnnnnnnnnnnnnnnnnnnnnnnnnnnnnnnnnnnnnnnnnnnnnnnnnnnnnnnnnnnnnnnnnnnnnnnnnnnnnnnnnnnnnnnnnnnnnnnnnnnnnnnnnnnnnnnnnnnnnnnnnnnnnnnnnnnnnnnnnnnnnnnnnnnnnnnnnnnnnnnnnnnnnnnnnnnnnnnnnnnnnnnnnnnnnnnnnnnnnnnnnnnnnnnnnnnnnnnnnnnnnnnnnnnnnnnnnnnnnnnnnnnnnnnnnnttttcgcttgcctgggatttttgtcacctgccaaccgaggagcgctgatgacgtgtgctgtggtcctgtgggtgctgctgggcacccctgcaggctatgttgctgccagattctataagnnnnnnnnnnnnnnnnnnnnnnnnnnnnnnnnnnnnnnnnnnnnnnnnnnnnnnnnnnnnnnnnnnnnnnnnnnnnnnnnnnnnnnnnnnnnnnnnnnnnnnnnnnnnnnnnnnnnnnnnnnnnnnnnnnnnnnnnnnnnnnnnnnnnnnnnnnnnnnnnnnnnnnnnnnnnnnnnnnnnnnnnnnnnnnnnnnnnnnnnnnnnnnnnnnnnnnnnnnnnnnnnnnnnnnnnnnnnnnnnnnnnnnnnnnnnnnnnnnnnnnnnnnnnnnnnnnnnnnnnnnnnnnnnnnnnnnnnnnnnnnnnnnnnnnnnnnnnnnnnnnnnnnnnnnnnnnnnnnnnnnnnnnnnnnnnnnnnnnnnnnnnnnnnnnnnnnnnnnnnnnnnnnnnnnnnnnnnnnnnnnnnnnnnnnnnnnnnnnnnnnnnnnnnnnnnnnnnnnnnnnnnnnnnnnnnnnnnnnnnnnnnnnnnnnnnnnnnnnnnggattatcattggcaatggcgttcattccttaccagcggctttactgcagtttatttcttaatatatgcagtacattacttcttttcaaaactacagatcacaggaacagcaagcacaattctgtactttggttataccatgataatggttttgatcttctttctttttacagg

SEQ ID NO: 24553 - DNA, 807 bp, Macaca Mulatta
gggtctcatttttcaatgtcacaaaccatggagcactcatctacaagttctctggatgtcgcttttctcaacctgcttatccgtatttcaatccttggaactgccaagtccccatgaccctgtgccaaccgagctcctgagtgttctcattcccttacctatttctgcatagtagcccttgtgctgagattcagattctgcacctgagttcatctccactgagaccatctcttcctttctttccccttctttacttagaatgtctttgtattcatttgctagggcttccaaaacaaagcatcatagactgctgatttaaactgtaattgtaattgttgtactgtgggctggaaatccaaaatctagattccagcaagagttggttctacttctgaagtctgcaaggaagggctttgttccatgcctctctccttgacttgtagacaacatcttctacctatgaactcttcacattgtctgtaggtacatctctgtgcccaagttttcccttttcattaagacaccagtcatactggctcagggcccaaccgctaatgccttaatgaaatccttttaaacattaaatcctccacaaaaaacccttatttccaaataagggaaataatttgggaggtatttggggaattaaaaaacctccaacattaataaattttaagggaagttcccaatattttaaacttggtaaacaaacctataaccccttttctttggaaagaaaaaaggcttgggtaacaattaaattatttccccaaagaaacccttgtgggattctacaacataaaaaac

SEQ ID NO: 24554 - DNA, 174 bp, Macaca Mulatta
acgagttacagacaaacatcaccgtaaatgactcacaacattataaacagttgtgagaaaatatttcacattatcaaagctgtacaataaaaaggtaatgtttgtataatgtggttgcaaactcttaatttatactattgcacttttagtattttgtattagggaggtttgtct

SEQ ID NO: 24555 - DNA, 477 bp, Macaca Mulatta
tccttcagccgacaaattactccaatccagaatatgcaaaattatatatggatgggcaaaactgtcgaaactccttaggaagtgttgatgaaaggaaagaactgcttccaaagaaaatagaaattggtataagagagacagtggcataatcagtgataccttttatatgctgtataaatgtataaaatatagggattacttttgtatgtgccaatagttattatacttgttttggcatcagcattacctctttctttatctttttcctggttaattgttttctgagttgttgggtttatgttttgctgatgactattgattgaccatttgtatggaatttttatgatgaagaactgcactacaatacaatttacaacaatgctgctgatatgacacacctttgaatttgtcacaattacaagcaacatattcctttgtagtgtgaatataagcaatctattttatatgaactttttt

SEQ ID NO: 24556 - DNA, 4141 bp, Macaca Mulatta
  misc_feature (1)...(4141): n = A,T,C or G
gcctcagacattccacagctacctagaggacatcatcaactaccgctgggagctcgaggaagggaagcccaaccctctgagggaagccagtttccaggacctgcctcttcgcacacgggtggagatcctgcaccgcctctgtgattaccggctggatgcagacgatgtcttcgatcttctaaaggnnnnnnnnnnnnnnnnnnnnnnnnnnnnnnnnnnnnnnnnnnnnnnnnnnnnnnnnnnnnnnnnnnnnnnnnnnnnnnnnnnnnnnnnnnnnnnnnnnnnnnnnnnnnnnnnnnnnnnnnnnnnnnnnnnnnnnnnnnnnnnnnnnnnnnnnnnnnnnnnnnnnnnnnnnnnnnnnnnnnnnnnnnnnnnnnnnnnnnnnnnnnnnnnnnnnnnnnnnnnnnnnnnnnnnnnnnnnnnnnnnnnnnnnnnnnnnnnnnnnnnnnnnnnnnnnnnnnnnnnnnnnnnnnnnnnnnnnnnnnnnnnnnnnnnnnnnnnnnnnnnnnnnnnnnnnnnnnnnnnnnnnnnnnnnnnnnnnnnnnnnnnnnnnnnnnnnnnnnnnnnnnnnnnnnnnnnnnnnnnnnnnnnnnnnnnnnnnnnnnnnnnnnnnnnnnnnnnnnnnnnnnnnnnnnnnnnnnnnnnnnnnnnnnnnnnnnnnnnnnnnnnnnnnnnnnnnnnnnnnnnnnnnnnnnnnnnnnnnnnnnnnnnnnnnnnnnnnnnnnnnnnnnaggagactcctgtgctgaccagaatagaaaaacaaaagcgcaaagaggaggaagaagagcgtcagattcttctagcagtgcagaagaaggagcaggagcagatgctgaaggaagagaggaaacgcgagttggaggagaaggtcaaggcagtggaaggtatgtgcagtgaccgcgtggtctggagaggtgcgtgtctgtggaccagccncctttgtgttcgttgtagatcgagcgaagaggagaaagctcagggaagaaagggcatggctgctggctcaagggaaggagctccctccagaactttcccatctggaccccaattcccccatgagagaggnnnnnnnnnnnnnnnnnnnntttgagttggacgatgatttcactgctatgtataaagnagttctagacgtggtaaaggctcacaaggattcctggccctttttggaacctgtggatgaatcttatgcccctaactattatcagattattaaggnaggcccccatggatatttccagcatggagaagaaactgaatggaggtttatactgtaccaaggaggaatttgtaaatgacatgaagaccatgttcaggaattgtcgaaagtataatggggaaagtagtgngagtataccaagatgtctgataatttagagaggtgtttccatcgggccatgatgaaacattttcctggtgaagatggagacacagatgaagaattctggattcgagaggatgaaaagcgggagaagagacggagtcgggctgggcgaagtggtgggagccatgtttggacccgctccagggacccagaagggcccagcaggaaacagcagcccgtggagaatggaggaaagtcgttgcccccgacacgccgagccccctcttctggggacgaacagagcagcagctccgcacagcccgcgcgggaggtgggcacttccaatggccgaggcttttctcatcccctgcattgcggtgggacgcccagccaggcaccctttttaaaccagatgnnnnnnnnnnnnnnnnnnnnnnnnnnnnnnnnnnnnnnnnnnnnnnnnnnnnnnnnnnnnnnnnnnnnnnnnnnnnnnnnnnnnnnnnnnnnnnnnnnnnnnnnnnnnnnnnnnnnnnnnnnnnnnnnnnnnnnnnnnnnnnnnnnnnnnnnnnnnnnnnnnnnnnnnnnnnnnnnnnnnnnnnnnnnnnnnnnnnnnnnnnnnnnnnnnnnnnnnnnnnnnnnnnnnnnnnnnnnnnnnnnnnnnnnnnnnnnnnnnnnnnnnnnnnnnnnnnnnnnnnnnnnnnnnnnnnnnnnnnnnnnnnnnnnnnnnnnnnnnnnnnnnnnnnnnnnnnnnnnnnnnnnnnnnnnnnnnnnnnnnnnnnnnnnnnnnnnnnnnnnnnnnnnnnnnnnnnnnnnnnnnnnnnnnnnnnnnnnnnnnnnnnnnnnnnnnnnnnnnnnnnnnnnnnnnnnnnnnnnnnnnnnnnnnnnnnnnnnnnnnnnnnnnnnnnnnnnnnnnnnnnnnnnnnnnnnnnnnnnnnnnnnnnnnnnnnnnnnnnnnnnnnnnnnnnnnnnnnnnnnnnnnnnnnnnnnnnnnnnnnnnnnnnnnnnnnnnnnnnnnnnnnnnnnnnnnnnnnnnnnnnnnnnnnnnnnnnnnnnnnnnnnnnnnnnnnnnnnnnnnnnnnnnnnnnnnnnnnnnnnnnnnnnnnnnnnnnnnnnnnnnnnnnnnnnnnnnnnnnnnnnnnnnnnnnnnnnnnnnnnnnnnnnnnnnnnnnnnnnnnnnnnnnnnnnnnnnnnnnnnnnnnnnnnnnnnnnnnnnnnnnnnnnnnnnnnnnnnnnnnnnnnnnnnnnnnnnnnnnnnnnnnnnnnnnnnnnnnnnnnnnnnnnnnnnnnnnnnnnnnnnnnnnnnnnnnnnnnnnnnnnnnnnnnnnnnnnnnnnnnnnnnnnnnnnnnnnnnnnnnnnnnnnnnnnnnnnnnnnnnnnnnnnnnnnnnnnagcagagccgttgcctggccttgaagagaagccagcaagtgttggtacttcagagggcatatacctcaaacaactacctcaccccacgcctcccctgcagactgactgcaccaggcagagctcaccacaagagaacgggaaacagtgggggcccggagctcaaaagcaactcctccgaatctgcggacagctgtaaagccaccaagggcaagaatccctggccctcggatagcagctaccctggcccagccgcccaagggtgcatgagagacctctccacggtggcagacaggggcactcttcccgagaacggagtcactggggaagcgtctccttgtggatcagaggggaagggccttggtagcagtggttctgaaaagctactctgccccagaggcagaacgtttcaggaaaccatgccatgcacaggacagaacgcgacgacaccgcccagcacagaccccggtttgatgggaggcactgtgagccagttttccccgctgtacgtgcctggcctggagtacccgaattcagccgcccattaccacatcagtccgggcctgcagggtgtgggcgctgtgatgggagggaagtccccagcatcccatccccagcatttccccccaagaggctttcagtctaaccacgctcattctggaggctttccccggtatcgccccccacaaggaatgaggtattcctaccacccaccaccgcagccttcctaccaccactatcagcgaactccttactatgcgtgtccacagagcttttcggactggcagagacctctgcatccccagggaagccccggcgggcccccagccagtcagcctcccccaccgaggtccctcttctcagataagaatgccatggccagtctgcaaggctgtgagacgctgcatgctgccttaacttctccaacccgtatggatgcagtggctgctaaagtccccaatgacgggcagaatcctggtccggaggaagagaagctggatgaatctctggagaggccagagagtcccaaagagtttttagacctggacaacataacgccgccaccaagcgcagagctcgttgtcagccagcgagtatctctatggaactccaccctccgcctctgagttcggggatgggnnnnnnnnnnnnnnnnnnnnnnnnnnnnngtgtgatgctgcagccagggcctccctatacacctcagcggccggccagtcactttcagcccagggcttactcctcccctgtggctgcccacccgcctcaccacccaggggccacccagcccaacggcctctctcaggagggtcccatctatcgctgccaggaagagggcctgggtcactttcaagctgtgatgatggaacaaattggcactagaagtggaataaggggacctttccaggaaatgtacagaccatcagg

SEQ ID NO: 24557 - DNA, 140 bp, Macaca Mulatta
caggtctataattcagcaggcagatctttccctcgaaggtttgttttgcctttaaatgtcagtttgaatgcccctgagggagacaacctgagtccattgtcctatacttcagccagtgctgtgaaacaggctgatggaac

SEQ ID NO: 24558 - DNA, 1200 bp, Macaca Mulatta
  misc_feature (1)...(1200): n = A,T,C or G
cctgcatcatccgggcctgggaccgcagcaagcccctgctcttctgcccggccatgaacaccgccatgtgggagcaccctatcacagcgcagcaggtagaccagctcaaggccttcggctatgtcgagatcccctgtgtggccaagaagctggtgtgtggagacgaaggtnnnnnnnnnnnnnnnnnnnnnnnnnnnnnnnnnnnnnnnnnnnnnnnnnnnnnnnnnnnnnnnnnnnnnnnnnnnnnnnnnnnnnnnnnnnnnnnnnnnnnnnnnnnnnnnnnnnnnnnnnnnnnnnnnnnnnnnnnnnnnnnnnnnnnnnnnnnnnnnnnnnnnnnnnnnnnnnnnnnnnnnnnnnnnnnnnnnnnnnnnnnnnnnnnnnnnnnnnnnnnnnnnnnnnnnnnnnnnnnnnnnnnnnnnnnnnnnnnnnnnnnnnnnnnnnnnnnnnnnnnnnnnnnnnnnnnnnnnnnnnnnnnnncttttcctggatgggcgaggcaagccaggagagcaagcagtgttgtcctcactggaggaggactgagcgactgggaaaactcggctctacatctcacccagaatgacttttagaaacaccacagctggagagtcctggctgagccttgggagcttcagctctttggcggggtgcccagatgccatgcgatcagcgaagcctgcgagttggcaggactctgaggtttcctgcagaccatgccatgagattgaaggtgcggggaaataaagaacaatcaccgtttaggaggctccattctttccctataacccaactgtggtcccagagaccagggggtgttgccaggtgtggctggggaagggtctgggttgatgactcactggtactctttagtccccatataacatggtggttaaggataaagttctgaagccagaaagcccctagttccaatcccagctctgccacttactggcagtgggagtttggttcaggacttagccttcctgaccttcactttcctcagctatcttgtttcctaccctcagggagttgttgagaggattcggtgaaattatgtgtgcaaaatacccatgccactgagtgcctggaacatagtaaatgtcaaatcaatggaagttaaaactaggcatgcttatatgccagagagctttcctaacatttactgcaatgccccatctcattttgggaaaaagaaaatcc

SEQ ID NO: 24559 - DNA, 739 bp, Macaca Mulatta
ggtaaggaaggagaacagcaggaattattcagccagtgtgttcggtacagactggctcatcatggaaacctccttataatatgattaatagtatgaatatttgtttttatgtttccaacctcaggtgccagatgtgacatccagatgacgcagtctccatcctccctgtctgcatctgtaggagacagagtcaccatcacttgccgggcgagtcagggcattaacaattatttaagttggtatcagcagaaaccagggaaagcccctaagcccctgatctattatgcatccagtttggaaacaggggtaccatcaaggttcagtggaagtagatctgggacagattatactctcaccatcagcagtctgcagcctgaagatattgcaacatattactgtcaacagtataataattcccctcccacagtgttacaagtcataacataaatcacccagcggagcagatgtgtgaggctcagtggtcccagatgccccttctggtgcctccacctgctgagagtgtttctcaaatcgcagtcacactttgaaggtcactggagagtttttgtaaaagagccatgaaggcccacttactcatagctgtctttccttgtcctaatccccagtagcacagacagggcaatgcttctgatttcattgagaagaaaggattacacctgaggagtctgagttgtggcatcagttggaattcatacagcaaaaatgagacactctaggt

SEQ ID NO: 24560 - DNA, 617 bp, Macaca Mulatta
cattccattgcacttccatttaaaatatgatacaaaatgctttttttctcaaaaatgaaaaacgtaagaggaaaagtctatgtccctttcaaactgtggaactttcatagctgaatgtcttagatatatgctacattatcttatccctagataaaaaaataaccttatccattcttgtattttactctctggcctgttacaattttatattagaaatacctgtttcttttcctgtaacactaatcatctttcatttttatattttgaacagtgttatttacttgtctactacaccggctggaggaatgtcaaatcttttttgacttttggcttaatatgtctatgcaacatgtatctctatgaactgcgcaacctctggcagcttttctttcatgtgactgtgggagcatttgttacactacagatctggctaaggcaagcccagggcaaggctcccgattatgatgtctgacaccatccttcagatctattgccttggcttcagggggaaaaggagggaacatatcataactgccactgtgatgaagaagctgttccccacaaaggagaagctctgctttctttctctccaactttccttttttaaaatcagcatg

SEQ ID NO: 24561 - DNA, 7126 bp, Macaca Mulatta
  misc_feature (1)...(7126): n = A,T,C or G
gtcttgcccagaagatcgttgcaacctaccgcctgtgctcggaacaactgtcctctcagcatcactatgactacggcatgcgtgctgtcaagtctgtgcttactgctgcaggaaacctgaagctcaagtatccagaggagaacgaaagtgtcctgttgctccgggcattgcttgatgtcaacctggccaagttcttagcgcaagatgtccctctgtttcaggnnnnnnnnnnnnnnnnnnnnnnnnnnnnnnnnnnnnnnnnnnnnnnnnnnnnnnnnnnnnnnnnnnnnnnnnnnnnnnnnnnnnnnnnnnnnnnnnnnnnnnnnnnnnnnnnnnnnnnnnnnnnnnnnnnnnnnnnnnnnnnnnnnnnnnnnnnnnnnnnnnnnnnnnnnnnnnnnnnnnnnnnnnnnnnnnnnnnnnnnnnnnnnnnnnnnnnnnnnnnnnnnnnnnnnnnnnnnnnnnnnnnnnnnnnnnnnnnnnnnnnnnnnnnnnnnnnnnnnnnnnnnnnnnnnnnnnnnnnnnnnnnnnnnnnnnnnnnnnnnnnnnnnnnnnnnnnnnnnnnnnnnnnnnnnnnnnnnnnnnnnnnnnnnnnnnnnnnnnnnnnnnnnnnnnnnnnnnnnnnnnnnnnnnnnnnnnnnnnnnnnnnnnnnnnnnnnnnnnnnnnnnnnnnnnnnnnnnnnnnnnnnnnnnnnnnnnnnnnnnnnnnnnnnnnnnnnnnnnnnnnnnnnnnnnnnnnnnnnnnnnnnnnnnnnnnnnnnnnnnnnnnnnnnnnnnnnnnnnnnnnnnnnnnnnnnnnnnnnnnnnnnnnaggtgtggaatgatctacatggagccccatcagctaggctggaagcctctgaaggattcctacatggacaccctgccctccagtctcactgaggagcacaaggaattggtnnnnnnnnnnnnnnnnnnnnnnnnnnnnnnnnnnnnnnnnnnnnnnnnnnnnnnnnnnnnnnnnnnnnnnnnnnnnnnnnnnnnnnnnnnnnnnnnnnnnnnnnnnnnnnnnnnnnnnnnnnnnnnnnnnnnnnnnnnnnnnnnnnnnnnnnnnnnnnnnnnnnnnnnnnnnnnnnnnnnnnnnnnnnnnnnnnnnnnnnnnnnnnnnnnnnnnnnnnnnnnnnnnnnnnnnnnnnnnnnnnnnnnnnnnnnnnnnnnnnnnnnnnnnnnnnnnnnnnnnnnnnnnnnnnnnnnnnnnnnnnnnnnnnnnnnnnnnnnnnnnnnnnnnnnnnnnnnnnnnnnnnnnnnnnnnnnnnnnnnnnnnnnnnnnnnaggaagcatctatgatttttatttcatcaaacaagctggtggacattgggaaatgtggacacagtatatcaccaaagaggaggaaaaaattccagctggtgcaaaggnnnnnnnnnnnnnnnnnnnnnnnnnnnnnnnnnnnnnnnnnnnnnnnnnnnnnnnnnnnnnnnnnnnnnnnnnnnnnnnnnnnnnnnnnnnnnnnnnnnnnnnnnnnnnnnnnnnnnnnnnnnnnnnnnnnnnnnnnnnnnnnnnnnnnnnnnnnnnnnnnnnnnnnnnnnnnnnnnnnnnnnnnnnnnnnnnnnnnnnnnnnnnnnnnnnnnnnnnnnnnnnnnnnnnnnnnnnnnnnnnnnnnnnnnnnnnnnnnnnnnnnnnnnnnnnnnnnnnnnnnnnnnnnnnnnnnnnnnnnnnnnnnnnnnnnnnnnnnnnnnnnnnnnnnnnnnnnnnnnnnnnnnnnnnnnnnnnnnnnnnnnnnnnnnnnnnnnnnnnnnnnnnnnnnnnnnnnnnnnnnnnnnnnnnnnnnnnnnnnnnnnnnnnnnnnnnnnnnnnnnnnnnnnnnnnnnnnnnnnnnnnnnnnnnnnnnnnnnnnnnnnnnnnnnnnnnnnnnnnnnnnnnnnnnnnnnnnnnnnnnnnnnnnnnnnnnnnnnnnnnnnnnnnnnnnnnnnnnnnnnnnnnnnnnnnnnnnnnnnnnnnnnnnnnnnnnnnnnnnnnnnnnnnnnnnnnnnnnnnnnnnnnnnnnnnnnnnnnnnnnnnnnnnnnnnnnnnnnnnnnnnnnnnnnnnnnnnnnnnnnnnnnnnnnnnnnnnnnnnnnnnnnnnnnnnnnnnnnnnnnnnnnnnnnnnnnnnnnnnnnnnnnnnnnnnnnnnnnnnnnnnnnnnnnnnnnnnnnnnnnnnnnnnnnnnnnnnnnnnnnnnnnnnnnnnnnnnnnnnnnnnnnnnnnnnnnnnnnnnnnnnnnnnnnnnnnnnnnnnnnnnnnnnnnnnnnnnnnnnnnnnnnnnnnnnnnnnnnnnnnnnnnnnnnnnnnnnnnnnnnnnnnnnnnnnnnnnnnnnnnnnnnnnnnnnnnnnnnnnnnnnnnnnnnnnnnnnnnnnnnnnnnnnnnnnnnnnnnnnnnnnnnnnnnnnnnnnnnnnnnnnnnnnnnnnnnnnnnnnnnnnnnnnnnnnnnnnnnnnnnnnnnnnnnnnnnnnnnnnnnnnnnnnnnnnnnnnnnnnnnnnnnnnnnnnnnnnnnnnnnnnnnnnnnnnnnnnnnnnnnnnnnnnnnnnnnnnnnnnnnnnnnnnnnnnnnnnnnnnnnnnnnnnnnnnnnnnnnnnnnnnnnnnnnnnnnnnnnnnnnnnnnnnnnnnnnnnnnnnnnnnnnnnnnnnnnnnnnnnnnnnnnnnnnnnnnnnnnnnnnnnnnnnnnnnnnnnnnnnnnnnnnnnnnnnnnnnnnnnnnnnnnnnnnnnnnnnnnnnctctttgccgacaatcagatcaaggacgagtcatttgtggaggatatcaacatgcttctgaacacaggcgatgtgcctaacatcttccctgctgatgagaaggctgacattgtggagaagatgcagacggcagctagggcccaaggagagaaggttgaagccactcctctttctatgtataacttctttattgagagggnnnnnnnnnnnnnnnnnnnnnnnnnnnnnnnnnnnnnnnnnnnnnnnnnnnnnnnnnnnnnnnnnnnnnnnnnnnnnnnnnnnnnnnnnnnnnnnnnnnnnnnnnnnnnnnnnnnnnnnnnnnnnnnnnnnnnnnnnnnnnnnnnnnnnnnnnnnnnnnnnnnnnnnnnnnnnnnnnnnnnnnnnnnnnnnnnnnnnnnnnnnnnnnnnnnnnnnnnnnnnnnnnnnnnnnnnnnnnnnnnnnnnnnnnnnnnnnnnnnnnnnnnnnnnnnnnnnnnnnnnnnnnnnnnnnnnnnnnnnnnnnnnnnnnnnnnnnnnnnnnnnnnnnnnnnnnnnnnnnnnnnnnnnnnnnnnnnnnnnnnnnnnnnnnnnnnnnnnnnnnnnnnnnnnnnnnnnnnnnnnnnnnnnnnnnnnnnnnnnnnnnnnnnnnnnnnnnnnnnnnnnnnnnnnnnnnnnnnnnnnnnnnnnnnnnnnnnnnnnnnnnnnnnnnnnnnnnnnnnnnnnnnnnnnnnnnnnnnnnnnnnnnnnnnnnnnnnnnnnnnnnnnnnnnnnnnnnnnnnnnnnnnnnnnnnnnnnnnnnnnnnnnnnnnnnnnnnnnnnnnnnnnnnnnnnnnnnnnnnnnnnnnnnnnnnnnnnnnnnnnnnnnnnnnnnnnnnnnnnnnnnnnnnnnnnnnnnnnnnnnnnnnnnnnnnnnnnnnnnnnnnnnnnnnnnnnnnnnnnnnnnnnnnnnnnnnnnnnnnnnnnnnnnnnnnnnnnnnnnnnnnnnnnnnnnnnnnnnnnnnnnnnnnnnnnnnnnnnnnnnnnnnnnnnnnnnnnnnnnnnnnnnnnnnnnnnnnnnnnnnnnnnnnnnnnnnnnnnnnnnnnnnnnnnnnnnnnnnnnnnnnnnnnnnnnnnnnnnnnnnnnnnnnnnnnnnnnnnnnnnnnnnnnnnnnnnnnnnnnnnnnnnnnnnnnnnnnnnnnnnnnnnnnnnnnnnnnnnnnnnnnnnnnnnnnnnnnnnnnnnnnnnnnnnnnnnnnnnnnnnnnnnnnnnnnnnnnnnnnnnnnnnnnnnnnnnnnnnnnnnnnnnnnnnnnnnnnnnnnnnnnnnnnnnnnnnnnnnnnnnnnnnnnnnnnnnnnnnnnnnnnnnnnnnnnnnnnnnnnnnnnnnnnnnnnnnnnnnnnnnnnnnnnnnnnnnnnnnnnnnnnnnnnnnnnnnnnnnnnnnnnnnnnnnnnnnnnnnnnnnnnnnnnnnnnnnnnnnnnnnnnnnnnnnnnnnnnnnnnnnnnnnnnnnnnnnnnnnnnnnnnnnnnnnnnnnnnnnnnnnnnnnnnnnnnnnnnnnnnnnnnnnnnnnnnnnnnnnnnnnnnnnnnnnnnnnnnnnnnnnnnnnnnnnnnnnnnnnnnnnnnnnnnnnnnnnnnnnnnnnnnnnnnnnnnnnnnnnnnnnnnnnnnnnnnnnnnnnnnnnnnnnnnnnnnnnnnnnnnnnnnnnnnnnnnnnnnnnnnnnnnnnnnnnnnnnnnnnnnnnnnnnnnnnnnnnnnnnnnnnnnnnnnnnnnnnnnnnnnnnnnnnnnnnnnnnnnnnnnnnnnnnnnnnnnnnnnnnnnnnnnnnnnnnnnnnnnnnnnnnnnnnnnnnnnnnnnnnnnnnnnnnnnnnnnnnnnnnnnnnnnnnnnnnnnnnnnnnnnnnnnnnnnnnnnnnnnnnnnnnnnnnnnnnnnnnnnnnnnnnnnnnnnnnnnnnnnnnnnnnnnnnnnnnnnnnnnnnnnnnnnnnnnnnnnnnnnnnnnnnnnnnnnnnnnnnnnnnnnnnnnnnnnnnnnnnnnnnnnnnnnnnnnnnnnnnnnnnnnnnnnnnnnnnnnnnnnnnnnnnnnnnnnnnnnnnnnnnnnnnnnnnnnnnnnnnnnnnnnnnnnnnnnnnnnnnnnnnnnnnnnnnnnnnnnnnnnnnnnnnnnnnnnnnnnnnnnnnnnnnnnnnnnnnnnnnnnnnnnnnnnnnnnnnnnnnnnnnnnnnnnnnnnnnnnnnnnnnnnnnnnnnnnnnnnnnnnnnnnnnnnnnnnnnnnnnnnnnnnnnnnnnnnnnnnnnnnnnnnnnnnnnnnnnnnnnnnnnnnnnnnnnnnnnnnnnnnnnnnnnnnnnnnnnnnnnnnnnnnnnnnnnnnnnnnnnnnnnnnnnnnnnnnnnnnnnnnnnnnnnnnnnnnnnnnnnnnnnnnnnnnnnnnnnnnnnnnnnnnnnnnnnnnnnnnnnnnnnnnnnnnnnnnnnnnnnnnnnnnnnnnnnnnnnnnnnnnnnnnnnnnnnnnnnnnnnnnnnnnnnnnnnnnnnnnnnnnnnnnnnnnnnnnnnnnnnnnnnnnnnnnnnnnnnnnnnnnnnnnnnnnnnnnnnnnnnnnnnnnnnnnnnnnnnnnnnnnnnnnnnnnnnnnnnnnnnnnnnnnnnnnnnnnnnnnnnnnnnnnnnnnnnnnnnnnnnnnnnnnnnnnnnnnnnnnnnnnnnnnnnnnnnnnnnnnnnnnnnnnnnnnnnnnnnnnnnnnnnnnnnnnnnnnnnnnnnnnnnnnnnnnnnnnnnnnnnnnnnnnnnnnnnnnnnnnnnnnnnnnnnnnnnnnnnnnnnnnnnnnnnnnnnnnnnnnnnnnnnnnnnnnnnnnnnnnnnnnnnnnnnnnnnnnnnnnnnnnnnnnnnnnnnnnnnnnnnnnnnnnnnnnnnnnnnnnnnnnnnnnnnnnnnnnnnnnnnnnnnnnnnnnnnnnnnnnnnnnnnnnnnnnnnnnnnnnnnnnnnnnnnnnnnnnnnnnnnnnnnnnnnnnnnnnnnnnnnnnnnnnnnnnnnnnnnnnnnnnnnnnnnnnnnnnnnnnnnnnnnnnnnnnnnnnnnnnnnnnnnnnnnnnnnnnnnnnnnnnnnnnnnnnnnnnnnnnnnnnnnnnnnnnnnnnnnnnnnnnnnnnnnnnnnnnnnnnnnnnnnnnnnnnnnnnnnnnnnnnnnnnnnnnnnnnnnnnnnnnnnnnnnnnnnnnnnnnnnnnnnnnnnnnnnnnnnnnnnnnnnnnnnnnnnnnnnnnnnnnnnnnnnnnnnnnnnnnnnnnnnnnnnnnnnnnnnnnnnnnnnnnnnnnnnnnnnnnnnnnnnnnnnnnnnnnnnnnnnnnnnnnnnnnnnnnnnnnnnnnnnnnnnnnnnnnnnnnnnnnnnnnnnnnnnnnnnnnnnnnnnnnnnnnnnnnnnnnnnnnnnnnnnnnnnnnnnnnnnnnnnnnnnnnnnnnnnnnnnnnnnnnnnnnnnnnnnnnnnnnnnnnnnnnnnnnnnnnnnnnnnnnnnnnnnnnnnnnnnnnnnnnnnnnnnnnnnnnnnnnnnnnnnnnnnnnnnnnnnnnnnnnnnnnnnnnnnnnnnnnnnnnnnnnnnnnnnnnnnnnnnnnnnnnnnnnnnnnnnnnnnnnnnnnnnnnnnnnnnnnnnnnnnnnnnnnnnnnnnnnnnnnnnnnnnnnnnnnnnnnnnnnnnnnnnnnnnnnnnnnnnnnnnnnnnnnnnnnnnnnnnnnnnnnnnnnnnnnnnnnnnnnnnnnnnnnnnnnnnnnnnnnnnnnnnnnnnnnnnnnnnnnnnnnnnnnnnnnnnnnnnnnnnnnnnnnnnnnnnnnnnnnnnnnnnnnnnnnnnnnnnnnnnnnnnnnnnnnnnnnnnnnnnnnnnnnnnnnnnnnnnnnnnnnnnnnnnnnnnnnnnnnnnnnnnnnnnnnnccagtcctatatcgactatctcaggagcctccccatcacagcccacccagaagtgtttggcctccatgagaatgcagacatcaccaaagacaaccaggaaaccaaccagctgtttgagggggtcctgctgaccctccctagacagtcaggaggaagtggcaagtcccctcagnnnnnnnnnnnnnnnnnnnnnnnnnnnnnnnnnnnnnnnnnnnnnnnnnnnnnnnnnnnnnnnnnnnnnnnnnnnnnnnnnnnnnnnnnnnnnnnnnnnnnnnnnnnnnnnnnnnnnnnnnnnnnnnnnnnnnnnnnnnnnnnnnnnnnnnnnnnnnnnnnnnnnnnnnnnnnnnnnnnnnnnnnnnnnnnnnnnnnnnnnnnnnnnnnnnnnnnnnnnnnnnnnnnnnnnnnnnnnnnnnnnnnnnnnnnnnnnnnnnnnnnnnnnnnnnnnnnnnnnnnnnnnnnnnnnnnnnnnnnnnnnnnnnnnnnntggctgacctgctggcccgcctgaccttcttccag

SEQ ID NO: 24562 - DNA, 4096 bp, Macaca Mulatta
  misc_feature (1)...(4096): n = A,T,C or G
agtttgaaggtcgcaataaggccttttcaaggcttgaaaatctcaagatccacttgcggagccacacaggcgagaagccgtatttgtgccagcatccgggttgtcagannnnnnnnnnnnnnnnnnnnnnnnnnnnnnnnnnnnnnnnnnnnnnnnnnnnnnnnnnnnnnnnnnnnnnnnnnnnnnnnnnnnnnnnnnnnnnnnnnnnnnnnnnnnnnnnnnnnnnnnnnnnnnnnnnnnnnnnnnnnnnnnnnnnnnnnnnnnnnnnnnnnnnnnnnnnnnnnnnnnnnnnnnnnnnnnnnnnnnnnnnnnnnnnnnnnnnnnnnnnnnnnnnnnnnnnnnnnnnnnnnnnnnnnnnnnnnnnnnnnnnnnnnnnnnnnnnnnnnnnnnnnnnnnnnnnnnnnnnnnnnnnnnnnnnnnnnnnnnnnnnnnnnnnnnnnnnnnnnnnnnnnnnnnnnnnnnnnnnnnnnnnnnnnnnnnnnnnnnnnnnnnnnnnnnnnnnnnnnnnnnnnnnnnnnnnnnnnnnnnnnnnnnnnnnnnnnnnnnnnnnnnnnnnnnnntcacagctgtggacgcaggagctgagaggnnnggtttgcaccttctgctccatctcctcaccatatcagcccccggagagttccggcttcttcttcaatactgcaaagaacccagcctccccatacccagcagccatcaggttcacacctgaagtcctatcagccagaaacaaactcttcttttcaaccaaatggtatccatgtccatggnnnnnnnnnnnnnnnnnnnnnnnnnnnnnnnnnnnnnnnnnnnnnnnnnnnnnnnnnnnnnnnnnnnnnnnnnnnnnnnnnnnnnnnnnnnnnnnnnnnnnnnnnnnnnnnnnnnnnnnnnnnnnnnnnnnnnnnnnnnnnnnnnnnnnnnnnnnnnnnnnnnnnnnnnnnnnnnnnnnnnnnnnnnnnnnnnnnnnnnnnnnnnnnnnnnnnnnnnnnnnnnnnnnnnnnnnnnnnnnnnnnnnnnnnnnnnnnnnnnnnnnnnnnnnnnnnnnnnnnnnnnnnnnnnnnnnnnnnnnnnnnnnnnnnnnnnnnnnnnnnnnnnnnnnnnnnnnnnnnnnnnnnnnnnnnnnnnnnnnnnnnnnnnnnnnnnnnnnnnnnnnnnnnnnnnnnnnnnnnnnnnnnnnnnnnnnnnnnnnnnnnnnnnnnnnnnnnnnnnnnnnnnnnnnnnnnnnnnnnnnnnnnnnnnnnnnnnnnnnnnnnnnnnnnnnnnnnnnnnnnnnnnnnnnnnnnnnnnnnnnnnnnnnnnnnnnnnnnnnnnnnnnnnnnnnnnnnnnnnnnnnnnnnnnnnnnnnnnnnnnnnnnnnnnnnnnnnnnnnnnnnnnnnnnnnnnnnnnnnnnnnnnnnnnnnnnnnnnnnnnnnnnnnnnnnnnnnnnnnnnnnnnnnnnnnnnnnnnnnnnnnnnnnnnnnnnnnnnnnnnnnnnnnnnnnnnnnnnnnnnnnnnnnnnnnnnnnnnnnnnnnnnnnnnnnnnnnnnnnnnnnnnnnnnnnnnnnnnnnnnnnnnnnnnnnnnnnnnnnnnnnnnnnnnnnnnnnnnnnnnnnnnnnnnnnnnnnnnnnnnnnnnnnnnnnnnnnnnnnnnnnnnnnnnnnnnnnnnnnnnnnnnnnnnnnnnnnnnnnnnnnnnnnnnnnnnnnnnnnnnnnnnnnnnnnnnnnnnnnnnnnnnnnnnnnnnnnnnnnnnnnnnnnnnnnnnnnnnnnnnnnnnnnnnnnnnnnnnnnnnnnnnnnnnnnnnnnnnnnnnnnnnnnnnnnnnnnnnnnnnnnnnnnnnnnnnnnnnnnnnnnnnnnnnnnnnnnnnnnnnnnnnnnnnnnnnnnnnnnnnnnnnnnnnnnnnnnnnnnnnnnnnnnnnnnnnnnnnnnnnnnnnnnnnnnnnnnnnnnnnnnnnnnnnnnnnnnnnnnnnnnnnnnnnnnnnnnnnnnnnnnnnnnnnnnnnnnnnnnnnnnnnnnnnnnnnnnnnnnnnnnnnnnnnnnnnnnnnnnnnnnnnnnnnnnnnnnnnnnnnnnnnnnnnnnnnnnnnnnnnnnnnnnnnnnnnnnnnnnnnnnnnnnnnnnnnnnnnnnnnnnnnnnnnnnnnnnnnnnnnnnnnnnnnnnnnnnnnnnnnnnnnnnnnnnnnnnnnnnnnnnnnnnnnnnnnnnnnnnnnnnnnnnnnnnnnnnnnnnnnnnnnnnnnnnnnnnnnnnnnnnnnnnnnnnnnnnnnnnnnnnnnnnnnnnnnnnnnnnnnnnnnnnnnnnnnnnnnnnnnnnnnnnnnnnnnnnnnnnnnnnnnnnnnnnnnnnnnnnnnnnnnnnnnnnnnnnnnnnnnnnnnnnnnnnnnnnnnnnnnnnnnnnnnnnnnnnnnnnnnnnnnnnnnnnnnnnnnnnnnnnnnnnnnnnnnnnnnnnnnnnnnnnnnnnnnnnnnnnnnnnnnnnnnnnnnnnnnnnnnnnnnnnnnnnnnnnnnnnnnnnnnnnnnnnnnnnnnnnnnnnnnnnnnnnnnnnnnnnnnnnnnnnnnnnnnnnnnnnnnnnnnnnnnnnnnnnnnnnnnnnnnnnnnnnnnnnnnnnnnnnnnnnnnnnnnnnnnnnnnnnnnnnnnnnnnnnnnnnnnnnnnnnnnnnnnnnnnnnnnnnnnnnnnnnnnnnnnnnnnnnnnnnnnnnnnnnnnnnnnnnnnnnnnnnnnnnnnnnnnnnnnnnnnnnnnnnnnnnnnnnnnnnnnnnnnnnnnnnnnnnnnnnnnnnnnnnnnnnnnnnnnnnnnnnnnnnnnnnnnnnnnnnnnnnnnnnnnnnnnnnnnnnnnnnnnnnnnnnnnnnnnnnnnnnnnnnnnnnnnnnnnnnnnnnnnnnnnnnnnnnnnnnnnnnnnnnnnnnnnnnnnnnnnnnnnnnnnnnnnnnnnnnnnnnnnnnnnnnnnnnnnnnnnnnnnnnnnnnnnnnnnnnnnnnnnnccacccttcttgcagtttcgtgggtcgtgtcacttggcctaagcaagtggcctaacgtatgcatgctcacagctggtagcatccctcatgcgtcctttgtcatactctggaaagaaagaaaaactctgctatcttcagagagaccatctattcatacttaaatagggaagcctttacaaggaactcaaaatacatttcatttcatttgtacaatgagaaaaaagatgaaaaggcaaggttgttattgcagttgacattgtcagtcctgccttttggctttatgtaatttaaagtagaaagggggaaggaggacaaaacagaagctgaactttagaaaccatggacattacctccctctttaagaggagctgcttgtgaaccaggctccagtcttccggtggcctctcacagtagccctgcccctttcttacctcacgggggctagagggactctatagagggcctaagcagtagaggcacctgcagccctccttcctcagcaggaaatcattgtggagcccctgagggacatttgcatctcagagcgtgcaggcagcaggacccggtgcagccctgcttcctgcaccgtgggtctttcctgatagctgcaggcttgagattgtggcctcaggataggacacgttcagatgccttccagactacacactatgcttagattctagagtctttcctgaccttaaaatttgtcccttgcttactttcacactgcagaagatttatatatactttcatcagtatttttgcagtagtacaagtggaagcttcgaaaaaatcattccctttcatgtcctggttttttaaagtcttgatatgcagccattttcataaacatccaaacagagattgtcattccccttaaaaacagaaacannnnnnnnnnnnnnnnnnnnnnnnnnnnnnnnnnnnnnnnnnnnnnnnnnnnnnnnnnnnnnnnnnnnnnnnnnnnnnnnnnnnnnnnnnnnnnnnnnnnnnntcttaattccctaacgaaactgcatcaaagtgtcagttataatttagcctctgatcagctgttaaatattatttaaatatttactggtcctgtggggtatctcccagtacccacgtctccctcaaattacataagcga

SEQ ID NO: 24563 - DNA, 917 bp, Macaca Mulatta
gggaccgagttggtagcatctgcagtgacccagtcaccctggatgtcccttgtatctttagttcctctgtgggcaaggccaccagctaaaatccaaatgaccagagatcaggcatctcagtctttctcaggtacaagtatggacacttttatttctggacacccgagatggccatgactccccgccctgggaaaacctgggtaggcacagcctcaaccaagaatataagggtaggggatgcttttgtcatgggagacttggcatctacggcttgtgatgggagaaacaggtgaatacttcgggcctcgtctcagtgaacacacaagggtttggctgggccttgagggtgtgtcttagctcagaggcacactgtgtccctttaagagaccaggagcatccccttcccttggatgacatcacctgtggctttattgtctttcctccagatggtccagaagttcccagcatttttccttcacgcaccgattaccattcaggagaaaacctctacttgtcctgcttcgcggactctaacccatcggcagagtatacttggtcgatgcatgggaagtttctgcaatcaggacaagagctctctatccccaaaattactacaaagcataccgggatctatggttgctctgctcgtaactcagccactggcagcgaacgttccacattcaagatgattgtagtctctggtaagtggatcctgcatcattggcaatagggttttaggtggagtctatctggctttcagagaagagtcaggaaaacatttttattcccagcctgtgtgccatgggcagaagcaaatcctaaattctcctcctgaaccctctcaatttgtctctacagactctcttctccttgtttttctgttttccccatggctgaccttgtgtccagcctgagaa

SEQ ID NO: 24564 - DNA, 3428 bp, Macaca Mulatta
  misc_feature (1)...(3428): n = A,T,C or G
ggtttttgagcccgttactgttggagctacagggagagaaacagggaaggagactacaacagatcattggnnnnnnnnnnnnnnnnnnnnnnnnnnnnnnnnnnnnnnnnnnnnnnnnnnnnnnnnnnnnnnnagtttcccagagctatggggacttcccatccggcgttcctggtcttaggctgtcttctcacagnnncagggctgagcctaatcctctgccagctttcgttaccctctatccttccaaatgaaaatgaaaaggttgtgcagctgaattcatccttttctctgagatgctttggggagagtgaagtgagctggcagtaccccatgtctgaagaagagaactctgatgtggaaatcagaaatgaagaaaacaacagtggcctttttgtgacagtcttggaagtgagcagtgcctcggcggcccacacagggctgtacacttgctattacaaccacactcagacagaagagaatgagcttgaaggcaggcacatttacatctatgtgccagnnnnnnnnnnnnnnnnnnnnnnnnnnnnnnnnnnnnnnnnnnnnnnnnnnnnnnnnnnnnnnnnnnnnnnnnnnnnnnnnnnnnnnnnnnnnnnnnnnnnnnnnnnnnnnnnnnnnnnnnnnnnnnnnnnnnnnnnnnnnnnnnnnnnnnnnnnnnnnnnnnnnnnnnnnnnnnnnnnnnnnnnnnnnnnnnnnnnnnnnnnnnnnnnnnnnnnnnnnnnnnnnnnnnnnnnnnnnnnnnnnnnnnnnnnnnnnnnnnnnnnnnnnnnnnnnnnnnnnnnnnnnnnnnnnnnnnnnnnnnnnnnnnnnnnnnnnnnnnnnnnnnnnnnnnnnnnnnnnnnnnnnnnnnnnnnnnnnnnnnnnnnnnnnnnnnnnnnnnnnnnnnnnnnnnnnnnnnnnnnnnnnnnnnnnnnnnnnnnnnnnnnnnnnnnnnnnnnnnnnnnnnnnnnnnnnnnnnnnnnnnnnnnnnnnnnnnnnnnnnnnnnnnnnnnnnnnnnnnnnnnnnnnnnnnnnnnnnnnnnnnnnnnnnnnnnnnnnnnnnnnnnnnnnnnnnnnnnnnnnnnnnnnnnnnnnnnnnnnnnnnnnnnnnnnnnnnnnnnnnnnnnnnnnnnnnnnnnnnnnnnnnnnnnnnnnnnnnnnnnnnnnnnnnnnnnnnnnnnnnnnnnnnnnnnnnnnnnnnnnnnnnnnnnnnnnnnnnnnnnnnnnnnnnnnnnnnnnnnnnnnnnnnnnnnnnnnnnnnnnnnnnnnnnnnnnnnnnnnnnnnnnnnnnnnnnnnnnnnnnnnnnnnnnnnnnnnnnnnnnnnnnnnnnnnnnnnnnnnnnnnnnnnnnnnnnnnnnnnnnnnnnnnnnnnnnnnnnnnnnnnnnnnnnnnnnnnnnnnnnnnnnnnnnnnnnnnnnnnnnnnnnnnnnnnnnnnnnnnnnnnnnnnnnnnnnnnnnnnnnnnnnnnnnnnnnnnnnnnnnnnnnnnnnnnnnnnnnnnnnnnnnnnnnnnnnnnnnnnnnnnnnnnnnnnnnnnnnnnnnnnnnnnnnnnnnnnnnnnnnnnnnnnnnnnnnnnnnnnnnnnnnnnnnnnnnnnnnnnnnnnnnnnnnnnnnnnnnnnnnnnnnnnnnnnnnnnnnnnnnnnnnnnnnnnnnnnnnnnnnnnnnnnnnnnnnnnnnnnnnnnnnnnnnnnnnnnnnnnnnnnnnnnnnnnncctgcgttctgaactcacggtggctgccgcagtcctggtgctgctggtgattgtgatcatctcactcattgtcctggttgtcatttggaaacagnagaaaccgaggtatgaaattcgctggagggtcattgaatcaatcagcccagatggacatgaatatatttatgtggacccaatgcagctgccttatgactcgagatgggagtttccaagagatggactagtgcttggtnnnnnnnnnnnnnnnnnnnnnnnnnnnnnnnnnnnnnnnnnnnnnnnnnnnnnnnnnnnnnnnnnnnnnnnnnnnnnnnnnnnnnnnnnnnnnnnnnnnnnnncacggccagatccagtgaaaaacaagctctcatgtctgaactgaagataatgactcacctggggccacatttgaacattgtaaacttgctgggagcctgcaccaagtcaggnnnnnnnnnnnnnnnnnnnnnnnnnnnnnnnnnnnnnnnnnnnnnnnnnnnnnnnnnnnnnnnnnnnnnnnnnnnnnnnnnnnnnnnnnnnnnnnnnnnnnnnnnnnnnnnnnnnnnnnnnnnnnnnnnnnnnnnnnnnnnnnnnnnnnnnngctatgttattttatcttttgaaaacaatggtgactacatggacatgaagcaggctgatactacacagtatgtccctatgctagaaaggaaagaggtttctaaatattccgacatccagagatcactgtatgatcgtccagcctcatataagaagaaatctatgttagnagactcagaagtcaaaaacctcctttcagatgataactcagaaggccttactttgttggatttgttgagcttcacctatcaagttgcccgaggaatggagtttttggcttcaaaaaannnnnnnnnnnnnnnnnnnnnnnnnnnnnnnnnnnnnnnnnnnnnnnnnnnnnnnnnnnnnnnnnnnnnnnnnnnnnnnnnnnnnnnnnnnnnnnnnnnnnnnnnnnnnnnnnnnnnnnnnnnnnnnnnnnnnnnnnnnnnnnnnnnnnnnnnnnnnnnnnnnnnnnnnnnnnnnnnnnnnnnnnnnnnnnnnnnnnnnnnnnnnnnnnnnnnnnnnnnnnnnnnnnnnnnnnnggtggaactccttaccctggcatgatggtggattctactttctacaataagatcaagagtgggtaccggatggccaagcctgaccatgctaccagtgaagnnnnnnnnnnnnnnnnnnnnnnnnnnnnnnnnnnnnnnnnnnnnnnnnnnnnnnnnnnnnnnnnnnnnnnnnnnnnnnnnnnnnnnnnnnnnnnnnnnnnnnnnagagttatgaaaaaattcacctggacttcctgaagagtgaccatcctgctgtggcacgcatgcgtgtggactcagacaatgcgtacattggtgtcacctacaaaaatgaggaagacaagctgaaggactgggagggtggtctggatgagcagagactgagcgctgacagcggctacatcattcctctgcctgacattgaccctgtccctgaggaggaggacctgggcaagaggaacagacacanncagctcgcagacctctgaagagagtgccattgagacgggttccagcagttccaccttcatcaagagagaggacgagaccattgaagacatcgacatgatggacgacatcggcatagactcttcagacctggtggaagacagcttcctgta

SEQ ID NO: 24565 - DNA, 733 bp, Macaca Mulatta
cctgtgtttcgctgggttctcagctccacagttacggcgctggggcaggcccaggccccgcctgtagcagagggctgtctgcaagtccccggggaggggcagtgctccccacagcccactgtggcccaagagctgtcagaaacccaggaacgggacgtttgtttggacccagtgtgggaccactccccattccccgcccctgctgaggaggtggcacagagtgaaatgtggatcagggctgtaattacacttaattccatttagtgctgagctctgaaatcaactccccagcctcaggagtgggggcggttcagaagccacttgcagatgctgcttttgcttttcctctgacttgccccagatgagttcatgggacctgattcctgatagggtcctaggtagttttgacctgaacgccttgaggagtgagtggccctttgagctccaggataccgctggagatctattttgcacactcctccaaccctgagaatccatgtttagtccctggcccctcctgacccttcctgggtttggatggggttttgcaggtgatacaagaggtagctaggcagtggcagaggactgcccctgccacactggactgtgtccactcctcaactcaaccctggctgtctgctagctcccacggcgctgcgtacaactcttctgcttttatgcgtccctctctttggctttcatgcacagggatagggagggcgggctaactagg

SEQ ID NO: 24566 - DNA, 806 bp, Macaca Mulatta
tcctgccctcccgtttggccgtgggtgtccccctctgtctcagtgtccctggatcctatttccttagggaggggcactggctcagccttctctctgaccatgacccaggcatccttgtccccctcacccacccagagctaggggcgggaacagcccacctttcggttggcaccgccttctttctgcctctcactggttttctcttctctctatctcttattttttccctcccttctcgaggtctgttcttcttccctagcatcctcccccaccacatctcctttcaccctcttggcttcttatcctgtgcctctcccatctcctgggtgggggcatcaaagcgtttctccccttagctttcagctccccttctgacctctcaaaccaaccactcccctcagtctgccaaaaatgggggccttatggggaaggctctggcactccaccccagctcaggccatgggcagcagggcttccttctcggtcctggcccaggcctctacatacttactccagccatttggggcggttgggtcatgacagctactatgagaagaagtgttccgttttgtccagtggccaatagcaagatatgaaccggtcaggacatatatggacttggtctgatgctgagtgggccacttgggaccggaagtgacttgctccagacaagaggtgaccaggcccggacagaaatggcctgggaagtagcagaagcagtgcagcaggaactagaagtgccttcatccaggacaggaagtagcacttctgaaacaggaagtggtctggctggaactccaagtggc

SEQ ID NO: 24567 - DNA, 648 bp, Macaca Mulatta
acttgagattatcctcaattcaagtcctaagataagggctttcttaagctttcaggtatatgtatcctgtagatgtagacaataatgtcccatttctaagtcttttccttttgattctccttaaattgatcgtacttccaaatttgctgttatgtttttttcctaatgctgtgatctgtctgatctgcagacaagaaccttgtctctgttgaagagcatcagggggagattatgtacacattgaaaccgaagtgtgtggttactgacttaatgtgcagtaactcctcacatatctgttaaggcatttcccagatgtgatgccagccttcttacgtgtactgaaagatgtttagcttagaaaaaacaaaacaggtgcaaaatcagataattttattttgtttcatgggttttatttactttttaaacaacgaaggaatattagaaaagcacacaaggcctcccagacttgttatgtaaagaatgaattgggacggatggcttagacttcactttcctaggctttttagcaaaacctaaagggtggtatccatattttgcatgaattatgggtgtaagaccttgcccgcttaggttttctatctctgtccttgatcttctttgccaaaatgtgagtataccgaaattttc

SEQ ID NO: 24568 - DNA, 407 bp, Macaca Mulatta
ttagtaattgtgagtaatgtaagaataagatttggctattagagggtattgtacttattaattaagaaacaatctataaggaatttgaagagatacaagtcaaggattggttaacatggtagttaacatggtggtgctaagcttatagtgtcctttgctgcttttcaaatacttctcagaaaactatgcagacaggtaaaaccttataattctttagattctttttaattttggtgttaacatagttataaaatagcctatgtgctttgaaataaacgcaagtaatatggacataaattaaatgaaaggtaaaatagctacactcctttctctttatttaatttcttatggttatcactcttaagtatttgctgtacaaccttagattattcctctgtgcacatgga

SEQ ID NO: 24569 - DNA, 298 bp, Macaca Mulatta
  misc_feature (1)...(298): n = A,T,C or G
gctccattggatatgactgtgcactggagccggttgtgctgttctctcagctatacacacccatcaaatcacagtgcccctgaggacgagagaaaattgaagnagctgtgtaaatgagtatggaagattatgatttcctgttcaaaattgttttaattggcaacgctggtgtggggaagacgtgcctcgtccgaagattcactcaggnnnncagggtcttttcccccctggtcaaggagccacaattggagttgattttatgattaagacagtggagattaatggtgaaaaagtaaag

SEQ ID NO: 24570 - DNA, 633 bp, Macaca Mulatta
  misc_feature (1)...(633): n = A,T,C or G
gggggaggggacgtaacggaggcaggtcggagccgctgccgtcgccatgacccgcggtaaccagcgtgagctcgcccgccagaagaatatgaaaaagcagagcgactcggttaagggaaagcgccgagatgacgggctttctgctgccgcccgcaagcagagggactcggagatcatgcagcataagcagaaaaaggcaaacgacaagaacgatgaaccccagtagctttgtggcttcgtgtcccaccctcttgctcttccccctgtgtgtctggagccacttccttctcactctccttttccccctgtagttctccctgttccctccctttctgggcctctctctccttccattcctcccctcattctccttttaagcttctccccccgctcctagcatctttttcctcccccctgtctttttcccgcccctacctcgattttctttagtacttcactctcttccttttgcctcttttattctcttttccatnnnnnnnnnnnnnnnnnnttcttttctcctctccctccttactcccttcttactctctcttctcgtcctttttcctccttctttctaatcccctccttgttcactttttcttctccctctccttcactccctcccctctc

SEQ ID NO: 24571 - DNA, 143 bp, Macaca Mulatta
tgtcattgaggccagcatcaaccatgagaagggctatgtccaatccaaggagatgattgacatctattccacccgagagccccagctggccttccaccagcgcatctccttctgcctagatatccacaacatgtctgtcaagg

SEQ ID NO: 24572 - DNA, 636 bp, Macaca Mulatta
cttattatctccatcatggctccggggtagatgcagcaaagctttcggcaggtacagggggagcctttgggctacaggagcaggtgctagactgtgccccaatgcctcgagtccaaaatgatcgctctcctgctctcctcccagaacgtgggtggaggtactgctgtggtccaggtgagagccactgaccgtgacatcgggatcaacagtgtcctgtcctactacatcactgagggcaacaaggacatgaccttccgcatggatcgcgtcagcggtgagatcgccacacggcccgccccgcctgaccgcgagcgccagagcttctaccacctggtggtcactgtggaggacgagggcacccccaccctgtcggtgagcgaggggggtggccagtggccacagggaggagcacttgggccagagcggctccgcctccgagtgaggggaacaagatgggtgggaatggaattccacacagcgggtgaatccttgacaactctttcatcgtgcctttagtccatctgcccaagatggcctccccttatggaggcctattgcatgcaaagctggggtgctagtttgccctcctgagtctacagctactcagaagctctgtttagtcctcttttctctcac

SEQ ID NO: 24573 - DNA, 1344 bp, Macaca Mulatta
ggagcacagatagtagcattcatgctccttcagagataactgttgctcatggcagtgggcttggaaaaggccaggagtctcctttgaagaaaagcccttctgctggcaacatacacatattgactggctttgccaagcctatggatatttactgccacagatttgtgcaagatgcacaaaacaaagtgacccacctttcagagcccaggtctgtgtctcagcaggctagtcagggaagaaatcaaatgaccagtgaagtttcaaacgaagaaacccaatcagaatcaacagaacagacaccttctcggccatctcaattagatgtctctctctctgcaacaggcccacagtttttgtcagttgagccagcgcattcagttgcatctcaaaaaacccccagctccgcttccagcatgcttgaacttgagacagggcttcacgtaactccttctccttcagagagcagtagcagcagagcagtctctccctttgccaagattcgaagttccatggttcaggttgctagtattacccaagctggattaacccatgggataaactttgcagtggcaaaagttcagaagagtcctgcagaatctgaagtcattaatcaagtccagcaaaatgaacttaaaaaaatgtttatacaatgccagacacggataattcagatttagcttttagccataagaatctttccatggcttttatttaaaaatatgaaagtttttatctcttggggtattttaattgtactgtctgaatccagggatcacaaattctgttcattggaaagggttttaaaaggagtctgaacctgagtagatttccagattttagagccaggactacagaagcgcatcattctagaatgtgtagacctgagtagcttatacactacagagcactttgcttatttgaaagtaattcagcaacaggtcactttgggataaactgaaccttttttttggagtggggtgggtagactacattaagtagacacaagggctggacatgcagatgcttaggggattagcatttttcataatttgttctgtttgtcagttcattcctgtgtgttacctctacaaattacacatttagtttttagtgactaacatgttaccaaagcatttgaatataaagctattttagttttgatggcttaactattccctgaggagttgagggttattgacactaaagaagtgaattctcatttgatccctaattcccccatattctacttgaacacattaaaatactctgctgcctacagtgtaaacctaagatattaagactgtccccagtaaactgaatctccaggtgataccaccccattaa

SEQ ID NO: 24574 - DNA, 2818 bp, Macaca Mulatta
  misc_feature (1)...(2818): n = A,T,C or G
agtgacaaagttttcttcanctaagtaatttaacagagctgtncctggtgcggaattccctgactgntgcaccagtaanccttccaggcacaaactgagggaagctttatcttcaagatanccacatcaatcgggtgcccccaaatgcttttcttatctaaggcagctctatcgactggatatgtncaatatanncntaagtatttacctcagggtatctttgatgatttggacaatataacacaactgattcttcgcaacaatccctggtattgcgggtgcaagatgaaatgggtacgtgactggttacaatcattacctgtgaaggtcaatgtgcgtgggcttatgtgccaagcnccagaaaaagttcgtgggatggctattaaggatctcaatgcagaactgtttgattgtaaggacagtgggattgtaagcaccattcagataaccactgcaatacccaacacagtgtatcctgcccaaggacagtggccagctccagtgaccaaacagccagatattaagaaccccaagctcaccaaggatcaccaaaccacagggagtccctcaagaaaaacaattacaattactgtgaaatctgtcacctctgatacaattcatatctcttggaaacttgctctacctatgactgctttgagactcagctggcttaaactgggccatagcccagcatttggatctataacagaaacaattgtaacaggggaacgcagtgagtacttggtcacagccctggagcctgattcaccctataaagtatgcatggttcccatggaaaccagtaacctctacctatttgatgaaactcctgtttgtattgagactgaaactgcaccccttcgaatgtacaaccctacaaccaccctcaatcgagagcaagagaaagaaccttacaaaaaccccaatttacctttggctgccatcattggtggagctgtggccctggttaccattgcccttcttgctttattgtggggaatgttcataggaatggatcgcttttctgtaggaactnnnnnnnnnnnnnnnnnnnnnnnnnnnnnnnnnnnnnnnnnnnnnnnnnnnnnnnnnnnnnnnnnnnnnnnnnnnnnnnnnnnnnnnnnnnnnnnnnnnnnnnnnnnnnnnnnnnnnnnnnnnnnnnnnnnnnnnnnnnnnnnnnnnnnnnnnnnnnnnnnnnnnnnnnnnnnnnnnnnnnnnnnnnnnnnnnnnnnnnnnnnnnnnnnnnnnnnnnnnnnnnnnnnnnnnnnnnnnnnnnnnnnnnnnnnnnnnnnnnnnnnnnnnnnnnnnnnnnnnnnnnnnnnnnnnnnnnnnnnnnnnnnnnnnnnnnnnnnnnnnnnnnnnnnnnnnnnnnnnnnnnnnnnnnnnnnnnnnnnnnnnnnnnnnnnnnnnnnnnnnnnnnnnnnnnnnnnnnnnnnnnnnnnnnnnnnnnnnnnnnnnnnnnnnnnnnnnnnnnnnnnnnnnnnnnnnnnnnnnnnnnnnnnnnnnnnnnnnaattctatattttcctattttttagtaatttgtactgtattttccttgcaaatatctgtagttataaaccatttactttgtgttctactgagtaagatgacttgttgactgtgaaagtgaattttcttgctgtgttgaacaatcaggactgcattcacatgagatccttgtagtataagcacaggccatttttcactttggtattaataaaatgtnnnnnnnnnnnntggctgaatggctgaatgagaaaatttaattttagaaaatggttatgaaataatgttccaattattaaatttgtattatcccagtggtattcaataaatcaaagtgtgtgaagtaatgggcaatatcaaacctgctgcatatctccatttttgctctaggcaaattaattatccttaaaaaagttaagcatatcttctgaactgaatacatcagctggcataaaaggagtgtgaagtctgttaaagccattgtcagcaaagctttgaaaataaaggacttcacaaaaacagtaatgtaaatgtgcttccaagttgcgggggaaatgtgtacttaggaaaacatgaaaacttagatttgtatagtgtaatgaacacaaataccaaaactgcattttggttttgcctatgccatcctgatttttgaaaagtgactaataaacacaaaattgttagtgtttatgatgtttttatcataaaggatgtcagagaaattttatgcatattaaaaatgtagtgtaattataagcgattcccctcaacaacccagagaaagtagttctttaaatgagagaatttaaagaaaaataaatactagacatcaaatttagatctggtttatgtcaaaggttttaacactgtacatnnnnnnnnnnnnnnnnnnnnnnnnnnnnnnnnnnnnnnnnnnnnnnnnnnnnnnnnnnnnnnnnnnnnnnnnnnnnnnnnnnnnnnnnnnnnnnnnnnnnnnnnnnnnnnnnnnnnnnnnnnnnnnnnnnnnnnnnnnnnnnnnnnnnnnnnnnnnnnnnnnnnnnnnnnnnnnntcaacaaaaaaccaaaagtgcattgtacgccctttggccagtcttgtatgtgccttgatccaacgctacatgtattcagcttttaaaactcgacaaatttttcatactccttaaatatgaaaaattatggtcttattgctgaataaaacttttaaaaagtacagaataattgtgcttgctttttcaggattgtgttactatcactaagtagcaaattgcccagcacattagtcctaaacgtcccatgtatttttctaggca

SEQ ID NO: 24575 - DNA, 924 bp, Macaca Mulatta
  misc_feature (1)...(924): n = A,T,C or G
acaagaaactgtttgaaactgtggaggaactgtcctcgccgctcacggctcatgtaacagnnnnnnnnnnnnnnnnnnnnnnnnnnnnnnnnnnnnnnnnnnnnnnnnnnnnnnnnnnnnnnnnnnnnnnnnnnnnnnnnnnnnnnnnnnnnnnnnnnnnnnnnnnnnnnnnnnnnnnnnnnnnnnnnnnnnnnnnnnnnnnnnnnnnnnnnnnnnnnnnnnnnnnnnnnnnnnnnnnnnnnnnnnnnnnnnnnnnnnnnnnnnnnnnnnnnnnnnnnnnnnnnnnnnnnnnnnnnnnnnnnnnnnnnnnnnnnnnnnnnnnnnnnnnnnnnnnnnnnnnnnnnnnnnnnnnnnnnnnnnnnnnnnnnnnnnnnnnnnnnnnnnnnnnnnnnnnnnnnnnnnnnnnnnnnnnnnnnnnnnnnnnnnnnnnnnnnnnnnnnnnnnnnnnnnnnnnnnnnnnnnnnnnnnnnnnnnnnnnnnnnnnnnnnnnnnnnnnnnnnnnnnnnnnnnnnnnnnnnnnnnnnnnnnnnnnnnnnnnnnnnnnnnnnnnnnnnnnnnnnnnnnnnnnnnnnnnnnnnnnnnnnnnnnnnnnnnnnnnnnnnnnnnnnnnnnnnnnnnnnnnnnnnnnnnnnnnnnnnnnnnnnnnnnnnnnnnnnnnnnnnnnnnnnnnnnnnnnnnnnnnnnnnnnagttttggtctgactcccaactatatcgtttttgtggagacaccagtcaaaattaacctgttcaagttcctttcttcatggagtctttggggagccaactacatggattgctttgagtccaatgaaaccatgggggnnnnnnnnnnnnnnnnnnnnnnnnnnnnnnnnngtacctcaataataaatacaggacttctcctttcaacctcttccatcacatcaacacctatgaggac

SEQ ID NO: 24576 - DNA, 479 bp, Macaca Mulatta
  misc_feature (1)...(479): n = A,T,C or G
caggggagctgtttgctcaggccccggtggatcagtttcccggcacagctgtggagagtgtgacggactccagcaggtacttcgtgatccgcatcgaagatggaaatggngggcgacgggcgtttattggaattggcttcggggaccgaggtgatgcctttgacttcaatgttgcattgcaggaccatttcaagtgnnnnnnnnnnnnnnnnnnnnnnnnnnnnnnnnnnnnnnnnnnnnnnnnnnnnnnnnnnnnnnnnnnnnnnnnnnnnnnnnnnnnnnnnnnnnnnnnnnnnnnnnnnaacatgaagaagaaggaaggagcagccgggaatccccgagcccggcctgccagcacaggagggctgagcctgcttccccctcccccagggggcaaaacctccaccctgatccctccccctggggagcagttggctgtagggggatccctcacccagccagcagttgctcccagttca

SEQ ID NO: 24577 - DNA, 1389 bp, Macaca Mulatta
  misc_feature (1)...(1389): n = A,T,C or G
gcagcgtggcagcaccttccacttctacgacaccgtggatgggcagctacggggcggcgtggagctgtcagccccaggacaggcgaagatcacgggtggggcctcggtgtctgacagctccagcacctcaatgcatgtgtactcgctgagtgtggacccgaacacctggcagaccctactccatgannnnnnnnnnnnnnnnnnnnnnnnnnnnnnnnnnnnnnnnnnnnnnnnnnnnnnnnnnnnnnnnnnnnnnnnnnnnnnnnnnnnnnnnnnnnnnnnnnnnnnnnnnnnnnnnnnnnnnnnnnnnnnnnnnnnnnnnnnnnnnnnnnnnnnnnnnnnnnnnnnnnnnnnnnnnnnnnnnnnnnnnnnnnnnnnnnnnnnnnnnnnnnnnnnnnnnnnnnnnnnnnnnnnnnnnnnnnnnnnnnnnnnnnnnnnnnnnnnnnnnnnnnnnnnnnnnnnnnnnnnnnnnnnnnnnnnnnnnnnnnnnnnnnnnnnnnnnnnnnnnnnnncaggccacaagccttccaggagtgtaggcgcctggccacagctgccctcagtcctctccatgatggggtgcctccacaacttnnnnacagatggggtccctgcggaggggacgttcactgaagacttccagggcctaagggaagaggtggaggccatctccaaggaactggagctcttggacagagagctgtgccagctgctgctggagggcctggagggggtgctgcgggaccagctggccctgcgagccttggaggaggcnnnnnnnnnnnnnnnnnnnnnnnnnnnnnnnnnnnnnnnnnnnnnnnnnnnnnnnnnnnnnnnnnnnnnnnnnnnnnnnnnnnnnnnnnnnnnnnnnnnnnnnnnnnnnnnnnnnnnnnnnnnnnnnnnnnnnnnnnnnnnnnnnnnnnnnnnnnnnnnnnnnnnnnnnnnnnnnnnnnnnnnnnnnnnnnnnnnnnnnnnnnnnnnnnnnnnnnggtgggcagcctcttggagcagagtgccccgtggcaggagcgcagcaccgtgtccctgccccccggggtcctggggagcagctggggtgaaggggcaccggcctgggtcttgctggaggagtgtggcctggaactgggggaggacacgccccacgtgtgctgggagccgcaggcccagagccgcacatgtgcactctacgcctcnnnnnnnnnnnnnnnnnnnnnnnnnnnnnnnnnnnnnnnnnnnnnnnnnnnnnnnnnnnnnnnnnnnnnnnnnnnnnnnnnngtttgcccaccagctgccagccctaggaaggccagaagcccagcagccacgtggccagtctaccatggggcccaggagctggggaaacacagtaaaggtggtgtatgaaggaaa

SEQ ID NO: 24578 - DNA, 747 bp, Macaca Mulatta
gctgaaactctaacacagaggtaaagataactggtgaaggttttgctttttttttgttgtcagctatcttaagaatcattaaatacacctgctttgggtaacactctttacaagcagtaattaatgctaataacaatgaaagcacaagatttccaaatcagtcgttttctcaaaaaaatgttggataagtgactcaccctgtctgctaactccagacctcccagcttgaagcaaaatctatccatgtgaggttgatatggatttcctagaagtactggaatgttatcatatcttgccctattttaattctgctgtagaaaactattgccttcacttttaaggattaatttgaatatgagtaactgtagtctagattttcatttaatgtgttaaagacgaagtagtgaacatcaatgaacatctgatagagataaattgtaatcaggcaaaagcttgtttgtatgttctggcaatcagcaaatgatgtaggtatgcccagtatcacttatcttctgtatttttcttctgtcgtgtaaatactataaacttttatggataatttttggactagtagccttcaatatacattctgctttgaattaattttttcaaatcaataaactatgtagacatttaaaaccaaatctcaactagaactgaaaaatgtgagttacataagttaaaaacttactttaaatcttatcttctataggtaactctaaataaattcatactgttatatctctc

SEQ ID NO: 24579 - DNA, 607 bp, Macaca Mulatta
  misc_feature (1)...(607): n = A,T,C or G
gtctgcagctgccactgacgctgtagttgcgttaagtacctcctagnatgcctagttggcacttctgaagggcacaaggccaagaactcctggccaggactgcaaggctctgcagccagtgcagaaaatgggccagctcctctgagacccctcaccacctaccccttccttcctctttatctctcccacactgtcttgctaaatatagacttggtaattaaaatgttgattgaagtnnnnnnnnnnnnnnnnnnnnnnnnnnnnnnnnnnnnnnnnnnnnnnnnnnnnnnnnnnnnnnnnnnnnnnnnnnnnnnnnnnnnnnnnnnnnnnnnnnnnnnnnnnnnnnnnnnnnnnnnnnnnnnnnnnnnnnnnnnnnnnnnnnnnnnnnnnnnnnnnnnnnnnnnnnnnnnnnnnnnnnnnnnnnnnnnnnnnnnnnnnnnnnnnnnnnnnnnnnnnnnnnnnnnnnnnnnnnnnnnnnnnnnnnnnnnnnnnnnnnnnnnnnnnnnnnnnnnnnnnnnnnnnnnnnnnnnnnnnnnnnnnnnnnnnnnnnnnnnnnnnnnnnnnnnnnnnnnnnnnnnnnnnnnnnnnnnnnnnnnnnnnnnnnnnn

SEQ ID NO: 24580 - DNA, 397 bp, Macaca Mulatta
taaggatgaatggaggggtatgtcttagctcaagcacctatcatgaaagcctggttttatattacctatgagaaagatcctgtcttgtacatgtaccagcttctagatgattataaggaaggtgacctccgcatcatgccagaatccaatgagtctcctccaacagagagggagccaggaggagttgtagatggcctgataggtaagcatgtggaatataccaaagaagatggctccaaaaggatcggcatggtcattcaccaagtggaagccaaaccctctgtgtatttcatcaagtttgatgatgatttccatatctatgtctatgatttggtgaaaaagtcctaactgttagggtaaaatttggcacatgtgtggaaacaaatgtataatttgt

SEQ ID NO: 24581 - DNA, 78 bp, Macaca Mulatta
aggaggcacacaccatatggcaaccaaactgactatagaatattcgagcttaacaaacggcttcagaactggacagag

SEQ ID NO: 24582 - DNA, 1092 bp, Macaca Mulatta
  misc_feature (1)...(1092): n = A,T,C or G
gggggctacaaccccgacacagtagcatttgtgccaatttctggttggaatggtgacaacatgctggagccaagtgctaacatgccttggttcaagggatggaaggtcacccgtaaggatggcaatgccagtggaaccacgctgcttgaggctctggactgcatcctaccaccaactcgtccaactgaagtaaaatctgtcgaaatgcaccatgaagctttgagtgaagctcttcctggggacaatgtgggcttcaatgtcaagaatgtgtctgtcaaggatgttcgtcgtggcaacgttgctggtgacagcaaaaacgacccaccaatggaagcagctggcttcactgctcaggtgattatcctgaaccatccaggccaaataagtgctggctatgcccctgtgttggattgccacacagctcacattgcatgcaagtttgctgagctgaaggaaaagattgatcgccgttctggtaaaaaactggaagatggccctaaattcttgaagtctggtgatgctgccattgttgatatggttcctggcaagcctatgtgtgttgagagcttctcagactatccacctttgggtcgctttgctgttcgtgatatgaggcagacagttgcggtgggtgtcatcaaagcagtggacaagaaagctgctggagctggccaaggtcacccagttgaccagaaaactctgaaggataaattgaatattatccataatgcccggccaacccaatttttaataagtggtgggaagagcggaactcagaaattgtttgtttccaaatgatccctacaatatcttagtaaaaaaacaacttggcttacttcccaagcaagtaattgagaaaaatcctcttttacgaaataagtcacacctcctttttttgaaccccacgcacgccacttattttttttacactatcgaccagttaatacacctctcggttccccttagaaaatagagaaccagatacacccttaagggtaaataaaacagctagcaannnnnnnnnnnnnnnnnnnnnnnnnnngatttaaaagctccccctttttccccagtttaatataagaccccctaccc

SEQ ID NO: 24583 - DNA, 605 bp, Macaca Mulatta
ccatcataaccacgttttttatgattgtcttcacagaccgagataaacgaaaaactgcaaatacaggaagactcctttaacgcacgaatagaaaaattgaaaaaggcctgaggactcggtacaaggagagtgatgctaaacttcacagaaacaaacaaaaccagtcagaataatagactctctggagcgtcgtatctccgtcacttagttgtgaaaggaaaaccaagccccagtttttattttcctaagtaattaggaaagtattggtcccaattttgctatctcccatcccataacagcctctgaatttattgcaccaagtgtaataagaatattttgtatacaagagtttggagaattatatataaaaatacaattacttttatgatagtcctttgacgttttgactaataaatgctattcatcttcaagaagaatgaagccaactttttaaataaccagaaataaagaaaaatgataataactttatccattttgacccaaatgaactgccacattactggaacactgtgaaaagatatcagtaccacactactgaggataaaatttgttaaacaatagtaattcaagtgcatatacgaggg

SEQ ID NO: 24584 - DNA, 200 bp, Macaca Mulatta
aggcccctctccagaatggcctctccacgccgctgtcctcgtcagagagctccagcacccggctgtctccaccagatgtctctgctctgctcgacatctccctgcccggcccgcctgaggatgcgctgtcacagggcgagcctgccacacacattagcgactccatcattgagatcgccatcagctccgggcagtacggt

SEQ ID NO: 24585 - DNA, 5880 bp, Macaca Mulatta
  misc_feature (1)...(5880): n = A,T,C or G
gttttggtaagcagtttggaggaaaaagaggatgtgattgtcttgtattagagccttcagaaatgattgtggtannnnnnnnnnnnnnnnnnnnnnnnnnnnnnnnnnnnnnnnnnnnnnnnnnnnnnnnnnnnnnnnnnnnnnnnnnnnnnnnnnnnnnnnnnnnnnnnnnnnnnnnnnnnnnnnnnnnnnnnnnnnnnnnnnnnnnnnnnnnnnnnnnnnnnnnnnnnnnnnnnnnnnnnnnnnnnnnnnnnnnnnnnnnnnnnnnnnnnnnnnnnnnnnnnnnnnnnnnnnnnnnnnnnnnnnnnnnnnnnnnnnnnnnnnnnnnnnnnnnnnnnnnnnnnnnnnnnnnnnnnnnnnnnnnnnnnnnnnnnnnnnnnnnnnnnnnnnnnnnnnnnnnnnnnnnnnnnnnnnnnnnnnnnnnnnnnnnnnnnnnnnnnnnnnnnnnnnnnnnnnnnnnnnnnnnnnnnnnnnnnnnnnnnnnnnnnnnnnnnnnnnnnnnnnnnnnnnnnnnnnnnnnnnnnnnnnnnnnnnnnnnnnnnnnnnnnnnnnnnnnnnnnnnnnnnnnnnnnnnnnnnnnnnnnnnnnnnnnnnnnnnnnnnnnnnnnnnnnnnnnnnnnnnnnnnnnnnnnnnnnnnnnnnnnnnnnnnnnnnnnnnnnnnnnnnnnnnnnnnnnnnnnnnnnnnnnnnnnnnnnnnnnnnnnnnnnnnnnnnnnnnnnnnnnnnnnnnnnnnnnnnnnnnnnnnnnnnnnnnnnnnnnnnnnnnnnnnnnnnnnnnnnnnnnnnnnnnnnnnnnnnnnnnnnnnnnnnnnnnnnnnnnnnnnnnnnnnnnnnnnnnnnnnnnnnnnnnnnnnnnnnnnnnnnnnnnnnnnnnnnnnnnnnnnnnnnnnnnnnnnnnnnnnnnnnnnnnnnnnnnnnnnnnnnnnnnnnnnnnnnnnnnnnnnnnnnnnnnnnnnnnnnnnnnnnnnnnnnnnnnnnnnnnnnnnnnnnnnnnnnnnnnnnnnnnnnnnnnnnnnnnnnnnnnnnnnnnnnnnnnnnnnnnnnnnnnnnnnnnnnnnnnnnnnnnnnnnnnnnnnnnnnnnnnnnnnnnnnnnnnnnnnnnnnnnnnnnnnnnnnnnnnnnnnnnnnnnnnnnnnnnnnnnnnnnnnnnnnnnnnnnnnnnnnnnnnnnnnnnnnnnnnnnnnnnnnnnnnnnnnnnnnnnnnnnnnnnnnnnnnnnnnnnnnnnnnnnnnnnnnnnnnnnnnnnnagatgaatggtcatctccggttattgaatattgcctgtgctgcaaaggctaagtggagacaggttgtgctgcagaaggcttcccgcgagtcccctctacaattcagccttaatggaggaagtgagaagggatttggtatttttgttgaaggagtagaacctggtagcaaagctgctgattcaggactgaaacgtggtgatcagnnnnnnnnnnnnnnnnnnnnnnnnnnnnnnnnnnnnnnnnnnnnnnnnnnnnnnnnnnnnnnnnnnnnnnnnnnnnnnnnnnncttactgtgaagaccaacatttnnnnnnnnnnnnnnnnnnnnnnnnnnnnnnnnnnnnnnnnnnnnnnnnnnnnnnnnnnnnnnnnnnnnnnnnnnnnnnnnnnnnnnnnnnnnnnnnnnnnnnnnnnnnnnnnnnnnnnnnnnnnnnnnnnnnnnnnnnnnnnnnnnnnnnnnnnnnnnnnnnnnnnnnnnnnnnnnnnnnnnnnnnnnnnnnnnnnnnnnnnnnnnnnnnnnnnnnnnnnnnnnnnnnnnnnnnnnnnnnnnnnnnnnnnnnnnnnnnnnnnnnnnnnnnnnnnnnnnnnnnnnnnnnnnnnnnnnnnnnnnnnnnnnnnnnnnnnnnnnnnnnnnnnnnnnnnnnnnnnnnnnnnnnnnnnnnnnnnnnnnnnnnnnnnnnnnnnnnnnnnnnnnnnnnnnnnnnnnnnnnnnnnnnnnnnnnnnnnnnnnnnnnnnnnnnnnnnnnnnnnnnnnnnnnnnnnnnnnnnnnnnnnnnnnnnnnnnnnnnnnnnnnnnnnnnnnnnnnnnnnnnnnnnnnnnnnnnnnnnnnnnnnnnnnnnnnnnnnnnnnnnnnnnnnnnnnnnnnnnnnnnnnnnnnnnnnnnnnnnnnnnnnnnnnnnnnnnnnnnnnnnnnnnnnnnnnnnnnnnnnnnnnnnnnnnnnnnnnnnnnnnnnnnnnnnnnnnnnnnnnnnnnnnnnnnnnnnnnnnnnnnnnnnnnnnnnnnnnnnnnnnnnnnnnnnnnnnnnnnnnnnnnnnnnnnnnnnnnnnnnnnnnnnnnnnnnnnnnnnnnnnnnnnnnnnnnnnnnnnnnnnnnnnnnnnnnnnnnnnnnnnnnnnnnnnnnnnnnnnnnnnnnnnnnnnnnnnnnnnnnnnnnnnnnnnnnnnnnnnnnnnnnnnnnnnnnnnnnnnnnnnnnnnnnnnnnnnnnnnnnnnnnnnnnnnnnnnnnnnnnnnnnnnnnnnnnnnnnnnnnnnnnnnnnnnnnnnnnnnnnnnnnnnnnnnnnnnnnnnnnnnnnnnnnnnnnnnnnnnnnnnnnnnnnnnnnnnnnnnnnnnnnnnnnnnnnnnnnnnnnnnnnnnnnnnnnnnnnnnnnnnnnnnnnnnnnnnnnnnnnnnnnnnnnnnnnnnnnnnnnnnnnnnnnnnnnnnnnnnnnnnnnnnnnnnnnnnnnnnnnnnnnnnnnnnnnnnnnnnnnnnnnnnnnnnnnnnnnnnnnnnnnnnnnnnnnnnnnnnnnnnnnnnnnnnnnnnnnnnnnnnnnnnnnnnnnnnnnnnnnnnnnnnnnnnnnnnnnnnnnnnnnnnnnnnnnnnnnnnnnnnnnnnnnnnnnnnnnnnnnnnnnnnnnnnnnnnnnnnnnnnnnnnnnnnnnnnnnnnnnnnnnnnnnnnnnnnnnnnnnnnnnnnnnnnnnnnnnnnnnnnnnnnnnnnnnnnnnnnnnnnnnnnnnnnnnnnnnnnnnnnnnnnnnnnnnnnnnnnnnnnnnnnnnnnnnnnnnnnnnnnnnnnnnnnnnnnnnnnnnnnnnnnnnnnnnnnnnnnnnnnnnnnnnnnnnnnnnnnnnnnnnnnnnnnnnnnnnnnnnnnnnnnnnnnnnnnnnnnnnnnnnnnnnnnnnnnnnnnnnnnnnnnnnnnnnnnnnnnnnnnnnnnnnnnnnnnnnnnnnnnnnnnnnnnnnnnnnnnnnnnnnnnnnnnnnnnnnnnnnnnnnnnnnnnnnnnnnnnnnnnnnnnnnnnnnnnnnnnnnnnnnnnnnnnnnnnnnnnnnnnnnnnnnnnnnnnnnnnnnnnnnnnnnnnnnnnnnnnnnnnnnnnnnnnnnnnnnnnnnnnnnnnnnnnnnnnnnnnnnnnnnnnnnnnnnnnnnnnnnnnnnnnnnnnnnnnnnnnnnnnnnnnnnnnnnnnnnnnnnnnnnnnnnnnnnnnnnnnnnnnnnnnnnnnnnnnnnnnnnnnnnnnnnnnnnnnnnnnnnnnnnnnnnnnnnnnnnnnnnnnnnnnnnnnnnnnnnnnnnnnnnnnnnnnnnnnnnnnnnnnnnnnnnnnnnnnnnnnnnnnnnnnnnnnnnnnnnnnnnnnnnnnnnnnnnnnnnnnnnnnnnnnnnnnnnnnnnnnnnnnnnnnnnnnnnnnnnnnnnnnnnnnnnnnnnnnnnnnnnnnnnnnnnnnnnnnnnnnnnnnnnnnnnnnnnnnnnnnnnnnnnnnnnnnnnnnnnnnnnnnnnnnnnnnnnnnnnnnnnnnnnnnnnnnnnnnnnnnnnnnnnnnnnnnnnnnnnnnnnnnnnnnnnnnnnnnnnnnnnnnnnnnnnnnnnnnnnnnnnnnnnnnnnnnnnnnnnnnnnnnnnnnnnnnnnnnnnnnnnnnnnnnnnnnnnnnnnnnnnnnnnnnnnnnnnnnnnnnnnnnnnnnnnnnnnnnnnnnnnnnnnnnnnnnnnnnnnnnnnnnnnnnnnnnnnnnnnnnnnnnnnnnnnnnnnnnnnnnnnnnnnnnnnnnnnnnnnnnnnnnnnnnnnnnnnnnnnnnnnnnnnnnnnnnnnnnnnnnnnnnnnnnnnnnnnnnnnnnnnnnnnnnnnnnnnnnnnnnnnnnnnnnnnnnnnnnnnnnnnnnnnnnnnnnnnnnnnnnnnnnnnnnnnnnnnnnnnnnnnnnnnnnnnnnnnnnnnnnnnnnnnnnnnnnnnnnnnnnnnnnnnnnnnnnnnnnnnnnnnnnnnnnnnnnnnnnnnnnnnnnnnnnnnnnnnnnnnnnnnnnnnnnnnnnnnnnnnnnnnnnnnnnnnnnnnnnnnnnnnnnnnnnnnnnnnnnnnnnnnnnnnnnnnnnnnnnnnnnnnnnnnnnnnnnnnnnnnnnnnnnnnnnnnnnnnnnnnnnnnnnnnnnnnnnnnnnnnnnnnnnnnnnnnnnnnnnnnnnnnnnnnnnnnnnnnnnnnnnnnnnnnnnnnnnnnnnnnnnnnnnnnnnnnnnnnnnnnnnnnnnnnnnnnnnnnnnnnnnnnnnnnnnnnnnnnnnnnnnnnnnnnnnnnnnnnnnnnnnnnnnnnnnnnnnnnnnnnnnnnnnnnnnnnnnnnnnnnnnnnnnnnnnnnnnnnnnnnnnnnnnnnnnnnnnnnnnnnnnnnnnnnnnnnnnnnnnnnnnnnnnnnnnnnnnnnnnnnnnnnnnnnnnnnnnnnnnnnnnnnnnnnnnnnnnnnnnnnnnnnnnnnnnnnnnnnnnnnnnnnnnnnnnnnnnnnnnnnnnnnnnnnnnnnnnnnnnnnnnnnnnnnnnnnnnnnnnnnnnnnnnnnnnnnnnnnnnnnnnnnnnnnnnnnnnnnnnnnnnnnnnnnnnnnnnnnnnnnnnnnnnnnnnnnnnnnnnnnnnnnnnnnnnnnnnnnnnnnnnnnnnnnnnnnnnnnnnnnnnnnnnnnnnnnnnnnnnnnnnnnnnnnnnnnnnnnnnnnnnnnnnnnnnnnnnnnnnnnnnnnnnnnnnnnnnnnnnnnnnnnnnnnnnnnnnnnnnnnnnnnnnnnnnnnnnnnnnnnnnnnnnnnnnnnnnnnnnnnnnnnnnnnnnnnnnnnnnnnnnnnnnnnnnnnnnnnnnnnnnnnnnnnnnnnnnnnnnnnnnnnnnnnnnnnnnnnnnnnnnnnnnnnnnnnnnnnnnnnnnnnnnnnnnnnnnnnnnnnnnnnnnnnnnnnnnnnnnnnnnnnnnnnnnnnnnnnnnnnnnnnnnnnnnnnnnnnnnnnnnnnnnnnnnnnnnnnnnnnnnnnnnnnnnnnnnnnnnnnnnnnnnnnnnnnnnnnnnnnnnnnnnnnnnnnnnnnnnnnnnnnnnnnnnnnnnnnnnnnnnnnnnnnnnnnnnnnnnnnnnnnnnnnnnnnnnnnnnnnnnnnnnnnnnnnnnnnnnnnnnnnnnnnnnnnnnnnnnnnnnnnnnnnnnnnnnnnnnnnnnnnnnnnnnnnnnnnnnnnnnnnnnnnnnnnnnnnnnnnnnnnnnnnnnnnnnnnnnnnnnnnnnnnnnnnnnnnnnnnnnnnnnnnnnnnnnnnnnnnnnnnnnnnnnnnnnnnnnnnnnnnnnnnnnnnnnnnnnnnnnnnnnnnnnnnnnnnnnnnnnnnnnnnnnctcatagcaccaggttgtgtctgacctgacataccctgcagctctcagctgcctgcttcaaacttttgtgggagaaagaggagctggagttatagaaatgattgtctcttggttctcagtttttagcccttgagaggacatacttttccagcctcatgggcatggcactcttaattaaaatttcagtgactgtttactggatgaggcagatttttcannnnnnnnnnnnnnnnnnnnnnnnnnnnnnnnnnnnnnnnnnnnnnnnnnnnnnnnnnnngtaaaagcaagtggaattttaataatcttctgtaattacc

SEQ ID NO: 24586 - DNA, 301 bp, Macaca Mulatta
agcagccccaacaagcgaggcccgcccacgtacaacgagcacatcaccaagcgcgtggcctccagcccggcgccgcccgaaggccccagccacccccgagagccaagcacaccccaccgctaccgcgaggggcggaccgagctgcgcagggacaagtctcctggccgccccctggagcgggagaagtccccgggccggatgctcagcacacggagagagcggtcccctgggaggctgtttgaagacagcagcaggggccggctgcctgcgggagccgtgaggaccccgctgtcccaggtga

SEQ ID NO: 24587 - DNA, 303 bp, Macaca Mulatta
  misc_feature (1)...(303): n = A,T,C or G
ggaaacatgatgatgaccggaggtttacctgccctgtcgaaggctgtgggaaatcgttcacgagagcnnnnnnnnnnnnnnnnnnnnnnnnnnnnnnnnnnnnnnnnnnnnnnnnnnnnnnnnnnnnnnnaggatgttgcgcaaggttctccgctcgtagcagtctgtacattcactctaagaaacatgtgcaggatgtgggtgctccgaaaagccgttgcccggtctctacctgcaacagactcttcacctccaagcacagcatgaaggcgcacatggtcagacagcacagccggcgccaag

SEQ ID NO: 24588 - DNA, 2019 bp, Macaca Mulatta
  misc_feature (1)...(2019): n = A,T,C or G
ttgggatatgagattgaaaatgacaactcggaatattcctgagagagaagtaccctgtgatgtagaaatggaatgattcacaagggaagctccctgcttgtccattttaggtgatggttgggactgtgagaaccaggagggagacttgagtcaatcagctttaactctggagaaaccagggactcaggaagcaatttgtgaatatcctggttttggggagcatttgattgcaagctcagaccttccaccatctcagagagttctggcaaccaatggtttccatgcacatgactcaaatgttagtggtctggattgtgaccctgccttacccagctgtcctaaaagttatgcagctaagagaactggtgacagtgatgcctgtggaaaaaccttcaaccattccatggaagttattcatggaagaaatccagtgagagagaagccctacaaatatcctgaaagtgttaagtcttttaatcattttacctctcttggtcatcaaaaaataacgaaaagannnnnnnnnnnnnnnnnnnnnnnnnnnnnnnnnnnnnnnnnnnnnnnnnnnnnnnnnnnnnnnnnnnnnnnnnnnnnnnnnnnnnnnnnnnnnnnnnnnnnnnnnnnnnnnnnnnnnnnnnnnnnnnnnnnnnnnnnttctcttgttttgcatcaccgaactcacaccggagagaagccttatacttgtaatgagtgtggaaagtccttctccaagaactacaacctgattgtgcatcaaaggatccacacaggagagaagccctataaatgtagtaagtgtgggaaagctttcagtgatgggtcagctctgacgcagcaccagagaattcacacaggcgagaaaccttacgaatgcctggaatgtggaaaaaccttcaaccgaaattcatccttaattttgcaccaaagaactcatacaggggaaaaaccatacagatgtaacgagtgcggaaaacccttcacggacatctcccaccttacagtgcatctcagaatccacaccggtgagaagccctatgagtgtagcaaatgtggaaaggctttccgggacggctcgtacctcacccagcacgagaggactcacactggagaaaagccctttgagtgtgcagagtgtgggaaatccttcaacagaaactctcacctcatgtgcatcaaaagatccattctggggagaaaccctatgaatgtaaagaatnnnnnnnnnnnnnnnnnnnnnnnnnnnnnnnnnnnnnnnnnnnnnnnnnnnnnnnnnnnnnnnnnnnnnnnnnnnnnnnnnnnnnnnnnnnnnnnnnnnnnnnnnnnnnnnnnnnnnnnnnnnnnnnnnnnnnnnnnnnnnnnnnnnnnnnnnnnnnnnnnnnnnnnnnnnnnnnnnnnnnnnnnnnnnnnnnnnnnnnnnnnnnnnnnnnnnnnnnnnnnnnnnnnnnnnnnnnnnnnnnnnnnnnnnnnnnnnnnnnnnnttcaagcagaactctcacctggcagtacatcagagactccatagcagggagggtcccagccagtgtcctcagtgtggaaaaacgttccgaaagagctcatcccttgttcgacatcaaagagcacacctgggagagcaaaccatggaaacataatagtttggggccacatgagtcttccagttagcgctcatgcctgtgtttaggaggcgtgtcttacatctgactcctctctggtcagtagaaaagaatcctttaagctaaccagtgaattgatgaatgtgagacattgctgagccacactgttaagtctgctcattggggaactcaggagaccacttaggatggtagtaaatgcagaaaagtctttggggatgatttagtctgtaccagacaggacagcacacacactggaatgaaacgtgcaaacatgggggtgacacttcctacagagagagcctgtgaatgcattcagaacatgattggaatgaagagccctgtagtagggagtttccaccttgtacataagcaaacactgaatcaa

SEQ ID NO: 24589 - DNA, 674 bp, Macaca Mulatta
ttttgtctcacaaagttaaagatgagatcctctccatcatgagctgcttagtaagtggccagcagctagtttgtatatgtttttatgtttttggctgtctctagtggcagtgtatttcccttctggtaatgaactttgtgacaaagaagtataatttatccttttagttaattagcggtattactgcatatatttggaaaattaactgatatgtttactgtttggagagctgagtctgtggcctgcaagtaaaatggtaaatgctaaccaggacaaagaagagaagtttgctaagtgctttgtagtgaccttatgtttgggtcaatctcagtgatgcctgggtttagacttattcagggtctgagccagggttttgtttaatttgagccacttacatattttaaaaagtaagaaactcatttgtaaatagatgatagttttattgaaaactgtattaaactttatttaattgccttatctcctattttaggtttgaaagagaagatagtgaggagctttgaagtctcctcagatgggtccttcttgctcataaatggcattgctggatatttgcatttgctagcaatgaagaccaaagaactgattggaagcatgacaattaatggaagggttgcagcatccactttctcttcagatagtaagaaagtgtatgc

SEQ ID NO: 24590 - DNA, 429 bp, Macaca Mulatta
gggtgggaacacttttttcaggtcctccagcactgagagccgggtcccggcgccgaagtactgagtgttttggctaaggtgtccctgacggctactggcacagagatagaaagctgttgggttcctttgggctgatgtcacagtgagaggaaaggattccttcctctcccgagacacactgtacccttcagctatgtctcctttctgaatgtcatttactatctgtgagtagtagatcaatctcagtccttgacctgggtcctgtcggtaccagtacatggcatcgtggttcaaattctgttcacaactcagggtcacattctgtccttcctttctgaacaggtactttggggactgagtgattccgccatccatggtgtttgctccaaggagacaaaggaccacacagcagaggccctggttgctcat

SEQ ID NO: 24591 - DNA, 809 bp, Macaca Mulatta
  misc_feature (1)...(809): n = A,T,C or G
ggaaagagcagagtgactgtgggtctggaatggctggtgtacttgggaatgtattatcaggattttacagcaatgctgggaaacgacagggaaaatgacaggaatgaatctcaccagattttttatgtactcagcagagccttgagttacggtgtttattttccaatcaagtgaagatatctcctactggaacatctcagctcctgcagtgaagaaaaattcctgtgatagttcagttccttagtttttctnnnnnnnnnnnnnnnnnnnnnnnnttaaatgatcttttgttcacggctctccttaatgactgagtgaacagttcctatctgtatatttgactaaaccttttcctaagctatctctcatggttcctatgtttttttatcataattaaaagcaaaaccatctggatcacctaacagtcagaggtcagtatctcagcgtgtgaattacagagtaaatacagagagaacctcttccacttttacttttcgtccaaataaaatgcatggtgtaccagaagttgaagatcgggttgaggattggggctagctcgatgacactaaggccccgacatcgcgggacgggacctgctgtggcgtggattcttaggaacgcggttctagccggccccctctccagggctcgccgtggccggcgttacttcctagttcttcttgtaacccttgagtgccancacggggaaggaaagagggatcanggnngctgaagatgcaacctctgacgttctgcggcttcctaggagagtcttacatgttgttgaagatttaccaagcaatggccag

SEQ ID NO: 24592 - DNA, 850 bp, Macaca Mulatta
  misc_feature (1)...(850): n = A,T,C or G
ataatgatatgtcgccgggtggggcgttccaagggttaatatcaaggcaccttttgtaggagggggtttaccacattccgggcggaaaatgattaaatggagtttacccacccatttttttcgaagaaattgacacccggccgcgggggctaaattttgaaattttaagggctcaccttggaaaaccccccttggaaagaaacccacgtaaggacccttcaaaaacaccctatttggattttgtttcaaaacaattctgttttcccccccnnnnnnnnnnnnnnnnnnnnnnnaatccaacacccctatttcctggacaccggttttccttaagaaacacgctatgacccattttcccttaccctatggggcccccggggcacaaagaaatggtttagaaaaattttctcaagggcccagggcggccaaccaaattttttatttatattactagattcagctggaagatggattgttgttaatgttggtttttnatgtttnttatccaaaatgtgtttattgagatggtttcccactcatcttgattcagagtgcctttagtgctgcttcctcctaaaggaacatccttctgtaagccttgcttttcctcctgtaggctggcagaggacagtggagcagccaacacacaaaactaccgtttgtgcatggctaaagaccgtggtgattttatagcatcctgggcatttcacatccatgaagtaggaattggggctctgcaccaggcgtttcttcttgtgtttcctcttctcctcttctggggagggatgaaggagatcctttgcgagaggcatgttctcgtgtgggtaggtcgtcaccgccggaaaagccc

SEQ ID NO: 24593 - DNA, 1112 bp, Macaca Mulatta
  misc_feature (1)...(1112): n = A,T,C or G
cggggctctatgtgtctctccctagagctttgccgttggaggcagctgctgcggtcctgcgagtttgaccggcatcaagcggcagcaacagggaggaattcgactccgaagacttctccacgtcggaggaggacgaggactacgtgccgtcgggtggagagtatagtgaagatgatgtaaatgaattagtgaaggaagatgaagtggatggtgaagagcagacacagaaaacccaagggaagagaaagaaaggcccagagcattccagccaggaagagaaaacaaggtgggctctcattnnnnnnnnnnnnnnnnnnnnntgccaattcagaatctgagggaagcagtagtgaggaagaagatgaagctgcagagcaggaaaaaggcattggatcagaggatgcaaggaaaaagaaggaagacgaactgtgggccagcttcctcaatgatgtgggaccaaaatcaaaagtgcccccaagtacacaagttaagaaaggagaggagactgaagagacaagttcaagtaaattgttggtaaaagcagaagagctagagaaacctaaagaaacagaaaaagttaaaatcaccaaggtgtttgattttgctggtgaagaagtacgggtgactaaggaagtggatgctacatctaaagaggccaaatccttcttcaagcagaatgagaaagaaaaaccaccagctaatgtcccttcagctctgccgtcactccctgctgggtcagggttaaaaagatcaagtggcatgagcaaccttttggggaaaattggtgccaagaaacagaaaatgagcaccctcgagaagtccaaactggactgggagagcttcaaggaggaagaggggattggtgaagaactggccatccataatcgagggaaagaggggtacattgaacggaaagccttcctcgaccgagtggatcacaggcagtttgaaattgagcgagatctcaggctgagcaaaatgaaaccttgatgttacggacaaaatcaagagcagcttaatcctgtttacaaagtgagcttttttgtgcgtctggtgaaatgtttttccaagtgttttctcaatcatctggtttccccaacaaggttcctttt

SEQ ID NO: 24594 - DNA, 99 bp, Macaca Mulatta
agggaagcagctatagagagggtctaactccagttctcagcttattaaccgaatgttcccgagcccatcgaaacatccgaaaatttctcaaagatcagg

SEQ ID NO: 24595 - DNA, 741 bp, Macaca Mulatta
  misc_feature (1)...(741): n = A,T,C or G
agagaagagaagagagaaaacgaggggaaantcctccactagatggcgagcagcgcttaagctgtttgggataatacaaccttaaggaaccaagagaacctctgtatgtctcatggaggaatttaattctgaaaagaaatcatctcgccggtcagaggaacaacaagcaacaagcactttagtagaaaccatcaggcagagtattcagcataataatgttcttaaacccatcaacctactttcacagcaaatgaagccaggcatgaaaagacaaaggagtttatacagagaaatcctcttcttatcattagtgtctctaggaagagagaatattgatattgaggcatttgacaatgaatatggaattgcatacaatagtctgtcttcagagattcttgaaaagttgcagaaaattgatgctccaccaagtgccagtgtcgagtggtgcaggaagtgttttggagcgcctctcatttaaatagagattcactagaattttgacacacaaggcttggagattagatttaatctggaaacattcaagggtttttttccccaaatcgtaagaactggtgaatatggaattgaagtaattcttgaggacagtatttaatgaattatgattcatactgcatcatgtccaaatatgaaatgccatttaaatgtcccagggggttattaacattgaagattttcaactcctgaactgcgtttctgactcttgtggaaactactttggga

SEQ ID NO: 24596 - DNA, 1151 bp, Macaca Mulatta
  misc_feature (1)...(1151): n = A,T,C or G
catctgcttcaatggttccagattgatgcagccagaggtnaggtcatcaccggcgagtcctcagactcctgggctgtatttctgctggtgttttcctgggagcagggttcatgcatatgactgctgaagccctggaggaaattgaatcacagattcagaagttcgtggtgcagnagaacagatcaacaagtgagagaaattcttctggtgatgctgattcggctcatnnnnnnnnnnnnnnnnnnnnnnnnnnnnnnnnnnnnnnnnnnnnnnnnnnnnnnnnnnnnnnnnnnnnnnnnnnnnnnnnnnnnnnnnnnnnnnnnnnnnnnnnnnnnnnnnnnnnnnnnnnnnnnnnnnnnnnnnnnnnnnnnnnnnnnnnnnnnnnnnnnnnnnnnnnnnnnnnnnnnnnnnnnnnnnnnnnnnnnnnnnnnnnnnnnnnnnnnnnnnnnnnnnnnnnnnnnnnnnnnnnnnnnnnnnnnnnnnnnnnnnnnnnnnnnnnnnnnnnnnnnnnnnnnnnnnnnnnnnnnnnnnnnnnnnnnnnnnnnnnnnnnnnnnnnnnnnnnnnnnnnnnnnnnnnnnnnnnnnnnnnnnnnnnnnnnnnnnnnnnnnnnnnnnnnnnnnnnnnnnnnnnnnnnnnnnnnnnnnnnnnnnnnnnnnnnnnnnnnnnnnnnnnnnnnnnnnnnnnagggcggggcttagcccaggctgtgttagagggtgtggcagctggcaccttcctgtatgtcaccttcctagaaattcttccacgggagctagctagtcctgaggcccctctagctaagtggagctgtgtagccgctggttttgccttcatggcctttattgccttatgggcctgagagattcctagcttttctgatggacctatttaggatgacctctctatccccaaggagacctcccaaatggctttggccctcagacatttctttactgagactaaatagcattcaataggactggactggaccccaggtttcctttacatgagatcccatttctcacccaggactgagaaaaagatatttaggttgagcagctattaattggagaattggtacagagatgctccagattttattcttgtcccatttatgctactgtgtgtaataaaatgcccattttaccct

SEQ ID NO: 24597 - DNA, 155 bp, Macaca Mulatta
gatgtccagtggcatgagccagttgattgggctgaaggaaaagggcctgccacaaattgcccgcctcctgcaatctggcaactctgatgtggtgcggtctggagcctccctcctgagcaacatgtcccgccaccctgtgctgcacagagtgatgg

SEQ ID NO: 24598 - DNA, 98 bp, Macaca Mulatta
gtcagctcaactaccaggcagcctctccagatgaaggtgccctggtaaacgctgccaggaacttcggctttgccttcctcgccaggacccagaacacc

SEQ ID NO: 24599 - DNA, 134 bp, Macaca Mulatta
aggctggcaaggcaatggacatgtttgcgaagatatcaatgaatgtgagataaataatggcggctgttctgtggctccacttgttgagtgtgtgaatacgcctgggtcttcccattgtcagccctgtccaccag

SEQ ID NO: 24600 - DNA, 1465 bp, Macaca Mulatta
  misc_feature (1)...(1465): n = A,T,C or G
cagcgggaactattctacatcctcctggcatattcggagtataacccggnggaggtgggctactgcagggacctgagccacatcgcggccttgtttctcctgtatctgcctgaggaggatgcattctgggcactggtgcagctgctggccagnnnnnnnnnnnnnnnnnnnnnnnnnnnnnnnnnnnnnnnnnnnnnnnnnnnnnnnnnnnnnnnnnnnnnnnnnnnnnnnnnnnnnnnnnnnnnnnnnnnnnnnnnnnnnnnnnnnnnnnnnnnnnnnnnnnnnnnnnnnnnnnnnnnnnnnnnnnnnnnnnnnnnnnnnnnnnnnnnnnnnnnnnnnnnnnnnnnnnnnnnnnnnnnnnnnnnnnnnnnnnnnnnnnnnnnnnnnnnnnnnnnnnnnnnnnnnnnnnnnnnnnnnnnnnnnnnnnnnnnnnnnnnnnnnnnnnnnnnnnnnnnnnnnnnnnnnnnnnnnnnnnnnnnnnnnnnnnnnnnnnnnnnnnnnnnnnnnnnnnnnnnnnnnnnnnnnnnnnnnnnnnnnnnnnnnnnnnnnnnnnnnnnnnnnnnnnnnnnnnnnnnnnnnnnnnnnnnnnnnnnnnnnnnnnnnnnntcggcaccgaggcctgtgctgacttcaagtggcagaacgaccctctgcaagggggacaggcagacccctccaggcccaccagcccggttccagcggcccatttggttagtttccccaccatgggcacctcgttcttccacatcttgtcctggtggggccgtccgggaagacacctaccctgtgggcactcaggatgtgcccagcctggtcccagctcagggaagacctcagggttcctggagattcctggagtggaactcgatgccccggctcccgacggacctggatgtagggggcccttggttcccccattatgatttcgaacagagctgctgggtccgtgnnnatcccaggaagagcagctggccacctgctggcaggcggaacaccctgcggagggggtgagattggctttcnctgcacgcagcactgattccaaccaggacagctccttcacagctagggacgagcagcannnnnnnnnnnnnnnnnnnnnnnnnnnnnnnnnnnnnnnnnnnnnnnnnnnnnnnnnnnnnnnnnnnnnnnnnnnnnnnnnnnnnnnnnnnnnnnnnnnnnnnnnnnnnnnnnnnnnnnnnnnnnnnnnnnnnnnnnnnnnnnnnnnnnnnnnnnnnnnnnnnnnnnnnnnnnnnnnnnnnnnnnnnnnnnnnnnnnnnnnnnnnnnnnnnnnnnnnnnnnnnnnnnnnnnnnnnnnnnnnnnnnntgcccagcccctcccagcaccccccactgtgtgaccagctttctgaattctgatgacaccatgtgcctgcctttgtattttcaactcatagacagttaacccccttcctgttttaaaataaatgttttctgttgaaat

SEQ ID NO: 24601 - DNA, 600 bp, Macaca Mulatta
tttcgcagccaaagccagcctccgactttcttcccttaacttttccaaggctaactcctctaacaaaatgctggcgtttttgtttgcttcagcagcctgtctatctttggcttgtctattgactccatacaaagatgacacttcttcagcatctccttatcagtgatggttgctatgtatctcatacattcagaatctgatggaaactgattgacttctttgactaagtagcgcaccaccttcacatgaccctttctaaatgctgccataagaggagttatcttgcggttatctgctgcatccacatctgcacctgcttgcaccagtaactgaaccacatcgaggtgtccaccatttgctgctagccacaatggagtgttccccttcttgttacgtacatcaatatgagctcccctgccaataagaagctcacagaatttgtaatgccctttatctgctgctatggttaaagctgtatctcttgaggaaggaactggaggggcattaacatcagcacctttatccaagagaactcggaccacctccggatatccaccagaggcagcttccattagtggtgtgagaccagtcttagctctg

SEQ ID NO: 24602 - DNA, 1835 bp, Macaca Mulatta
  misc_feature (1)...(1835): n = A,T,C or G
ggcggcggcggctgtgccggagcgtgagcggtgcggggacccccgagtcctgcgggcgcgnnnnnnnnnnnnnnnnnnnnnnnnnnnnnnnnnnnnnnnnnnnnnnnnnnnnnnnnnnnnnnnnnnnnnnnnnnnnnnnnnnnnnnnnnnnnnnnnnnnnnnnnnnnnnnnnnnnnnnnnnnnnnnnnnnnnnnnnnnnnnnnnnnnnnnnnnnnnnnnnnnnnnnnnnnnnnnnnnnnnnnnnnnnnnnnnnnnnnnnnnnnnnnnnnnnnnnnnnnnnnnnnnnnnnnnnnnnnnnnnnnnnnnnnnnnnnnnnnnnnnnnnnnnnnnnnnnnnnnnnnnnnnnnnnnnnnnnnnnnnnnnnnnnnnnnnnnnnnnnnnnnnnnnnnnnnnnnnnnnnnnnnnnnnnnnnnnnnnnnnnnnnnnnnnnnnnnnnnnnnnnnnnnnnnnnnnnnnnnnnnnnnnnnnnnnnnnnnnnnnnnnnnnnnnnnnnnnnnnnnnnnnnnnnnnnnnnnnnnnnnnnnnnnnnnnnnnnnnnnnnnnnnnnnnnnnnnnnnnnnnnnnnnnnnnnnnnnnnnnnnnnnnnnnnnnnnnnnnnnnnnnnnnnnnnnnnnnnnnnnnnnnnnnnnnnnnnnnnnnnnnnnnnnnnnnnnnnnnnnnnnnnnnnnnnnnnnnnnnnnnnnnnnnnnnnnnnnnnnnnnnnnnnnnnnnnnnnnnnnnnnnnnnnnnnnnnnnnnnnnnnnnnnnnnnnnnnnnnnnnnnnnnnnnnnnnnnnnnnnnnnnnnnnnnnnnnnnnnnnnnnnnnnnnnnnnnnnnnnnnnnnnnnnnnnnnnnnnnnnnnnnnnnnnnnnnnnnnnnnnnnnnnnnnnnnnnnnnnnnnnnnnnnnnnnnnnnnnnnnnnnnnnnnnnnnnnnnnnnnnnnnnnnnnnnnnnnnnnnnnnnnnnnnnnnnnnnnnnnnnnnnnnnnnnnnnnnnnnnnnnnnnnnnnnnnnnnnnnnnnnnnnnnnnnnnnnnnnnnnnnnnnnnnnnnnnnnnnnnnnnnnnnnnnnnnnnnnnnnnnnnnnnnnnnnnnnnnnnnnnnnnnnnnnnnnnnnnnnnnnnnnnnnnnnnnnnnnnnnnnnnnnnnnnnnnnnnnnnnnnnnnnnnnnnnnnnnnnnnnnnnnnnnnnnnnnnnnnnnnnnnnnnnnnnnnnnnnnnnnnnnnnnnnnnnnnnnnnnnnnnnnnnnnnnnnnnnnnnnnnnnnnnnnnnnnnnnnnnnnnnnnnnnnnnnnnnnnnnnnnnnnnnnnnnnnnnnnnnnnnnnnnnnnnnnnnnnnnnnnnnnnnnnnnnnnnnnnnnnnnnnnnnnnnnnnnnnnnnnnnnnnnnnnnnnnnnnnnnnnnnnnnnnnnnnnnnnnnnnnnnnnnnnnnnnnnnnnnnnnnnnnnnnnnnnnnnnnnnnnnnnnnnnnnnnnnnnnnnnnnnnnnnnnnnnnnnnnnnnnnnnnnnnnnnnnnnnnnnnnnnnnnnnnnnnnnnnnnnnnnnnnnnnggctgtcccctcctctccagcccctgcccacccaccggtggaggtgctaactagcagggacgtggcataggatgggagctgggtgcgagctgtttggggtccattctttgtccctcagcctctcagagtccggccagcccttgtgttcccatgccccccactttcctcctccccactgcagtgaggcaatagtccagggtggggcctggcctccctgccctgattgggcactcaggaggtgaggcctggggggcttcctgcccactccttgcccacctgcctgcccccgggcagcacgggagggagagc

SEQ ID NO: 24603 - DNA, 74 bp, Macaca Mulatta
agcttacgaactctggtttaagcaaatcctctgggaattggattctgttcgagagatctttcagaatggccatg

SEQ ID NO: 24604 - DNA, 729 bp, Macaca Mulatta
aattctccttccttggttgaagcggttctgcttgcctcccaggcatcatcctcagggtagttggttctatgctcttgacctgtaaggagctagatggaactcacggagtcaactgactgtcttcacaggcaactgtgtaaagaattcacagaacttctcagccaagaccggacaccccacgggacaagcaggcccgccccagtcttggagacgaacatacagaactgcttgtctcatttcagcctgattacccacggttttggcagccaggccatctgtgccgcggtgtctgccctgcagaactacatcaaagaagccctgattgtcatagacaaatcctacgtgaaccccggagaccagagtccggctgattctaacaaaaccctggagaaaatggagaagcacaggaaataaaattgggacgaagaaaggctcggagagttgggaaggaacaggactgcaaaaatccttctccaccgcacagactgggaacccctcttggcctgggggaagagtttcttacctaccttactctttaaggggtcttcactggttctggatcgcagcgatcacccgctcctggattccttagttgcttctctagcgctgagctgtctcctaactttggacctattatcagaaggtgacaagtactggctctttattcattaagcttttattattattatttttgaaccccattctttccttctctgaaactggtgctac

SEQ ID NO: 24605 - DNA, 825 bp, Macaca Mulatta
  misc_feature (1)...(825): n = A,T,C or G
ggcaactagagcacatacaacccattacagcaagtcagacccaggcccagggcccgaaaagctcaaaggtcaaagacactacctcttccttnnnnnnnnnnnnnnnnnnnnnnnnnaggaggtctcgnnnnnnnnnnnnnnnnnnnnnnnnnnnnnntnnnnnnnnnnnnnnnnnnnnnnnatctcccgggttcaagccattctcctgcttcagcctcccaagtggccgggactgcaggcgtgtgccaccacgcccggctgatcttgttgtgtttttagtagagacagaannnnnnnnnnnnnnnnnnnatgctctcgaattcctgacctcgggtgatccacctgcctcttcccctttgaatgtactcatctaccgaactaacaatttcaacaagtatcactggggcccaaagacaattcttcctacctaaaggtgctcaaagtctaaatgagtaggtcatggaaacaaatcatgactgcagatcttgccgcatgtccaagatgctcctagagagcagaactctaaccctggaacgagcagaaaatatacctttgaaggccgaacgaggaagagtttcccagtggactaaaaatgtaaaaagtgaagcncccgagctagacttggagtggtagcatttatggnnnncncagctcaaacatccaagaattnnnnnnnnnnnnnnnnnnnnnnnnnnnnnnnnnnnnnnnnnnnnnnnnnnnnnnnnnnnnnnnnnnnnnnnnnnnnnnnnnnnnnnnnnnnnnnnnnnnnnnnnnnnnnnnnnnnnnnnnnnnnnnnnnnnnnnnnnnnnnnnnnnnnnnnnnnnn

SEQ ID NO: 24606 - DNA, 152 bp, Macaca Mulatta
tgacggtttcatataccctcaaagtggcggaggcccgcttcggaggtttctctggcctgcttctccgttggaggggaagcatctacaagctcctctacaaggaattcctcctcttcggggccttgtacgctgtgcttagcatcacctaccgg

SEQ ID NO: 24607 - DNA, 836 bp, Macaca Mulatta
gatctgcagatccttctctcctttatcttcctattagtctacctgaccactatgatggccaacgccaccatcatgatggtcattcgcctggacagggctttgcacactcctatgtactccttcctctttgtcctttcacgttgtgaaacctgctacaccttggtcattgtacccaaaatgcttaccaacctgctatctacaattccaactatttctttctctgggtgtgtggtccagctctatttatttgtgggcttggcttgtaccaactgctttctcattgccgtgatgagctctgatcgctatgttgccatctgcaacccccttaactacacactcattgtcaggcgagccacctgcatgcagctggctctagcctccagcttttgtgggttcctggtgtttatgattgccagtatcctggtgttcagtgtgctctcctgtgcctccaatcggatcaaccactttttttgtgacatttcccctgtcatacaactgggctgcacagacaccaacctgaaggagatgatcgtctttttcctcagcattctggtcttggtggatccccttgtgatgacattcatctcctacttcttaatagtttccaccatcctcaagatctcgtcagtggaaggacagtgcaaagccttcgccacctgtgcttcccacctctcagtggtcgtcatccactatggctgtgcttcctttttctacttgaggcccacatccctgtactcttcagagaaggaccggctcgtggcagtgacttatactgtcattaccccactgctcaacccccttgtctctaaactgagaaataaagaagtaaagaaggc

SEQ ID NO: 24608 - DNA, 909 bp, Macaca Mulatta
  misc_feature (1)...(909): n = A,T,C or G
tttagatctttaaatggatgagatggctaccactcagatttccaaagatgaacttgatgaactcaaagaggcctttgcaaaagttgnnnnnnnnnnnnnnnnnnnnnnnnnnnnnnnnnnnnnnnnnnnnnnnnnnnnnnnnnnnnnnnnnnnnnnnnnnnnnnnnnnnnnnnnnnnnnnnnnnnnnnnnnnnnnnnnnnnnnnnnnnnnnnnnnnnnnnnnnnnnnnnnnnnnnnnnnnnnnnnnnnnnnnnnnnnnnnnnnnnnnnnnnnnnnnnnnnnnnnnnnnnnnnnnnnnnnnnnnnnnnnnnnnnnnnnnnnnnnnnnnnnnnnnnnnnnnnnnnnnnnnnnnnnnnnnnnnnnnnnnnnnnnnnnnnnnnnnnnnnnnnnnnnnnnnnnnnnnnnnnnnnnnnnnnnnnnnnnnnnnnnnnnnnnnnnnnnnnnnnnnnnnnnnnnnnnnnnnnnnnnnnnnnnnnnnnnnnnnnnnnnnnnnnnnnnnnnnnnnnnnnnnnngtaaaatgattaacctttcagttcctgataccattgatgaaagagcaatcaacaagaagaaacttacacccttcatcattcagnnncaggaaaacttgaacttggcactgaactctgcttctgccattgggtgtcatgttgtgaacattggtgcagaagatttgagggctgggaaacctcatgtggttttgggactgctttggcagatcattannnnnnnnnnnnnnnnnnnnnnnnnnnnnnnnnnnnnnnnnnnnnnnnnnnnnnnnnnnnnnnnnnnnnnnnntggaggaacttatgaaattgtctccagaagagcttctgcttagatgggcaaactttcatttggaaaactcgggctggcaaaaaattaacaactttagtgctgacatcaagg

SEQ ID NO: 24609 - DNA, 299 bp, Macaca Mulatta
caagactcactggagagacacaatatgtatgtaaacaatgataaagtcttctatatttccagttcccgttgacatcatgaataaacttgcactggacagataaccctataaatgtaattgtgggaaagcctttcataatttttattcctttcaaaatcatgaaacaactcacactggagagatactatctgaatgtaaggaatgtgggaaacgcaatcaattttttaaaaataccattgtcaatatataacaactcacagagcagaataaccctgtgagtgtaaaatatgtaaggaagc

SEQ ID NO: 24610 - DNA, 1793 bp, Macaca Mulatta
  misc_feature (1)...(1793): n = A,T,C or G
caggatgccgtgcgcatgcttaataccctgcagaccaatgccggctacctggagcaggtgaagcgccagcggggtgacccccagacacagctggaagccatggaactgtacctggcacggagtgggctgcaggtncaggtggaggacttggaccggctgaacatcatccacgtcactgggacgaaggggaaggnaagggctccacttgtgccttcacggaatgtatcctccgaagctatggcctgaaaacgggattctttagnnnnnnnnnnnnnnnnnnnnnnnnnnnnnnnnnnnnnnnnnnnnnnnnnnnnnnnnnnnnnnnnnnnnnnnnnnnnnnnnnnnnnnnnnnnnnnnnnnnnnnnnnnnnnnnnnnnnnnnnnnnnnnnnnnnnnnnnnnnnnnnnnnnnnnnnnnnnnnnnnnnnnnnnnnnnnnnnnnnnnnnnnnnnnnnnnnnnnnnnnnnnnnnnnnnnnnnnnnnnnnnnnnnnnnnnnnnnnnnnnnnnnnnnnnnnnnnnnnnnnnnnnnnnnnnnnnnnnnnnnnnnnnnnnnnnnnnnnnnnnnnnnnnnnnnnnnnnnnnnnnnnnnnnnnnnnnnnnnnnnnnnnnnnnnnnnnnngcaaggcgtccctgccttcactgtgctccaacctgaaggtcccctggcagtgctgagggaccgagcccagcagatctcannnnnnnnnnnnnnnnnnnnnnnnnnnnnnnnnnnnnnnnnnnnnnnnnnnnnnnnnnnnnnnnnnnnnnnnnnnnnnnnnnnnnnnnnnnnnnnnnnnnnnnnnnnnnnnnnnnnnnnnnnnnnnnnnnnnnnnnnnnnnnnnnnnnnnnnnnnnnnnnnnnnnnnnnnnnnnnnnnnnnnnnnnnnnnnnnnnnnnnnnnnnnnnnnnnnnnnnnnnnnnnnnnnnnnnnnnnnnnnnnnnnnnnnnnnnnnnnnnnnnnnnnnnnnnnnnnnnnnnnnnnnnnnnnnnnnnnnnnnnnnnnnnnnnnnnnnnnnnnnnnnnnnnnnnnnnnnnnnnnnnnnnnnnnnnnnnnnnnnnnnnnnnnnnnnnnnnnnnnnnnnnnnnnnnnnnnnnnnnnnnnnnnnnnnnnnnnnnnnnnnnnnnnnnnnnnnnnnnnnnnnnnnnnnnnnnnnnnnnnnnnnnnnnnnnnnnnnnnnnnnnnnnnnnnnnnnnnnnnnnnnnnnnnnnnnnnnnnnnnnnnnnnnnnnnnnnnnnnnnnnnnnnnnnnnnnnnnnnnnnnnnnnnnnnnnnnnnnnnnnnnnnnnnnnnnnnnnnnnnnnnnnnnnnnnnnnnnnnnnnnnnnnnnnnnnnnnnnnnnnnnnnnnnnnnnnnnnnnnnnnnnnnnnnnnnnnnnnnnnnnnnnnnnnnnnnnnnnnnnnnnnnnnnnnnnnnnnnnnnnnnnnnnnnnnnnnnnnnnnnnnnnnnnnnnnnnnnnnnnnnnnnnnnnnnnnnnnnnnnnnnnnnnnnnnnnnnnnnnnnnnnnnnnnnnnnnnnnnnnnnnnnnnnnnnnnnnnnnnnnnnnnnnnnnnnnnnnnnnnnnnnnnnnnnnnnnnnnnnnnnnnnnnnnnnnnnnnnnnnnnnnngtcctgaagctgctggagcctgcactgtcccagtagctgaggcccggggttggaggtgggagcctcccacacctgcctgcgttctccccatgaacttacatactaggtgccttttgttttctgctttcctggttctgtctagactggcctagggatcagggctctgggatgggaggccaggagaggatgtc

SEQ ID NO: 24611 - DNA, 748 bp, Macaca Mulatta
aactaggaggtgaggaatgagatcttaggtttaacctgcatcctgaccccaccatctatagggtcccaacttggttattacaggcaaccttccctctctccttggtgaagaacatcccaagccagaaagaagagaagttaactacagtgttttcctttgcactgatccccaccccaattcaatccaggaagggacttaggaaacccttctttactagatatcctggccccttgggcttgtgaacacctcctagccacatcactacagtacagtgagtgaccccagcctcctgcctaccccaagatgcccctccccaccctgaccgtgctaactgtgtgtacatatatattctacatatatgtatattaaaactgcactgccatgtctgcccttttttgtggtgtctagcattaacttattgtctaggccagagcgggggcgggaggggaatgccacagtgaagggagtggcagaatcaaattgctacatagtccaaacaaaaaagaaagctttttcaaaaaacatttaattcacatgcagtctcagagactatttagacaaagttgaagttaggagctttcaggatgtgagagtaaaactttaatgggaggggagggctggctgctggaagaaggaagaagccagactggttagacagtattcttaactcctagcccagcctagcgtgtcctgcccctctggccactgctgcagacacctgccttaacacacaacctctaggactcca

SEQ ID NO: 24612 - DNA, 199 bp, Macaca Mulatta
  misc_feature (1)...(199): n = A,T,C or G
natttacttttatcaaggtggacaagctgtagccatcggacaatttaaagatcgaattacagggtccaacgatccaggtaatgcatctatcactatctcgcatatgcagccagcggacagtggaatttacatctgtgatgttaacaaccccccagactttctcggccaaaaccaaggtgtcctcaacgtcagtgtgtta

SEQ ID NO: 24613 - DNA, 2500 bp, Macaca Mulatta
  misc_feature (1)...(2500): n = A,T,C or G
aggtatgaaagatgccgccgagcttctgggccaccgggaggcggtgaagtgtaggctgggcgtggggggctccgaccccgggggccatccgggggacctggcgcccaactctgacccagtggagggagccactctgctgcccggggaggacatcaccacagtgggctctactccggcctcgctggcggtgagcgccaaagacccggacaagcagcccgggccccagggcggcccgaaccccagccaagccggccagcagcagggacaacagaagcagaagcgccaccggnnnnnnnnnnnnnnnnnnnnnnnnnnnnnnnnnnnnnnnnnnnnnnnnnnnnnnnnnnnnnnnnnnnnnnnnnnnnnnnnnnnnnnnnnnnnnnnnnnnnnnnnnnnnnnnnnnnnnnnnnnnnnnnnnnnnnnnnnnnnnnnnnnnnnnnnnnnnnnnnnnnnnnnnnnnnnnnnnnnnnnnnnnnnnnnnnnnnnnnnnnnnnnnnnnnnnnnnnnnnnnnnnnnnnnnnnnnnnnnnnnnnnnnnnnnnnnnnnnnnnnnnnnnnnnnnnnnnnnnnnnnnnnnnnnnnnnnnnnnnnnnnnnnnnnnnnnnnnnnnnnnnnnnnnnnnnnnnnnnnnnnnnnnnnnnnnnnnnnnnnnnnnnnnnnnnnnnnnnnnnnnnnnnnnnnnnnnnnnnnnnnnnnnnnnnnnnnnnnnnnnnnnnnnnnnnnnnnnnnnnnnnnnnnnnnnnnnnnnnnnnnnnnnnnnnnnnnnnnnnnnnnnnnnnnnnnnnnnnnnnnnnnnnnnnnnnnnnnnnnnnnnnnnnnnnnnnnnnnnnnnnnnnnnnnnnnnnnnnnnnnnnnnnnnnnnnnnnnnnnnnnnnnnnnnnnnnnnnnnnnnnnnnnnnnnnnnnnnnnnnnnnnnnnnnnnnnnnnnnnnnnnnnnnnnnnnnnnnnnnnnnnnnnnnnnnnnnnnnnnnnnnnnnnnnnnnnnnnnnnnnnnnnnnnnnnnnnnnnnnnnnnnnnnnnnnnnnnnnnnnnnnnnnnnnnnnnnnnnnnnnnnnnnnnnnnnnnnnnnnnnnnnnnnnnnnnnnnnnnnnnnnnnnnnnnnnnnnnnnnnnnnnnnnnnnnnnnnnnnnnnnnnnnnnnnnnnnnnnnnnnnnnnnnnnnnnnnnnnnnnnnnnnnnnnnnnnnnnnnnnnnnnnnnnnnnnnnnnnnnnnnnnnnnnnnnnnnnnnnnnnnnnnnnnnnnnnnnnnnnnnnnnnnnnnnnnnnnnnnnnnnnnnnnnnnnnnnnnnnnnnnnnnnnnnnnnnnnnnnnnnnnnnnnnnnnnnnnnnnnnnnnnnnnnnnnnnnnnnnnnnnnnnnnnnnnnnnnnnnnnnnnnnnnnnnnnnnnnnnnnnnnnnnnnnnnnnnnnnnnnnnnnnnnnnnnnnnnnnnnnnnnnnnnnnnnnnnnnnnnnnnnnnnnnnnnnnnnnnnnnnnnnnnnnnnnnnnnnnnnnnnnnnnnnnnnnnnnnnnnnnnnnnnnnnnnnnnnnnnnnnnnnnnnnnnnnnnnnnnnnnnnnnnnnnnnnnnnnnnnnnnnnnnnnnnnnnnnnnnnnnnnnnnnnnnnnnnnnnnnnnnnnnnnnnnnnnnnnnnnnnnnnnnnnnnnnnnnnnnnnnnnnnnnnnnnnnnnnnnnnnnnnnnnnnnnnnnnnnnnnnnnnnnnnnnnnnnnnnnnnnnnnnnnnnnnnnnnnnnnnnnntacccttgcccagtccacccagtcctattcgtgcagccctctcttggcttgcaagagaacgcnnnnnnnnnnnnnnnnnnnnnnnnnnnnnnnttaagcacaactgtgtgagggtgtagaagggaaggcttctcaggattaacgtgacagtggattgggtggctggagtagactaaagcagtcatgtgatgaggaagaagtgatctgacccattttgataagtctttataaggaagaataaaataaacgtgtaagcaaaattttcttttgtaaaagcaaaagccacatctcttttctggatccttcaggactggggtttgtttgcttccttttccgtttctctcttctcgctgctctgtgcccttggttgttttgtggtggtcctgtcgtccctcgtgcccctcggccacctgctggccgccgatgggggcactcggacatctacaaccctgcaactttgtacagaaaacacaatcagctctttctgcatgtgctggtcaaatccaaacccagagaacagaagcgctttctaagaatgaacaaacatgtgaaataggatgttttgtgtagataaagcattcttgttacatactggtcaatttgtgatatgttttaacttaatgtctgtgcttatttatggaattcggttttcttaataaatgtttgagctaatataaagcatattatttgacttttccggacaagtttatatcaagttaaatgtaaatggataaaataaaatcattttcagtatgtgatacagagaa

SEQ ID NO: 24614 - DNA, 1425 bp, Macaca Mulatta
  misc_feature (1)...(1425): n = A,T,C or G
nagtaaaatctctttgtggcttggaagcctctcaggttcctgcagaggaagctctttctggggctggtgagccctgtgacatcatcgacagcagtgatgagatggatgcccaggaggaaagcatccatgagagaactgtctccagaaaaaagaaaagcaagaggcacaaannnnnnnnnnnnnnnnnnnnnnnnnnnnnnnnnnnnnnnnnnnnnnnnnnnnnnnnnnnnnnnnnnnnnnnnnnnnnnnnnnnnnnnnnnnnnnnnnnnnnnnnnnnnnnnnnnnnnnnnnnnnnnnnnnnnnnnnnnnnnnnnnnnnnnnnnnnnnnnnnnnnnnnnnnnnnnnnnnnnnnnnnnnnnnnnnnnnnnnnnnnnnnnnnnnnnnnnnnnnnnnnnnnnnnnnnnnnnnnnnnnnnnnnnnnnnnnnnnnnnnnnnnnnnnnnnnnnnnnnnnnnnnnnnnnnnnnnnnnnnnnnnnnnnnnnnnnnnnnnnnnnnnnnnnnnnnnnnnnnnnnnnnnnnnnnnnnnnnnnnnnnnnnnnnnnnnnnnnnnnnnnnnnnnnnnnnnnnnnnnnnnnnnnnnnnnnnnnnnngtcccctaggttaaagagcaagtgtacaggaggattgcagcctcccgttcagtacgaagatgttcataccaatccagaccaggactgctgcctactgcaggtcacgaccctcaatttcatctttattccgattgtcatggnnnnnnnnnnnnnnnngtttactatcaatgtgagcacggacatgcggcatcatcgagtgagactggtgttccaagattcccctgtccatggtggtcggaaactgcgcagtgagcagggtgtgcaagtcatcctggacccagtgcacagcgttcggctctttgactggtggcaccctcagtacccattctccctgagagcatagttactgctgcctatcccttggggcagccctgagtctagtccattagtaatcagattccagtttggacggggcggctggattgtatatctggttagtaatgtacatgctcttcaggttctagggctcctgttaggggagggagaaatgttgaatcaagaggaagaacaactactatgatttataaacatattttaatgtaaaaatttgcatttaaaaggagtggccctgttttctgtgttaaaaccccatttggtgctattgagtttgttctttattcttttatcccagtgaaaattgttgatcttgctctagggaaaaattaaactctttgaatctccaaacaaggaagtttcagcattcccttatggattagaggaaccttagaggcctgaaattgttgcttccagtttagctgcccctcaaattcaagtgaatattttcccttctccctttacccttcttcagaaataaagcaggtgacagggttttcag

SEQ ID NO: 24615 - DNA, 386 bp, Macaca Mulatta
  misc_feature (1)...(386): n = A,T,C or G
aacttcccagtgctccttaagagtatgctggtttagtggtccgtaccgtactggagcctgtgttacaaggattgcaagggttgccaccccaagcccaggcccctgcccttggtcaggcactgacagccatcgtgggtgcctggctcgaccacattcttacccatgggattcggttcagnttcagcctgcagggagcgctgcagctcagacaagactttggagtggtcagggagttgctggaagaggagcagtggagcctgacccctgatctccgccagacgctgcttatgctcagcatcttccagcagctggatggagccctgctgtgtctgttgcagcagcccttgcccaagtctcaagtccacaggaggcccccctgttgctgn

SEQ ID NO: 24616 - DNA, 1314 bp, Macaca Mulatta
  misc_feature (1)...(1314): n = A,T,C or G
aggatggggctagtaagcagcaaaaaaccggacaaggaaaagccgatcaaggagaaggacaagggccaatggagccccctgaaggtcagcgcccaagacaaggaccccccgccactgccgccactggnnnnnnnnnnnnnnnnnnnnnnnnnnnnnnnnnnnnnnnnnnnnnnnnnnnnnnnnnnnnnnnnnnnnnnnnnnnnnnnnnnnnnnnnnnnnnnnnnnnnnnnnnnnnnnnnnnnnnnnnnnnnnnnnnnnnnnnnnnnnnnnnnnnnnnnnnnnnnnnnnnnnnnnnnnnnnnnnnnnnnnnnnnnnnnnnnnnnnnnnnnnnnnnnnnnnnnnnnnnnnnnnnnnnnnnnnnnnnnnnnnnnnnnnnnnnnnnnnnnnnnnnnnnnnnnnnnnnnnnnnnnnnnnnnnnnnnnnnnnnnnnnnnnnnnnnnnnnnnnnnnnnnnnnnnnnnnnnnnnnnnnnnnnnnnnnnnnnnnnnnnnnnnnnnnnnnnnnnnnnnnnnnnnnnnnnnnnnnnnnnnnnnnnnnnnnnnnnnnnnnnnnnnnnnnnnnnnnnnnnnnnnnnnnnnnnnnnnnnnnnnnnnnnnnnnnnnnnnnnnnnnnnnnnnnnnnnnnnnnnnnnnnnnnnnnnnnnnnnnnnnnnnnnnnnnnnnnnnnnnnnnnnnnnnnnnnnnnnnnnnnnnnnnnnnnnnnnnnnnnnnnnnnnnnnnnnnnnnnnnnnnnnnnnnnnnnnnnnnnnnnnnnnnnnnnnnnnnnnnnnnnnnnnnnnnnnnnnnnnnnnnnnnnnnnnnnnnnnnnnnnnnnnnnnnnnnnnnnnnnnnnnnnnnnnnnnnnnnnnnnnnnnnnnnnnnnnnnnnnnnnnnnnnnnnnnnnnnnnnnnnnnnnnnnnnnnnnnnnnnnnnnnnnnnnnnnnnnnnnnnnnnnnnnnnnnnnnnnnnnnnnnnnnnnnnnnnnnnnnnnnnnnnnnnnnnnnnnnnnnnnnnnnnnnnnnnnnnnnnnnnnnnnnnnnnnnnnnnnnnnnnnnnnnnnnnnnnnnnnnnnnnnnnnnnnnnnnnnnnnnnnnnnnnnnnnnnnnnnnnnnnnnnnnnnnnnnnnnnnnnnnnnnnnnnnnnnnnnnnnnnnnnnnnnnnnnnnnnnnnnnnnnnnnnnnnnnnnnnnnnnnnnnnnnnnnnnggggccaagttccccatcaagtggacagccccagaagccatccacttcggggtcttcaccatcaaagcagacgtgtggtcgtttggagtcctcctgatggaagttgtcacttatgggcgggtaccatacccag

SEQ ID NO: 24617 - DNA, 1547 bp, Macaca Mulatta
  misc_feature (1)...(1547): n = A,T,C or G
cttccgtagcggtctccgccggttggggtaaagtaactccggctgctccaccatggcgtctatggggaccctcgccttcgatgaatatgggcgcccttttctcatcatcaaggatcaggaccgcaagtcccgtcttatgggacttgaggcccnnnnnnnnnnnnnnnnnnnnnnnnnnnnnnnnnnnnnnnnnnnnnnnnnnnnnnnnnnnnnnnnnnnnnnnnnnnnnnnnnnnnnnnnnnnnnnnnnnnnnnnnnnnnnnnnnnnnnnnnnnnnnnnnnnnnnnnnnnnnnnnnnnnnnnnnnnnnnnnnnnnnnnnnnnnnnnnnnnnnnnnnnnnnnnnnnnnnnnnnnnnnnnnnnnnnnnnnnnnnnnnnnnnnnnnnnnnnnnnnnnnnnnnnnnnnnnnnnnnnnnnnnnnnnnnnnnnnnnnnnnnnnnnnnnnnnnnnnnnnnnnnnnnnnnnnnnnnnnnnnnnnnnnnnnnnnnnnnnnnnnnnnnnnnnnnnnnnnnnnnnnnnnnnnnnnnnnnnnnnnnnnnnnnnnnnnnnnnnnnnnnnnnnnnnnnnnnnnnnnnnnnnnnnnnnnnnnnnnnnnnnnnnnnnnnnnnnnnnnnnnnnnnnnnnnnnnnnnnnnnnnnnnnnnnnnnnnnnnnnnnnnnnnnnnnnnnnnnnnnnnnnnnnnnnnnnnnnnnnnnnnnnnnnnnnnnnnnnnnnnnnnnnnnnnnnnnnnnnnnnnnnnnnnnnnnnnnnnnnnnnnnnnnnnnnnnnnnnnnnnnnnnnnnnnnnnnnnnnnnnnnnnnnnnnnnnnnnnnnnnnnnnnnnnnnnnnnnnnnnnnnnnnnnnnnnnnnnnnnnnnnnnnnnnnnnnnnnnnnnnnnnnnnnnnnnnnnnnnnnnnnnnnnnnnnnnnnnnnnnnnnnnnnnnnnnttaaagagactggtgctaacctagcaatttgtcagtggggttttgatgatgaagcaaatcacttacttcttcagaacaacttgcctgcggttcgctgggtaggaggacctgaaattgagnnnnnnnnnnnnnnnnnnnnnnnnnnnnnnnnnnnnnnnnnnnnnnnnnnnnnnnnnnnnnnnnnnnnnnnnnnnnnnnnnnnnnnnnnnnnnnnnnnnnnnnnnnnnnnnnnnnnnnnnnnnnnnnnnnnnnnnnnnnnnnnnnnnnnnnnnnnnnnnnnnnnnnnnnnnnnnnnnnnnnnnnnnnnnnnnnnnnnnnnnnnnnnnnnnnnnnnnnnnnnnnnnnnnnnnnnnnnnnnnnnnnnnnnnnnnnnnnnnnnnnnnnnnnnnnnnnnnnnnnnnnnnnnnnnnnnnnnnnnnnnnnnnnnnnnnnnnnnnnnnnagtgccccactttagaacagtacgccatgagagcgtttgccgacgcgctggaggtcatccccatggccctctctgaaaacagtggcatgaatcccatccagacgatgaccgaagtccgagccagacaggtgaaggagatgaaccctgctcttggcatcgactgtttgcacaaggggacaaat

SEQ ID NO: 24618 - DNA, 119 bp, Macaca Mulatta
taatgcacgatgaagtaagtgagacagagaacatccggaaaaacctggccatcgagcgcatgatcatcgaaggctgtgagatcctcctggacaccagccagacctttgtgagacaaggt

SEQ ID NO: 24619 - DNA, 1133 bp, Macaca Mulatta
  misc_feature (1)...(1133): n = A,T,C or G
gggagtactcttaaccccattagaactgtttttccttttgtatctgcaatatgggatggtattgttttcatgagcttctagaaatttcacttgcaagtttatttttgcttcctgtgttactgccattcctatttacagtatatttgagtgaatgattatatttttaaaaagttacatggggcttttttggttgtcctaaacttacaaacattccactcattctgtttgtaactgtgattataatgtttgtgataatttctggcctgattgaaggaaatttgagaggtctgcatttatatattttaaatagatttgatagctttttaaattgctttttttcatgaggtatttataaagttatttgaggttgtctggaattgtatgaaagaaaattagaaccacgttgtatttacatttaccttggtagttaatttgtggatggcagttttctgtagttttggggactgtggtagctcttggattgttttgcaaattacagctgaaatctgtgtcatggattaaactggcttatgtggctagaataggaagagagaanaaatgaaatggttgtttactaattttatactctcattaaaaatctctaatgttaagaaaacctttaataaacatgattgattaatatggcagatgatttacagtccattatataacattttgtaagccactcaacactagccttacaaggttcatgaaaggggagaaaacattaattctttctgcctttgctggtataatccacataataatttaagctataatttatttttaaaatgagtgcctcttgggaagtttcttttctgttctaacactgcctgttaaaatgaaaatcttaggctggtgcgnnnnnnnnnnnnnnnnnnnnnnnnnnnnnnnnnnnnnnnnnnnngcggatcatnnnnnnnnnnnnnnnnnnnnnnnnntnnnnnnnnnnnnnnnnnnnngnnnnnnnnnnnnnnnnnngnnnnnnnnnnnnnncgtggtgcatnnnnnnnnnnnnnnnnnnnnnnnnnnnnncaagnnnnnnnnnnnnnnnnnnnnnnnnnnntaannnnnnnnnnnnnnnnnnnnnnnnnnnnnnnnnngcaggctgagcgaaagagcaagactctctc

SEQ ID NO: 24620 - DNA, 409 bp, Macaca Mulatta
agctgttgcagcaaagactcactggcccagtgcatggggaggaggtttgtgttcgaggctgaagcactgtgagaggagagctataatactgctgacagtaataaactgccacatcttcagcctgcaggccactgatggtgagagtgaaatctgtcccagacccgctgccactgaatcggttagggaccccggattcccgggtagatgcccagtaaacgagcagcttaggagcctgtcctggtttctgctggtaccaggctaagtagttcttattgttggagctgtataaaagactccggctggacttgcagttgatggtgaccctctctcccagagacacagccagggagtctggagactgggtcatcacaatgtccccacaggcacctgtaatggacaatgattatac

SEQ ID NO: 24621 - DNA, 399 bp, Macaca Mulatta
  misc_feature (1)...(399): n = A,T,C or G
ggttcccaagacaacgcggaagggaaaagggacccgccaaggaagttccaggaacaaaagcctctccctannnnnnnnnctctccgtaaaagaccaccacttcaaaaatccctgaggaatggagtgggtcaccactatccagccactctgaccagccaaatgaggaactcaatcaaaatgagccacagcaggaccacaagggcaaggagacttccactgtctccagcgtctccttgggcagccagtaattccccgggcaattccacagacttgaagtctatctgaaaagtcgccagaggtctaaccccagataagtagccaacagggtgtagagtacattttgcaccccaaagggtatgccctatggtgatggaaataaaatgaacatgtagtaaaatg

SEQ ID NO: 24622 - DNA, 150 bp, Macaca Mulatta
gtgtggctgctgaccgaatagcaattcagtctaagggtcgatacacggccaatctatcccctcagaatttgatctcttgctgtgccaagaaccgtcatgggtgcaatagtggaagcatcgatagggcttggtggtacctgagaaaacgtg

SEQ ID NO: 24623 - DNA, 923 bp, Macaca Mulatta
  misc_feature (1)...(923): n = A,T,C or G
ggggctgacggggaagagggctgagcagctcccaggcagactgccttcttttaccctgtcctgatagccttccctgatctagatctccttcgtcatgacaattctcaataaaacataatcccaccgnnnnnnnnnnnnnnnnnnnnnnnnnnnnnnnnnnaaaaaaccacaacaaaacacnnnnnnnnnnnnnnnnnnnnnnngacnnnnnnnnnnnnnncnnnnnnnnnnnnnnnncaaaccctcnnnnnnnnnnnnnnnnnnnnnnnnngaactttgggggcccccccgnnnnnnnnnnnnnnnnnnnnnnncctttcnnnnnnnnnnnnnnnnnnnngaggaaaagaaaccggggtccacctttttccccaacggaaacccccggtcacaaaaaagggctcggggtttnnnnnnnnnnnnnnnnnnnncgcggggggaacacacctgttcttcaaaaaaaccccccaaggggggccggggggggcttccggggtgcttccccaccaggggccctccccgcgttcttttctttttataattctgcccccccggcgggcgctcttcttttggagacgggggcggggttacccttatgacacatcttccgcccgcccggggggagacctcccccacaaggcgggggcgggagagaaaccccaaacccccccccgggcgctctccgcacccttttgtgccgcctcttgcagataaaaattattccgcccgcccgcggagaaacaaggcggggggcacgaaccaaatttgcccccacattgttcgccccccctccctattaccacaaccggcgccgggtgaaaacttcccccccccgacgtgcgttgcgctctgcacaccgaaaacacaaatattgtccctcattccgcctaacctcttctatgtgaacgcatataggccgccct

SEQ ID NO: 24624 - DNA, 904 bp, Macaca Mulatta
  misc_feature (1)...(904): n = A,T,C or G
gatattagaacaaataagcctacaaacgataaaagtcacagcctccagtttccttcttctgatgtagaatttctacccaaggagtttcgacaagacaaaagcaaaattgctcagnnnnnnnnnnnnnnnnnnnnnnnnnnnnnnnnnnnnnnnnnnnnnnnnnnnnnnnnnnnnnnnnnnnnnnnnnnnnnnnnnnnnnnnnnnnnnnnnnnnnnnnnnnnnnnnnnnnnnnnnnnnnnnnnnnnnnnnnnnnnnnnnnnnnnnnnnnnnnnnnnnnnnnnnnnnnnnnnnnnnnnnnnnnnnnnnnnnnnnnnnnnnnnnnnnnnnnnnnnnnnnnnnnnnnnnnnnnnnnnnnnnnnnnnnnnnnnnnnnnnnnnnnnnnnnnnnnnnnnnnnnnnnnnnnnnnnnnnnnncactctgatacagatgtggcaggcggcgggttctgaggcaagcgtggcccctcatgtgctgaagacaatcttattgatactgaaaggaaaacctggggaaatggaggacaccctaacgaaaggaaaacgtttctctcttgatgttaccaacttaatgcctttggcggtaaataacacgatgagtatttcttcttctcagtattgttttcctgattgtgaaaaatccctatctgcccacagactcaatcatactttcttaacacagtcctcttctcatgcatccattcatgcaacacatatttattgagtgtctattatgtgctgtgccctattatggagtttacattttggtantatgctcaggatgccctgagagttctgctgaattgttctggactgcaacaggtggatattactctaacgaaggcgaatttctgggaccagttatctgaagagctgtgttactattatggagtctactttattgctaa

SEQ ID NO: 24625 - DNA, 172 bp, Macaca Mulatta
  misc_feature (1)...(172): n = A,T,C or G
gcagccggccaccagccccccaagagaacacgacttctgaggcaggcctgccccagggagaagcacggacccgaggtgacggcgatgaggaggggctgctgacacacagcgaggaagagctgngaacacagccaggacacagacgcggatgatggggccttgcagtaagcag

SEQ ID NO: 24626 - DNA, 625 bp, Macaca Mulatta
ggggtgtcgaaggtggtgggcagatgccgggcctccatgcctaggtggtggtacaatgtcactgacggatcctgccagctgtttgtgtatgggggctgtgatggaaacagcaataattacatgagcaaggaggagtgcctcaagaaatgtgccgctgttacagagaatgccacaggtgacctggccaccagcaggaatgcagcagattcctctgtcccaagtgttcccagaaggcaggattctgatgaccactccagcgatatgttcaactatgaagaatactgtgccgccaaggcggtcactggaccttgccgtgcgtccttcccacgctggtactttgacgtggagaggaactcctgcaataacttcatctatggaggctgccggggcaataagaacagctaccgctctgaggaggcctgcatgctccgctgcttccgccagcaggagaatccttccctgccccttggctcaaaggtggtggttcaggcggggctggtcgttatcgtgtggactcccacctgggcatctcctggtccgccccctgccgggcaccctcgaccttaaggcaccatgctcctgccttagtccgcctcaaaagtaccatgctcattacaaattttct

SEQ ID NO: 24627 - DNA, 642 bp, Macaca Mulatta
  misc_feature (1)...(642): n = A,T,C or G
atggcaaatattctcacaagtaatacagaggtgtccgtaatgggattttctggggcacctggcctggtgtaagtgaggcacacccntggtggctacaagtcctccttcaaagaggctaagatgatgatcagacccaagcactttaagccataaatcactctgttcattcctccaggtattcgttatctaacaggacaattaattccttcagcattttagaatatgccttgtttcatatttttcatagctaaaaaatgatgtctgactgctaggttcttatgctacacagcatttgaaataaagctgaaaaacaatgcattttaaaggggtcctttgttgttatgctgttatccactggacacttgcaagcaattaggaatattgagaattatacattagatttatttataattctcttaatttctattaattgaaacattttctattgcttgtattacttgctatatgtaaaaaataattgttgnnnnnnnnnnnnnnnnnnnnnnnnnacgcccggccaagagagggtatttcatatggcttttagttccatttgtttgtatttcatcttgattctttttcttgggaaaataaagcattctgtttggttcagatttctcagatttgacaaaggctctatct

SEQ ID NO: 24628 - DNA, 482 bp, Macaca Mulatta
cttacccttgaaaaacaaattaaagaagaaagagaacaagacaactctgaatctccaaatggcagaacatcacctcttgtgtcccagaataatgaacaaggctcaaccttacgggatttgctgactacaacagctggaaagctacgtgtggggtctacagatgctggcattgcctttgccccagtatattcaatgggagccccagtagcaaaagtggacggactatgcctaacattcttgatgacataattgcttcagttgttgaaaacaaaattccaccaagtaaaacctccaagataaatgtaaaaccagagcttaaagaagagcctgaagaaagcataatatctgcagtggatgaaaataataaattaaagagtgatataccacattcttggatctgtgagaagcataattgatggcttaaggattataagaatagcaataattggaagcttttcaaagaatgttggaaacaaggacag

SEQ ID NO: 24629 - DNA, 648 bp, Macaca Mulatta
ttattttaatgactgcaaaagacaaaatgactatacagactttagtcagactgcaaacaataaagctgagaatcgcatggagctcagactttgttttaaccggaactgatgtataatcacagatctaattgattttattatggcaaaactatgcttttgccaccttcctgttacagtattactttgcttttatcttttctttctcaacagctttccattcagtctggatccttccatgactacagccatttaagtgttcagcactgtgtacgatacataatatttggtagcttgtaaatgaaataaagaataaagttttatttatggctacctatgtgtttgtaagcaggtatattgtatattagtgtattagtaataatatatacatgaattttgtctggggattaagattggacaattaatagattaatacagtcttgattctgctctaatggtagcaaattggaaaatgtttaagtatttgacacttaaatttatctatatttttaacaaaattcttaaacttagtatggaaactgagcttgttttgaattcggtcagggtttttactcaagcaagtggttgatttttttaagtcaaactacataggaacttttaaccttttcttagattaattttactttttaa

SEQ ID NO: 24630 - DNA, 845 bp, Macaca Mulatta
cccccactgcaccctacccacccaccccccgcccagggcagctttactggggctggctaatccaagcctcctcacctcttcccaacccttacaagcaagggtggtaggagctcagccgtatgaccattctccctgacagcgagtccaaacttggcctagcatccctcctggcccccctctggccatgacttggcctgtgcctggttctctatcagaaaggggatgctgaacaaaacctccttataagttttatccaattccttcctcattgcctcgggctgcgtcaggggaagcaggggataggtgtccagttgctgggccgagggaggagctggtttggcacaggacctaaccagtgaagctggaggctacagcccctaaacttgcttgaggccaacgatacttactcacaactaagtaccttaatgctaatgaggtccactaaaaaggggaggaaggcagacctcctaggagacccacgaagggtttttaaccagggaaagctgagccccaggaaaacctaaccactgtgcaggcagaatttgggggatagaaccgacaataaaatagatgttcctgcagcctgagatttcaggtagaggactaaggtttaataagacaataggtgacctgaggacatgcaagcttgtaaaatgcaacagcctcctgctagagtgacttgtacatgagcttgcttgcagaagactagattagatgcttctcagagtcccctcctgcccaggggttctctgattttcatgttctctgcccacgatgggctgggggactaaacaatgtgcttattttcaccgtgatcatgagaccacggttacgggttatctcct

SEQ ID NO: 24631 - DNA, 1130 bp, Macaca Mulatta
  misc_feature (1)...(1130): n = A,T,C or G
aggtgcggttcctggagcagcagaacaaggttctggaaaccaagtggaccctgctgcaggagcagggaaccaagaccgtgaggcagaacctggagccgttgttcgagcagtacatcaacaacctcaggaggcagctggacagcatcgttggggaacggggccgcctggactcggagctcagaggcatgcaggacctggtggaggacttcaagaacannnnnnnnnnnnnnnnnnnnnnnnnnnnnnnnnnnnnnnnnnnnnnnnnnnnnnnnnnnggacgtggatgctgcctacatgaacaaggttgaactgcaagccaaggcagacactctcacagacgagatcaacttcctgagagccttgtatgaagcagngagctgtcccagatgcagacccacatctcagacacatccgtggtgctgtccatggacaacaaccgcaacctggacctggacagcatcatcgctgaggtcaaggcccaatatgaggagattgctcagaggagccgggctgaggccgagtcttggtaccagagcaagnnnnnnnnnnnnnnnnnnnnnnnnnnnnnnnnnnnnnnnnnnnnnnnnnnnnnnnnnnnnnnnnnnnnnnnnnnnnnnnnnnnnnnnnnnnnnnnnnnnnnnnnnnnnnnnnnnnnnnnnnnnagtgtgccagcctgcaggccgccattgctgatgctgagcagcgtggggaaatggcactcaaggatgccaagaacaagctggaagggctggaggatgccctgcagaaggccaagcaggacctggcccggctgctgaaggagtaccaggagttgatgaacgtgaagctggccctggacgtggagattgccacctaccgcaagctgctggagggcgaggagtgcaggncaggctgaatggcgaaggcgttggacaagtcaacatctnctgtggtacaatccaccgtctccagtggctatggcggtgccagtggtgtcggcagtggcttaggcctgggtggaggaagcagctactcctatggcagtggtcttggcgttggaggtggcttcagttccagcagcggcagagccattggaggtggcctcagctctgttggaggcggcagttccaccatcaagtacaccaccacct

SEQ ID NO: 24632 - DNA, 293 bp, Macaca Mulatta
  misc_feature (1)...(293): n = A,T,C or G
natgcgagccacccctctggctactcctgcaggttccctgtccaggaagaagcagttggagttggatgacaacttagacaccgagcatcccgtccagaaacgagctcgaagtgggccccagcccaggctgcccccctgcctgttgcccctgagcccacctcctgctccagatcgtgcaactgctgtggccactacctcccgtcttgggccctatgtcctcctggagcccgaggggggcgggcgggccaaccgggccctgcactgccctacaggcactgagtatacctgcaagg

SEQ ID NO: 24633 - DNA, 295 bp, Macaca Mulatta
tcgttctgatcgctgcactaccagaatcattgcccaatggctcagatgaaaaaaactgctttttttgccaaccaggaaatttccattgtaaaaacaatcgttgcgtgtttgaaagttgggtgtgtgattctcaagatgactgtggtgatggcagcgatgaagagaattgcccagtaatcgtgcctacaagagtcatcactgctgccgtcatagggagcctcatctgtggcctgttactcgtcattgcattgggatgtacttgtaagctttattctctgagaatgtttgaaagaag

SEQ ID NO: 24634 - DNA, 773 bp, Macaca Mulatta
  misc_feature (1)...(773): n = A,T,C or G
ggatatcttagaattgtatataaaacaacatgtaacccattcatgaaaaacttctaagtattgctttttgctgctatgttctgcattgagcctagttttgccattgtcccttgaatgtagtattatccatagattatacataactacatctattgcttttggcggtaaatcaagatttagttgtaattttccagctgtgaaaatgttgccttgtatttaaaagggtttcatgaatggaaacctaagtaaaactaagctcattagtgacagacttgctttcttcatgttactcctccagcaactccctcaccaccatgcctccctgcctaccatccccggaagggtgcttattctttaacaaagagaatcnnnnnnnnnnnnnnnnnnnnnnntgttgtctaatatatctacagtaaatgttacactagatcttttattttcctctgtagcttttcagaaaaagcaatctaccttggatttgtaaatcaagctgaaacttttttgatgttcatatactcatatgtcttataggtggtaggtgtcacttgtgtgtatgtgtaagtgaagtatgatgcatgctcattcacttggtctctttgaagtaagggaaaggatcacagtgctgctgggccatgatggtatgtagaaaggtctgtcagcacacatgggaaagccccccatttgccagatgtaagaactttaataatccagatgcaatcattggaagtatttaatatgccatttggtagcaccttagcctattaatctggcaa

SEQ ID NO: 24635 - DNA, 782 bp, Macaca Mulatta
gcctgagcgcaaccccagggtagcaggggtacccgaggagcgggctatgccctggcaggagcagagcccaggatggggtcagggtcaggccctgctggaggctggagggcgcccaaggcgaggccagtgaggcccagctctacaaatacagcgttttatttacaggagtctctccaggtcccagctccctgccacccccaccccagccccagggagaagagggtggacgccagaggagctggcagaggctgggcaggtcctgagtgggtcaggccaggccgagagagaaggcacgaggccctgggcgccccagtcccagggcagaggccaggcctgcctggagaaggcagcacggggtcagctctcaggggtcaggctggggtccacgccgccgcagctctgctcataggacggtggggcctctgcagggagaaagcagggtctgcatggggctcctggcgtcccctccctgccaagccctggcccttgactcaccataggggtagccccaagagctgtactctggaggaagaatcaaggtgctggtggtaggcactggtcccccagagccctctgcaaagtaggggacagtggcacctgttgaaatgcacaagggaggccgaagcgggtatgaggcagggctgccatcctgaggacagggctcgggagcaccaggcacagaacccaaggtggccagcaggggctgctgctgcgaatggctcttggtggagagggagaccgggtccaagaagtgggggccgccagccgcagcctcggcctcc

SEQ ID NO: 24636 - DNA, 143 bp, Macaca Mulatta
gggacactacacagaaaatgagaactgctcactatcctaccccagccgaattggatgcatatgctaagaaggtcgcaaaacacccactgactataaaaatcttccccacagtgtgaaggttccccagcgaaaaccgttcgtcg

SEQ ID NO: 24637 - DNA, 826 bp, Macaca Mulatta
  misc_feature (1)...(826): n = A,T,C or G
gtcttctcttgccggcaaatgtagtcggcgggccannnnnnnnnnnnnnnnnncatgttagagtaccagcaggtggcgcaggacactccatgaaagcagagtcaacattcactgatttgactgtatgggatagttcgagtcccgtgggatccatacacatcgcaacaagtcattcttgcncctcagaagaaagaattgaactgttagtcatgaatcagcaaaattccagatgagctctccaaccacgtattttctgtgtttttgatccagaccctgatggtactgctctagcagactgttctggtagtcttcactgaacatcagagatggatcctgtgccgtaagagaagaaactggggatctggtccaccccgggctcctcaacctgagtgtgaggccttgctgggccctgaggtcacctgcccttgggagtccattgtgactgcagttcaggggggtcaatgtcctcactgatgacagaaagaagtcctgggggatgcggagggcatcgtgtagcggcaggcagtctgggtggtccacaggtgtgcacttcagcatgtcctgtccatccacagatgaagggatgaagaatcttcaggacacaggcacaatggaatacttttcagccatcaaaattcagggcattttctctttcccgcaacacggctgcacctaagcagtcagggccacagacagcagcagtttcctcccgaagacgagtctccaagtcatccccacgccgccgcagtgcgccctcaagcgggtccggaaggaacgggagccattctccatctttccattatggacgccacgccacgcacgcccc

SEQ ID NO: 24638 - DNA, 83 bp, Macaca Mulatta
tgatcatagcagggttaagcttgcacagcttgctgaaaaagatggcaaactgactgattacatcaatgccaattatgttgatg

SEQ ID NO: 24639 - DNA, 1524 bp, Macaca Mulatta
  misc_feature (1)...(1524): n = A,T,C or G
ctctaggtgctgtgctgccctgaagcccggtccatggtgcccaaggaaagcccctgaagctcaccaggaggaagacgcatgcagggcactcctgcaggagggacgagccctgggccatcccccatggacaggcagacactcctggtcttcagtttgatcctggcagcagctttgggccaaatgaatttcacagggnnnnnnnnnnnnnnnnnnnnnnnnnnnnnnnnnnnnnnnnnnnnnnnnnnnnnnnnnnnnnnnnnnnnnnnnnnnnnnnnnnnnnnnnnnnnnnnnnnnnnnnnnnnnnnnnnnnnnnnnnnnnnnnnnnnnnnnnnnnnnnnnnnnnnnnnnnnnnnnnnnnnnnnnnnnnnnnnnnnnnnnnnnnnnnnnnnnnnnnnnnnnnnnnnnnnccaggtgctgctggatgaggaaagagaggccatggcgaaatcccgccggctggagcgcagcaccagcagcttcagttactcctcataccacaccctggagganagatatatagctggattgacaactttgtaacggagcattccaatattgtctcaaaaattcagattggcaacagctttgaaaaccggtccattcttgtcctgaannnnnnnnnnnnnnnnnnnnnnnnnnnnnnnnnnnnnnnnnnnnnnnnnnnnnnnnnnnnnnnnnnnnnnnnnnnnnnnnnnnnnnnnnnnnnnnnnnnnnnnnnnnnnnnnnnnnnnnnnnnnnnnnnnnnnnnnnnnnnnnnnnnnnnnnnnnnnnnnnnnnnnnnnnnnnnnnnnnnnnnnnnnnnnnnnnnnnnnnnnnnnnnnnnnnnnnnnnnnnnnnnnnnnnnnnnnnnnnnnnnnnnnnnnnnnnnnnnnnnnnnnnnnnnnnnnnnnnnnnnnnnnnnnnnnnnnnnnnnnnaggaaatggttctaacagcaacccctgctcagagacttatcatgggccctcccctcagtcggagccagaggtggctgccatagtgaacttcatcacnnnnnnnnnnnnnnnnnnnnnnnnnnnnnnnnnnnnnnnnnnnnnnnnnnnnnnnnnnnnnnnnnnnnnnnnnnnnnnnnnnnnnnnnnnnnnnnnnnnnnnnnnnnnnnnnnnnnnnnnnnnnnnnnnnnnnnnnnnnnnnnnnnnnnnnnnnnnnnnnnnnnnnnnnnnnnnnnnnnnnnnnnnnnnnatgtggccagtgggatcaccgttgactgggcctacgacagtggcatcaagtatgccttcagctttgagctccgggacactgggcgctatggcttcctgctgcccgccacacaaatcatccccacggcccaggagacatggatggcgctccggaccatcatggagcacaccctgaatcacccttactagcagcacgactgagggcagggcgggaggctccatccttctccccaaggtctgcggctcctcctgaaacccaagttatgcatccccatccccatgccctcatcccgacctcttagaaaataaatacaagtttgaaca

SEQ ID NO: 24640 - DNA, 357 bp, Macaca Mulatta
taaggaagggattaggacagtactgtgcatatcctgccaaggttttcctccctcccatctgcctggatgagttggtctgccacttctggagggatgggttcgagggttgggcactgaagtttttcacattatttttctataaccaggaatacatagtatatgtaggactcaagcaacccagcaagagacactgagcaaaacattaaatttctctttcacctgccaaccttcccaagccccatccccttcccccaggtaaccactgtcaatcattctgtgtgtattcttcaggtcctatgtgtttccccgcacatgtctgcacaggcagagtatgttaaaaaagatctataatttaaa

SEQ ID NO: 24641 - DNA, 275 bp, Macaca Mulatta
cctggaagcatgggctctggtctcctcccttggggaagttagtggagcctcatcaggaggcagatcaccactgtggcacgggtgctgctcctggtgctcataggcacagtctcagttctgggggcgctcgatagatatgacgaggcttgcaccaaagatctgtgcgctgctcatttggaggggaagatgtgccgtctggaagagttgtgacagaataatctcatgaggccaggcaaagtatatctggtttcatgttcagctggccttagtactca

SEQ ID NO: 24642 - DNA, 375 bp, Macaca Mulatta
acaccaagaccctggcccagcggctggctatcctcacaggcactgtagaggtggggacagggacagggacaggggcaggggcggaacccccgaagaaggaatcccaacccagttcgggagccgtggagatggagagtgtgtgaaacagccgaggcctggctgcgcccttgggcttcctgccttgcagggcctgcatggaggttctccctgggggtggtgggagggggaggcttgacctcttgtcctgtttttttgggccagaggggacaagccctgtccctggcatttcatttctaggtagaatctgggagtgaatttgtcccattccctctccgtagggcttccgtgcctctcagtgggacagatcagaggaag

SEQ ID NO: 24643 - DNA, 763 bp, Macaca Mulatta
ggacaacgtggagtcctgtggctctctgcgtcctgaaaccattgtcctgtcagccctctctggattgaagaagaaactgagtgatttacaaactcaattaagccacgagatccagagtgatgtgctaaccataaattaactgcagcttgcctgcttcagcaaaaacggacattcaggccagcagctggatatgggggtctctcttctagtttctgagaatctagtctactgttgcttgagcgtcttggcaggacatcagtaccaatgagaagagggtcacagatagattaccagggatgcagtggtgtttaggcaggactggtctttactggccctgactgctgttcataactggcagcagtgctccccagatcccagaaggtcccttctggactgtttccagcgcacctgtagggaaccactgcactcctctcctggttagtccagctctttaaaccctttctgtccaagatgagtcattttcagttgtaccttagatttctagtgttaggatcaagtgccatagccttttttcaaggggcctataaaccttcccagtccttgccccagggctggcacttcaaattcccaggtgtccctaatttgagaagtaaccttttggaatagcattagacactggctgtcccctccccaccaaataaacatgatatttcattctctgtccagcagttatgaacccccttcaccatcaatggcttgatcctttaatcctggtggtggttgggcaagggtggaaacaacc

SEQ ID NO: 24644 - DNA, 640 bp, Macaca Mulatta
  misc_feature (1)...(640): n = A,T,C or G
agcactgagggtggaaggcagggaggtgccagccttgttcccttccacagagggaattcccatgttggaattcctaccccggcttcctgccgtctgttctggaacacattgccccaggcctccgagcctcagtttcctcgtttgtaaaatgggggcgatgacagagcgtcctcaaaggggataagacggaagaagttggctcatatcagggttcataattgttgccgagtattaacaggtaaccacaatcacactccacaaagcttcccttttagtgtcagtgaaattaatttaaaagaagtttccgaaagtcaannnnnnnnnnnnnatcctgagataagtcaggtaagggggaaatgaccaccccacgaccgcaggctggtgaggaggtcccagccacggaggtgatgctgcagggcctggcctggtggcatagcgtggggggtgggttcaccatggagaggccaaggaggtgctgaggcttgtgagaaaaggccgacaaccccatgcggttatttatgaaatggttttccttcctccggggctgggggcttgtgcccactcgcatctggtcctgggaccccctggtggtgtcctcagggctcccgctgtcccaggccggcctccacttctggaagca

SEQ ID NO: 24645 - DNA, 2388 bp, Macaca Mulatta
  misc_feature (1)...(2388): n = A,T,C or G
acgaggaggaggagcgcgagcacgaccttcccacgcatcccagaggccccagctgcaatgcctctctgatcccaggccctggacggcagaggcagcctggcacctctcaccagcgagccctgcagccagccctgcggggtggccgcgagccactgcactacctgctccccgtacagctccccnnnnnnnnnnnnnnnnnnnnnnnnnnnnnnnnnnnnnnnnnnnnnnnnnnnnnnnnnnnnnnnnnnnnnnnnnnnnnnnnnnnnnnnnnnnnnnnnnnnnnnnnnnnnnnnnnnnnnnnnnnnnnnnnnnnnnnnnnnnnnnnnnnnnnnnnnnnnnnnnnnnnnnnnnnnnnnnnnnnnnnnnnnnnnnnnnnnnnnnnnnnnnnnnnnnnnnnnnnnnnnnnnnnnnnnnnnnnnnnnnnnnnnnnnnnnnnnnnnnnnnnnnnnnnnnnnnnnnnnnnnnnnnnnnnnnnnnnnnnnnnnnnnnnnnnnnnnnnnnnnnnnnnnnnnnnnnnnnnnnnnnnnnnnnnnnnnnnnnnnnnnnnnnnnnnnnnnnnnnnnnnnnnnnnnnnnnnnnnnnnnnnnnnnnnnnnnnnnnnnnnnnnnnnnnnnnnnnnnnnnnnnnnnnnnnnnnnnnnnnnnnnnnnnnnnnnnnnnnnnnnnnnnnnnnnnnnnnnnnnnnnnnnnnnnnnnnnnnnnnnnnnnnnnnnnnnnnnnnnnnnnnnnnnnnnnnnnnnnnnnnnnnnnnnnnnnnnnnnnnnnnnnnnnnnnnnnnnnnnnnnnnnnnnnnnnnnnnnnnnnnnnnnnnnnnnnnnnnnnnnnnnnnnnnnnnnnnnnnnnnnnnnnnnnnnnnnnnnnnnnnnnnnnnnnnnnnnnnnnnnnnnnnnnnnnnnnnnnnnnnnnnnnnnnnnnnnnnnnnnnnnnnnnnnnnnnnnnnnnnnnnnnnnnnnnnnnnnnnnnnnnnnnnnnnnnnnnnnnnnnnnnnnnnnnnnnnnnnnnnnnnnnnnnnnnnnnnnnnnnnnnnnnnnnnnnnnnnnnnnnnnnnnnnnnnnnnnnnnnnnnnnnnnnnnnnnnnnnnnnnnnnnnnnnnnnnnnnnnnnnnnnnnnnnnnnnnnnnnnnnnnnnnnnnnnnnnnnnnnnnnnnnnnnnnnnnnnnnnnnnnnnnnnnnnnnnnnnnnnnnnnnnnnnnnnnnnnnnnnnnnnnnnnnnnnnnnnnnnnnnnnnnnnnnnnnnnnnnnnnnnnnnnnnnnnnnnnnnnnnnnnnnnnnnnnnnnnnnnnnnnnnnnnnnnnnnnnnnnnnnnnnnnnnnnnnnnnnnnnnnnnnnnnnnnnnnnnnnnnnnnnnnnnnnnnnnnnnnnnnnnnnnnnnnnnnnnnnnnnnnnnnnnnnnnnnnnnnnnnnnnnnnnnnnnnnnnnnnnnnnnnnnnnnnnnnnnnnnnnnnnnnnnnnnnnnnnnnnnnnnnnnnnnnnnnnnnnnnnnnnnnnnnnnnnnnnnnnnnnnnnnnnnnnnnnnnnnnnnnnnnnnnnnnnnnnnnnnnnnnnnnnnnnnnnnnnnnnnnnnnnnnnnnnnnnnnnnnnnnnnnnnnnnnnnnnnnnnnnnnnnnnnnnnnnnnnnnnnnnnnnnnnnnnnnnnnnnnnnnnnnnnnnnnnnnnnnnnnnnnnnnnnnnnnnnnnnnnnnnnnnnnnnnnnnnnnnnnnnnnnnnnnnnnnnnnnnnnnnnnnnnnnnnnnnnnnnnnnnnnnnnnnnnnnnnnnnnnnnnnnnnnnnnnnnnnnnnnnnttagaatgtggcagtggctttatgctttgtgtgtatcttgatgagttttccagtggcctctgcagaagctggtccccttctaagggcatagctaaccccctcccactcctgagtcactgaattcaaggagggtggggcagggaaagggctggcccccctgctgaaatcttgattctgcatctgacgaaggtcagggtgccgctgagggagcagggagcgggcagggaggaggaggggaatgcacatcttttgcgccactattaaggcacctgtcacctcacatctcaatctagaatcagagtgccctgggttgagaaacagacctgggctctggtcacactttggtcactcattagctctaggaccagtcactagtctcttgagattccatttattccagggaaatgaggcttgcccagatagactaagaaccctttagtgctccaagaagtgagaatttccgaaaaagatctgccggcccagaccactccctcttgccctaatcctggcagggcctggatgtatttacccaactctccgatcttgtgtgcagggatgcttgctgatgggtgaaagaccaccataaaacaagattagcagcaaaacaa

SEQ ID NO: 24646 - DNA, 661 bp, Macaca Mulatta
  misc_feature (1)...(661): n = A,T,C or G
ttccggcgaggggcaggaaagacagcgtcttccggcgcggcggttccggannnnnnnnnnnnnncccccagggctgacagtgcggacggcgggagtttcctcgctcccctgctgggattgactgaccgagggtttagtgactgcccggatctggctgatnnnnnnnnnnnnnnnnnnnnnnnnnnnnnnnnnnnnnnnnnnnnnnnnnnnnnnnnnnnnnnnnnnnnnnnnnnnnnnnnnnnnnnnnnnnnnnnnnnnnnnnnnnnnnnnnnnnnnnnnnccaggtggtcgtggcaggccgtagcattttcaagatctatgccatcgaggaggaacagttcgtggagaagctgaacctgcgtgtggggcgtaagccttcacttaatctgagctgcgctgatgtggtgtggcaccagatggatgagaacctgctggccacagcagccaccaatggtgtggtggtcacgtggaacctgggccggccgtcccgcaacaagcaggaccagctgttcacagaacacaagcgcacggtgaacaaagtgtgcttccaccccactgaagcccacgtgctgctcagtggctcccaggatggcttcatgaagtgctttgacctccgcagaaaggactctgtcagcaccttctcgggtgaggccacagaggc

SEQ ID NO: 24647 - DNA, 443 bp, Macaca Mulatta
  misc_feature (1)...(443): n = A,T,C or G
agctcaccccaaccgctgagaagagggtgcagaaatccagggaggtcatagatagcatcatagaagagaaaacannnnnnnnnnnnnnnnnnnnnnnnnnnnnnnnnnnnnnnnnnnnnnnnnnnnnnnnnnnnnnnnnnnnnnnnnnnnnnnnnnnnnnnnnnnnnnnnnnnnnnnnnnnnnnnnnnnnnnnnnnnnnnnnnnnnnnnnnnnnnnnnnnnnnnnnnnnnnnnnnnnnnnnnnnnnnnnnnnnnnnnnnnnnnnnnnnnnnnnnnnnnnnnnnnnnnnnnnnnnnnnnnnnnnnnnnnnnnnnnnnnnnnatgttccagagaaaggaaccgttggtgccagtggagaccttgccccactctctcatcttgctctcgggttaattggagaagggaagatgtggtctccaaagagtggttgggctgatgctaaat

SEQ ID NO: 24648 - DNA, 1954 bp, Macaca Mulatta
  misc_feature (1)...(1954): n = A,T,C or G
aggcctgaaagtcattgtgggggccctgattaactcagtgaagaaactggctgatgtgaccattctcaccatcttctgcctaagtgtttttgccttggtggggctgcaactcttcaagggcaacctcaagaataaatgtgtcaagaatgatatggctgtcaatgagacaaccaactactcatctcacagaannnnnnnnnnnnnnnnnnnnnnnnnnnnnnnnnnnnnnnnnnnnnnnnnnnnnnnnnnnnnnnnnnnnnnnnnnnnnnnnnnnnnnnnnnnnnnnnnnnnnnnnnnnnnnnnnnnnnnnnnnnnnnnnnnnnnnnnnnnnnnnnnnnnnnnnnnnnnnnnnnnnnnnnnnnnnnnnnnnnnnnnnnnnnnnnnnnnnnnnnnnnnnnnnnnnnnnnnnnnnnnnnnnnnnnnnnnnnnnnnnnnnnnnnnnnnnnnnnnnnnnnnnnnnnnnnnnnnnnnnnnnnnnnnnnnnnnnnnnnnnnnnnnnnnnnnnnnnnnnnnnnnnnnnnnnnnnnnnnnnnnnnnnnnnnnnnnnnnnnnnnnnnnnnnnnnnnnnnnnnnnnnnnnnnnnnnnnnnnnnnnnnnnnnnnnnnnnnnnnnnnnnnnnnnnnnnnnnnnnnnnnnnnnnnnnnnnnnnnnnnnnnnnnnnnnnnnnnnnnnnnnnnnnnnnnnnnnnnnnnnnnnnnnnnnnnnnnnnnnnnnnnnnnnnnnnnnnnnnnnnnnnnnnnnnnnnnnnnnnnnnnnnnnnnnnnnnnnnnnnnnnnnnnnnnnnnnnnnnnnnnnnnnnnnnnnnnnnnnnnnnnnnnnnnnnnnnnnnnnnnnnnnnnnnnnnnnnnnnnnnnnnnnnnnnnnnnnnnnnnnnnnnnnnnnnnnnnnnnnnnnnnnnnnnnnnnnnnnnnnnnnnnnnnnnnnnnnnnnnnnnnnnnnnnnnnnnnnnnnnnnnnnnnnnnnnnnnnnnnnnnnnnnnnnnnnnnnnnnnnnnnnnnnnnnnnnnnnnnnnnnnnnnnnnnnnnnnnnnnnnnnnnnnnnnnnnnnnnnnnnnnnnnnnnnnnnnnnnnnnnnnnnnnnnnnnnnnnnnnnnnnnnnnnnnnnnnnnnnnnnnnnnnnnnnnnnnnnnnnnnnnnnnnnnnnnnnnnnnnnnnnnnnnnnnnnnnnnnnnnnnnnnnnnnnnnnnnnnnnnnnnnnnnnnnnnnnnnnnnnnnnnnnnnnnnnnnnnnnnnnnnnnnnnnnnnnnnnnnnnnnnnnnnnnnnnnnnnnnnnnnnnnnnnnnnnnnnnnnnnnnnnnnnnnnnnnnnnnnnnnnnnnnnnnnnnnnnnnnnnnnnnnnnnnnnnnnnnnnnnnnnnnnnnnnnnnnnnnnnnnnnnnnnnnnnnnnnnnnnnnnnnnnnnnnnnnnnnnnnnnnnnnnnnnnnnnnnnnnnnnnnnnnnnnnnnnnnnnnnnnnnnnnnnnnnnnnnnnnnnnnnnnnnnnnnnnnnnnnnnnnnnnnnnnnnnnnnnnnnnnnnnnnnnnnnnnnnnnnnnnnnnnnnnnnnnnnnnnnnnnnnnnnnnnnnnnnnnnnnnnnnnnnnnnnnnnnnnnnnnnnnnnnnnnnnnnnnnnnnnnnnnnnnnnnnnnnnnnnnnnnnnnnnnnnnnnnntcatcggaaactcagtgggggcactggggaacctcaccatcatcctggccatcattgtctttgtctttgctctggttggcaagcagctcctaggggaaaactaccgtaataaccgaaaaaatatctccgcgccccatgaagactggccccgctggcacatgcacgacttcttccactctttcctcattgtcttccgtattctctgtggagagtggattgagaacatgtgggcctgcatggaagtcggccagaaatccatatgcctcatccttttcttgacggtgatggtgctggggaacctggtggt

SEQ ID NO: 24649 - DNA, 808 bp, Macaca Mulatta
  misc_feature (1)...(808): n = A,T,C or G
ggattggagcagttgtcactggtatgcagaggattctacatctgtgccagagaccctgaaatatggcgtctggcctgcttgaaagtttggggcagaagctgtattaaacttgttccatacacatcctggagagagatgtttttagaacggcctcgtgttcggtttgatggtaggttggattctgtagaactcagcagaaatagtgatctgtaattctgattttgataaatatgccatttcaattttccatgatgaatgtgagtactgtaagcatgtttaaaggaaaccacagtaaaataatgctggaaatgtcaatattataatttttaactttttacaattattttcataggagtgtatatcagtaaaaccacatatattcgtcaaggggaacagtctcttgatggtttctatagagcctggcaccaagtggaatattacaggtaccactgtagtacactgagtgagtggaaaattctctctctccatgtattagttaaatggacatctgttctttgttgcttttaattgacccacaaaatggctctcagtatttttatctagtactacaatataagaattgcactcaaaaaaccaataggctaatataaattacagaatttcttctggcctcttttagatttctccttgtcttttgccctgngtatatttgcctttttcaaatacctttgtgcttttattccaattttattggcttgccaaatatttactgggcaatttatgaaaaaaaataggacatggttaacccaattggtgttgtgggatcctccacttttggttttggaaa

SEQ ID NO: 24650 - DNA, 3514 bp, Macaca Mulatta
  misc_feature (1)...(3514): n = A,T,C or G
agggcctggacatggcgctgaggggccgccccgcgggaagatgaataagggctggctggagctggagagcgacccnacccaggcctcttcaccttgctggtggaagatttcggtnnnnnnnnnnnnnnnnnnnnnnnnnnnnnnnnnnnnnnnnnnnnnnnnnnnnnnnnnnnnnnnnnnnnnnnnnnnnnnnnnnnnnnnnnnnnnnnnnnnnnnnnnnnnnnnnnnnnnnnnnnnnnnnnnnnnnnnnnnnnnnnnnnnnnnnnnnnnnnnnnnnnnnnnnnnnnnnnnnnnnnnnnnnnnnnnnnnnnnnnnnnnnnnnnnnnnnnnnnnnnnnnnnnnnnnnnnnnnnnnnnnnnnnnnnnnnnnnnnnnnnnnnnnnnnnnnnnnnnnnnnnnnnnnnnnnnnnnnnnnnnnnnnnnnnnnnnnnnnnnnnnnnnnnnnnnnnnnnnnnnnnnnnnnnnnnnnnnnnnnnnnnnccaggcccgagccacgccacctccctgagaagcagaatggccttagtgcagtgcggaccatggaggcgttccactttgtcagctatgtgcctatcacaggccggctctttgagctggatgggctgaaggtctaaaccattgaccatgnnnnnnnnnnnnnnnnnnnnnnnnnnnnnnnnnnnnnnnnnnnnnnnnnnnnnnnnnnnnnnnnnnnnnnnnnnnnnnnnnnnnnnnnnnnnnnnnnnnnnnnnnnnnnnnnnnnnnnnnnnnnnnnnnnnnnnnnnnnnnnnnnnnnnnnnnnnnnnnnnnnnnnnnnnnnnnnnnnnnnnnnnnnnnnnnnnnnnnnnnnnnnnnnnnnnnnnnnnnnnnnnnnnnnnnnnnnnnnnnnnnnnnnnnnnnnnnnnnnnnnnnnnnnnnnnnnnnnnnnnnnnnnnnnnnnnnnnnnnnnnnnnnnnnnnnnnnnnnnnnnnnnnnnnnnnnnnnnnnnnnnnnnnnnnnnnnnnnnnnnnnnnnnnnnnnnnnnnnnnnnnnnnnnnnnnnnnnnnnnnnnnnnnnnnnnnnnnnnnnnnnnnnnnnnnnnnnnnnnnnnnnnnnnnnnnnnnnnnnnnnnnnnnnnnnnnnnnnnnnnnnnnnnnnnnnnnnnnnnnnnnnnnnnnnnnnnnnnnnnnnnnnnnnnnnnnnnnnnnnnnnnnnnnnnnnnnnnnnnnnnnnnnnnnnnnnnnnnnnnnnnnnnnnnnnnnnnnnnnnnnnnnnnnnnnnnnnnnnnnnnnnnnnnnnnnnnnnnnnnnnnnnnnnnnnnnnnnnnnnnnnnnnnnnnnnnnnnnnnnnnnnnnnnnnnnnnnnnnnnnnnnnnnnnnnnnnnnnnnnnnnnnnnnnnnnnnnnnnnnnnnnnnnnnnnnnnnnnnnnnnnnnnnnnnnnnnnnnnnnnnnnnnnnnnnnnnnnnnnnnnnnnnnnnnnnnnnnnnnnnnnnnnnnnnnnnnnnnnnnnnnnnnnnnnnnnnnnnnnnnnnnnnnnnnnnnnnnnnnnnnnnnnnnnnnnnnnnnnnnnnnnnnnnnnnnnnnnnnnnnnnnnnnnnnnnnnnnnnnnnnnnnnnnnnnnnnnnnnnnnnnnnnnnnnnnnnnnnnnnnnnnnnnnnnnnnnnnnnnnnnnnnnnnnnnnnnnnnnnnnnnnnnnnnnnnnnnnnnnnnnnnnnnnnnnnnnnnnnnnnnnnnnnnnnnnnnnnnnnnnnnnnnnnnnnnnnnnnnnnnnnnnnnnnnnnnnnnnnnnnnnnnnnnnnnnnnnnnnnnnnnnnnnnnnnnnnnnnnnnnnnnnnnnnnnnnnnnnnnnnnnnnnnnnnnnnnnnnnnnnnnnnnnnnnnnnnnnnnnnnnnnnnnnnnnnnnnnnnnnnnnnnnnnnnnnnnnnnnnnnnnnnnnnnnnnnnnnnnnnnnnnnnnnnnnnnnnnnnnnnnnnnnnnnnnnnnnnnnnnnnnnnnnnnnnnnnnnnnnnnnnnnnnnnnnnnnnnnnnnnnnnnnnnnnnnnnnnnnnnnnnnnnnnnnnnnnnnnnnnnnnnnnnnnnnnnnnnnnnnnnnnnnnnnnnnnnnnnnnnnnnnnnnnnnnnnnnnnnnnnnnnnnnnnnnnnnnnnnnnnnnnnnnnnnnnnnnnnnnnnnnnnnnnnnnnnnnnnnnnnnnnnnnnnnnnnnnnnnnnnnnnnnnnnnnnnnnnnnnnnnnnnnnnnnnnnnnnnnnnnnnnnnnnnnnnnnnnnnnnnnnnnnnnnnnnnnnnnnnnnnnnnnnnnnnnnnnnnnnnnnnnnnnnnnnnnnnnnnnnnnnnnnnnnnnnnnnnnnnnnnnnnnnnnnnnnnnnnnnnnnnnnnnnnnnnnnnnnnnnnnnnnnnnnnnnnnnnnnnnnnnnnnnnnnnnnnnnnnnnnnnnnnnnnnnnnnnnnnnnnnnnnnnnnnnnnnnnnnnnnnnnnnnnnnnnnnnnnnnnnnnnnnnnnnnnnnnnnnnnnnnnnnnnnnnnnnnnnnnnnnnnnnnnnnnnnnnnnnnnnnnnnnnnnnnnnnnnnnnnnnnnnnnnnnnnnnnnnnnnnnnnnnnnnnnnnnnnnnnnnnnnnnnnnnnnnnnnnnnnnnnnnnnnnnnnnnnnnnnnnnnnnnnnnnnnnnnnnnnnnnnnnnnnnnnnnnnnnnnnnnnnnnnnnnnnnnnnnnnnnnnnnnnnnnnnnnnnnnnnnnnnnnnnnnnnnnnnnnnnnnnnnnnnnnnnnnnnnnnnnnnnnnnnnnnnnnnnnnnnnnnnnnnnnnnnnnnnnnnnnnnnnnnnnnnnnnnnnnnnnnnnnnnnnnnnnnnnnnnnnnnnnnnnnnnnnnnnnnnnnnnnnnnnnnnnnnnnnnnnnnnnnnnnnnnnnnnnnnnnnnnnnnnnnnnnnnnnnnnnnnnnnnnnnnnnnnnnnnnnnnnnnnnnnnnnnnnnnnnnnnnnnnnnnnnnnnnnnnnnnnnnnnnnnnnnnnnnnnnnnnnnnnnnnnnnnnnnnnnnnnnnnnnnnnnnnnnnnnnnnnnnnnnnnnnnnnnnnnnnnnnnnnnnnnnnnnnnnnnnnnnnnnnnnnnnnnnnnnnnnnnnnnnnnnnnnnnnnnnnnnnnnnnnnnnnnnnnnnnnnnnnnnnnnnnnnnnnnnnnnnnnnnnnnnnnnnnnnnnnnnnnnnnnnnnnnnnnnnnnnnnnnnnnnnnnnnnnnnnnnnnnnnnnnnnnnnnnnnnnnnnnnnnnnnnnnnnnnnnnnnnnnnnnnnnnnnnnnnnnnnnnnnnnnnnnnnnnnnnnnnnnnnnnnnnnnnnnnnggcccagctttgcctctggagtccaggccccaacacagccccatggcctctgccagatggttttgaaaaaggtgatccaagcaggcccctgtatctgtacatagtgactgagtggggggtgccggcaagtgtggcagctgcctctgggctgagcacagcctgacccctctagcccctgtaaatactggatcaatgaataaaactctcctaagaatctcctgagaaatgaa

SEQ ID NO: 24651 - DNA, 1266 bp, Macaca Mulatta
  misc_feature (1)...(1266): n = A,T,C or G
cggcagcagaggcagtaccttgcccaaacgcaatgggaaaggcacggagccgggcctggccctgcccgccagggaaggaggggcccccagcggagctggggccatgcaacttccccgggaggaaggagacaggtcgcaggatgtctggcagtggatgctggagagtgagcggcagagcaagcccaagccccatagnnnnnnnnnnnnnnnnnnnnnnnnnnnnnnnnnnnnnnnnnnnnnnnnnnnnnnnnnnnnnnnnnnnnnnnnnnnnnnnnnnnnnnnnnnnnnnnnnnnnnnnnnnnnnnnnnnnnnnnnnnnnnnnnnnnnnnnnnnnnnnnnnnnnnnnnnnnnnnnnnnnnnnnnnnnnnnnnnnnnnnnnnnnnnnnnnnnnnnnnnnnnnnnnnnnnnnnnnnnnnnnnnnnnnnnnnnnnnnnnnnnnnnnnnnnnnnnnnnnnnnnnnnnnnnnnnnnnnnnnnnnnnnnnnnnnnnnnnnnnnnnnnnnnnnnnnnnnnnnnnnnnnnnnnntcacaaagagccaaagaaactggcaggtgtccatgcgctccaggccagtgagttggttgtcacttactttttctgtggggaagaaattccataccggaggatgctgaaggctcagagcttgaccctgggccnnnnnnnnnnnnnnnnnnnnnnnnnnnnnnnnnnnnnnnnnnnnnnnnnnnnnnnnnnnnnnnnnnnnnnnnnnnnnnnnnnnnnnnnnnnnnnnnnnnnnnnnnnnnnnnnnnnnnnnnnnnnnnnnnnnnnnnnnnnnnnnnnnnnnnnnnnnnnnnnnnnnnnnnnnnnnnnnnnnnnnnnnnnnnnnnnnnnnnnnnnnnnnnnnnnnnnnnnnnnnnnnnnnnnnnnnnnnnnnnnnnnnnnnnnnnnnnnnnnnnnnnnnnnnnnnnnnnnnnnnnnnnnnnnnnnnnnnnnnnnnnnnnnnnnnnnnnnnnnnnnnnnnnnnnnnnnnnnnnnnnnnnnnnnnnnnnnnnnnnnnnnnnnnnnnnnnnnnnnnnnnnnnnnnnaaaacatgaccactcttggctattgaagatgctgcctgtatttgagagactgccatacataatatatgacttcctagggatctgaaatccataaactaagagaaactgtatagcttacctgaacgggaatccttactgatatttatagaacagttgatttcccccatccccagtttatggatatgctgctttaaacttggaagggggagagaggaagttt

SEQ ID NO: 24652 - DNA, 504 bp, Macaca Mulatta
gacaggtggctttgccagtatgtccatagaggtgtcacacggccccagggcctctcaggccatgctcaggagcaggtgaaaggatggtggcttctgtctggagcacccttcctggcccagagtaaggccccctggggagcggtggagggaggagctggagaaagctttggccctgggacaaggtccaggttctggcaggtgaatcaggaaaaaacagtagaagaaagcaacctggtagcttggccccatgtggctggatttcgagtttcccagaaagagtcttggccctcctttggggttgcaagaagaattctgagccccacctactgaggactcccggctccccactatccagccttcccagtgaaggcaggatcctggagggccggagaccaagtctgtccttggcttggcactggggcaaataggtgctcaggagatgctgaggaggttggctttggggctggcaggttgggtgacggggctgaatgctgaggctggtgg

SEQ ID NO: 24653 - DNA, 134 bp, Macaca Mulatta
gagttttgaaaagaaacttgctccggaagaatgcttttcccctttggatctttttaacaaaatccgagaacaaaatgaagaacttggactgattattgatttaacatatactcaacgctattataaaccggagg

SEQ ID NO: 24654 - DNA, 494 bp, Macaca Mulatta
ggtgtcaaaggagaccctggccctccaggccccatgggtccgcctggagatatgccatgttttcctgggaatgatgggctgcctggagcccctggtatccctggagagtgtggagagaagggagagcctggcgagaggggccctccagggcttccagctcatctagatgaggagctccaagccacactccacgacttcagacatcaaatcttgcagacaaggggagccctcagtctacaggagtccatactggcaataggagggaaggtcttctccaccaatgggcagtctgccacttttgatgccattcaggaggcatgcgccagagcaggcggccacattgctgtcccaaggagtccagaggaaaacgaagccattgcgagcttcgtgaagaagtacaacacgtatgcctatgtgggcctgactgaaggaccaagccctggagacttccgctactcagatgggacccctgtaaactacaccaactggtaccg

SEQ ID NO: 24655 - DNA, 275 bp, Macaca Mulatta
agagaaacagacagatggacaagcccctcggaaggctctgggcctcaggatccctaatgacagtgatcgggagggaagggacccgaactatggtcttgacctgggccagcgccacgttgcacagtctctccccaagacagggttgggaagtggcaagtgcgggcgcctcagacagcagcaatgctgtgtggctgcaaaggccaaggacacctgcaccaaatgagaccatggagtccactctcatggcctgaaaccccagtgacattccagcagga

SEQ ID NO: 24656 - DNA, 444 bp, Macaca Mulatta
gaccagagagctaacttgtgaccagtgttagtgaatctgtggcctaacttgtgaccagtggtctaacctgtgacccttgggctgctctgtgacctatggtcttcctctgcttagggagaagtgaattcaaacggtgctggaagggccaaggggcctgccgaacttactgcacaaggcaagaaacttacatgcacctgtgcccggatgcgtccctgtgctgtctctcctatgcattgaaacctccgccggtccccaagagtaaatatgagtagctggttctttgctgtccaataaaacacgggccgccagttgtctcttctttctgtttgctcgcctgtgctcctctcccccctggggtgggggataggcctaggatgtgggagaaatggtctgtggaaggaagtgagggacctgaggagagtgggcgctaatgaccattgtaaa

SEQ ID NO: 24657 - DNA, 1748 bp, Macaca Mulatta
  misc_feature (1)...(1748): n = A,T,C or G
tccctcccgcctcagtggatcatgcccagggcggcagcggcggcggttgcgggggggaagtgactgggcggtgccggcgcaggagacgatgccgtnnnnnnnnnnnnnnnnnnnnnnnnnnnnnnnnnnnnnnnnnnnnnnnnnnnnnnnnnnnnnnnnnnnnnnnnnnnnnnnnnnnnnnnnnnnnnnnnnnnnnnnnnnnnnnnnnnnnnnnnnnnnnnnnnnnnnnnnnnnnnnnnnnnnnnnnnnnnnnnnnnnnnnnnnnnnnnnnnnnnnnnnnnnnnnnnnnnnnnnnnnnnnnnnnnnnnnnnnnnnnnnnnnnnnnnnnnnnnnnnnnnnnnnnnnnnnnnnnnnnnnnnnnnnnnnnnnnnnnnnnnnnnnnnnnnnnnnnnnnnnnnnnnnnnnnnnnnnnnnnnnnnnnnnnnnnnnnnnnnnnnnnnnnnnnnnnnnnnnnnnnnnnnnnnnnnnnnnnnnnnnnnnnnnnnnnnnnnnnnnnnnnnnnnnnnnnnnnnnnnnnnnnnnnnnnnnnnnnnnnnnnnnnnnnnnnnnnnnnnnnnnnnnnnnnnnnnnnnnnnnnnnnnnnnnnnnnnnnnnnnnnnnnnnnnnnnnnnnnnnnnnnnnnnnnnnnnnnnnnnnnnnnnnnnnnnnnnnnnnnnnnnnnnnnnnnnnnnnnnnnnnnnnnnnnnnnnnnnnnnnnnnnnnnnnnnnnnnnnnnnnnnnnnnnnnnnnnnnnnnnnnnnnnnnnnnnnnnnnnnnnnnnnnnnnnnnnnnnnnnnnnnnnnnngccacaacatctattccaatatattaggtttcctcggtggtgtttcctgggctatgctagtagcaagaacttgccagctttatccaaatgcaatagcatcaactcttgtacataaatttttcttggtattttctaaatgnnnnnnnnnnnnnnnnnnnnnnnnnnnnnnnnnnnnnnnnnnnnnnnnnnnnnnnnnnnnnnnnnnnnnnnnnnnnnnnnnnnnnnnnnnnnnnnnnnnnnnnnnnnnnnnnnnnnnnnnnnnnnnnnnnnnnnnnnnnnnnnnnnnnnnnnnnnnnnnnnnnnnnnnnnnnnnnnnnnnnnnnnnnnnnnnnnnnnnnnnnnnnnnnnnnnnnnnnnnnnnnnnnnnnnnnnnnnnnnnnnnnnnnnnnnnnnnnnnnnnnnnnnnnnnnnnnnnnnnnnnnnnnnnnnnnnnnnnnnnnnnnnnnnnnnnnnnnnnnnnnnnnnnnnnnnnnnnnnnnnnnnnnnnnnnnnnnnnnnnnnnnnnnnnnnnnnnnnnnnnnnnnnnnnnnnnnnnnnnnnnnnnnnnnnnnnnnnnnnnnnnnnnnnnnnnnnnnnnnnnnnnnnnnnnnnnnnnnnnnnnnnnnnnnnnnnnnnnnnnnnnnnnnnnnnnnnnnnnnnnnnnnnnnnnnnnnnnnnnnnnnnnnnnnnnnnnnnnnnnnnnnnnnnnnnnnnnnnnnnnnnnnnnnnnnnnnnnnnnnnnnnnnnnnnnnnnnnnnnnnnnnnnnnnnnnnnnnnnnnnnnnnnnnnnnnnnnnnnnnnnnnnnnnnnnnnnnnnnnnnnnnnnnnnnnnnnnnnnnnnnnnnnnnnnnnnnnnnnnnnnnattgacagctctcctgttagcagccttgacttgtctatggacagtgataacagcctttctgtgccttcacctactagtgctacgaagaccagtccattgaacagttctggcagctctcaggg

SEQ ID NO: 24658 - DNA, 2244 bp, Macaca Mulatta
  misc_feature (1)...(2244): n = A,T,C or G
ngaatgcattagtctaatgagatgtttgcagctggagcgcaggctgctggagactaactgtgagctactaacacgggtggaagatagcttttgcagtactcggtttgcatgtgctgaaagtcatctgtcttctgagtcaacactcctgacctggtaaacaacctgctcagggctctggtgaacaagctgtannnnnnnnnnnnnnnnnnnnnnnnnnnnnnnnnnnnnnnnnnnnnnnnnnnnnnnnnnnnnnnnnnnnnnnnnnnnnnnnnnnnnnnnnnnnnnnnnnnnnnnnnnnnnnnnnnnnnnnnnnnnnnncagtctgcctctacatcaacaaacaggccaatgcggggccctacctggagaggaggaaggtgcagcagctcccggagcatttcgggcctgagcggccatcggcggtgctgcagcaggccgtccaagcctgcatcgactgcgcccaccagcagaagttggtcttctccctggtcaagcagggctacggtggagagatggtgtcannagtctcagcttcctttgatggcaaacagcacctgcggagcctgcctgtggtgaacagcgtcggctatgtcctccgcttccttgccaagctgtgccgaagcctcctgtgcgacgacctcttcagccaccagcccttccccaggggctgcagtgcctctgagaaagttcaggagaaagaggaagggaggatggaatcagnnnnnnnnnnnnnnnnnnnnnnnnnnnnnnnnnnnnnnnnnnnnnnnnnnnnnnnnnnnnnnnnnnnnnnnnnnnnnnnnnnnnnnnnnnnnnnnnnnnnnnnnnnnnnnnnnnnnnnnnnnnnnnnnnnnnnnnnnnnnnnnnnnnnnnnnnnnnnnnnnnnnnnnnnnnnnnnnnnnnnnnnnnnnnnnnnnnnnnnnnnnnnnnnnnnnnnnnnnnnnnnnnnnnnnnnnnnnnnnnnnnnnnnnnnnnnnnnnnnnnnnnnnnnnnnnnnnnnnnnnnnnnnnnnnnnnnnnnnnnnnnnnnnnnnnnnnnnnnnnnnnnnnnnnnnnnnnnnnnnnnnnnnnnnnnnnnnnnnnnnnnnnnnnnnnnnnnnnnnnnnnnnnnnnnnnnnnnnnnnnnnnnnnnnnnnnnnnnnnnnnnnnnnnnnnnnnnnnnnnnnnnnnnnnnnnnnnnnnnnnnnnnnnnnnnnnnnnnnnnnnnnnnnnnnnnnnnnnnnnnnnnnnnnnnnnnnnnnnnnnnnnnnnnnnnnnnnnnnnnnnnnnnnnnnnnnnnnnnnnnnnnnnnnnnnnnnnnnnnnnnnnnnnnnnnnnnnnnnnnnnnnnnnnnnnnnnnnnnnnnnnnnnnnnnnnnnnnnnnnnnnnnnnnnnnnnnnnnnnnnnnnnnnnnnnnnnnnnnnnnnnnnnnnnnnnnnnnnnnnnnnnnnnnnnnnnnnnnnnnnnnnnnnnnnnnnnnnnnnnnnnnnnnnnnnnnnnnnnnnnnnnnnnnnnnnnnnnnnnnnnnnnnnnnnnnnnnnnnnnnnnnnnnnnnnnnnnnnnnnnnnnnnnnnnnnnnnnnnnnnnnnnnnnnnnnnnnnnnnnnnnnnnnnnnnnnnnnnnnnnnnnnnnnnnnnnnnnnnnnnnnnnnnnnnnnnnnnnnnnnnnnnnnnnnnnnnnnnnnnnnnnnnnnnnnnnnnnnnnnnnnnnnnnnnnnnnnnnnnnnnnnnnnnnnnnnnnnnnnnnnnnnnnnnnnnnnnnnnnnnnnnnnnnnnnnnnnnnnnnnnnnnnnnnnnnnnnnnnnnnnnnnnnnnnnnnnnnnnnnnnnnnnnnnnnnnnnnnnnnnnnnnnnnnnnnnnnncttttctattcctagaaaatctgaagtactgtgttgctccgctagagggcagactgctaatgaaatttcaggaccctcactgactgcagtagcaagattattcagtactgagtggatgggttacggtgtctgtgaacaagatctagcccacacagaaacaggggatttattccacagttagcaccacagattgcgacttgggaagaaaccatcagctagaggggtctagttcgtatccaatcattattgactgactgactgatactcaactagcaaaggcaagaatttggaagcacgctctacccagatgggactttggagttccttctcttccagagtcctcattgaggtgttgaagtgttggcatgccgaagaatcttagtgacatttagccatgggtgtttcttt

SEQ ID NO: 24659 - DNA, 2654 bp, Macaca Mulatta
  misc_feature (1)...(2654): n = A,T,C or G
cagggagtcgagctctccggcctatcagccgccatcagccacttcctgaactgcttcctgagctcctaccctaaccccgtggcccacctgcccgccgacgagctggtctccaagaagaggaataagaggaggaaaaaccggccccccggtgctgcagataacacagcctgggctgtcgtgaccccccaggagctctggaaggacatctgccaggaggccaagaactactttgacttccacctcgagtgtgagactgtggaccaggctgtggagacctacggcctgcagaagataacactcctgcgggagatctcgctgaaaacagggatccaggtntccaggtcctgctgaaggagtacagcttcgacagtcgccacaagcccgcgttcaccgaggaggacgtgctcaacatcttccccgtggtcaagcacgtcaaccccaaggcctcggatgccttccatttcttccagagcggccaggccaaagtgcnnnnnnnnnnnnnnnnnnnnnnnnnnnnnnnnnnnnnnnnnnnnnnnnnnnnnnnnnnnnnnnnnnnnnnnnnnnnnnnnnnnnnnnnnnnnnnnnnnnnnnnnnnnnnnnnnnnnnnnnnnnnnnnnnnnnnnnnnnnnnnnnnnnnnnnnnnnnnnnnnnnnnnnnnnnnnnnnnnnnnnnnnnnnnnnnnnnnnnnnnnnnnnnnnnnnnnnnnnnnnnnnnnnnnnnnnnnnnnnnnnnnnnnnnnnnnnnnnnnnnnnnnnnnnnnnnnnnnnnnnnnnnnnnnnnnnnnnnnnnnnnnnnnnnnnnnnnnnnnnnnnnnnnnnnnnnnnnnnnnnnnnnnnnnnnnnnnnnnnnnnnnnnnnnnnnnnnnnnnnnnnnnnnnnnnnnnnnnnnnnnnnnnnnnnnnnnnnnnnnnnnnnnnnnnnnnnnnnnnnnnnnnnnnnnnnnnnnnnnnnnnnnnnnnnnnnnnnnnnnnnnnnnnnnnnnnnnnnnnnnnnnnnnnnnnnnnnnnnnnnnnnnnnnnnnnnnnnnnnnnnnnnnnnnnnnnnnnnnnnnnnnnnnnnnnnnnnnnnnnnnnnnnnnnnnnnnnnnnnnnnnnnnnnnnnnnnnnnnnnnnnnnnnnnnnnnnnnnnnnnnnnnnnnnnnnnnnnnnnnnnnnnnnnnnnnnnnnnnnnnnnnnnnnnnnnnnnnnnnnnnnnnnnnnnnnnnnnnnnnnnnnnnnnnnnnnnnnnnnnnnnnnnnnnnnnnnnnnnnnnnnnnnnnnnnnnnnnnnnnnnnnnnnnnnnnnnnnnnnnnnnnnnnnnnnnnnnnnnnnnnnnnnnnnnnnnnnnnnnnnnnnnnnnnnnnnnnnnnnnnnnnnnnnnnnnnnnnnnnnnnnnnnnnnnnnnnnnnnnnnnnnnnnnnnnnnnnnnnnnnnnnnnnnnnnnnnnnnnnnnnnnnnnnnnnnnnnnnnnnnnnnnnnnnnnnnnnnnnnnnnnnnnnnnnnnnnnnnnnnnnnnnnnnnnnnnnnnnnnnnnnnnnnnnnnnnnnnnnnnnnnnnnnnnnnnnnnnnnnnnnnnnnnnnnnnnnnnnnnnnnnnnnnnnnnnnnnnnnnnnnnnnnnnnnnnnnnnnnnnnnnnnnnnnnnnnnnnnnnnnnnnnnnnnnnnnnnnnnnnnnnnnnnnnnnnnnnnnnnnnnnnnnnnnnnnnnnnnnnnnnnnnnnnnnnnnnnnnnnnnnnnnnnnnnnnnnnnnnnnnnnnnnnnnnnnnnnnnnnnnnnnnnnnnnnnnnnnnnnnnnnnnnnnnnnnnnnnnnnnnnnnnnnnnnnnnnnnnnnnnnnnnnnnnnnnnnnnnnnnnnnnnnnnnnnnnnnnnnnnnnnnnnnnnnnnnnnnnnnnnnnnnnnnnnnnnnnnnnnnnnnnnnnnnnnnnnnnnnnnnnnnnnnnnnnnnnnnnnnnnnnnnnnnnnnnnnnnnnnnnnnnnnnnnnnnnnnnnnnnnnnnnnnnnnnnnnnnnnnnnnnnnnnnnnnnnnnnnnnnnnnnnnnnnnnnnnnnnnnnnnnnnnnnnnnnnnnnnnnnnnnnnnnnnnnnnnnnnnnnnnnnnnnnnnnnnnnnnnnnnnnnnnnnnnnnnnnnnnnnnnnnnnnnnnnnnnnnnnnnnnnnnnnnnnnnnnnnnnnnnnnnnnnnnnnnnnnnnncttggggtctgcagtctgaatgtatccctctcctggttcgaacntgagctgcctaacgcacagnnnnnnnnnnnnnnnnnnnnnnnnnnnnnnnnnnnnnnnnnnnnnnnnnagttacaggtgccgatgtgatgtcacttctctggagcccagctcccttcctggtctgagactagctctgggggtggtgggggcccccacaggccccgctcttcccgcgcccccttcctgtgctgctgctctgtgcctgctgtcagagccctggttggggaggacgtgaccaccctgagacctggaggagacgggcgtccgcctgggtttacggagagctgcttttgggtgtggtctgtgcagacaccttgtttcaaaggggatgggcgtgagctagcaagcaaagtatccccaccgctgagcaagaactttttcttgtttttaaaccatcacgtcctcatttcacattggaataaagtgagtttttgaaacctgc

SEQ ID NO: 24660 - DNA, 905 bp, Macaca Mulatta
  misc_feature (1)...(905): n = A,T,C or G
agtctgtgcggcaacatacatgatggggaatgagttgaccttcctagatgattccatctgcacgggcacctccagtggaaatcaagtgaacctcactatccaaggactgagggctatggacacaggactctacatctgcaaggtggagctcatgtacccaccaccatactacatgggcataggcaatggaacccagatttatgtaattgngatccagaaccgtgcccagattctgacttcctcctctggatccttgcagcagttagttcggggttgtttttttatagctttctcctcacagctgtttctttgagcaaaatgngctaaagaaaagaagccctctcacaacaggggtctatgtgaaaatgcccccaacagagccagaatgtgaaaagcaatttcagccttattttattcccatcaattgagaaaccattatgaagaagagagtccatatttcaatttccaagagctgaggcaattctaacttttttgctatccagctatttttatttgtttgtgcatttggggggaattcatctctctttaatataaagttggatgcagaacccaaattacgtgtactacaatttaaagcaaaggagcagaaagacagagctgggatgttcctgtcacatcagctccatttttagtgaaagcatcacttgggaataatatggggatgcagcattatgatgtgggtcaaggaattaaggaatggcacagtccaaagaaagaaaaggcagggagagagagaaaggactatattgtacacatcttatatttatgtatgagacgtttatagccgaaatgatcttttcaagttaaattttatgccttttatttctgaaacaaatggtataattacatcaaggcttcaaaaatactcacatggctatgtttta

SEQ ID NO: 24661 - DNA, 454 bp, Macaca Mulatta
  misc_feature (1)...(454): n = A,T,C or G
aggcttcagaagaagtgtcgaaatcactgcaagcaatgaaagaaattctgtgtggtacaaatgaaaaagaacccccaacagaagcagtggctcagctagcacaagaactctacaatagtggcctgctggtgacactgatagctgacttgcagctgatagactttgagnnnnnnnnnnnnnnnnnnnnnnnnnnnnnnnnnnnnnnnnnnnnnnnnnnnnnnnnnnnnnnnnnnnnnnnnnnnnnnnnnnnnnnnnnnnnnnnnnnnnnnnnnnnnnnnnnnnnnatatgaagccccacagattgccttacgttgtgggattatgctgagagaatgtattcgacatgaaccgcttgccaaaatcatcctcttttctaatcaattcagagatttctttaagtatgtggagttgtcaacatttgatattgcttcagatgcctttgctacttttaagg

SEQ ID NO: 24662 - DNA, 2076 bp, Macaca Mulatta
  misc_feature (1)...(2076): n = A,T,C or G
cgaggcgacccggccgccggccgctcctcggtgcgctgttccgcacttgctgccctcgcccggtcccaggcgccgctgccatgcggctggtgctgctctgggcccnnnnnnnnnnnnnnnnnnnnnnnnnnnnnnnnnnnnnnnnnnnnnnnnnnnnnnnnnnnnnnnnnnnnnnnnnnnnnnnnnnnnnnnnnnnnnnnnnnnnnnnnnnnnnnnnnnnnnnnnnnnnnnnnnnnnnnnnnnnnnnnnnnnnnnnnnnnnnnnnnnnnnnnnnnnnnnnnnnnnnnnnnnnnnnnnnnnnnnnnnnnnnnnnnnnnnnnnnnnnnnnnnnnnnnnnnnnnnnnnnnnnnnnnnnnnnnnnnnnnnnnnnnnnnnnnnnnnnnnnnnnnnnnnnnnnnnnnnnnnnnnnnnnnnnnnnnnnnnnnnnnnnnnnnnnnnnnnnnnnnnnnnnnnnnnnnnnnnnnnnnnnnnnnnnnnnnnnnnnnnnnnnnnnnnnnnnnnnnnnnnnnnnnnnnnnnnnnnnnnnnnnnnnnnnnnnnnnnnnnnnnnnnnnnnnnnnnnnnnnnnnnnnnnnnnnnnnnnnnnnnnnnnnnnnnnnnnnnnnnnnnnnnnnnnnnnnnnnnnnnnnnnnnnnnnnnnnnnnnnnnnnnnnnnnnnnnnnnnnnnnnnnnnnnnnnnnnnnnnnnnnnnnnnnnnnnnnnnnnnnnnnnnnnnnnnnnnnnnnnnnnnnnnnnnnnnnnnnnnnnnnnnnnnnnnnnnnnnnnnnnnnnnnnnnnnnnnnnnnnnnnnnnnnnnnnnnnnnnnnnnnnnnnnnnnnnnnnnnnnttcttccggcctctgaatgtacgagtggcactagtgggcctggaggcctggacccagcgtgacctggtggagatcagcccaaacccggctgtcaccctcgaaaacttcctccactggcgcagggcacatttgctgcctcgattgcctcacgacagtgcccagctggtgannnnnnnnnnnnnnnnnnnnnnnnnnnnnnnnnnnnnnnnnnnnnnnnnnnnnnnnnnnnnnnnnnnnnnnnnnnnnnnnnnnnnnnnnnnnnnnnnnnnnnnnnnnnnnnnnnnnnnnnnnnnnnnnnnnnnnnnnnnnnnnnnnnnnnnnnnnnnnnnnnnnnnnnnnnnnnnnnnnnnnnnnnnnnnnnnnnnnnnnnnnnnnnnnnnnnnnnnnnnnnnnnnnnnnnnnnnnnnnnnnnnnnnnnnnnnnnnnnnnnnnnnnnnnnnnnnnnnnnnnnnnnnnnnnnnnnnnnnnnnnnnnnnnnnnnnnnnnnnnnnnnnnnnnnnnnnnnnnnnnnnnnnnnnnnnnnnnnnnnnnnnnnnnnnnnnnnnnnnnnnnnnnnnnnnnnnnnnnnnnnnnnnnnnnnnnnnnnnnnnnnnnnnnnnnnnnnnnnnnnnnnnnnnnnnnnnnnnnnnnnnnnnnnnnnnnnnnnnnnnnnnnnnnnnnnnnnnnnnnnnnnnnnnnnnnnnnnnnnnnnnnnnnnnnnnnnnnnnnnnnnnnnnnnnnnnnnnnnnnnnnnnnnnnnnnnnnnnnnnnnnnnnnnnnnnnnnnnnnnnnnnnnnnnnnnnnnnnnnnnnnnnnnnnnnnnnnnnnnnnnnnnnnnnnnnnnnnnnnnnnnnnnnnnnnnnnnnnnnnnnnnnnnnnnnnnnnnnnnnnnnnnnnnnnnnnnnnnnnnnnnnnnnnnnnnnnnnnnnnnnnnnnnnnnnnnnnnnnnnnnnnnnnnnnnnnnnnnnnnnnnnnnnnnnnnnnnnnnnnnnnnnnnnnnnnnnnnnnnnnnnnnnnnnnnnnnnnnnnnnnnnnnnnnnnnnnnnnnnnnnnnnnnnnnnnnnnnnnnnnnnnnnnnnnnnnnnnnnnnnnnnnnnnnnnnnnnnnnnnnnnnnnnnnnnnnnnnnnnnnnnnnnnnnnnnnnnnnnnnnnnnnnnnnnnnnnnnnnnnnnnnnnnnnnnnnnnnnnnnnnnngtgcatagaccatcgatgccagcgtgtggatctcctgggggcacaggaatgtcgaagcaaatgccatggacatggggt

SEQ ID NO: 24663 - DNA, 814 bp, Macaca Mulatta
  misc_feature (1)...(814): n = A,T,C or G
gggaaggggaagtacagaaatatgttgatttgtgatttctggtgtcacctgtgttaccaaaaaccaaaacnnnnnnnnnnnnnnnnnnnnnnnnnnnnnnnnnnnnngnnnnnnnnnnnnnnnnnnnatgcagtggcatgattttggcttactgcaacctccgcctctcagattcaagcannnnnnnnnnnnnnnnnnnnnnnatnnnnnnnnnnnnngcgtgccaccacnnnnnnnnnnnnnnnnnnnnnnnnnnnnnnnnnnnnnnnntaccatgttagccaggatggtctcgatcacctgacctcatgatctgcccacctcagcctcccacaatcctgggattacagatgtgagccactgttcccagcccaaatcttcttgatcatacgtttaaatatattttttaatattgggagcatgagttgtcacttcttgtttgccttttttataaggcaatattggagagttacatcattgctaatgtagaaatgttaagtggaaaaatacacagtttggtaaaatagattccacatttatttgtgggttttttcccctcctttctttccacagcacttttgatatcaagcaagtggcttcctttttgagannnnnnnnnnnnnnnnnnnnnnnngtaaatgaagcccaactacctaacccttttcttatttggatttgtttttagaaatggtgaagttgtggttaaatagtactagctagaaataccaaatttctgggttatcattttctccttccctggtgccacttgaacattttaatttgccttaaaacctttttgaaatacatccttcgg

SEQ ID NO: 24664 - DNA, 905 bp, Macaca Mulatta
tctgcactgacttgaacccagagttaaaaacattggcgtcggtggcctctcccccgtcatccggctcacgggcctgttccttctgtgctgatgttcatccccgctgctccctgcaggccacatgtgggtgctgaaggtgcagaattcctctccaccggggaggcagccgcggactcctatcccaactggctcaagttccacattggcatcaaccggtacgagctgtactccagacacaacccagccatcgaggccctgctgcatgacctcagctcccagaggatcaccagcgtgggtaggtgtccttgggcgcacttgagggccatctgtgtgccggctggggctggcgtcagggctgccggggcaggctgtgcgttagagaggtctgggaggccgttgttcgttgttcgttaccgcagcattaacctcctgcagcgatctgcacgggaagcgcggagggacagaaggctcacgtctcgtgtgctctcacaccggatgtgcccctgatctgctgcacgatgagctgggagatgcctggacagcctgtccgctgtgctctgcctcctcacctgggtggtccttagggtgccaactgaacgacagcgtctttccctcctggggtagaagactagaggggcatcctcggcggcagtgacccctccaccgagatcgtgtgtgtgggactctcctgcttttctgcacacgaccctggctgggtggggagatagccttgagcctgcttcttgtggttttgaagccgtccttcgtcagagctcagcaaggcgctgtgcggtttcatactgaggagacgtaggcagggctcaggatggaggcctgggcctcccggatggaggagtttaaaggcaatgtctccaggtagtttgggatctgctgaattggacaaa

SEQ ID NO: 24665 - DNA, 414 bp, Macaca Mulatta
  misc_feature (1)...(414): n = A,T,C or G
gcacagcgcagccttgcccttatccgatggcgccacctaatggccacctttcacctgtgcaagccaaatacatcctgaaagacagcttctccatcttttgcgagcctggctatgagcttctgcaagnnnnnnnnnnnnnnnnnnnnnnnnnnnnnnnnnnnnnnnnnnnnnnnnnnnnnnnnnnnnnnnnnnnnnnnnnnnnnnnnnnnnnnnnnnnnnnnnnnnnnnnnnnnnnnnnnnnnnnnnnnnnnnnnnnnnnnnnnnnnnnnnnnnnnnnnnnnnnnnnnnnnnnnnnnnnnnnnnnnnnnnnnnnnnnnnnnnnnnnnnnnnnnnnnnnnggtaaatatgtgtgtgaggctgatggattctggacgagctccaaaggagaaagatcaccgccagtctgtgagcctg

SEQ ID NO: 24666 - DNA, 2227 bp, Macaca Mulatta
  misc_feature (1)...(2227): n = A,T,C or G
ggcctgtcttcctgttcaccgtgggcagcagagggatggctgctcagctgctgactgatgaggcannttcggaagacaaaccctctgttgttggggtggccacaggaggaccgacgaggaacagtgccaggggtcctggctcagaaggagtgtgggaaccaggcagctggccagagaggcggcggggagatgcgggtgcccagtgcgagccactgggaattccccaggggaacaaactcttggggggctcagtaccccgatgtcatgaactgaaggcatttaccaaccaaagctgtgtcctggttccaccacggctggacgaccccacagaaaagggggcctgtccacccataaggcgtgagaagaacttctccagtatttcggacctcagtaagccccccacgccctgcgtggagaagaaaacctatgactgcagcgagtgtggcaaggcctttagccgaagctcgtccctgataaagcaccaaaggatccacacgggagaaaagccgtttgagtgcgacacctgtgggaagcacttcatcgagcgctcgtccctcaccatccaccagcgggtgcacacgggcgagaagccctatgcctgcggggactgcggcaaggccttcagccagcgcatgaacctcactgtgcaccagcgcacgcacacgggcgagaagccgtatgtgtgcgacgtgtgtgggaaggccttccggaagacgtcctctctcacccagcacgagcggatccacacgggggagaagccctacgcgtgcggggactgcggcaaggccttcagccagaacatgcacctcatcgtgcaccagcgcacgcacaccggggagaagccgtacgtgtgccccgagtgcgggcgagccttcagccagaacatgcacctgaccgagcaccagcgcacgcacaccggggagaagccgtacgcctgcaaggagtgcggcaaggccttcaacaagagctcctcgctcaccctgcaccagaggaaccacaccggcgagaagccctacgtgtgcggcgagtgcggcnnnnnnnnnnnnnnnnnnnnnnnnnnnnnnnnnnnnnnnnnnnnnnnnnnnnnnnnnnnnnnnnnnnnnnnnnnnnnnnnnnnnnnnnnnnnnnnnnnnnnnnnnnnnnnnnnnnnnnnnnnnnnnnnnnnnnnnnnnnnnnnnnnnnnnnnnnnnnnnnnnnnnnnnnnnnnnnnnnnnnnnnnnnnnnnnnnnnnnnnnnnnnnnnnnnnnnnnnnnnnnnnnnnnnnnnnnnnnnnnnnnnnnnnnnnnnnnnnnnnnnnnnnnnnnnnnnnnnnnnnnnnnnnnnnnnnnnnnnnnnnnnnnnnnnnnnnnnnnnnnnnnnnnnnnnnnnnnnnnnnnnnnnnnnnnnnnnnnnnnnnnnnnnnnnnnnnnnnnnnnnnnnnnnnnnnnnnnnnnnnnnnnnnnnnnnnnnnnnnnnnnnnnnnnnnnnnnnnnnnnnnnnnnnnnnnnnnnnnnnnnnnnnnnnnnnnnnnnnnnnnnnnnnnnnnnnnnnnnnnnnnnnnncaggacggacgtcagagggatgcgcgctttgccagcagtgctgtgagaagttctcccctggggtggggactcggggtcagggacnttcaggaatgtggggttgtggaagggctggctgatcacacatgccccctccttactgagcctcagaaagcaagcccctcggtgtcggacgtatctggggacatttcagggttcactgtaactgagccatggccgctggtaacagacatcagggttccagactagctctctgagtaactgtcctacgagcttggacaggtcacgcctgcctccacatctctgtttcttcaatgggaaagtggagctggtggaggggagggaggaggcatctccccctttgtcagagacaccctggagtccagatgcagcttgtcaccatctgcattgtctcggtgggttaggagcatgagggctttcctatccctccacccaccatttccctgcagtgcgcgctagaagccaccaagctaggaagtaggcaggagtttgccgattgtttgtgaggggaaaaaaaaaatttttttttcagagttagcaaataacagtaactactgctttgaatgccaaagtttcttagagtgtgctgttacattttttaaaaataaaacttctaattaagggagactgtgtcattttgaacagtcttctgttttggccagttg

SEQ ID NO: 24667 - DNA, 1585 bp, Macaca Mulatta
  misc_feature (1)...(1585): n = A,T,C or G
aggcacttacaattcatgatacagaaaaatgccaagcatgggatctaggaaccaacttctttctcagtgaagatgatgttgttaataagagaaacaggnnnnnnnnnnnnnnnnnnnnnnnnnnnnnnnnnnnnnnnnnnnnnnnnnnnnnnnnnnnnnnnnnnnnnnnnnnnnnnnnnnnnnnnnnnnnnnnnnnnnnnnnnnnnnnnnnnnngtattgactgagatgaaacttccatcgctgaagaagatcaatgancttttgccgttctcagtgacctccnnnnnnnnnnnnnnnnnnnnnnnnnnnnnnnnnnnnnnnnnnnnnnnnnnnnnnnnnnnnnnnnnnnnnnnnnnnnnnnnnnnnnnnnnnnnnnnnnnnnnnnnnnnnnnnnnnnnnnnnnnnnnnnnnnnnnnnnnnnnnnnnnnnnnnnnnnnnnnnnnnnnnnnnnnnnnnnnnnnnnnnnnnnnnnnnnnnnnnnnnnnnnnnnnnnnnnnnnnnnnnnnnnnnnnnnnnnnnnnnnnnnnnnnnnnnnnnnnnnnnnnnnnnnnnnnnnnnnnnnnnnnnnnnnnnnnnnnnnnnnnnnnnnnnnnnnnnnnnnnnnnnnnnnnnnnnnnnnnnnnnnnnnnnnnnnnnnnnnnnnnnnnnnnnnnnnnnnnnnnnnnnnnnnnnnnnnnnnnnnnnnnnnnnnnnnnnnnnnnaggcacctttagagattcacacagctatgcttgccttggaccagtttcaggagaaatacagtcgcaagccaaatgttggnnnnnnnnnnnnnnnnnnnnnnnnnnnnnnnnnnnnnnnnnnnnnnnnnnnnnnnnnnnnnnnnnnnnnnnnnnnnnnnnnnnnnnnnnnnnnnnnnnnnnnnnnnnnnnnnnnnnnnnnnnnnnnnnnnnnnnnnnnnnnnnnnnnnnnnnnnnnnnnnnnnnnnnnnnnnnnnnnnnnnnnnnnnnnnnnnnnnnnnnnnnnnnnnnnnnnnnnnnnnnnnnnnnnnnnnnnnnnnnnnnnnnnnnnnnnnnnnnnnnnnnnnnnnnnnnnnnnnnnnnnnnnnnnnnnnnnnnnnnnnnnnnnnnnnnnnnnnnnnnnnnnnnnnnnnnnnnnnnnnnnnnnnnnnnnnnnnnnnnnnnnnnnnnnnnnnnnnnnnnnnnnnnnnnnnnnnnnnnnnnnnnnnnnnnnnnnnnnnnnnnnnnnnnnnnnnnnnnnnnnnnnnnnnnnnnnnnnnnnnnnnnnnnnnnnnnnnnnnnnnnnnnnnnnnnnnnnnnnnnnnnnnnnnnnnnnnnnnnnnnnnnnnnnnnnnnnnnnnnnnnnnnnnnnnnnnnnnnnnnnnnnnnnnnnnnnnnnnnnnnnnnnnnnnnnnnnnnnnnnnnnnnnnnnnnnnnnnnnnnnnnnnnnnnnnnnnnnnnnnnnnnnnnnnnnnnnnnnnnnnnnnnnnnnnnnnnnnnnnnnnnnnnnnnnnnnnnnnagtcgttgcttagcaaatctaaggcctctcttagattctggaacaatgggcactaaggggcacactgaagttattgtaccacatttgactgaatcttacaatagtca

SEQ ID NO: 24668 - DNA, 1201 bp, Macaca Mulatta
  misc_feature (1)...(1201): n = A,T,C or G
tggtgcttggggtgcccagcgctgtcctgaccctctgcctctggctggcggcctccagggtctgcctggcggccggccccggcgcggctgctgcgcgacggctggacgagtcgctgtctgccgggagcgtccagcgcgcccgctgcgcctccaggtgcctgagcctgcagatcactcgcatctccgccttcttccagcacttccagnnnnnnnnnnnnnnnnnnnnnnnnnnnnnnnnnnnnnnnnnnnnnnnnnnnnnnnnnnnnnnnnnnnnnnnnnnnnnnnnnnnnnnnnnnnnnnnnnnnnnnnnnnnnnnnnnnnnnnnnnnnnnnnnnnnnnnnnnnnnnnnnnnnnnnnnnnnnnnnnnnnnnnnnnnnnnnnnnnnnnnnnnnnnnnnnnnnnnnnnnnnnnnnnnnnnnnnnnnnnnnnnnnnnnnnnnnnnnnnnnnnnnnnnnnnnnnnnnnnnnnnnnnnnnnnnnnnnnnnnnnnnnnnnnnnnnnnnnnnnnnnnnnnnnnnnnnnnnnnnnnnnnnnnnnnnggtgtccccctgaagcccagaaaagagttacgatttacagaactgcagtctggacagctggaggttaagtggtcctcgaaattcaatatttctattgagcctgtgatctacgtggtacaaagaagatggaattacggaatccatcctagcgaagatgatgccactcattggcagacagtggcccagnnnnnnnnnnnnnnnnnnnnnnnnnnnnnnnnnnnnnnnnnnnnnnnnnnnnnnnnnnnnnnnnnnnnnnnnnnnnnnnnnnnnnnnnnnnnnnnnnnnnnnnnnnnnnnnnnnnnnnnnnnnnnnnnnnnnnnnnnnnnnnnnnnnnnnnnnnnnnnnnnnnnnnnnnnnnnnnnnnnnnnnnnnnnnnnnnnnnnnnnnnnnnnnnnnnnnnnnnnnnnnnnnnnnnnnnnnnnnnnnnnnnnnnnnnnnnnnnnnnnnnnnnnnnnnnnnnnnnnnnnnnnnnnnnnnnnnnnnnnnnnnnnnnnnnnnnnnnnnnnnnnnnnnnnnnnnnntttcaaaattctgtgaccctggagaaactccagccagactgtgactatgttgtggaattgcaagccataacgtactggggacagacacggctgaagagtgcgaaggtgtcccttcacttcacatccacacatgcaaccaaca

SEQ ID NO: 24669 - DNA, 2525 bp, Macaca Mulatta
  misc_feature (1)...(2525): n = A,T,C or G
gaagcttattttcgatacatggcagaaaacccaactgctggtatggttcaggaggaagaggaagacaatctagaatatgatagtgacggaaatccaattgcacctaccaaaaaaataattgatcctcttccccccattgatcattcagannnnnnnnnnnnnnnnnnnnnnnnnnnnnnnnnnnnnnnnnnnnnnnnnnnnnnnnnnnnnnnnnnnnnnnnnnnnnnnnnnnnnnnnnnnnnnnnnnnnnnnnnnnnnnnnnnnnnnnnnnnnnnnnnnnnnnnnnnnnnnnnnnnnnnnnnnnnnnnnnnnnnnnnnnnnnnnnnnnnnnnnnnnnnnnnnnnnnnnnnnnnnnnnnnnnnnnnnnnnnnnnnnnnnnnnnnnnnnnnnnnnnnnnnnnnnnnnnnnnnnnnnnnnnnnnnnnnnnnnnnnnnnnnnnnnnnnnnnnnnnnnnnnnnnnnnnnnnnnnnnnnnnnnnnnnnnnnnnnnnnnnnnnnnnnnnnnnnnnnnnnnnnnnnnnnnnnnnnnnnnnnnnnnnnnnnnnnnnnnnnnnnnnnnnnnnnnnnnnnnnnnnnnnnnnnnnnnnnnnnnnnnnnnnnnnnnnnnnnnnnnnnnnnnnnnnnnnnnnnnnnnnnnnnnnnnnnnnnnnnnnnnnnnnnnnnnnnnnnnnnnnnnnnnnnnnnnnnnnnnnnnnnnnnnnnnnnnnnnnnnnnnnnnnnnnnnnnnnnnnnnnnnnnnnnnnnnnnnnnnnnnnnnnnnnnnnnnnnnnnnnnnnnnnnnnnnnnnnnnnnnnnnnnnnnnnnnnnnnnnnnnnnnnnnnnnnnnnnnnnnnnnnnnnnnnnnnnnnnnnnnnnnnnnnnnnnnnnnnnnnnnnnnnnnnnnnnnnnnnnnnnnnnnnnnnnnnnnnnnnnnnnnnnnnnnnnnnnnnnnnnnnnnnnnnnnnnnnnnnnnnnnnnnnnnnnnnnnnnnnnnnnnnnnnnnnnnnnnnnnnnnnnnnnnnnnnnnnnnnnnnnnnnnnnnnnnnnnnnnnnnnnnnnnnnnnnnnnnnnnnnnnnnnnnnnnnnnnnnnnnnnnnnnnnnnnnnnnnnnnnnnnnnnnnnnnnnnnnnnnnnnnnnnnnnnnnnnnnnnnnnnnnnnnnnnnnnnnnnnnnnnnnnnnnnnnnnnnnnnnnnnnnnnnnnnnnnnnnnnnnnnnnnnnnnnnnnnnnnnnnnnnnnnnnnnnnnnnnnnnnnnnnnnnnnnnnnnnnnnnnnnnnnnnnnnnnnnnnnnnnnnnnnnnnnnnnnnnnnnnnnnnnnnnnnnnnnnnnnnnnnnnnnnnnnnnnnnnnnnnnnnnnnnnnnnnnnnnnnnnnnnnnnnnnnnnnnnnnnnnnnnnnnnnnnnnnnnnnnnnnnnnnnnnnnnnnnnnnnnnnnnnnnnnnnnnnnnnnnnnnnnnnnnnnnnnnnnnnnnnnnnnnnnnnnnnnnnnnnnnnnnnnnnnnnnnnnnnnnnnnnnnnnnnnnnnnnnnnnnnnnnnnnnnnnnnnnnnnnnnnnnnnnnnnnnnnnnnnnnnnnnnnnnnnnnnnnnnnnnnnnnnnnnnnnnnnnnnnnnnnnnnnnnnnnnnnnnnnnnnnnnnnnnnnnnnnnnnnnnnnnnnnnnnnnnnnnnnnnnnnnnnnnnnnnnnnnnnnnnnnnnnnnnnnnnnnnnnnnnnnnnnnnnnnnnnnnnnnnnnnnnnnnnnnnnnnnnnnnnnnnnnnnnnnnnnnnnnnnnnnnnnnnnnnnnnnnnnnnnnnnnnnnnnnnnnnnnnnnnnnnnnnnnnnnnnnnnnnnnnnnnnnnnnnnnnnnnnnnnnnnnnnnnnnnnnnnnnnnnnnnnnnnnnnnnnnnnnnnnnnnnnnnnnnnnnnnnnnnnnnnnnnnnnnnnnnnnnnnnnnnnnnnnnnnnnnnnnnnnnnnnnnnnnnnnnnnnnnnnnnnnnnnnnnnnnnnnnnnnnnnnnnnnnnnnnnnnnnnnnnnnnnnnnnnnnnnnnnnnnnnnnnnnnnnnnnnnnnnnnnnnnnnnnnnnnnnnnnnnnnnnnnnnnnnnnnnnnnnnnnnnnnnnnnnnnnnnnnnnnnnnnnnnnnnnnnnnnnnnnnnnnnnnnnnnnnnnnnnnnnnnnnnnnnnnnnnnnnnnnnnnnnnnnnnnnnnnnnnnnnnnnnnnnnnnnnnnnnnnnnnnnnnnnnnnnnnnnnnnnnnnnnnnnnnnnnnnnnnnnnnnnnnnnnnnnnnnnnnnnnnnnnnnnnnnnnnnnnnnnnnnnnnnnnnnnnnnnnnnnnnnnnnnnnnnnnnnnnnnnnnnnnnnnnnnnnnnnnnnnnnnnnnnnnnnnnnnnnnnnnnnnnnnnnnnnnnnnnnnnnnnnnnnnnnnnnnnagaaagatttcggtaactaggtgtctcagggctgggttggggtccaaagtgtaaggaccccctgcccttagtggagagctggagcttggagacattaccccttcatcagaaggaattttcggatgttttattgggaagct

SEQ ID NO: 24670 - DNA, 390 bp, Macaca Mulatta
  misc_feature (1)...(390): n = A,T,C or G
tcttgaaatgtcaaaacgtaaggtgtgcacagtgatcttcaacttaacaaacacttacgttctcctttataaaatgcatagtaaaccactaatgttagctatttaataaaagttttcagttataagtttggtaaatattaataaatggatacacagtcaaaatacttttaaaaaaagaaaatgttaccagttttttatctgaagtttaactgtccaattgtanaggtgtaagttatataggcatgaaaaaaatgggggagtaaaattcacaaaatgcagtcgaatatatatgaaaagcattagatggataagtgactattttnagagattcagcatgcatggatattagttttgattaatgtgtataataatttacacattatactctan

SEQ ID NO: 24671 - DNA, 111 bp, Macaca Mulatta
gaaagagagaacctgcttgcattatgctgtgaagaaaaaatttaccttcattgattatctactaattatcctcttaatgcctgttctgcttattgggtatttcctcatggt

SEQ ID NO: 24672 - DNA, 959 bp, Macaca Mulatta
  misc_feature (1)...(959): n = A,T,C or G
aggcagcacagtcagtactgatttcattatttgaactcaataccccagagtttacaatgttattaggagctttaccaaaaacttttcaggatggtgctacgaagcttcttcataatcaccttcgaaacactggcaatggaacccannnnnnnnnnnnnnnnnnnnnnnnnnnnnnnnnnnnnnnnnnnnnnnnnnnnnnnnnnnnnnnnnnnnnnnnnnnnnnnnnnnnnnnnnnnnnnnnnnnnnnnnnnnnnnnnnnnnnnnnnnnnnnnnnnnnnnnnnnnnnnnnnnnnnnnnnnnnnnnnnnnnnnnnnnnnnnnnnnnnnnnnnnnnnnnnnnnnnnnnnnnnnnnnnnnnnnnnnnnnnnnnnnnnnnnnnnnnnnnnnnnnnnnnnnnnnnnnnnnnnnnnnnnnnnnnnnnnnnnnnnnnnnnnnnnnnnnnnnnnnnnnnnnnnnnnnnnnnnnnnnnnnnnnnnnnnnnnnnnnnnnnnnnnnnnnnnnnnnnnnnnnnnnnnnnnnnnnnnnnnnnnnnnnnnnnnnnnnnnnnnnnnnnnnnnnnnnnnnnnnnnnnnnnnnnnnnnnnnnnnnnnnnnnnnnnnnnnnnnnnnnnnnnnnnnnnnnnnnnnnnnnnnnnnnnnnnnnnnnnnnnnnnnnnnnnnnnnnnnnnnnnnnnnnnnnnnnnnnnnnnnnnnnnnnnnnnnnnnnnnnnnnnnnnnnnnnnnnnnnnnnnnnnnnnnnnnnnnnnnnnnnnnnnnnnnnnnnnnnnnnnnnnnnnnnnnnnnnnnnnnnnnnnnnnnnnnnnnnnnnnnnnnnnnnnnnnnnnnnnnnagcctacaatcagggctttggcgttaaaggttttaagagaaatcctaaggcatcaaccagcaagatttaaaaactatgcagaattgactgtcatgaaaacattggaagcacataaagatcctcataaggagg

SEQ ID NO: 24673 - DNA, 421 bp, Macaca Mulatta
  misc_feature (1)...(421): n = A,T,C or G
aaaaatacctcgtgatatgtatgaagatgagttaggtcctgtatttgaaagagctgggaagacatatgaaattcgacttatgatggaatttagtggagaaaatcgaggttatgcttttgtgatgtacactacaaaagaagaagcccagttagccatcagaattcttaataattatgaaattcgaccagggaagtttattggtgtgtgtgtaagcctggataattgtaggttatttattggagctattccnnnnnnnnnnnnnnnnnnnnnnnnnnnnnnnnnnnnnnnnnnnnnnnnnnnnnagttgtagatgtcattgtttatccaagtgcaactgataagaccaaaaatcgtggttttgcatttgtggaatatgaatctcacagagctagtgctatggcacggaggaaactaattccag

SEQ ID NO: 24674 - DNA, 4535 bp, Macaca Mulatta
  misc_feature (1)...(4535): n = A,T,C or G
cgagacaggaccgcagtcagtggagaccatgggagaggtgtgtggagggcctctggcccttggcggattcgatccgttcccccagggaccatccacagatggcttcttccttcatgtagacagggctgatgaggacactgagggaaggttgtatgttagttgttcaaaaagccccaactcccacgattcagagccgtggactctcctcaggcaggattctgactcggatgtggtggacatagaggaagccgagcatgatttcctgggtgaggcccatcctgtggttctcagcagatacatcggggaggaagagtcggctaaactgcaggaggacatgaaggtgaaggaacatgaagacaaagatgacgccagtggccgctcgagcccctgcctgagcacagcgtctcagatgagcagcgtctctgtggcgagtgggagtgtgaagatgaccagctttgcagagaggaagctccagagactcaacagctgcgagaccaagtccagcaccagcagctcccaaaagaccacaccagatgcgtctgagagctgcccggcccctctgacgacatggaggcagaaaagggagcagagcccgggccggcatggcagggaccccgccagcctnnnnnnnnnnnnnnnnnnnnnnnnnnnnnnnnnnnnnnnnnnnnnnnnnnnnnnnnnnnnnnnnnnnnnnnnnnnnnnnnnnnnnnnnnnnnnnnnnnnnnnnnnnnnnnnnnnnnnnnnnnnnnnnnnnnnnnnnnnnnnnnnnnnnnnnnnnnnnnnnnnnnnnnnnnnnnnnnnnnnnnnnnnnnnnnnnnnnnnnnnnnnnnnnnnnnnnnnnnnnnnnnnnnnnnnnnnnnnnnnnnnnnnnnnnnnnnnnnnnnnnnnnnnnnnnnnnnnnnnnnnnnnnnnnnnnnnnnnnnnnnnnnnnnnnnnnnnnnnnnnnnnnnnnnnnnnnnnnnnnnnnnnnnnnnnnnnnnnnnnnnnnnnnnnnnnnnnnnnnnnnnnnnnnnnnnnnnnnnnnnnnnnnnnnnnnnnnnnnnnnnnnnnnnnnnnnnnnnnnnnnnnnnnnnnnnnnnnnnnnnnnnnnnnnnnnnnnnnnnnnnnnnnnnnnnnnnnnnnnnnnnnnnnnnnnnnnnnnnnnnnnnnnnnnnnnnnnnnnnnnnnnnnnnnnnnnnnnnnnnnnnnnnnnnnnnnnnnnnnnnnnnnnnnnnnnnnnnnnnnnnnnnnnnnnnnnnnnnnnnnnnnnnnnnnnnnnnnnnnnnnnnnnnnnnnnnnnnnnnnnnnnnnnnnnnnnnnnnnnnnnnnnnnnnnnnnnnnnnnnnnnnnnnnnnnnnnnnnnnnnnnnnnnnnnnnnnnnnnnnnnnnnnnnnnnnnnnnnnnnnnnnnnnnnnnnnnnnnnnnnnnnnnnnnnnnnnnnnnnnnnnnnnnnnnnnnnnnnnnnnnnnnnnnnnnnnnnnnnnnnnnnnnnnnnnnnnnnnnnnnnnnnnnnnnnnnnnnnnnnnnnnnnnnnnnnnnnnnnnnnnnnnnnnnnnnnnnnnnnnnnnnnnnnnnnnnnnnnnnnnnnnnnnnnnnnnnnnnnnnnnnnnnnnnnnnnnnnnnnnnnnnnnnnnnnnnnnnnnnnnnnnnnnnnnnnnnnnnnnnnnnnnnnnnnnnnnnnnnnnnnnnnnnnnnnnnnnnnnnnnnnnnnnnnnnnnnnnnnnnnnnnnnnnnnnnnnnnnnnnnnnnnnnnnnnnnnnnnnnnnnnnnnnnnnnnnnnnnnnnnnnnnnnnnnnnnnnnnnnnnnnnnnnnnnnnnnnnnnnnnnnnnnnnnnnnnnnnnnnnnnnnnnnnnnnnnnnnnnnnnnnnnnnnnnnnnnnnnnnnnnnnnnnnnnnnnnnnnnnnnnnnnnnnnnnnnnnnnnnnnnnnnnnnnnnnnnnnnnnnnnnnnnnnnnnnnnnnnnnnnnnnnnnnnnnnnnnnnnnnnnnnnnnnnnnnnnnnnnnnnnnnnnnnnnnnnnnnnnnnnnnnnnnnnnnnnnnnnnnnnnnnnnnnnnnnnnnnnnnnnnnnnnnnnnnnnnnnnnnnnnnnnnnnnnnnnnnnnnnnnnnnnnnnnnnnnnnnnnnnnnnnnnnnnnnnnnnnnnnnnnnnnnnnnnnnnnnnnnnnnnnnnnnnnnnnnnnnnnnnnnnnnnnnnnnnnnnnnnnnnnnnnnnnnnnnnnnnnnnnnnnnnnnnnnnnnnnnnnnnnnnnnnnnnnnnnnnnnnnnnnnnnnnnnnnnnnnnnnnnnnnnnnnnnnnnnnnnnnnnnnnnnnnnnnnnnnnnnnnnnnnnnnnnnnnnnnnnnnnnnnnnnnnnnnnnnnnnnnnnnnnnnnnnnnnnnnnnnnnnnnnnnnnnnnnnnnnnnnnnnnnnnnnnnnnnnnnnnnnnnnnnnnnnnnnnnnnnnnnnnnnnnnnnnnnnnnnnnnnnnnnnnnnnnnnnnnnnnnnnnnnnnnnnnnnnnnnnnnnnnnnnnnnnnnnnnnnnnnnnnnnnnnnnnnnnnctggagaagtgtgacgccaatcactacatcatactgtttcgtgatgctggctgccagttcagggcactttactgctactatcctgacactgaggaaatctacaaactcactggcacggggccaaagaacatcaccaagaaaatgatcgacaagctgtataaatacagctcagaccgaaaacagtttaacttgatcccagccaaaaccatgtctgtcagtgtggatgcactcacaatccacaaccacctgtggcagcccaagcggcccgcagtgccaaagaagggccagactcgtaaatgaccccggtgcagccggtgtccgaagggtgacccagactcgtaaatgacgccctcgtggctggcatccagagggtgccacggggtccttatttattgttttcatctatttgggtacgaagtgtgcaaagtcannnnnnnnnnnnnnnnnnnnnnnnnnnnnnnnnnnnnnnnnnnnnnnnnnnnnnnnnnnnnnnnnnnnnnnnnnnnnnnnnnnnnnnnnnnnnnnnnnnnnnnnnnnnnnnnnnnnnnnnnnnnnnnnnnnnnnnnnnnnnnnnnnnnnnnnnnnnnnnnnnnnnnnnnnnnnnnnnnnnnnnnnnnnnnnnnnnnnnnnnnnnnnnnnnnnnnnnnnnnnnnnnnnnnnnnnnnnnnnnnnnnnnnnnnnnnnnnnnnnnnnnnnnnnnnnnnnnnnnnnnnnnnnnnnnnnnnnnnnnnnnnnnnnnnnnnnnnnnnnnnnnnnnnnnnnnnnnnnnnnnnnnnnnnnnnnnnnnnnnnnnnnnnnnnnnnnnnnnnnnnnnnnnnnnnnnnnnnnnnnnnnnnnnnnnnnnnnnnnnnnnnnnnnnnnnnnnnnnnnnnnnnnnnnnnnnnnnnnnnnnnnnnnnnnnnnnnnnnnnnnnnnnnnnnnnnnnnnnnnnnnnnnnnnnnnnnnnnnnnnnnnnnnnnnnnnnnnnnnnnnnnnnnnnnnnnnnnnnnnnnnnnnnnnnnnnnnnnnnnnnnnnnnnnnnnnnnnnnnnnnnnnnnnnnnnnnnnnnnnnnnnnnnnntaggagctgatgtttgcttcattaaaagtgggcaagccgagccaactttagccatcattaattaagtttcggatagtactctaatgatttgttcactgtaataaagacagattttggtgaagtagaatatttttcattctgagcatgtttgtcccataaggtgatgcacttaagctgacagtccctttagtggttttgttaggtcacggcttgtcctgtctggattctgcatctggaagcgctgcgtgctctcagaggagcatgctcttttccgtgtagatggatagttttgttttgttgcctatttgaaaacaagtggttatttgcagttatttcagaactccaagtaagtggatggctttgggtgctttctgccttggtcccagtggtgttgatgcttctgcggagcggacattgccgggagcaggtgcgtgccagccacagctgccagacactgcagcgactgaccagctgccagaagattctggagccactaacattagttttgcacatattttcttgggagtgttacttgaatctatctcgaactgcagaaaaaattaaagatcaatagggagaaaaagttagacacaagtgtaactgttacataattttagataagaaacgtgagtcgtgtacataaggaaggcgggaacgtggtacagaaggctagaaggaattacaggtcttattcccctttcctcagtcctttgaagaaaaggacggtctcttgcgattttgtatatatcgtgttcaacacagccgctctctgtcctgtaaatagggaactaaaggctgtatgatttctcaagtgctgagttacacatcctgagtgagctttctgttaccatactttcacacgtgggctttatttctcactgtatgtttgatatgatattaccgtatttattttaagaaagcactaagatgtaataaagtgatgaactaatttgctttac

SEQ ID NO: 24675 - DNA, 1776 bp, Macaca Mulatta
  misc_feature (1)...(1776): n = A,T,C or G
aggcattcgcctggaagtggaaagactgcagggtttgcaggaagggctggaaagtgatgacgtgcaggttcagatcaagatttcttctaaaatagctaannnnnnnnnnnnnnnnnnnnnnnnnnnnnnnnnnnnnnnnnnnnnnnnnnnnnnnnnnnnnnnnnnnnnnnnnnnnnnnnnnnnnnnnnnnnnnnnnnnnnnnnnnnnnnnnnnnnnnnnnnnnnnnnnnnnnnnnnnnnnnnnnnnnnnnnnnnnnnnnnnnnnnnnnnnnnnnnnnnnnnnnnnnnnnnnnnnnnnnnnnnnnnnnnnnnnnnnnnnnnnnnnnnnnnnnnnnnnnnnnnnnnnnnnnnnnnnnnnnnnnnnnnnnnnnnnnnnnnnnnnnnnnnnnnnnnnnnnnnnnnnnnnnnnnnnnnnnnnnnnnnnnnnnnnnnnnnnnnnnnnnnnnnnnnnnnnnnnnnnnnnnnggggaactcttgcaagccttaatagacaaactggagaccgagttagaagatgacatcgccagggttgaggcaatttcagtgngtggcctgtgctatgtatgaagtgatctcaataggcacctctgtcaccggcttgtattcagagctgttcactctcctcctgaagctggttagctgcacactgggccagaagatgcccacgttttcctggagccgcaggcggcatgtgatgcagcagggagaacagcagcagatcccagacccctgcaggnnnnnnnnnnnnnnnnnnnnnnnnnnnnnnnnnnnnnnnnnnnnnnnnnnnnnnnnnnnnnnnnnnnnnnnnnnnnnnnnnnnnnnnnnnnnnnnnnnnnnnnnnnnnnnnnnnnnnnnnnnnnnnnnnnnnnnnnnnnnnnnnnnnnnnnnnnnnnnnnnnnnnnnnnnnnnnnnnnnnnnnnnnnnnnnnnnnnnnnnnnnnnnnnnnnnnnnnnnnnnnnnnnnnnnnnnnnnnnnnnnnnnnnnnnnnnnnnnnnnnnnnnnnnnnnnnnnnnnnnnnnnnnnnnnnnnnnnnnnnnnnnnnnnnnnnnnnnnnnnnnnnnnnnnnnnnnnnnnnnnnnnnnnnnnnnnnnnnnnnnnnnnnnnnnnnnnnnnnnnnnnnnnnnnnnnnnnnnnnnnnnnnnnnnnnnnnnnnnnnnnnnnnnnnnnnnnnnnnnnnnnnnnnnnnnnnnnnnnnctcgcaccgatttcgtctgtgaaagcttgaaggctctaaaacaaatcctgaatctgctcacagaccgagacgtgagcttctacttcaaggaaatagtgctgcaaacaaggaccttctttgaagatgnnnnnnnnnnnnnnnnnnnnnnnnnnnnnnnnnnnnnnnnnnnnnnnnnnnnnnnnnnnnnnnnnnnnnnnnnnnnnnnnnnnnnnnnnnnnnnnnnnnnnnnnnnnnnnnnnnnnnnnnnnnnnnnnnnnnnnnnnnnnnnnnnnnnnnnnnnnnnnnnnnnnnnnnnnnnnnnnnnnnnnnnnnnnnnnnnnnnnnnnnnnnnnnnnnnnnnnnnnnnnnnnnnnnnnnnnnnnnnnnnnnnnnnnnnnnnnnnnnnnnnnnnnnnnnnnnnnnnnnnnnnnnnnnnnnnnnnnnnnnnnnnnnnnnnnnnnnnnnnnnnnnnnnnnnnnnnnnnnnnnnnnnnnnnnnnnnnnnnnnnnnnnnnnnnnnnnnnnnnnnnnnnnnngatgccattattctcaatttgaccagccaatatgtggagttactagacagagaacaactgatcacacg

SEQ ID NO: 24676 - DNA, 174 bp, Macaca Mulatta
agtctcctttatttttgctattcttggacgccacctggcagctgttagaacaatatcctgcagctttcgagttctccgaaacctacctggccgtgttgtacgacagcacccggatctcactgtttggcaccttcctgttcaactcccctcaccagcgagtgaagcaaagcacgg

SEQ ID NO: 24677 - DNA, 614 bp, Macaca Mulatta
  misc_feature (1)...(614): n = A,T,C or G
tatctggagtcctcgaggcggggctgctccttgagggnctgtgggtccgtgctgaccccactgtgcacctctttcccgttcacccaccagctcagctccacgtggtcggggtagaagcctgtggccaggcacaccagcgtggccttttgggtgtgggagatctctgcttctgatggctcaaacacagcgaccttgggtgggaacacctttttcaggtcctctacaacagttagcctggtgcctgaaccgaaggagtagtcatgacggatccccccagtcagagctgctggcacaaagataaagggccgagtcccccagctccaaggtgctcacattcatctcagagcgagagttagagaactggcgccctgagaatcgattagagaagtttcctttttgtctctgtgtctcactgaagtattcgaagaggacctgaaggccctgtcctggggtctgttggtaccagtacacactcctatgcccagagataggggagcagctcaatgtcgcttgctgtcctctcattttgatcagagatcttggagtttgggtgactccagcctctactgggcctgctcccaggagacaaagcagtgcccagcagagcagcatgg

SEQ ID NO: 24678 - DNA, 2241 bp, Macaca Mulatta
  misc_feature (1)...(2241): n = A,T,C or G
acttccctttttccggtccgccggattatgaatgacggccggcgggagtgttttccagataaactagctgtcgtttttcttctggcctctgtggaagcgagcggtctgcgggcagcagctcccagaggcagcctgggaattccagctcgggctgggcgggaaggcgcaggcggcccaggtcgccgacacgctcacgcaccctacctgcctggccgcgcctctgcgaccaggtnaggtgactcaatgaaagaagaaaatgaaagccataaagaaaagtcttacagaagaagaatacctgtatctggacttttctcaccaaacaaaaggatgcatctttcctcttcatacatctgtaactttatttctgttatcttactgtgactgtaaaatctttaaaatttgcttagttgtcaccaaagaagtgagtacagatagttcactactaagagatgatctgattcaggatgttgaaatacagattatttcaaggcaagagctcccaccaatagtccagaattgctgtttgcctgcagtagtagaacgatcagacaatttttgtagagcaggacttgccgttgtattgagacacataatccagaaatcctatgaagcagaccccttaaagaaggaacttttggaacttctgggctttaaaaagacttgcttgaaagcctgtgctgaagtngttagtcagtggaccaggctatgtgaactcaccatccctttggctattgagaattttctcagagaatcttctgaccagccccccacctatacctgtagaaatactacagctagagaaaaagcttagtgagcctgttagagtgcataatgatgataaactccgcaggcagaaactcaagcaacagaaggctgatggagttggggcctccccttactaagggaaaggcaaagagcaaggtccacacgcaggaaacatctgaagagttggactcttcatctgagagtctggaactgaaagtggcattctcaaagctcacagtgcaggaagaaccagctactaccaacagagagccttctcacatcagaaaagcaaaagcctccgaccttccacctctggagcatgtgtttgcagaagggctttacttcactctggcagatatcgtgctcttgccctgtatccatcatttcttggtaanggtaattatctgcaagaaattttctgagaagctggtagaatttccattgctagcctcttggtaccagaggattcaggaagtgccaagagtaaaaacagcagcttctaagtgtgggatccaatttctccatttaccaaagttgttgacagtctcaactgagcagcgtccaaacttaagtgaagtcccaggtgtagaagagcacagcgatcctttatttataggaggaccaagaccaaccatggccaagttaatggnggaaaagggcattgaagtgatgttttctccccacccttgccctacttggactgttgattggaatgttctccctgcagcagtcagcccaaaggaaggtnnnnnnnnnnnnnnnnnnnnnnnnnnnnnnnnnnnnnnnnnnnnnnnnnnnnnnnnnnnnnnnnnnnnnnnnnnnnnnnnnnnnnnnnnnnnnnnnnnnnnnnnnnnnnnnnnnnnnnnnnnnnnnnnnnnnnnnnnnnnnnnnnnnnnnnnnnnnnnnnnnnnnnnnnnnnnnnnnnnnnnnnnnnnnnnnnnnnnnnnnnnnnnnnnnnnnnnnnnnnnnnnnnnnnnnnnnnnnnnnnnnnnnnnnnnnnnnnnnnnnnnnnnnnnnnnnnnnnnnnnnnnnnnnnnnnnnnnnnnnnnnnnnnnnnnnnnnnnnnnnnnnnnnnnnnnnnnnnnnnnnnnnnnnnnnnnnnnnnnnnnnnnnnnnnnnnnnnnnnnnnnnnnnnnnnnnnnnnnnnnnnnnnnnnnnnnnnnnnnnnnnnnnnnnnnnnnnnnnnnnnnnnnnnnnnnnnnnnnnnnnnnnnnnnnnnnnnnnnnnnnnnnnnnnnnnnnnnngtaaagtaagatcataaaacagttatcaattttaagaggtttataggtttaagtaatttttcaaagaaatagctattttattgctaaataaaataattatgattcaactagtttaattttcaacataattttaaatggaaatactgacctctgaaacttgctgagcatgttcttttggtatcttgatttagatgcattgcatcgaaattataacaatagcaaaattttttaa

SEQ ID NO: 24679 - DNA, 105 bp, Macaca Mulatta
tttggaccacctactctcggaactccagggcggtttcaatggtgtttcccgctcagcaattctgcaggagaattctactctatctgcaagtaacaagtgttgcat

SEQ ID NO: 24680 - DNA, 515 bp, Macaca Mulatta
aggtggccaggagatggggaaagaggaaaaacaaacctaagatgaattatgagaaactgagccgtggcctacgctactattacgacaaaaacatcatccacaagacagcggggaaacgctacgtgtaccgctttgtgtgtgacctgcagagcctgctggggtacacccctgaggagctgcacgccatgctggacgtcaagccagatgccgatgagtgatggcactgaaggggctggggaaaccctgctgagaccttccaaggacagccgtgttggttggactctgaatttttaattgttattctattttttattttccagaactcattttttaccttcaggggtgggagctaagtcagttgcagctgtaatcaattgtgtgcagttggaaaaggaaagccaggacttgtggggtgggtgggaccagaaattcttgaacggattttcaggagagggagaagggtcttctcagaagctggaaggctgtggcttgagagagaaagaagactaatgtgt

SEQ ID NO: 24681 - DNA, 584 bp, Macaca Mulatta
aatgaagctgaaaggggtgtttacatctgtaaacggtttcaaacagtagagaaacacacctaattagcactgtcactttttgccttgtcctggtatgtttgtttcaaatgaatacattaatgggggttttatccttttgaatgacttcttagctagtagacagaaatctcttcttcccagtggatgctctgcctttttaaccactgacatgtagggaggactactgtccggtgtcagcttatggggtcagctggctgtgggggtagagtcctgaggaatgtggtcacagcaagaaggcagggagcagcggagccttgcctttgaatgaggcagctcgtgaggcaagcaattctggagagaggtgcctagaaaggtgcggcctttcagctcttccttgatcactcacgcatctttgcgtactcccctgccgtccttcaactgtatcttacttttcttactggaaaggaatgaagtctgtgcagagataagttggacaacctgtgagtgcatctctcctttccttaagtcttcacagctaactttggagagctccaaaactacacggatctactcggcatgggtgc

SEQ ID NO: 24682 - DNA, 595 bp, Macaca Mulatta
  misc_feature (1)...(595): n = A,T,C or G
tggataaaaaagttatcagccaaatggcaatgaacgatgaaaccgcgaaaaacaagagtctgtcaaggtttggtgcaaaacttttaccaannnnnnnnnnnnnnnnnnnnnnnnnnnnnnnnnnnnnnnnnnnnnnnnnnnnnnnnnnnnnnnnnnnnnnnnnnnnnnnnnnnnnnnnnnnnnnnnnnnnnnnnnnnnnnnnnnnnnnnnnnnnnnnnnnnnnnnnnnnnnnnnnnnnnnnnnnnnnnnnnnnnnnnnnnnnnnnnnnnnnnnnnnnnnnnnnnnnnnnnnnnnnnnnnnnnnnnnnnnnnnnnnnnnnnnnnnnnnnnnnnnnnnnnnnnnnnnnnnnnnnnnnnnnnnnnnnnnnnnnnnnnnnnnnnnnnnnnnnnnnnnnnnnnnnnnnnnnnnnnnnnnnnnnnnnnnnnnnnnnnnnnnnnnnnnnnnnnnnnnnnnnnnnnnnnnnnnnnnnnnnnnnnnnnnnnnnnnnnnnnnnnnnnnnnnnnnnnnnnnnnnnnnnnnnnnnnnnnnnnnnnnnnnnnnctgggctccaacatcggcaccaccaccacggccctgctggccgccctggccagcc

SEQ ID NO: 24683 - DNA, 183 bp, Macaca Mulatta
  misc_feature (1)...(183): n = A,T,C or G
tcagacaatgagcagaggggcctggctttgcacaaaagcagccttccagaggaaaaggtgctcacagctggaacggccttcaggaaataggttcagagggttncaaggnnccagnngtttncccatannactttaaagaccatggccacaaagggttaatactgcacagccttcgagccaggg

SEQ ID NO: 24684 - DNA, 186 bp, Macaca Mulatta
tcttcctgatgaccatctttcaggctggcgggccaggcccctgggtgtctcccatatccttgtctttagtgagactgaggatctggtatgaggaaacagatcagcttcagccagtgagggcccctgcgttgggcctgggagagattttttttgttcctgcctttcctgtggtcccaggcactctct

SEQ ID NO: 24685 - DNA, 710 bp, Macaca Mulatta
aggttcatattgagatccattgaaggccctcccagagtgatgaaggcgtgacctcaggcccaccgcatccaagaacacgaagcatgagggacagaagggggtccctcggcacctgcctggcacaagtgcagcaggccagaggaggtgactcgaacaaactgtcatacagccttaagaaaagaatgccgatggagggcctttggcctgcagatgcaccctcctggatgaataagcctgtggttgatggaaattcacagagtgaggcattatcactggaaatgagaaaggatccgagcggggctggcctctggcttcacggtggtggcccagtgcttccatacgtgaaagaatcagtaagaagaaatccagcctcagcagccactcggagcacagccgtgggtttgctccctgctccaacagagtgttttgctcaggtggcctgcagtggtgttgaagctctggagcgggactggcttggaggaggggccagggccaccgacggccacagaggacagtgccccaaaggagagcctcgggtgtcacgactgctatgccatcaaaaactgccggaaatgggaagttttcaggatgacccaccaaatgctcttcccaagggtctgggctctgagttggaaccctcttgcctgcactccgtcctgtctgcaacactgcacgtgtgtcccgaagtgctcctgaatgatgagacaaaa

SEQ ID NO: 24686 - DNA, 3012 bp, Macaca Mulatta
  misc_feature (1)...(3012): n = A,T,C or G
gggacaactccgcaaacgaaaaagaacgacatgatgcaatcttcaggaaagtaagaggcatactaaataagcttactcctgaaaagtttgacaagctatgccttgagctcctcaatgtgggtgtagagtctaaactcatccttaaaggggtcatactgctgattgtggacaaagccctagaagagccaaagtatagctcactgtatgctcagctatgtctgcgattggcagaagatgcaccaaactttgatggcccagcagcagagggtcaaccaggacagaagcaaagcaccacattcagacgcctcctaatttccaaattacaagatgaatttgaaaaccgaactagaaatgttgatgtctatgataagcgtgaaaatcccctcctccccgagggggaggaacagagagccattgctaggatcaggatgttgggaaacatcaatttcattggagagcttggcaagcttgatcttattcacgaatctatccttcataagtgcatcaaaacacttttggaaaagaagaagagagtccaactcaaagatatgggagaggatttggagtgcctctgtcagataatgaggacagtgggacctagattagaccatgaacgagccaagtccttaatggatcagtactttgcccgaatgtgctccttgatgttaagtaaggaattgccagcgaggattcgtttcctgctgcaggataccgtagagttgcgagaacaccattgggttcctcgcaaggcttttcttgacaatggaccaaagacgatcaatcaaatccgtcaagatgcagtaaaagatctaggggtgtttattcctgctcccatggctcaagggatgagaagtgacttctttctggagggaccgttcatgccacccaggatgaaaatagatagggacccacttggaggacttgctgatatgtttggacaaatgccaggtagcggaattggtactggtccaggagttatccaggatagattttcaaccaccaatgggacgtcatcgttcaaatcaactgttcaatggccatgggggacacatcatgcctcccacacagtcgcagtttggagagatgggaggcaagtttatgaaaagccaggggctaagccagctctaccataaccagagtcagggactcttatcccagctgcaaggacagtcgaaggatatgccacctcggttttctaagaaaggacagcttaatgcagatgagattagcctgaggcctgctcagtctttcctaatggattaaaaaccaagtgccaaagcttcagccccagataactatgattcctccttagtggcacaaacaccacgcactcaaacaccaactctgggacagacacctcagcttggtctcaaaactaatccaccacttatccaggaaaagcctgccaagaccagcaaaaagccaccgccatcaaaggaagaactacttaaactaactgaaactgttgtgactgaatatctaaatagtggaaatgcaaatgaggctgtcagtggtgtaagagaaatgagggctcctaaacactttcttcctgagatgttaagcaaagtaatcatcctgtcactagatagaagcgatgaagataaagaaaaagcaagttctttgatcagtttactcaaacaggaagggatagccacaagtgacaacttcatgcaggctttcctgaatgtattggaccagtgtcccaaactggaggttgacatccccttggtgaaatcatatttagcacagtttgcagctcgtgccatcatttcagagctggtgagcatttcagaactagctcaaccactagaaagtggcacccattttcctctcttcctactttgtcttcagcaattagctaaattacaagatcgagaatggttaacagaactttttcaacaaagcaaggtcaatatgcagaaaatgctcccagaaattgatcagaataaggaccgcatgttggagattttggaaggaaagggactgagtttcttattcccactcctcaaactggagaaggaactgttgaagcaaataaagttggatccatcccctcaaaccatatataaatggattaaagataacatctctcccaaacttcatgtagataaaggatttgtgaacatcttaatgactagcttcttacagtacatttctagtgaagtaaacccccccagcgatgaaacagattcatcctctgctccttccaaagaacagttagagcaggaaaaacaactacttctttctttcaagccagtaatgcagaaatttcttcatgatcacgttgatctacaagtcagcgccctgtatgctcttcaggtgcactgctataacagcaacttcccaaaaggcatgttacttcgcttttttgtgcacttctatgatatggagattattgaaagaaaagcctttcctggcttggaaaagaaaatataaacccagaagttttccgggaaaaaggcaggggtttgtttccaggggaaatccatgggctaaccctgggctaaaaaaacgcnnnnnnnnnnnnnnnnnnnnnnngggaaaaaacctgtacatcaaaaaaacccccgccccaagagcccttataatttgtggcacaaaaaaacaacacgggttggcgccattaaggaagtgaaaccaggccgcttttttaaacacctataaaccccacttgnnnnnnnnnnnnnnnnnnnnnnnnnncccccggtgaaaagggttttttttcccccacttatttttatataacccccaaaaaacacccctcctccccttttagggataatttttctttctgccccgcaaagggggtgtttttttgttttaagggggaaaagagcctttaaaataactacaggcgcctcccacccaaacaaatatttttttggaaggagccccctcttatagggtgtataaaaacnnnnnnnnnnnnnnnnnnnngcccaacaaattttctctcctctacaatttttctcccgcaagaagagaggggcttttatttgtgtcagggagact

SEQ ID NO: 24687 - DNA, 711 bp, Macaca Mulatta
ttcccctgcaaccgcaatgtgctggccgccgcgtgtccctacttcaagagcatgttcacaggtggcatgtacgagagccagcagactagcgtgaccatgcacgatgtggacgccgagtccttcgaggtgttggtcgactactgctacacgggtcgtgtgtctctcagcgaggccaacgtggagcgcctgtacgcggcctccgacatgctgcaactggagtatgtgcgggaagcctgtgcctccttcttagcccgacgtcttgacctgaccaactgcactgccatcctcaagtttgcagacgcctttggccatcgcaagctgcgatcccaggcccagtcctatatagctcagaacttcaagcagctcagccacatgggttcaattcgggaggagactctagcagatctgaccctggcccagctgctggctgtcctgcgcttggatagtctggacgtggagagtgagcagacagtgtgccacgtggcagtgcagtggctggaggctgctcccaaagagcggggtcccagtgctgcggaagtcttcaagtgcgtgcgctggatgcacttcactgaagaagatcaggactacttagaagggctgctgaccaagcccatcgtgaagaagtactgcctggacgttattgaaggggccctgcagatgcgctatggtgaaatgttgtacaagtctctggtgccagtgccaaacagcagc

SEQ ID NO: 24688 - DNA, 5304 bp, Macaca Mulatta
  misc_feature (1)...(5304): n = A,T,C or G
gacttccttgtgaaacctcctagtagaaaaagttcttgggacaaacttcatttgnnntcaccataagggaaagaagagagccttgttggacactgaagaagggacggggatttcttctcctaatctgggcctcctgtcatgnnnnnnnnnnnnnnnnnnnnnnnnnnnnnnnnnnnnnnnnnnnnnnnnnnnnnnnnnnnnnnnnnnnnnnnnnnnnnnnnnnnnnnnnnnnnnnnnnnnnnnnnnnnnnnnnnnnnnnnnnnnnnnnnnnnnnnnnnnnnnnnnnnnnnnnnnnnnnnnnnnnnnnnnnnnnnnnnnnnnnnnnnnnnnnnnnnnnnnnnnnnnnnnnnnnnnnnnnnnnnnnnnnnnnnnnnnnnnnnnnnnnnnnnnnnnnnnnnnnnnnnnnnnnnnnnnnnnnnnnnnnnnnnnnnnnnnnnnnnnnnnnnnnnnnnnnnnnnnnnnnnnnnnnnnnnnnnnnnnnnnnnnnnnnnnnnnnnnnnnnnnnnnnnnnnnnnnnnnnnnnnnnnnnnnnnnnnnnnnnnnnnnnnnnnnnnnnnnnnnnnnnnnnnnnnnnnnnnnnnnnnnnnnnnnnnnnnnnnnnnnnnnnnnnnnnnnnnnnnnnnnnnnnnnnnnnnnnnnnnnnnnnnnnnnnnnnnnnnnnnnnnnnnnnnnnnnnnnnnnnnnnnnnnnnnnnnnnnnnnnnnnnnnnnnnnnnnnnnnnnnnnnnnnnnnnnnnnnnnnnnnnnnnnnnnnnnnnnnnnnnnnnnnnnnnnnnnnnnnnnnnnnnnnnnnnnnnnnnnnnnnnnnnnnnnnnnnnnnnnnnnnnnnnnnnnnnnnnnnnnnnnnnnnnnnnnnnnnnnnnnnnnnnnnnnnnnnnnnnnnnnnnnnnnnnnnnnnnnnnnnnnnnnnnnnnnnnnnnnnnnnnnnnnnnnnnnnnnnnnnnnnnnnnnnnnnnnnnnnnnnnnnnnnnnnnnnnnnnnnnnnnnnnnnnnnnnnnnnnnnnnnnnnnnnnnnnnnnnnnnnnnnnnnnnnnnnnnnnnnnnnnnnnnnnnnnnnnnnnnnnnnnnnnnnnnnnnnnnnnnnnnnnnnnnnnnnnnnnnnnnnnnnnnnnnnnnnnnnnnnnnnnnnnnnnnnnnnnnnnnnnnnnnnnnnnnnnnnnnnnnnnnnnnnnnnnnnnnnnnnnnnnnnnnnnnnnnnnnnnnnnnnnnnnnnnnnnnnnnnnnnnnnnnnnnnnnnnnnnnnnnnnnnnnnnnnnnnnnnnnnnnnnnnnnnnnnnnnnnnnnnnnnnnnnnnnnnnnnnnnnnnnnnnnnnnnnnnnnnnnnnnnnnnnnnnnnnnnnnnnnnnnnnnnnnnnnnnnnnnnnnnnnnnnnnnnnnnnnnnnnnnnnnnnnnnnnnnnnnnnnnnnnnnnnnnnnnnnnnnnnnnnnnnnnnnnnnnnnnnnnnnnnnnnnnnnnnnnnnnnnnnnnnnnnnnnnnnnnnnnnnnnnnnnnnnnnnnnnnnnnnnnnnnnnnnnnnnnnnnnnnnnnnnnnnnnnnnnnnnnnnnnnnnnnnnnnnnnnnnnnnnnnnnnnnnnnnnnnnnnnnnnnnnnnnnnnnnnnnnnnnnnnnnnnnnnnnnnnnnnnnnnnnnnnnnnnnnnnntgaaactggtacagcatacctattcctgcctctttggaacattcctgtgcaacaatgccaaggagagaggggagaagcatactcaggaacggacatgttccgtgtggtcacttcttcgggctggcaacaaggctttcaaaaacctactgtattcctctcagtcagaagccgtnnnnnnnnnnnnnnnnnnnnnnnnnnnnnnnnnnnnnnnnnnnnnnnnnnnnnnnnnnnnnnnnnnnnnnnnnnnnnnnnnnnnnnnnnnnnnnnnnnnnnnnnnnnnnnnnnnnnnnnnnnnnnnnnnnnnnnnnnnnnnnnnnnnnnnnnnnnnnnnnnnnnnnnnnnnnnnnnnnnnnnnnnnnnnnnnnnnnnnnnnnnnnnnnnnnnnnnnnnnnnnnnnnnnnnnnnnnnnnnnnnnnnnnnnnnnnnnnnnnnnnnnnnnnnnnnnnnnnnnnnnnnnnnnnnnnnnnnnnnnnnnnnnnnnnnnnnnnnnnnnnnnnnnnnnnnnnnnnnnnnnnnnnnnnnnnnnnnnnnnnnnnnnnnnnnnnnnnnnnnnnnnnnnnnnnnnnnnnnnnnnnnnnnnnnnnnnnnnnnnnnnnnnnnnnnnnnnnnnnnnnnnnnnnnnnnnnnnnnnnnnnnnnnnnnnnnnnnnnnnnnnnnnnnnnnnnnnnnnnnnnnnnnnnnnnnnnnnnnnnnnnnnnnnnnnnnnnnnnnnnnnnnnnnnnnnnnnnnnnnnnnnnnnnnnnnnnnnnnnnnnnnnnnnnnnnnnnnnnnnnnnnnnnnnnnnnnnnnnnnnnnnnnnnnnnnnnnnnnnnnnnnnnnnnnnnnnnnnnnnnnnnnnnnnnnnnnnnnnnnnnnnnnnnnnnnnnnnnnnnnnnnnnnnnnnnnnnnnnnnnnnnnnnnnnnnnnnnnnnnnnnnnnnnnnnnnnnnnnnnnnnnnnnnnnnnnnnnnnnnnnnnnnnnnnnnnnnnnnnnnnnnnnnnnnnnnnnnnnnnnnnnnnnnnnnnnnnnnnnnnnnnnnnnnnnnnnnnnnnnnnnnnnnnnnnnnnnnnnnnnnnnnnnnnnnnnnnnnnnnnnnnnnnnnnnnnnnnnnnnnnnnnnnnnnnnnnnnnnnnnnnnnnnnnnnnnnnnnnnnnnnnnnnnnnnnnnnnnnnnnnnnnnnnnnnnnnnnnnnnnnnnnnnnnnnnnnnnnnnnnnnnnnnnnnnnnnnnnnnnnnnnnnnnnnnnnnnnnnnnnnnnnnnnnnnnnnnnnnnnnnnnnnnnnnnnnnnnnnnnnnnnnnnnnnnnnnnnnnnnnnnnnnnnnnnnnnnnnnnnnnnnnnnnnnnnnnnnnnnnnnnnnnnnnnnnnnnnnnnnnnnnnnnnnnnnnnnnnnnnnnnnnnnnnnnnnnnnnnnnnnnnnnnnnnnnnnnnnnnnnnnnnnnnnnnnnnnnnnnnnnnnnnnnnnnnnnnnnnnnnnnnnnnnnnnnnnnnnnnnnnnnnnnnnnnnnnnnnnnnnnnnnnnnnnnnnnnnnnnnnnnnnnnnnnnnnnnnnnnnnnnnnnnnnnnnnnnnnnnnnnnnnnnnnnnnnnnnnnnnnnnnnnnnnnnnnnnnnnnnnnnnnnnnnnnnnnnnnnnnnnnnnnnnnnnnnnnnnnnnnnnnnnnnnnnnnnnnnnnnnnnnnnnnnnnnnnnnnnnnnnnnnnnnnnnnnnnnnnnnnnnnnnnnnnnnnnnnnnnnnnnnnnnnnnnnnnnnnnnnnnnnnnnnnnnnnnnnnnnnnnnnnnnnnnnnnnnnnnnnnnnnnnnnnnnnnnnnnnnnnnnnnnnnnnnnnnnnnnnnnnnnnnnnnnnnnnnnnnnnnnnnnnnnnnnnnnnnnnnnnnnnnnnnnnnnnnnnnnnnnnnnnnnnnnnnnnnnnnnnnnnnnnnnnnnnnnnnnnnnnnnnnnnnnnnnnnnnnnnnnnnnnnnnnnnnnnnnnnnnnnnnnnnnnnnnnnnnnnnnnnnnnnnnnnnnnnnnnnnnnnnnnnnnnnnnnnnnnnnnnnnnnnnnnnnnnnnnnnnnnnnnnnnnnnnnnnnnnnnnnnnnnnnnnnnnnnnnnnnnnnnnnnnnnnnnnnnnnnnnnnnnnnnnnnnnnnnnnnnnnnnnnnnnnnnnnnnnnnnnnnnnnnnnnnnnnnnnnnnnnnnnnnnnnnnnnnnnnnnnnnnnnnnnnnnnnnnnnnnnnnnnnnnnnnnnnnnnnnnnnnnnnnnnnnnnnnnnnnnnnnnnnnnnnnnnnnnnnnnnnnnnnnnnnnnnnnnnnnnnnnnnnnnnnnnnnnnnnnnnnnnnnnnnnnnnnnnnnnnnnnnnnnnnnnnnnnnnnnnnnnnnnnnnnnnnnnnnnnnnnnnnnnnnnnnnnnnnnnnnnnnnnnnnnnnnnnnnnnnnnnnnnnnnnnnnnnnnnnnnnnnnnnnnnnnnnnnnnnnnnnnnnnnnnnnnnnnnnnnnnnnnnnnnnnnnnnnnnnnnnnnnnnnnnnnnnnnnnnnnnnnnnnnnnnnnnnnnnnnnnnnnnnnnnnnnnnnnnnnnnnnnnnnnnnnnnnnnnnnnnnnnnnnnnnnnnnnnnnnnnnnnnnnnnnnnnnnnnnnnnnnnnnnnnnnnnnnnnnnnnnnnnnnnnnnnnnnnnnnnnnnnnnnnnnnnnnnnnnnnnnnnnnnnnnnnnnnnnnnnnnnnnnnnnnnnnnnnnnnnnnnnnnnnnnnnnnnnnnnnnnnnnnnnnnnnnnnnnnnnnnnnnnnnnnnnnnnnnnnnnnnnnnnnnnnnnnnnnnnnnnnnnnnnnnnnnnnnnnnnnnnnnnnnnnnnnnnnnnnnnnnnnnnnnnnnnnnnnnnnnnnnnnnnnnnnnnnnnnnnnnnnnnnnnnnnnnnnnnnnnnnnnnnnnnnnnnnnnnnnnntggggcctggtcccttaaacaatctcttcctcagccagcacagggaaatccagactcagggttccagaaatcccccattcccaaaccaaaccaatcatggatcttccctttaaggggtagaatcagcctttagagttacaagcccctggaaaagggagcaggtcctcatacaatcagcctttctccttctcggaacaggaagaagggctgagcattcccccttccccactcctggctggctgagtgggcacttgtctggctgctatccagcagtgaagggccacttggtgactttgtagggttccttagagaagtgacatggccttgaggagatttggggcaccttttctcagtgagctttgatatggtccgaaaacagccttaaatcaagaatatttgtggaggtgggtgtggggaaggttggagaagaggtaggtttgtgctttgtaattttggcatccatgtttttgtgcctgccctccctcttggggaggccatgcttggctctgctgaaagctgctaactggtgacagggtggatcatggtgaggactaggggtaaggtcagggaatgcttaagctctggccttgccctgtattgctcttctcctttggtagcagttccctgaccaagggcaagctgtgtctcaggaaggtggcttctgtgcgtgcctgggtgtgttacggcgtagcccagaaggcttccctggtgttctcagttcaggcaaagcccagagcatatgagcacgtctctgacttccagtggcaaca

SEQ ID NO: 24689 - DNA, 2856 bp, Macaca Mulatta
  misc_feature (1)...(2856): n = A,T,C or G
ggtattgacttggagaacatcgtttactacaaagatgacacacactatttcgttatgacagccaaaaagcagagtttgctggacaaaggagtgatactacatgnnnnnnnnnnnnnnnnnnnnnnnnnnnnnnnnnnnnnnnnnnnnnnnnnnnnnnnnnnnnnnnnnnnnnnnnnnnnnnnnnnnnnnnnnnnnnnnnnnnnnnnnnnnnnnnnnnnnnnnnnnnnnnnnnnnnnnnnnnnnnnnnnnnnnnnnnnnnnnnnnnnnnnnnnnnnnnnnnnnnnnnnnnnnnnnnnnnnnnnnnnnnnnnnnnnnnnnnnnnnnnnnnnnnnnnnnnnnnnnnnnnnnnnnnnnnnnnnnnnnnnnnnnnnnnnnnnnnnnnnnnnnnnnnnnnnnnnnnnnnnnnnnnnnnnnnnnnnnnnnnnnnnnnnnnnnnnnnnnnnnnnnnnnnnnnnnnnnnnnnnnnnnnnnnnnnagggaaagtatttataggttgctgcctcagaccacccctgagaatgtgagtaagaacttcagccagtacagtatcgacccagtcactcggtatcccaatatcaacgtcagcttcctccggccaagccaggtnnnnnnnnnnnnnnnnnnnnnnnnnnnnnnnnnnnnnnnnnnnnnnnnnnnnnnnnnnnnnnnnnnnnnnnnnnnnnnnnnnnnnnnnnnnnnnnnnnnnnnnnnnnnnnnnnnnnnnnnnnnnnnnnnnnnnnnnnnnnnnnnnnnnnnnnnnnnnnnnnnnnnnnnnnnnnnnnnnnnnnnnnnnnnnnnnnnnnnnnnnnnnnnnnnnnnnnnnnnnnnnnnnnnnnnnnnnnnnnnnnnnnnnnnnnnnnnnnnnnnnnnnnnnnnnnnnnnnnnnnnnnnnnnnnnnnnnnnnnnnnnnnnnnnnnnnnnnnnnnnnnnnnnnnnnnnnnnnnnnnnnnnnnnnnnnnnnnnnnnnnnnnnnnnnnnnnnnnnnnnnnnnnnnnnnnnnnnnnnnnnnnnnnnnnnnnnnnnnnnnnnnnnnnnnnnnnnnnnnnnnnnnnnnnnnnnnnnnnnnnnnnnnnnnnnnnnnnnnnnnnnnnnnnnnnnnnnnnnnnnnnnnnnnnnnnnnnnnnnnnnnnnnnnnnnnnnnnnnnnnnnnnnnnnnnnnnnnnnnnnnnnnnnnnnnnnnnnnnnnnnnnnnnnnnnnnnnnnnnnnnnnnnnnnnnnnnnnnnnnnnnnnnnnnnnnnnnnnnnnnnnnnnnnnnnnnnnnnnnnnnnnnnnnnnnnnnnnnnnnnnnnnnnnnnnnnnnnnnnnnnnnnnnnnnnnnnnnnnnnnnnnnnnnnnnnnnnnnnnnnnnnnnnnnnnnnnnnnnnnnnnnnnnnnnnnnnnnnnnnnnnnnnnnnnnnnnnnnnnnnnnnnnnnnnnnnnnnnnnnnnnnnnnnnnnnnnnnnnnnnnnnnnnnnnnnnnnnnnnnnnnnnnnnnncagggctccatgaagaaggagttcccgcagaacctgggaggcagcgacacgtgctacttctgccagaagcgggtctacgtgatggagaggctgagcgccgagggcaagttcttccaccggagctgcttcaagtgcgagtactgcgccaccaccctgcgcctgtcggcctacgcctacgacatcgaggatggnnnnnnnnnnnnnnnnnnnnnnnnnnnnnnnnnnnnnnnnnnnnnnnnnnnnnnnnnnnnnnnnnnnnnnnnnnnnnnnnnnnnnnnnnnnnnnnnnnnnnnnnnnnnnnnnnnnnnnnnnnnnnnnnnnnnnnnnnnnnnnnnnnnnnnnnnnnnnnnnnnnnnnnnnnnnnnnnnnnnnnnnnnnnnnnnnnnnnnnnnnnnnnnnnnnnnnnnnnnnnnnnnnnnnnnnnnnnnnnnnnnnnnnnnnnnnnnnnnnnnnnnnnnnnnnnnnnnnnnnnnnnnnnnnnnnnnnnnnnnnnnnnnnnnnnnnnnnnnnnnnnnnnnnnnnnnnnnnnnnnnnnnnnnnnnnnnnnnnnnnnnnnnnnnnnnnnnnnnnnnnnnnnnnnnnnnnnnnnnnnnnnnnnnnnnnnnnnnnnnnnnnnnnnnnnnnnnnnnnnnnnnnnnnnnnnnnnnnnnnnnnnnnnnnnnnnnnnnnnnnnnnnnnnnnnnnnnnnnnnnnnnnnnnnnnnnnnnnnnnnnnnnnnnnnnnnnnnnnnnnnnnnnnnnnnnnnnnnnnnnnnnnnnnnnnnnnnnnnnnnnnnnnnnnnnnnnnnnnnnnnnnnnnnnnnnnnnnnnnnnnnnnnnnnnnnnnnnnnnnnnnnnnnnnnnnnnnnnnnnnnnnnnnnnnnnnnnnnnnnnnnnnnnnnnnnnnnnnnnnnnnnnnnnnnnnnnnnnnnnnnnnnnnnnnnnnnnnnnnnnnnnnnnnnnnnnnnnnnnnnnnnnnnnnnnnnnnnnnnnnnnnnnnnnnnnnnnnnnnnnnnnnnnnnnnnnnnnnnnnnnnnnnnnnnnnnnnnnnnnnnnnnnnnnnnnnnnnnnnnnnnnnnnnnnnnnnnnnnntccagctgggtgatgcctttagggatgtgcgtgctttaattccaggactccctgtatctgctgccctgcaccccagggctcccagtgtcagcggagaaggcttcaaagtgctcagccaattacagatgatcacaagagccaagaaccaaaaggggggccagtgtcctgcagggcttcaggacaggaactcaggctgcagccccgaggggcggaggccccaagtcgccttggagagcgtttgaatcacacactaggcaccttgatttagccacgatgaagggaacatgtggggataaggagagcagagcag

SEQ ID NO: 24690 - DNA, 746 bp, Macaca Mulatta
cccgctgcccccagtgctccctgggtgggggtggatcctggccagtcccccagacacgcagtctgctaaccagaagcagcgaccttcggggagagccagccaccagccagccactgctccagaggcaggcctggggccacccgggaggctttcctcaggatggaaaatatttgcctttggttgtcggctgctgccttgtcttgtgtctgaatggacaactggctgacttctctctcttccgaacagccatgaaatgcgaaggtgtttaagagtaaaaaccaggcgagggcagctgggcctggcgtctggctgttttgaacaacactcctgttttcctcctagagtgaacagaatactttctgcggttcagaatactccgtgcgctggtccctcttcccaggccccgccccagcccccacaggcctcacctccagctgctccagaccattccagaactccctccctcttggcttctagtcactcagcatctgggggagagagcctcttccagctgtacatggctagcttggcctggccccagaactgctgtgttctggaaagttgtaggagaatccctcttggcgggctctccagcatggagaatcgcaggcctctgctccggaaagggaggctcttgagaggtcagattcaccacggccaggacaaccaactgtgggggctcacaggggctggggctctgctttcaggggtgagaggagccaccatctgcccccatgcccaccctg

SEQ ID NO: 24691 - DNA, 1640 bp, Macaca Mulatta
  misc_feature (1)...(1640): n = A,T,C or G
cattcatcataggcttagtctgacagattctgtagggggctatcatctttctcctcctctgctaaatgcctctttcttccagctgctcactgggtcagagggatgtcctttctcagatnnnnnnnnnnnnnnnnnnnnnnnnttcatagctgtgctccttccatacttccaaggagtccggcttctgcagaattcctctgtacctcacactgcaacacgtgtagatagcgcctttgaagaatacctatatttttactatagtatgagaagtcctggggctcaaattttaaacatttcctaactctcagcttacactggtttaaaatgtccaggtctctctgctgaattctcttgttgaattcnnnnnnnnnnnnnnnnnnnnnnnnnnnnnnnnnnnnnnnnnnnnnnnnnnnnnnnnnncccatctctgctggtcccagggaaagcaaggacgttttcttttgaggacttataggttgatcgcccacaggtcaaactgttggcattgaaccgctctcatttcttgctattggattgtttcctaaacgttggataggggaattcgaaattgttgctatttttatgagctgtgcccttgatcaaatctgtgctgtgggtctgagtcactttgccaacactgtcttcagtttcaccactctgatcagcatgcaggcgaggggcatgtttagtttacttccctaactgctgtcttctatagctttggacttcatatttcttatccacttttgtctaggctnnnnnnnnnnnnnnnnnnnnnnnnnnnnnnnnnnnnnnnnnnnnnnnnnnnnnnnnnnnnnnnnnnnnnnnnnnnnnnnnnnnnnnnnnnnnnnnnnnnnnnnnnnnnnnnnnnnnnnnnnnnnnnnnnnnnnnnnnnnnnnnnnnnnnnnnnnnnnnnnnnnnnnnnnnnnnnnnnnnnnnnnnnnnnnnnnnnnnnnnnnnnnnnnnnnnnnnnnnnnnnnnnnnnnnnnnnnnnnnnnnnnnnnnnnnnnnnnnnnnnnnnnnnnnnnnnnnnnnnnnnnnnnnnnnnnnnnnnnnnnnnnnnnnnnnnnnnnnnnnnnnnnnnnnnnnnnnnnnnnnnnnnnnnnnnnnnnnnnnnnnnnnnnnnnnnnnnnnnnnnnnnnnnnnnnnnnnnnnnnnnnnnnnnnnnnnnnnnnnnnnnnnnnnnnnnnnnnnnnnnnnnnnnnnnnnnnnnnnnnnnnnnnnnnnnnnnnnnnnnnnnnnnnnnnnnnnnnnnnnnnnnnnnnnnnnnnnnnnnnnnnnnnnnnnnnnnnnnnnnnnnnnnnnnnnnnnnnnnnnnnnnnnnnnnnnnnnnnnnnnnnnnnnnnnnnnnnnnnnnnnnnnnnnnnnnnnnnnnnnnnnnnnnnnnnnnnnnnnnnnnnnnnnnnnnnnnnnnnnnnnnnnnnnnnnnnnnnnnnnnnnnnnnnnnnnnnnnnnnnnnnnnnnnnnnnnnnnnnnnnnnnnnnnnnnnnnnnnnnnnnnnnnnnnnnnnnnnnnnnnnnnnnnnnnnnnnnnnnnnnnnnnnnnnnnnnntcaaaagggagatgataccaaccccagatgcagcatgtcctgaatgaatgatctgtaaaatacaataataaaagcttatagtttgagta

SEQ ID NO: 24692 - DNA, 519 bp, Macaca Mulatta
ggttgggtctgcaggctctgacccttttcctgcctctcggcacaggttccattggccccactggcgcccggctcaccttggtgctcgccctgacagtgattctggagctgacgtgaaggcacccacccaggccactccattgggcactgacatctccgcgaccggttttcatttcttttctaaactatttccagtcttgttcttagtctctctttccgtctgtgtcttggcttcttcagtcggtttaactaaaacaaacagaacaattttccccacctcggtttgtggctctgcattctttatctgctcagtagcagcaaccgggcccctcctcctggcattcagtacggggacaggcactgagaagggaagggcaagggagatggaagtcatgctcttcccagatgaacaggggacatggggctcactatctcactcaagtcctagcatccaggtgtggaatgtggccagagacttgagaaatccaaattcctccgggctaagtgtaatagtcagctg

SEQ ID NO: 24693 - DNA, 649 bp, Macaca Mulatta
aaaacccatgtgttcctactgccgatcagctgtcagcctttccagtgatcagaatactacttcttctggtatgaatagcaatgatgaattatttgagagtgcttccagtcaactccagatgactggattgactgatattgcagacattattgatgaccttataactaaagacggagtttccagtgaagagctgggcttaacagaacaagctaagcgcacctccagaattcagcattcttctggcagacattcacaaagaactgacaaggaaagaagagagattcaagcctggatgaaaagaaaacgaaaagaaagaatggcaaagtacttaaatgagctggcagaaaagagagggcaagaacatgatcctttctgtcccagaagcaatccactttacatgacttcaagggaaataaggctgagacaaaagatgaagcatgaaaaagacagattgctgctctctgaacactacagtcgtcgaatctcacaagcatacagtctgatgaatgaactattatctgagtcagtacagctaccagctgtaccacagaaaccattgcctaacaaacccagccctactcactcttccagatatcaacactgcccttcttccagaggagagaatcaacatggttacagttttctaata

SEQ ID NO: 24694 - DNA, 495 bp, Macaca Mulatta
  misc_feature (1)...(495): n = A,T,C or G
agaacatgccaattacttcggcgtggatgagaaactggggccagtggctgtgaacattaagcgggagaagctggaagaccacaaggagcatggacctcagtaccagtacaggatcatcttccggacccgcgannnnnnnnnnnnnnnnnnnnnnnnnnnnnnnnnnnnnnnnnnnnnnnnnnnnnnnnnnnnnnnnnnnnnnnnnnnnnnnnnnnnnnnnnnnnnnnnnnnnnnnnnnnnnnnnnnnnnnnnnnnnnnnnnnnnnnnnnnnnnnnnnnnnnnnnnnnnnnnnnnnnnnnnnnnnnnnnnnnnnnnnnnnnctctgccggaagcacaaggtgggcatcctctattgcaaggccggccagagctccgaggaggagatgtacaacaacgaggaggctggccccgccttcgaggagttcctctccctcatcggcgagaaggtctgcctgaagggcttcaccaagtatgctgcccagctggacgtcaaga

SEQ ID NO: 24695 - DNA, 83 bp, Macaca Mulatta
gtgctgttaacaaagatagacacttttcttgcgaagactgtaatggaaatgtcagtggaggttttgatgcttcaacatctcag

SEQ ID NO: 24696 - DNA, 815 bp, Macaca Mulatta
  misc_feature (1)...(815): n = A,T,C or G
gcgggggcccgtcaagaagtccaacgcaccgcttgtcaacgtgaccctctactatgaagcactgtgcggtggctgccgcgccttcctggtccgagagcttttcccaacgtggctgatggtcatggagatcctcaatgtcacgctggtgccctacggaaatgcacaggnaggaacaaaatgtcagcggcagatgggagttcaagtgccagcatggagaagaggagtgcaaactcaacaaggtggaggnaggcctgcctgttggatatgcttgacatggatcaggccttcctgaccattctctgcaaggaagagtttgacgacatggagaaaagtctgccactannnnnnnnnnnnnnnnnnnnnnnnnnnnnnnnnnnnnnnnnnnnnnnnnnnnnnnnnnnnnnnnnnnnnnnnnnnnnnnnnnnnnnnnnnnnnnnnnnnnnnnnnnnnnnnnnnnnnnnnnnnnnnnnnnnnnnnnnnnnnnnnnnnnnnnnnnnacccttggaagatcagaaccagctcctgaccctcgtctgccagttgtaccagnnnnnnnnnnggatatctgccctccctcaacccactccctcaggggtgtctgcttcaagtgatgtccggtgcgctgtggagagctgatgcaaggcaagtgggaacccggcttcctgcctttttttctgatccggatcctcggcacctgcttcttaccaactggaaaatttctatgcatcccatgaagaccagatacacaaaattccaccccataatcacgaatcttgctccactaagaacggtgctaaagtaaatctagtttaata

SEQ ID NO: 24697 - DNA, 1281 bp, Macaca Mulatta
  misc_feature (1)...(1281): n = A,T,C or G
aaagtgctcangtattacacattataacattcttgactgtcgagaaagacctgcacatgtaacatctttttaataataccagtacacagggaaagatactagggaagagatgaggggggagttctccatgactgaagaagaaaaatatatgtaatttatgggtagaaaggaggaattctgcgaaattttgcaagtgaaatgaaaaacggtataataaaaagtatccctcgtgccgaattcggcacgaggaaaaagcaaaaattgaagtcagtgaagatggaaccaaagcttcagcagcaacaactgcaattctaattgcaagatcatcgcctccctggtttatagtagacagaccttttctgtttttcatccgacataatcctacaggtgctgtgttattcatggggcagataaacaaaccctgaagagtacacaaaagaaaccatgcaaagcaacgactactttgctacaaagaaagactcctttcctgcatctttcatagttctgttaaatatttttgtacattgcttctttttcaaaactagttcttaggaacagactcgatgcaagcgtttctgtgctgggaggtattggagggaaaaaacaagcaggatggctggaacactgtactgaggaatgactagaaaggcttcgaaatgtctaaaagattctttaaactactgaactgttacctaggttaacaaccctcctgagtatttgctgtttgtccagttcaggaatttttgttttgttttgtctatatgtgcggcttctcagaagaaatttaatcagtgtgacagaaaaaaaataatgtttatggtagcttttactttttatgaaaaaaatattatttgccttttaaattcttttcccccatccccctccaaagtcttgatagcaagcattattttgggggtagaaacggtgaaatctctagcctctttgtgttttagttgttgttagttgttttatataatgcatgtattcactaaaataaagtttaaaaaacccatgtcttgctagacaaggttgctgttgtgcagtgtgcctgtcactactggtctgtactccttggatttgcatttttgtattttgtacaaagtaaaaataaactgttatgagtagtaaaaataaagctatttctctgctatttgaaaataccaaaaatacacacccatattcgcacttnnnnnnnnnntannnnnnnnnnnnnnnnnnnnnnnnnnnnnnnnnnnnnnnnnnnnnngcgttacccaactnnatgggaaaaaccctggcgtt

SEQ ID NO: 24698 - DNA, 411 bp, Macaca Mulatta
catagaaatgaaaggcattgttattatgtttcagattggaagggggtgaatctaattgcttcccatctcgctcttccaagctgtctattgcatatattcctctcaaatataattcttcaaaatttaagatgttgtgcttctaataatattggctttccttcctccctccaattcaagtgctattttaagtcatctttgggaaatttttctgaaatgaaggagaaagacaattagtttggagtctggcctgtataatttaaaatccattattaacaaataggttggagatagttgaagctaactgggataatatgatagtgcatatatggtctttccagtgggcctcctagtttcctatccatattaagtattcttattaagttcttttgctattattacagtggtgatttc

SEQ ID NO: 24699 - DNA, 3604 bp, Macaca Mulatta
  misc_feature (1)...(3604): n = A,T,C or G
cagatcatccgccagctggagaacaacatcgagaagacaatgatcaagatcatcaccagccagaacatccacctgctgtatttggacctgctggattatctgaagacagtnnnnnnnnnnnnnnnnnnnnnnnnnnnnnnnnnnnnnnnnnnnnnnnnnnnnnnnnnnnnnnnnnnnnnnnnnnnnnnnnnnnnnnnnnnnnnnnnnnnnnnnnnnnnnnnnnnnnnnnnnnnnnnnnnnnnnnnnnnnnnnnnnnnnnnnnnnnnnnnnnnnnnnnnnnnnnnnnnnnnnnnnnnnnnnnnnnnnnnnnnnnnnnnnnnnnnnnnnnnnnnnnnnnnnnnnnnnnnnnnnnnnnnnnnnnnnnnnnnnnnnnnnnnnnnnnnnnnnnnnnnnnnnnnnnnnnnnnnnnnnnnnnnnnnnnnnnnnnnnnnnnnnnnnnnnnnnnnnnnnnnnnnnnnnnnnnnnnnnnnnnnnnnnnnnnnnnnnnnnnnnnnnnnnnnnnnnnnnnnnnnnnnnnnnnnnnnnnnnnnnnnnnnnnnnnnnnnnnnnnnnnnnnnnnnnnnnnnnnnnnnnnnnnnnnnnnnnnnnnnnnnnnnnnnnnnnnnnnnnnnnnnnnnnnnnnnnnnnnnnnnnnnnnnnnnnnnnnnnnnnnnnnnnnnnnnnnnnnnnnnnnnnnnnnnnnnnnnnnnnnnnnnnnnnnnnnnnnnnnnnnnnnnnnnnnnnnnnnnnnnnnnnnnnnnnnnnnnnnnnnnnnnnnnnnnnnnnnnnnnnnnnnnnnnnnnnnnnnnnnnnnnnnnnnnnnnnnnnnnnnnnnnnnnnnnnnnnnnnnnnnnnnnnnnnnnnnnnnnnnnnnnnnnnnnnnnnnnnnnnnnnnnnnnnnnnnnnnnnnnnnnnnnnnnnnnnnnnnnnnnnnnnnnnnnnnnnnnnnnnnnnnnnnnnnnnnnnnnnnnnnnnnnnnnnnnnnnnnnnnnnnnnnnnnnnnnnnnnnnnnnnnnnnnnnnnnnnnnnnnnnnnnnnnnnnnnnnnnnnnnnnnnnnnnnnnnnnnnnnnnnnnnnnnnnnnnnnnnnnnnnnnnnnnnnnnnnnnnnnnnnnnnnnnnnnnnnnnnnnnnnnnnnnnnnnnnnnnnnnnnnnnnnnnnnnnnnnnnnnnnnnnnnnnnnnnnnnnnnnnnnnnnnnnnnnnnnnnnnnnnnnnnnnnnnnnnnnnnnnnnnnnnnnnnnnnnnnnnnnnnnnnnnnnnnnnnnnnnnnnnnnnnnnnnnnnnnnnnnnnnnnnnnnnnnnnnnnnnnnnnnnnnnnnnnnnnnnnnnnnnnnnnnnnnnnnnnnnnnnnnnnnnnnnnnnnnnnnnnnnnnnnnnnnnnnnnnnnnnnnnnnnnnnnnnnnnnnnnnnnnnnnnnnnnnnnnnnnnnnnnnnnnnnnnnnnnnnnnnnnnnnnnnnnnnnnnnnnnnnnnnnnnnnnnnnnnnnnnnnnnnnnnnnnnnnnnnnnnnnnnnnnnnnnnnnnnnnnnnnnnnnnnnnnnnnnnnnnnnnnnnnnnnnnnnnnnnnnnnnnnnnnnnnnnnnnnnnnnnnnnnnnnnnnnnnnnnnnnnnnnnnnnnnnnnnnnnnnnnnnnnnnnnnnnnnnnnnnnnnnnnnnnnnnnnnnnnnnnnnnnnnnnnnnnnnnnnnnnnnnnnnnnnnnnnnnnnnnnnnnnnnnnnnnnnnnnnnnnnnnnnnnnnnnnnnnnnnnnnnnnnnnnnnnnnnnnnnnnnnnnnnnnnnnnnnnnnnnnnnnnnnnnnnnnnnnnnnnnnnnnnnnnnnnnnnnnnnnnnnnnnnnnnnnnnnnnnnnnnnnnnnnnnnnnnnnnnnnnnnnnnnnnnnnnnnnnnnnnnnnnnnnnnnnnnnnnnnnnnnnnnnnnnnnnnnnnnnnnnnnnnnnnnnnnnnnnnnnnnnnnnnnnnnnnnnnnnnnnnnnnnnnnnnnnnnnnnnnnnnnnnnnnnnnnnnnnnnnnnnnnnnnnnnnnnnnnnnnnnnnnnnnnnnnnnnnnnnnnnnnnnnnnnnnnnnnnnnnnnnnnnnnnnnnnnnnnnnnnnnnnnnnnnnnnnnnnnnnnnnnnnnnnnnnnnnnnnnnnnnnnnnnnnnnnnnnnnnnnnnnnnnnnnnnnnnnnnnnnnnnnnnnnnnnnnnnnnnnnnnnnnnnnnnnnnnnnnnnnnnnnnnnnnnnnnnnnnnnnnnnnnnnnnnnnnnnnnnnnnnnnnnnnnnnnnnnnnnnnnnnnnnnnnnnnnnnnnnnnnnnnnnnnnnnnnnnnnnnnnnnnnnnnnnnnnnnnnnnnnnnnnnnnnnnnnnnnnnnnnnnnnnnnnnnnnnnnnnnnnnnnnnnnnnnnnnnnnnnnnnnnnnnnnnnnnnnnnnnnnnnnnnnnnnnnnnnnnnnnnnnnnnnnnnnnnnnnnnnnnnnnnnnnnnnnnnnnnnnnnnnnnnnnnnnnnnnnnnnnnnnnnnnnnnnnnnnnnnnnnnnnnnnnnnnnnnnnnnnnnnnnnnnnnnnnnnnnnnnnnnnnnnnnnnnnnnnnnnnnnnnnnnnnnnnnnnnnnnnnnnnnnnnnnnnnnnnnnnnnnnnnnnnnnnnnnnnnnnnnnnnnnnnnnnnnnnnnnnnnnnnnnnnnnnnnnnnnnnnnnnnnnnnnnnnnnnnnnnnnnnnnnnnnnnnnnnnnnnnnnnnnnnnnnnnnnnnnnnnnnnnnnnnnnnnnnnnnnnnnnnnnnnnnnnnnnnnnnnnnnnnnnnnnnnnnnnnnnnnnnnnnnnnnnnnnnnnnnnnnnnnnnnnnnnnnnnnnnnnnnnnnnnnnnnnnnnnnnnnnnnnnnnnnnnnnnnnnnnnnnnnnnnnnnnnnnnnnnnnnnnnnnnnnnnnnnnnnnnnnnnnnnnnnnnnnnnnnnnnnnnnnnnnnnnnnnnnnnnnnnnnnnnnnnnnnnnnnnnnnnnnnnnnnnnnnnnnnnnnnnnnnnnnnnnnnnnnnnnnnnnnnnnnnnnnnnnnnnnnnnnnnnnnnnnnnnnnnnnnnnnnnnnnnnnnnnnnnnnnnnnnnnnnnnnnnnnnnnnnnnnnnnnnnnnnnnnnnnnnnnnnnnnnnnnnnnnnnnnnnnnnnnnnnnnnnnnnnnnnnnnnnnnnnnnnnnnnnnnnnnnnnnnnnnnnnnnnnnnnnnnnnnnnnnnnnnnnnnnnnnnnnnnnnnnnnnnnnnnnnnnnnnnnnnnnnnnntgtccgaaccaggggccgtattggcctttcttatactctagagcatacgaagacaaaggacattttgatgaagttcaaattggagtcagagtgctcatcggaaagaaggcgcagctaacacgtttaggaacagaaatggattatgttgaagacaaattatccattgtgtttgtgttcagtaacccaagcatcaaaggaacttgtggctggggagaaggcttgactatttgcaatctcaggattcctctggccggagctcccggactcctgtggaagcctgggggctcgctgaagaagtcacgtgactggaacctgcttagtgctctgctgtctggtaaggaaaataaagcggtacattttgaataaaaataaaagctcattt

SEQ ID NO: 24700 - DNA, 1320 bp, Macaca Mulatta
  misc_feature (1)...(1320): n = A,T,C or G
cctagggcgatgttgacagacagacaaagaggcggatgcaacctacctcttgggcagggagctgcggtctgaggcccctgcccagctggaaaccacnnnnnnnnnnnnnnnnnnnnnnnnnnnnnnnnnnnnnnnnnnnnnnnnnnnnnnnnnnnnnnnnnnnnnnnnnnnnnnnnnnnnnnnnnnnnnnnnnnnnnnnnnnnnnnnnnnnnnnnnnnnnnnnnnnnnnnnnnnnnnnnnnnnnnnnnnnnnnnnnnnactttgctgtcattcgccgagcgtccctggagaagaacccgtaccaggctgtgcaccaatggnnnnnnnnnnnnnnnnnnnnnnnnnnnnnnnnnnnnnnnnnnnnnnnnnnnnnnnnnnnnnnnnnnnnnnnnnnnnnnnnnnnnnnnnnnnnnnnnnnnnnnnnnnnnnnnnnnnnnnnnnnnnnnnnnnnnnnnnnnnnnnnnnnnnnnnnnnnnnnnnnnnnnnnnnnnnnnnnnnnnnnnnnnnnnnnnnnnnnnnnnnnnnnnnnnnnnnnnnnnnnnnnnnnnnnnnnnnnnnnnnnnnnnnnnnnnnnnnnnnnnnnnnnnnnnnnnngtttctgtgctgtgggaagaggtctcctttcagccgtctggggagcacagaggctgacctatgtcagggacaggaggcggcaagagagnnnnnnnnnnnnnnnnnnnnnnnnnnnnnnnnnnnnnnnnnnnnnnnnnnnnnnnnnnnnnnnnnnnnnnnnnnnnnnnnnnnnnnnnnnnnnnnnnnnnnnnnnnnnnnnnnnnnnnnnnnnnnnnnnnnnnnnnnnnnnnnnnnnnnnnnnnnnnnnnnnnnnnnnnnnnnnnnnnnnnnnnnnnnnnnnnnnnnnnnnnnnnnnnnnnnnnnnnnnnnnnnnnnnnnnnnnnnnnngtctccgctccgaagcagatgctattgatccaagaagatactcgggtagtcttcggtggctgcacgttatgatgctgcgcctgggcccctctcccaccacctgcctgcccacagagnagctctccagggcagaagtccaggtgtgctcagcgggtgccctgcgaggggtctctcgggctgacgtcaggccttggtgggctgcactctcatctggaggctccagggaagcgtgtgcctccaggaccattcaggctgttgacaagtcagctcctcatggctgtaggactcaggttcccacgtccttgtccctgctcccgcagcccctccaccttcaaaccagcaatggtgcattcagcaaattgtagtcaaatatacatcacataaaatttaccatcttaa

SEQ ID NO: 24701 - DNA, 1595 bp, Macaca Mulatta
  misc_feature (1)...(1595): n = A,T,C or G
gtcctccatttggaaatagtgctaagaaaattaaaagaataaaactgggcaggggcatgagaatagggtgcaaaggtgaaattttggactgtggccaagaagctccatggtgagcagtcacagtctgtgtctggaagtttaatgaactgttctctacatttcacaggnnnnnnnnnnnnnnnnnnnnnnnnnnnnnnnnnnnnnnnnnnnnnnnnnnnnnnnnnnnnnnnnnnnnnnnnnnnnnnnnnnnnnnnnnnnnnnnnnnnnnnnnnnnnnnnnnnnnnnnnnnnnnnnnnnnnnnnnnnnnnnnnnnnnnnnnnnnnnnnnnnnnnnnnnnnnnnnnnnnnnnnnnnnnnnnnnnnnnnnnnnnnnnnnnnnnnnnnnnnnnnnnnnnnnnnnnnnnnnnnnnnnnnnnnnnnnnnnnnnnnnnnnnnnnnnnnnnnnnnnnnnnnnnnnnnnnnnnnnnnnnnnnnnnnnnnnnnnnnnnnnnnnnnnnnnnnnnnnnnnnnnnnnnnnnnnnnnnnnnnnnnnnnnnnnnnnnnnnnnnnnnnnnnnnnnnnnnnnnnnnnnnnnnnnnnnnnnnnnnnnnnnnnnnnnnnnnnnnnnnnnnnnnnnnnnnnnnnnnnnnnnnnnnnnnnnnnnnnnnnnnnnnnnnnnnnnnnnnnnnnnnnnnnnnnnnnnnnnnnnnnnnnnnnnnnnnnnnnnnnnnnnnnnnnnnnnnnnnnnnnnnnnnnnnnnnnnnnnnnnnnnnnnnnnnnnnnnnnnnnnnnnnnnnnnnnnnnnnnnnnnnnnnnnnnnnnnnnnnnnnnnnnnnnnnnnnnnnnnnnnnnnnnnnnnnnnnnnnnnnnnnnnnnnnnnnnnnnnnnnnnnnnnnnnnnnnnnnnnnnnnnnnnnnnnnnnnnnnnnnnnnnnnnnnnnnnnnnnnnnnnnnnnnnnnnnnnnnnnnnnnnnnnnnnnnnnnnnnnnnnnnnnnnnnttgtgtgcagcgagtgtggacgaggctttaacaggttgtcaacgctaatcatacacgagcggacacactccggcgagaaaccttacatgtgtagtgagtgtgggcgaggcttcagccagaagtcaaaccttatcatacaccagaggacacactccggggaaaagccttacgtgtgccgggagtgcggcaaaggtttcagccagaagtcggctgtcgtgagacaccagaggacacacctgttatgagaagaccatcgtgtgcagtgactgcggtctgggcttcagcgacaggtcaaacctcatctcccaccagaggacgcactctggggagaagccctacacctgcaaggagtgtgggcgatgcttcaggcagaggaccacccttgtcaatcaccagaggacacactcaaaggagaagccctacgtgtgcggggtgtgtgggcacagcttcagccagaattcaaccctcatctctcacaggcggacgcacaccggggagaagccgtatgtgtgtggggtgtgcgggcgaggctttagtctcaagtcacacctcaacagacaccagaacatacactcaggggagaagcccattgtgtgcaaggactgtggccggggcttca

SEQ ID NO: 24702 - DNA, 843 bp, Macaca Mulatta
  misc_feature (1)...(843): n = A,T,C or G
gaactaaacggggtgaagtcacattcnnnnnnnnnnnnnnnnnnnnnnnnnnnnnnnnnnnnnnnnnnnnnnnnnnnnnnnnnnnnnnnnnnnnnnnnnnnnnnnnnnnnnnnnnnnnnnnnnnnnnnnnnnnagattcattttattttcatcaccatggggcgtaccctgttgttgagttctctgggtcagacctctacagacttctcagatggatcctaggtctctgggcttgccgtgaaattactcgctgctcagggagagagttgaaatggtggcatcctccccctctgttgctccggctgtgtcccctaactctgttgctccggctgtgtccctcactctgttgctctggctgcagctcattctgttggagctcctcattcagctggtcactgtggtcagagggtgttggcctgctcccttcctcaggtcttcttaaagccacgtatttttgtggagcatttttcttcctggctctcctcaagttgttttcctttcttcgctgtcttgggagtcttcttcgtgcttccggacgtcggttgagagaaggacttcttcttccttgtcttgttggtgttggctggtggttgctcttcaacaactgtaccggaggctctcagttttctcttcatcttcaacaagtcaatctatctcaaggatctcacgttgcagcattcttaccagaggccactgggcctggagttccagttccagtgtctggagagtccacctcagctcagcaatctcatgccggttggcagtggtcagcagaagccgaggcctgcccatcagttctttactctgagatgttagagtggaataaaaatataaatacttata

SEQ ID NO: 24703 - DNA, 888 bp, Macaca Mulatta
  misc_feature (1)...(888): n = A,T,C or G
tggaccttcaaaaccctcagggcagagagcagccctgcactccctacactgcatccacactcagcccctgcaggcaaggagagcacgggccaggttcccgagagctcagnnnnnnnnnnnnnnnnnnnnnnnnnnnnnnnnnnnnnnnnnnnnnnnnnnnnnnnnnnnnnnnnnnnnnnnnnnnnnnnnnnnnnnnnnnnnnnnnnnnnnnnnnnnnnnnnnnnnnnnnnnnnnnnnnnnnnnnnnnnnnnnnnnnnnnnnnnnnnnnnnnnnnnnnnnnnnnnnnnnnnnnnnnnnnnnnnnnnnnnnnnnnnnnnnnnnnnnnnnnnnnnnnnnnnnnnnnnnnnnnnnnnnnnnnnnnnnnnnnnnnnnnnnnnnnnnnnnnnnnnnnnnnnnnnnnnnnnnnnnnnnnnnnnnnnnnnnnnnnnnnnnnnnnnnnnnnnnnnnnnnnnnnnnnnnnnnnnnnnnnnnnnnnnnnnnnnnnnnnnnnnnnnnnnnnnnnnnnnnnnnnnnnnnnnnnnnnnnnnnnnnnnnnnnnnnnnnnnnnnnnnnnnnnnnnnnnnnnnnnnnnnnnnnnnnnnnnnnnnnnnnnnnnnnnnnnnnnnnnnnnnnnnnnnnnnnnnnnnnnnnnnnnnnnnnnnnnnnnnnnnnnnnnnnnnnnnnnnnnnnnnnnnnnnnnnnnnnnnnnnnnnnnnnnnnnnnnnnagaaccccaaaagggagattcagaagatcctggagtttgtggggcgctctctgccagaggagactgtggacctcatggttcaacacacgtcattcaaggagatgaagaagaaccctaagaacaactacaccgccgtcccccaggagttcatggaccacagcatctcccccttcatgaggaaag

SEQ ID NO: 24704 - DNA, 1231 bp, Macaca Mulatta
  misc_feature (1)...(1231): n = A,T,C or G
aagaggaaatacagcaacaagcatgactcatcgagatttttacagcagacaagtcacacaaaatccccaaattagaaccagaggaacaaaatnnnnnnnnnnnnnnnnnnnnnnnnnnnnnnnnnnnnnnnnnnnnnnnnnnnnnnnnnnnnnnnnnnnnnnnttcagccaatactatcttctgttccaacaacagaagtgtccactggtgttaagtttcaggttggcgatcttgtgtggtccaaggtgggaacctatccttggtggccttgtatggtttcaagtgatccccagcttgaggttcataccaaaattaacacaagaggtnnnnnnnnnnnnnnnnnnnnnnnnnnnnnnnnnnnnnnnnnnnnnnnnnnnnnnnnnnnnnnnnnnnnnnnnnnnnnnnnnnnnnnnnnnnnnnnnnnnnnnnnnnnnnnnnnnnnnnnnnnnnnnnnnnnnnnnnnnnnnnnnnnnnnaaagattcggaaaccccgacctcagagagaacgtgctcagtgggatattggtattgcccatgcagagaaagcattgaaaatgactcgagaagaaaggatagaacagtatacttttatctatattgataaacagcctgaagaggctttatcccaagcaaaaaagaatgttgcctccaaaaccgaagttaaaaaaactcgacgaccaagatctgtgctgaatactcagccagaacagaccagtgcaggggaggtggcctcctcactctcaagtactgaaattcggagacacagccagaggcggcacacgagagcggaagaggaagagccacnnnnnnnnnnnnnnnnnnnnnnnnnnnnnnnnnnnnnnnnnnnnnnnnnnnnnnnnnnnnnnnnnnnnnnnnnnnnnnnnnnnnnnnnnnnnnnnnnnnnnnnnnnnnnnnnnnnnnnnnnnnnnnnnnnnnnnnnnnnnnnnnnnnnnnnnnnnnnnnnnnnnnnnnnnnnnnnnnnnnnnnnnnaaagggaattggtaacaaaacagaaataagtgtcagggggcaagacaggcttataatttctacaccaaaccagagaagtgaaaagccaacgcagagtatatcatctcctgaagcaacatctggttctacaggnnggctcagtagaaaagaagcaacagagaagatcaattagaactcgttctgaatcagagaaatccactgaggttgtgccaaagaagaagatcaaaaaggagcaggttg

SEQ ID NO: 24705 - DNA, 107 bp, Macaca Mulatta
gtcccgggcctctgctgtccccgacccactgatattctgtgccaggcttcttcctattcaccaagtgcgcacctcacatctgccactgggcatgcaccagttccaca

SEQ ID NO: 24706 - DNA, 932 bp, Macaca Mulatta
  misc_feature (1)...(932): n = A,T,C or G
ggtcatcgaggagcactttgggcccaatgcagtagcagtccctttcctgtcagatgcagtctgctatgacctactgggtgtgctggtaaaacagtcccgcccagcccatacccgcctggctttgccaggtcggcagggtcggagggcactgaaaccagtggggccactaccaagcctcctggagcaggcaggatctgagggtgccttcgcccactgcactcgggaatactcaccaaatggccaagcagagatagcctatgaagagatgcgaatgttggatgggcagccatgcaagatccgcctacatatgggtggcctgcgcaagaaggttgccttcctgttgctgccaccagggcaggtgagcctacagcagactctttccctggctccgaagcacccacagcatctatgtcatctaccaggccttctcttgttcctgcctgccgctggggctgatnnnnnnnnnnnnnnnnnnnnnnnnnnnnnnnnnnnnnnnnnnnnnnnnnnnnnnnnnnnnnnnnnnnnnnnnnnnnnnnnnnnnnnnnnnnnnnnnnnnnnnnnnnnnnnnnnnnnnnnnnnnnnnnnnnnnnnnnnnnnnnnnnnnnnnnnnnnnnnnnnnnnnnnnnnnnnnnnnnnnnnnnnnnnnnnnnnnnnnnnnnnnnnnnnnnnnnnnnnnnnnnnnnnnnnnnnnnnnnnnnnnnnnnnnnnnnnnnnnnnnnnnnnnnnnnnnnnnnnnnnnnnnnnnnnnnnnnnnnnnnnnnnnnnnnnnnnnnnnnnnnnnnnnnnnnnnnnnnnnnnnagagaactggctcttcagcccccgcagccctccaccaggagcccagggtgggggccccagggaccccgacgggcactccatgtccctgcccctgctgcagggtctatcctcagagttcgacagcgacgactga

SEQ ID NO: 24707 - DNA, 2027 bp, Macaca Mulatta
  misc_feature (1)...(2027): n = A,T,C or G
ngagaagtcgaacccactgacccaggacctagacaaagcagatgctgaggaaattgttcgactgctgggacaatgtgatgctgagatcttccaggaggaggggcaagccctgcccacataccannnnnnnnnnnnnnnnnnnnnnnnnnnnnnnnnnnnnnnnnnnnnnnnnnnnnnnnnnnnnnnnnnnaggagccagatggggggctggttgtgctgagtggagggggtacctctggccggatggcattcctcatgtcggtnnnnnnnnnnnnnnnnnnnnnnnnnnnnnnnnnnnnnnnnnnnnnnnnnnnnnnnnnnnnnnnnnnnnnaggtctgtggtggcctctagggaggggacagaagatagtgccttacacgggattgaggaactgaagaaggnnnnnnnnnnnnnnnnnnnnnnnnnnnnnnnnnnnnnnnnnnnnnnnnnnnnnnnnnnnnnnnnnnnnnnnnnnnnnnnnnnnnnnnnnnnnnnnnnnnnnnnnnnnnnnnnnnnnnnnnnnnnnnnnnnnnnnnnnnnnnnnnnnnnnnnnnnnnnnnnnnnnnnnnnnnnnnnnnnnnnnnnnnnnnnnnnnnnnnnnnnnnnnnnnnnnnnnnnnnnnnnnnnnnnnnnnnnnnnnnnnnnnnnnnnnncccgagggtctcaacggctcctcccggatgagaggtggaagtgccaccaagatcctgctggaaaccctgttannnnnnnnnnnnnnnnnnnnnnnnnnnnnnnnnnnnnnnnnnnnnnnnnnnnnnnnnnnnnnnnnnnnnnnnnnnnnnnnnnnnnnnnnnnnnnnnnnnnnnnnnnnnnnnnnnnnnnnnnnnnnnnnnnnnnnnnnnnnnnnnnnnnnnnnnnnnnnnnnnnnnnnnnnnnnnnnnnnnnnnnnnnnnnnnnnnnnnnnnnnnnnnnnnnnnnnnnnnnnnnnnnnnnnnnnnnnnnnnnnnnnnnnnnnnnnnnnnnnnnnnnnnnnnnnnnnnnnnnnnnnnnnnnnnnnnnnnnnnnnnnnnnnnnnnnnnnnnnnnnnnnnnnnnnnnnnnnnnnnnnnnnnnnnnnnnnnnnnnnnnnnnnnnnnnnnnnnnnnnnnnnnnnnnnnnnnnnnnnnnnnnnnnnnnnnnnnnnnnnnnnnnnnnnnnnnnnnnnnnnnnnnnnnnnnnnnnnnnnnnnnnnnnnnnnnnnnnnnnnnnnnnnnnnnnnnnnnnnnnnnnnnnnnnnnnnnnnnnnnnnnnnnnnnnnnnnnnnnnnnnnnnnnnnnnnnnnnnnnnnnnnnnnnnnnnnnnnnnnnnnnnnnnnnnnnnnnnnnnnnnnnnnnnnnnnnnnnnnnnnnnnnnnnnnnnnnnnnnnnnnnnnnnnnnnnnnnnnnnnnnnnnnnnnnnnnnnnnnnnnnnnnnnnnnnnnnnnnnnnnnnnnnnnnnnnnnnnnnnnnnnnnnnnnnnnnnnnnnnnnnnnnnnnnnnnnnnnnnnnnnnnnnnnnnnnnnnnnnnnnnnnnnnnnnnnnnnnnnnnnnnnnnnnnnnnnnnnnnnnnnnnnnnnnnnnnnnnnnnnnnnnnnnnnnnnnnnnnnnnnnnnnnnnnnnnnnnnnnnnacaggtgatccccatcgccttgctgagcctcctattccggtgctcgattactgaggctcaggcacacctggctgcaactccttctgtctgtgaggctgtcaggagtgctcttgctgggccaggtcagaagcgcaccgcggaccccctggagatcctagagcctgacggtcagtgaacccgtgtttctgggtgggtgaaaggggcccaaccctgcccacttcagcccagccggcccaaggggacttgtgctagtagcatatgtgggaggaagaagtcccgtttccaggggcaccagcagcccaggatagggagaaagattctctccattttgggggagagttcttgctcttgacctagtggtttctactctcagcgacttattccgatttgagaaataaaatgaaatgtcttattttggaa

SEQ ID NO: 24708 - DNA, 2364 bp, Macaca Mulatta
  misc_feature (1)...(2364): n = A,T,C or G
ggctctgcaggcactgcagcggcagcccaatgcagctcagtatttccaccagttcatgctccagcagcaactcagtaatgcccagctgcatagcctggctgctgtccagcaggnnnnnnnnnnnnnnnnnnnnnnnnnnnnnnnnnnnnnnnnnnnnnnnnnnnnnnnnnnnnnnnnnnnnnnnnnnnnnnnnnnaatctggccaccacatcggccgcccagctcatcagccgatcccagagtgtgagctctcccagtgctaccaccttgacccaatctgtgctactggggaacaccacctccccacccctcaaccagtcgcaggcccagatgtatctacggnnnnnnnnnnnnnnnnnnnnnnnnnnnnnnnnnnnnnnnnnnnnnnnnnnnnnnnnnnnnnnnnnnnnnnnnnnnnnnnnnnnnnnnnnnnnnnnnnnnnnnnnnnnnnnnnnnnnnnnnnnnnnnnnnnnnnnnnnnnnnnnnnnnnnnnntcaggtgcagaacttggcagtaaggaatcaacaggcctcagctcaaggacctccaatgcaaggctccactcagaaggccattcctccgggagcctcccctgtctctagcctctcccaggcctctagccaggccctagcggtggcacaggcttcctctggggccacaagccagtccctcaaccttagtcaagctggtggaggcagtgggaatagcatcccggggtccatgggtccaggtggaggtggccaggcacatggtggtttgggccagttgccttcctcaggagtgggtggtgggagctgtcccaggaagggcacaggagtggtgcagcccttgcctgcagcccaaacagtgactgtgagccagggcagccagacagaggcagaaagtgcagcagccaagaaggcagaagcagatgggagcggtcagcagaatgtgggtatgaacctgacacggacagccacacctgcgcccagccagacacnnnnnnnnnnnnnnnnnnnnnnnnnnnnnnnnnnnnnnnnnnnnnnnnnnnnnnnnnnnnnnnnnnnnnnnnnnnnnnnnnnnnnnnnnnnnnnnnnnnnnnnnnnnnnnnnnnnnnnnnnnnnnnnnnnnnnnnnnnnnnnnnnnnnnnnnnnnnnnnnnnnnnnnnnnnnnnnnnnnnnnnnnnnnnnnnnnnnnnnnnnnnnnnnnnnnnnnnnnnnnnnngcaagccaccactctcactgcccctcagccaccacaggtcccacctactcagcaggtcccaccttcgcagtcccagcagcaagcccaaaccctggtcgttcagcccatgcttcagtcttcacccttgtctcttccacctgatgcagcccctaagccaccaattcccatccaatccaaaccacctgtagcacctatcaagccacctcagttagggactgctaagatgtcagctacccagcaaccaccaccccatatcccagtgcaagttgtaggcactcgacagccaggtacagcccaggcacaggctttggggttggcacagctggcagctgctgtacctacttctcgggggatgccaagtccagtgcagtctggtcaggcccatttggcctcctcgccaccttcatcccaggctcctggtgcactgcnnnnnnnnnnnnnnnnnnnnnnnnnnnnnnnnnnnnnnnnnnnnnnnnnnnnnnnnnnnnnnnnnnnnnnnnnnnnnnnnnnnnnnnnnnnnnnnnnnnnnnnnnnnnnnnnnnnnnnnnnnnnnnnnnnnnnnnnnnnnnnnnnnnnnnnnnnnnnnnnnnnnnnnnnnnnnnnnnnnnnnnnnnnnnnnnnnnnnnnnnnnnnnnnnnnnnnnnnnnnnnnnnnnnnnnnnnnnnnnnnnnnnnnnnnnnnnnnnnnnnnnnnnnnnnnnnnnnnnnnnnnnnnnnnnnnnnnnnnnnnnnnnnnnnnnnnnnnnnnnnnnnnnnnnnnnnnnnnnnnnnnnnnnnnnnnnnnnnnnnnnnnnnnnnnnnnnnnnnnnnnnnnnnnnnnnnnnnnnnnnnnnnnnnnnnnnnnnnnnnnnnnnnnnnnnnnnnnnnnnnnnnnnnnnnnnnnnnnnnnnnnnnnnnnnnnnnnnnnnnnnnnnnnnnnnnnnnnnnnnnnnnnnnnnnnnnnnnnnnnnnnnnnnnnnnnnnnnnnnnnnnnnnnnnnnnnnnnnnnnnnnnnnnnnnnnnnnnnnnnnnnnnnnnnnnnnnnnnnnnnnnnnnnnnnnnnnnnnnnngagttagataagaaggcgaatctcctgaagtgcgagtactgtgggaagtacgcccccgcagagcagtttcgtggctctaagaggttctgctccaagacttgcgctaagaggta

SEQ ID NO: 24709 - DNA, 924 bp, Macaca Mulatta
ctcctggctaggcggcctcccaactccgttgcgcaacagcgctcctggctgagcggcctctgtgcgggccccgcctgctggaccacttcatctgtgagctgccggcgttgctcaagctggcctgcggaggcgacggagacaccaccgagaaccagatgttcgccgcccgtgtggtcatcctgctgctgccgtctggcgtcatcctggcctcctatggtgccgtggcccgagctgtctgttgcatgcggtccagcggaggccggagaagggcggtgggcacgtgtgggtcccacctgacagcggtctgcctgttctacggctcggccatctacacctacttgcagccggcgcagcgctacaaccaggcacggggcaagttcgtatcgctcttctacaccgtggtcacacccgctctcaacccgctcatctacaccctcaggaataaggaagtgaagggggcggcgaggaggctgctgtggagtctggggagaggccaggctgtacagtgagtaggttggggaggggagaaagtattaagccagaacccaaggatggaaatacccattagtgagtcagcttagacttcagactcttcatttttgtatgataatctgcaagatttgtcctaaggagtccaatgggggaaatgttttcctcccgtgtggaaatgtttagttcttgagggaaaattcctaaatcctctatatacacaggtttaaggaaggaaaacctacccctcacgactccacgtgcaggtaagatgatggacgtgatgactgcctttagcttcctccctatctgatggaagaccgtggaagacctcttgatctctgccatcagaagtctcaagttgacaagaaaatcatagtccctactctgcaggagagggtcatccagaaaaagatgccatggactctcttctcc

SEQ ID NO: 24710 - DNA, 441 bp, Macaca Mulatta
  misc_feature (1)...(441): n = A,T,C or G
gggcttttcgatccgccatctgcggtggagccgccacaaaaatgcagattttcgtgaaaacccttacggggnnnnnnnnnnnnnnnnnnnnnnnnnnnnnnnnnnnnnnnnnnnnnnnnnnnnnnnnnnnnnnnnnnnnnnnnnnnnnnnnnnnnnnnnnnnnnnnnnnnnnnnnnnnnnnnnnnnnnnnnnnnnnnnnnnnnnnnnnnnnnnnnnnnnnnnnnnnnnnnnnnnnnnnnnnnnnnnnnnnnnnnnnnnnnnnnnnnnnnnnnnnnnnnnnncttcgtggcggtgctaagaaaaggaagaagaagtcttacaccactcccaagaagaataagcacaagagaaagaaggttaagctggctgtcctgaaatattataaggtggatgagaatggcaaaattagtcgccttcgtcgagagtgcccatctgatgaat

SEQ ID NO: 24711 - DNA, 562 bp, Macaca Mulatta
  misc_feature (1)...(562): n = A,T,C or G
gtagttctcctgggtcggctctgcgggcttctgggagatgtagtttctggtctgtaggcaggacggaaagagcgggggaggccccttacgcaaactacaattcccggcggggagcgcggtgaaggggggtgggatctgaacatggcggcggtggtagctgctacggcgctgaagggccggggggcgagaaatgcccgcgttctccggggnttctcgcaggagccacagctaacaaggcttcccataacaggacccgggcactgcaaagccatagctctccagagggcaaggaggaacctgaacccctatccccggagctggaatacattcccagaaagaggggcaagaannnnnnnnnnnnnnnnnnnnnnnnnngggccatcggcttcccttgtggtatcctcctcttcatcctcaccaagcgggaagtggacaaggaccgtgtgaagcagatgaaggctcggcagaacatgcggttgtccaacacgggcgagtatgagagccagaggttcagggcctcctcccagcgtgccccatcccctgatgttggatctggggcgca

SEQ ID NO: 24712 - DNA, 1762 bp, Macaca Mulatta
  misc_feature (1)...(1762): n = A,T,C or G
nctggtctcgaactcctgggctcaagcagtccgcctgcctaggcctcccaaagtnnnnnnnnnnnnnnnnnnnnnnnnnnnnnnnnnnnnnnnnnnnnnnnnnnnnnnnnnnnnnnnnnnnnnnnnnnnnnnnnnnnnnnnnnnnnnnnnnnnnnnnnnnnnnnnnnnnnnnnnnnnnnnnnnnnnnnnnnnnnnnnnnnnnnnnnnnnnnnnnnnnnnnnnnnnngctaatccaaaagtaaatgagaaacttagaaaaagattgccaactccaaatcaacatatttagagaaaattggaaaaggagaagcttactacagctttatttgaggactttttaaagaacgcagggttttatctgnnnnnnnnnnnnnnnnnnnnnnnnnnnnnnnnnnnnnnnnnnnnnnnnnnnnnnnnnnnnnnnnnnnnnnnnnnnnnnnnnnnnnnnnnnnnnnnnnnnnnnnnnnnnnnnnnnnnnnnnnnnnnnnnnnnnnnnnnnnnnnnnnnnnnnnnnnnnnnnnnnnnnnnnnnnnnnnnnnnnnnnnnnnnnnnnnnnnnnnnnnnnnnnnnnnnnnnnnnnnnnnnnnnnnnnnnnnnnnnnnnnnnnnnnnnnnnnnnnnnnnnnnnnnnnnnnnnnnnnnnnnnnnnnnnnnnnnnnnnnnnnnnnnnnnnnnnnnnnnnnnnnnnnnnnnnnnnnnnnnnnnnnnnnnnnnnnnnnnnnnnnnnnnnnnnnnnnnnnnnnnnnnnnnnnnnnnnnnnnnnnnnnnnnnnnnnnnnnnnnnnnnnnnnnnnnnnnnnnnnnnnnnnnnnnnnnnnnnnnnnnnnnnnnnnnnnnnnnnnnnnnnnnnnnnnnnnnnnnnnnnnnnnnnnnnnnnnnnnnnnnnnnnnnnnnnnnnnnnnnnnnnnnnnnnnnnnnnnnnnnnnnnnnnnnnnnnnnnnnnnnnnnnnnnnnnnnnnnnnnnnnnnnnnnnnnnnnnnnnnnnnnnnnnnnnnnnnnnnnnnnnnnnnnnnnnnnnnnnnnnnnnnnnnnnnnnnnnnnnnnnnnnnnnnnnnnnnnnnnnnnnnnnnnnnnnnnnnnnnnnnnnnnnnnnnnnnnnnnnnnnnnnnnnnnnnnnnnnnnnnnnnnnnnnnnnnnnnnnnnnnnnnnnnnnnnnnnnnnnnnnnnnnnnnnnnnnnnnnnnnnnnnnnnnnnnnnnnnnnnnnnnnnnnnnnnnnnaagaaatgagtgcaataatagaagaacgggatgctgccttgtctaannnnnnnnnnnnnnnnnnnnnnnnnnnnnnnnnnnnnnnnnnnnnnnnnnnnnnnnnnnnnnnnnnnnnnnnnnnnnnnnnnnnnnnnnnnnnnnnnnnnnnnnnnnnnnnnnnnnnnnnnnnnnnnnnnnnnnnnnnnnnnnnnnnnnnnnnnnnnnnnnnnnnnnnnnnnnnnnnnnnnnnnnnnnnnnnnnnnnnnncagtttacacaaatctttatctcaagaagaaaatctgaaggatcagtttaactatgccctgagtacatatgaagaagctttaaaaaacagagagaacattgtttccatcactcaacaacaaaatgaggaactggctactcaactgcaacaagctctgacagagcgagcaaatatggaattacaacttcaacatgccatagaggcctcccaagtaaccaatgaaaaagttcaaaagttggaaaggctggtggatgtactgagaaagaaggttggaaccgggaccatgaggacagtgatctg

SEQ ID NO: 24713 - DNA, 418 bp, Macaca Mulatta
atgcagtattatatattcattttgcagaatctgcacctacagctcaatacggttggtgctgattattatagtacatataccatgtaaactctcaaactctatttagctgtgaaatagtggtgtgcaattccttgttaaagaaatgcaactttattaagaagatgctggctgctttgtgttagaataggacaccccgcagcttctctgtagtggctctgtcacagtcaaaaaaagaaaaggtttttgtgcgtttcttcaaaattctgctttcttcaacatcaaaaattgtgtaggaatattttcagtgaaagggaataactagtacttttctgcatagtttttctgctgcttactttttatttaagtataggtactgctaatgaatctgttttcttagtgagtaaatatgcataatttt

SEQ ID NO: 24714 - DNA, 790 bp, Macaca Mulatta
gggggctaccggcgccccgtcctcctcctccaccctctgggtggctggacaaaggatgatgacgttcctttgatgtggcgtatgaagcagcatgctgcagtgttggaagaaggagttctgaatcctgagacgacagtggtggccatcttcccatctcccatgatgtatgccggaccaacagaggtccagtggcattgcagagcacggatggttgcaggagccaacttttacattgttggacgagaccctgctggcatgcctcatccagaaacagggaaagatctttatgagccaagtcatggtgccaaagtgctgacgatggcccctggtttaatcactttggaaatagttccctttcgagtggcggcttacaacaagaaaaagaagcgtatggactactatgactctgaacaccatgaagactttgaatttatttcaggaacacgaatgcgcaaacttgctcgagaaagccagaaaccacctgaaagtttcatggctcccaaggcttggactgggctgatggaatactacaaatcccttggagaaagcttaagctgttaacccagtcactccacctttcccacgttactaagtaacaagaaggggaccaccagtctctgttggcattttccttgtggggggccgtccgggacatgccttcctaaaaaacaaacctttttcccttaacttggcatttattttttcgtcctgcccttgggaagtttccgttttttaacacaagtgttaacaccactgaatgggtttttaaatggaatctttttcccccttt

SEQ ID NO: 24715 - DNA, 168 bp, Macaca Mulatta
cctggggtctgctgtcttggttcccactgcagactctctcggcatgagagaagctctgggagtctgggcacagccgtgggaagcagtgcaggaaatgtatcctcaggagggctgtctctacctccatcctatggaggcagggatgaggctcctggaagggacctgccg

SEQ ID NO: 24716 - DNA, 134 bp, Macaca Mulatta
ggatgtgtggcgaggtgacgcgcaggacctcctctcccagatcgcccagctgcaggaggagaacaagcagctcatgaccaacctctcccacaaggatgtcagcttctcagaggaggagttccagaagcatgaag

SEQ ID NO: 24717 - DNA, 717 bp, Macaca Mulatta
  misc_feature (1)...(717): n = A,T,C or G
cgggcagcctatgaggagccgccagagcagctgagagaactttccagagagggggaggaggaggacgacgacaggcaagaagagcagaggagcacggggcgtgaatccccagacgacctcggccagtgacgagccggcagcagagggcggtggaggaagggttaggggttcattctcccacttctgggcctcccttctcctctctaagccctgttctactgtccctccatcccagacattgatggggacatttcttccccagtgtcagctgtggagaacatggctggcctggtaagggggtctctgtgactgaccctgctgacctcgctgtcctgtgaagtaacccctcccagctgtgatacctggtgcagggcctggccctcgttggagaccaggctgcagcctccagttcccttgtagttggcaggagctcctggaagcacagcactgagcatgggacgctcccgctcagaactctccagggaggcaatgccagcctnnnnnnnnnnnnnnnnncctgttcacctgtgtgccccgcacctggaaggggctcccgggaaagggtgtgccctccccacattttgttgaaaggaatgaaaaataagtggatatgtttggggccctgcgttggcctggcctccacctcgccctccctttccgcttcccttccccaacctgccagtatgttccaaacccccccggggaaggccccctccc

SEQ ID NO: 24718 - DNA, 755 bp, Macaca Mulatta
  misc_feature (1)...(755): n = A,T,C or G
ggggtggtgggcgtgacgcaacgtccagcgcgcgcttttcatgccttggtgtttcctttggcggagtttttgttttcagaagatgctgggtttgttttattcagcggcagtggtgcttccccgaatctcagaatgcctgttaaaagatcactgaaattggatgatctgttagaagaaaattttcaccatgttgtccaggctggtatcaaactcccgagctcaagcaatccgcccatctcggcctgccaaagtcttgggattacaagtgtgagccaccatgcctggcatcatttgatccttcaaaaatcacaaggaagaaaagttttataacttattctccaacaactggaacttgtcaaatgagtctatttgcttctcccacaagctctgaagaacaaaagcacagaaatggactatcaaatgnnnnnnnnnnnnnnnnnnnntcaccccagtttaactngaaagcaaagaatcgacaaccaaagacaatggatgaaattgatgatgtttgcctaatctaaagttgaagaaattggtcagaaagaaatcctgggcgaataattgccaaaattttaagttagtataccgggcttttggaaggggcaattaaaaaaaccttgaaaaatcctcattgggaaatctccctggggccatccacgttnnnnnnnnnnnnnnnnnnnngggccaaaaaaacccaaaggaaccttaattggaccaaaaggttatttttaaacccaaaaacctggtttttaaaa

SEQ ID NO: 24719 - DNA, 322 bp, Macaca Mulatta
  misc_feature (1)...(322): n = A,T,C or G
cttagaaataactactcttgacactttccaaaatatttaaaataggaaaggaaaatcagtgaggatgttgtgctcagaaatgtcactgtcatgaaaaataggtaaatttgttttctcagctactgggaaagtgtacctcctagaaacttannnnnnnnnnnnnnnaagaggacaagaaggactaaaaatatcaacttttgcttttggacaaaaatgcatctgactgtatttttacttaagggtattgtgggtttcctctggagctgctgggttctggtgggttatgcaaaaggaggtttgggagacaatcaagttcattcca

SEQ ID NO: 24720 - DNA, 185 bp, Macaca Mulatta
  misc_feature (1)...(185): n = A,T,C or G
aggacagtccggggctcagagctgcctgttttggagcggatttgccaggaacttacagctgctgctcaacccttccggaggctagaggcttcacgggatcagcttcgccagctgttcaagnnnnnncctttaagcttcacttgatcgaggagagagtgacaggtccaacagcaccagtatatggg

SEQ ID NO: 24721 - DNA, 1173 bp, Macaca Mulatta
  misc_feature (1)...(1173): n = A,T,C or G
cggccctcgccctgtcagccgccacggccgccgccgccgccagagtcgccatgcagatcccgcgcgccgcgctgctcccactgctgctactgctgctgctggcggcgcccgcttcggcgcagctgtcccgggccggccgctnnnnnnnnnnnnnnnnnnnnnnnnnnnnnnnnnnnnnnnnnnnnnnnnnnnnnnnnnnnnnnnnnnnnnnnnnnnnnnnnnnnnnnnnnnnnnnnnnnnnnnnnnnnnnnnnnnnnnnnnnnnnnnnnnnnnnnnnnnnnnnnnnnnnnnnnnnnnnnnnnnnnnnnnnnnnnnnnnnnnnnnnnnnnnnnnnnnnnnnnnnnnnnnnnnnnnnnnnnnnnnnnnnnnnnnnnnnnnnnnnnnnnnnnnnnnnnnnnnnnnnnnnnnnnnnnnnnnnnnnnnnnnnnnnnnnnnnnnnnnnnnnnnnnnnnnnnnnnnnnnnnnnnnnnnnnnnnnnnnnnnnnnnnnnnnnnnnnnnnnnnnnnnnnnnnnnnnnnnnnnnnnnnnnnnnnnnnnnnnnnnnnnnnnnnnnnnnnnnnnnnnnnnnnnnnnnnnnnnnnnnnnnnnnnnnnnnnnnnnnnnnnnnnnnnnnnnnnnnnnnnnnnnnnnnnnnnnnnnnnnnnnnnnnnnnnnnnnnnnnnnnnnnnnnnnnnnnnnnnnnnnnnnnnnnnnnnnnnnnnnnnnnnnnnnnnnnnnnnnnnnnnnnnnnnnnnnnnnnnnnnnnnnnnnnnnnnnnnnnnnnnnnnnnnnnnnnnnnnnnnnnnnnnnnnnnnnnnnnnnnnnnnnnnnnnnnnnnnnnnnnnnnnnnnnnnnnnnnnnnnnnnnnnnnnnnnnnnnnnnnnnnnnnnnnnnnnnnnnnnnnnnnnnnnnnnnnnnnnnnnnnnnnnnnnnnnnnnnnnnnnnnnnnnnnnnnnnnnnnnnnnnnnnnnnnnnnnnnnnnnnnnnnnnnnnnnnnnnnnnnnnnnnnnnnnnnnnnnnnnnnnnnnnnnnnnnnnnnnnnnnnnnnnnnnnnnnnnnnnnnnnnnnnnnnnnnnnngacggtgaagtgattggaattaacactttgaaagtgacagctggaatctcctttgcaatcccatctgataagattaaaaagtttctcaccgagtcccatgaccgacaggccaaagg

SEQ ID NO: 24722 - DNA, 1241 bp, Macaca Mulatta
  misc_feature (1)...(1241): n = A,T,C or G
ggagaaagggagcaaaataaaaaacataaaggagatagattattaagcaaaatcaatagctgagttttttgaaacaaactggcaaaattaattaattgacttttggcccaaatttacattgttaattaaatcaagaaggaagaagatctaagagctcccattgataggcaagcctagagagaactagctaaatttgtcatgctaggatattgaaacagagaaggtttacatacatttatgaagggtcaatttactttggacagtgaggtatttgtcctagatagtggaaaaaaggagaattagtctgatggaatcatgaagtaatacagtgaacttgcaggtgcacaaaataagagggccacatctatatggtgcagtctggaattctgtttaagtttgcaggtacctcttggacatctgaattgatccagttgtcatccaccacagacatctcacatcagatacagacagttccaagattgacaacagagaacaccctgctggaaagacctgggcagaaatggagagccctgcgggagccatgttacattttcatctaaagagagaagacacatctgatgagactgaaagttctttgttgttttagattgtagaatggtattgaattggtctgtggaaattgcattgcttttatttctttgtgtaatcaagtttaagtaataggggatatataatcataagcattttagggtgggagggactattaagtaattttaagtgggtggggttatttagaatgttagaataatattgtgtattagatatcgctataagtgggcatgtgtacttacttgtgaccctttaccctgtaattgctatccttaaagatttcaaataactcagagggaactgcaggggagaccaacttatttagagtgaattggacatggataaaaaccctagtgggagaaagttcaaaggtgattagattaatagtttaatagaggatgagtgccctttgataaattactggctaaaatgaaattatccaatgattggatggtaaaattttcatgggaagttataaaagtgataaataaaaaaccttgctttttaccccctgtcagtagcccctccctcctaaccactgaaacccactttaccccttacccccctcctttctaaactttaattgctcgtatttctcttcactctatattgctctccaatttggctaataattgccattggcctgttanccataaaaattcaataaagat

SEQ ID NO: 24723 - DNA, 350 bp, Macaca Mulatta
agatcaggagggttgtgtttgcgcatatgtttcataaggtatgtttcctgagggagatggtaaaaagaagttgagggatgaagaagaaggaaaagagattacttgtaactagcaccctaggctctgattctgctagagttaaggtttatactggttttctggagccaagactgagcaaaactcaagtaagactttcagtggctcactactgagagaaaaaagagaggggaacctttagaagtcagtgaacattcaactggcaaaggaatgagctgctatttttttcgaagacccctgaatgaaacaaccttacaacctttcctggagtctcatagaaaatatctaactgg

SEQ ID NO: 24724 - DNA, 684 bp, Macaca Mulatta
  misc_feature (1)...(684): n = A,T,C or G
tgatgggtcagagacagagttcctcccgtatagacctcctcaacagggcccaccacaagcagtactcagtcagcaggaaagacgatattatggggaccacactacagtcactggtgggacacagggtcnnctccagnaaatgggcgatgannnaccaagcannngtatatacccccctgagtgtgaaattcacagggtatgtgccacacagcgaagatgcataccagggaccacctccacaacagggatatccaccccagcagcagcagtacccagggcagcaaggttacccaggacagcagcagggctacggtccttcacagggtggtccaggtcctcagtatcctaactacccacagggacaaggtcagcagtatggaggatatagaccaacacagcctggaccaccacagccaccccagcagaggccttatggatacgaccagggacagtatggaaattaccagcagtgaaaaagtacttacattccaatagccagtatctattagcagccatattgtcacctcagcactgtggacacctccctgtgaagatatccttccattccatctagtttttggagaaaccttgtggataagtggctgtttaatcagtaagcagcctttgtggtttagttataaaaaaggctttagtagctcaaaaatactcttggattcacatttc

SEQ ID NO: 24725 - DNA, 1143 bp, Macaca Mulatta
  misc_feature (1)...(1143): n = A,T,C or G
gggtctcctcccgccgcccaagatgccgaaaggaaagaaggccaagggaaagaaggtggctccggcccctgctgtcgtgaaaaagcaggaggccaagaaagtggtgaatcccctgtttgagaaaagacctaagaattttggcattggacaggacatccagcccaaaagagacctcacccgctttgtgaaatggcctcgctatatcaggttgcagcggcagagagccatcctctataagcggctgaaagtgcctcctgctattaaccagttcaccaagccctggaacgccaaacagctactcagctggcttaacctggccccctaagttaccgaaccaaaaaacaaaacccaggagaaataaaactagaagggctggtttggccccccgggtgannnnnnnnnnnnnnnnnnnnnnnntatccccgcgagaaaaagaggagaaatccttccccccnnnnnnnnnnnnnnnnnnnnncctttctctcatattttttttaaaagagatgaggaagtaatctatttattaaacaccgagcatcataattaaatcataataatatgtagctgtggggcggagaatgaatatagaacaccaatatgtaagggtctcgctccgttctacacaaaattaaactaacgaatgaaaaaggtgtagggagaaacattacaccctaatttaaatagtaattctagaaataaacatgagaaaaanatgaagaaaagcaagtaatagaaataataacatcacccgacactttgtaacagataagacaacgagcaccaccgccagggttatccacatttgtacaaatataaatattcaacacatataagataatgaatggagaaataaaacatcaagagaatcgggttagtgagacacgggactcaattataaacacaacggaagggaaagaaacccccctcccactcctaatatgtagagagaaccggtgaatcatagttacaagaggaaacatgtaatcaagtaagagatctcgaacacgcggcggaagcactctcttgtgtggacatcacactatatccaaacacctcacctcgctatcagtaagagacagacaaaaagcaactcgtacacatactcgcctgatagtaataactgcgacaagcctcagcataatt

SEQ ID NO: 24726 - DNA, 1542 bp, Macaca Mulatta
  misc_feature (1)...(1542): n = A,T,C or G
ccgtcgcaggatgaaggatcggactcaggagctgcggagtcgaaagacagtgatgatgaagaggaggtggtccacgtggatcgggaccacttcatggatgagttctttgaacaggtnnnnnnnnnnnnnnnnnnnnnnnnnnnnnnnnnnnnnnnnnnnnnnnnnnnnnnnnnnnnnnnnnnnnnnnnnnnnnnnnnnnnnnnnnnnnnnnnnnnnnnnnnnnnnnnnnnnnnnnnnnnnnnnnnnnnnnnnnnnnnnnnnnnnnnnnnnnnnnnnnnnnnnnnnnnnnnnnnnnnnnnnnnnnnnnnnnnnnnnnnnnnnnnnnnnnnnnnnnnnnnnnnnnnnnnnnnnnnnnnnnnnnnnnnnnnnnnnnnnnnnnnnnnnnnnnnnnnnnnnnnnnnnnnnnnnnnnnnnnnnnnnnnnnnnnnnnnnnnnnnnnnnnnnnnnnnnnnnnnnnnnnnnnnnnnnnnnnnnnnnnnnnnnnnnnnnnnnnnnnnnnnnnnnnnnnnnnnnnnnnnnnnnnnnnnnnnnnnnnnnnnnnnnnnnnnnnnnnnnnnnnnnnnnnnnnnnnnnnnnnnnnnnnnnnnnnnnnnnnnnnnnnnnnnnnnnnnnnnnnnnnnnnnnnnnnnnnnnnnnnnnnnnnnnnnnnnnnnnnnnnnnnnnnnnnnnnnnnnnnnnnnnnnnnnnnnnnnnnnnnnnnnnnnnnnnnnnnnnnnnnnnnnnnnnnnnnnnnnnnnnnnnnnnnnnnnnnnnnnnnnnnnnnnnnnnnnnnnnnnnnnnnnnnnnnnnnnnnnaagaaaatcatgatcatcatttgctgtgtggtgctgggggtggtcttggcgtcatccattggggggacgctgggcttgtagnnnnnnnnnnnnnnnnnnnnnnnnnnnnnnnnnnnnnccacatcgggagcaatacccccaccacccctttcactccatcccctgctccaggctcaccctcaaaacagacccaggcagccccaccccnccacccccatggcagaccctggtgtccctggaccttacccggccatggannnnnnnnnntccccgcacgtagatcgcagcaggcgtgattacacatgcacaccaacatgcatgccgccggcacatgctcaagacgtgtggacaccccagcnnnnnnnnnnnnnnnnnnnnnnnnnnnnnnnnnnnnnnnnnnnnnnnnnnnnnnnnggtatgtgtgcgtggtctgagcttcccccttcaccagggctgttgtgtagactgcagccgagtgtaacacagctgcccaccacgcccctctctgtcctccgtgaacnnnnnnnnnnnnnnntgagaccacagatctgtggacacgccatttgtgtacgtggaattttgtgtttgagtgtttgaacctaatgcaacagcaacgaagccactgatacccgagccctttgtgtctgctacaaaccaggcgggtggtgtgtgtgtactcacactcacattctcagaggatccagggaggcccaggtacacgcaggccgtggcagacaccccatgtctt

SEQ ID NO: 24727 - DNA, 889 bp, Macaca Mulatta
  misc_feature (1)...(889): n = A,T,C or G
ggagaccacgctccctcctgagcgcaggtcctctctctcccttcaccctttctccataccggggcctaagtccgccttactcctctcctccatgtacttgaaccctccaggtggtgccgagctggggctggttagggaccagaccacctctgagaactagaccatttcctgcctaaagatatgactccggttctcgccccgccctctcctgggnnnnnnnnnnnnntgnnnnnnnnnnnnnnnnnnnnnnnnnnnnnnnnnnnnnnnnnnnnnnnnnnnnnnnnnnnnnnnnnnnnnnnnnnnnnnnnnnnnnnnnnnnnnnnnnnnnnnnnnnnnnnnnngnnnnnnnnnnnnnnnnnnnnnnnnnnnnnnnnnnnnnnnnnnnnnnnnnnnnnnnnnnnnnnnnnnnnnnnnnngagagccaaaaggggggagaggaaaggaagnnnnnnnnnnnnnnnnnnnnnnnnnatagaaggatggaaaacggggaagaagccaaaaaagngacttatttatttccttggaatccacttgaccttctaggaatcctaatattccctcaatgtggctcgccattttttggcaagagaaagggcgttcaaataataccagaatcaattcatatttactccccatatataagttctccttcaagcgaatggtatctttctactcctacagctggtgtgaaatacttctcacatcatttttcatacttcaaaataatagggagcatttcctctgaacccctttgcatttattatagggcaaactccctcctccagacatttggatatttgtgctggcaataactacatacagaggacaacaacagatatatgtgattaagagagcgcagatgcgaatattaaggaaattctcatgc

SEQ ID NO: 24728 - DNA, 199 bp, Macaca Mulatta
atgtgtgcagagtatgtattgtgtgattggtgtgggtatgggtgatctaggctatttttgcctatggctgtgcaaggggtttagggtgcactttatgtatctgggtctaatgtatgtgatatatttatgtatatcatgtggatataaatgattgtgtgctaaactggagacaagtagtgatgtaagcactcatcatggt

SEQ ID NO: 24729 - DNA, 911 bp, Macaca Mulatta
  misc_feature (1)...(911): n = A,T,C or G
gggacacgcacgccgggcgtgcccgtttataaaaggagagcaagcggcgactcaagctcggtttggtgctttggatccgtttccatcggtccttacagccgctcctcagaccccagcagcaaagatggtgaagcagatcgagagcaaggctgcttttcaggaagccttgaacaccgcaggtgataaacttgtagtagttgacttctcagccacgtggtgtgggccttgcaaaatgatcaagcctttctttcattccctctctgaaaagtattccaacgtggtattccttgaagtagatgtggatgactgtcaggatgttgcttcagagtgtgaagtcaaatgcatgccaacattccagttttttaagaagggacaaaaggtgggtgaattttctggagccaataaggaaaagcttgaagccaccattaatgaattagtctaatcatgttttctgaaaacataaccagccattggctatttaaaacttgtaatttttttaatttacaaaaatataaaatatgaagacataaacccagttgccatctgcgtgacaataaaacattaattctaacacgaaaaagannnnnnnnnnnnnnnnnnnnnnnnttgttcggccgccttcggcccctcgagaaagcttttctaagaaccattcctttttggccgccgcggggcccccagtaaaggttaaagtgaaaacattgggctcccatatnnnnnnnnnnnnnnnnnnnnnnnnnnnnnnnnnnnnnnnnnnnnnnnnnnnnnnnnnnnnnnnnnnnnnnnnnnnnnnnnnnnnnnnnnnnnnnnnnnnnnnnnnnnnnnnnnnnnnnnnnnnnnnnnnnnnnnnnnnnnnnnnnnnnnnnnnnnnnnnnnnnnnnnnnnnnnnnnnnnnnnnnnnnnnnnnnnga

SEQ ID NO: 24730 - DNA, 619 bp, Macaca Mulatta
cgcgctgaggaggttcctgcggctgccaggaggtgtgagccgcggaccatgagcgtgggcatcatcggagccggccagctggcctatgctctggcgcggggcttcacggccgcaggtatcgtgtcggctcacaagataatagccagctctccggaaatgaacctgcccacggtgtcggcccttatgaagatgggtgtgaacctgacacgcagcaacaaggagacagtgaagcacagcgacgtcctgtttctggccgtgaagccacatatcatccccttcattctggatgagattggggccgatgtacaagccagacacatcgtggtctcctgtgcggctggtgtcaccatcagctctgtggagaagaagctgatggcgttccagccagcccccaaagtgattcgctgcatgaccaacacacctgtggtagtgcgggaaggcgctacagtgtacgccatgggcacccatgctctggtggaggatgggcagctcctggagcaactcatgagcagcgtgggcttctgcactgaggtggaagaggacctcatcgatgccgtcacggggctcagtggcagcgggcctgcctatgcattcatggctctggatgcattggctgatg

SEQ ID NO: 24731 - DNA, 1705 bp, Macaca Mulatta
  misc_feature (1)...(1705): n = A,T,C or G
ggtatcagcgaacgaaatcaaacaatatttaccacacatattggaacaaagaacatcaagtaatgtaatcaataaaagagaaaatctcttagaaaaaaagaagaatcaacgtaaaataagaataaaaggaattcaaaataaagatatcttgagaaataagaatcattntacaaaagcaagcagagaaaaattttacagatgaaggagaccagctctttaagatgggcatcaaggttctccagcagtctaaaagccaaaaacaaaaagaagannnnnnnnnnnnnnnnnnnnnnnnnnnnnnnnnnnnnnnnnnnnnnnnnnnnnnnnnnnnnnnnnnnnnnnnnnnnnnnnnnnnnnnnnnnnnnnnnnnnnnnnnnnnnnnnnnnnnnnnnnnnnnnnnnnnnnnnnnnnnnnnnnnnnnnnnnnnnnnnnnnnnnnnnnnnnnnnnnnnnnnnnnnnnnnnnnnnnnnnnnnnnnnnnnnnnnnnggcactgatatattacacctttggaagtgctggaggaagcatcatgtcccagatgattttggnggggtacagatatttgtcaggaatcaatgttctacagaattgtgaagttgccctaagttattacaagaaagtggcagatnnnnnttgctgacacatttgaaaaaagtgaaggtgttccagtggaaaaagtgagactaacagaaagacctgaaaatctgagttctaacagtgagattttggattgggacatataccaatactataaatttttggcagaaagaggagatgttcagatacaagnnnnnnnnnnnnnnnnnnnnnnnnnnnnnnnnnnnnnnnnnnnnnnnnnnnnnnnnnnnnnnnnnnnnnnnnnnnnnnnnnnnnnnnnnnnnnnnnnnnnnnnnnnnnnnnnnnnnnnnnnnagatgtatttagaggggaatgctgccgcaccgcaaaataatgctactgccttcaagtacttttccatggcagccagtaagnnnnnnnnnnnnnnnnnnnnnnnnnnnnnnnnnnnnnnnnnnnnnnnnnnnnnnnnnnnnnnnnnnnnnnnnnnnnnnnnnnnnnnnnnnnnnnnnnnnnnnnnnnnnnnnnnnnnnnnnnnnnnnnnnnnnnnnnnnnnnnnnnnnnnnctggctctggaatatggaaggattataaacttgccttcaaatatttttacttggcatctcagagtgggacagccccnnnnnnnnnnnnnnnnnnnnnnnnnnnnnnnnnnnnnnnnnnnnnnnnnnnnnnnnnnnnnnnnnnnnnnnnnnnnnnnnnnnnnnnnnnnnnnnnnnnnnnnnnnnnnnnnnnnnnnnnnnnnnnnnnnnnnnnnnnnnnnnnnnnnnnnnnnnnnnnnnnnnnnnnnnnnnnnnnnnnnnnnnnnnnnnnnnnnnnnnnnnnnnnnnnnnnnnnnnnnnnnnnnnnnnnnnnnnnnnnnnnnnnnnnnnnnnnnnnnnnnnnnnnnnnnnnnnnnnnnnnnnnnnnnnnnnnnnnnnnnnnnnnnnnnnnggcaatgcatttgctagagtaaaaattggagattaccattactatggctatgggactaagaaagactatcatacagcagccacacactacagcattgcagccgacaaataccacaacgcacaagccatgttcaatctggcttatatgtatgaacatggcttaggcatcgcaaagg

SEQ ID NO: 24732 - DNA, 669 bp, Macaca Mulatta
ttgtcagatatatattttaaaagtacttaaccagagctggtggattttgtggactttaatttgactcagttcactctgtgagcatcctggattgcatcgatgaacactgaattactgtaagaacgtagacaggctctcactatgacctggacagtttactacaccggtaacattctaatatcaaggagaattccattcatcatggaacattcacattttacttttctcaatggaatgcttgctgcaggcttacaaatcacacctagaactgaagtctgagtggtgttaatgatttttctgaaaggaataaaattggaatgtttctttaaatgtggaaaatttcttcagtatcctaataatatacccaaatgctttttctgggagagagcattcttttacaaaagaactttccctataaaagcatcacagtataatgtgaattggcattaaaatctttggatgcttttgcattaagttcatggagaaatattttgtattttactatgtatgtattaataaaaagtgggcaaagtaaagtctgcaaaatttagcttctctaaatttttgctcagtgtctgcagctggctatgggtcagggcttagtacaacaaaaccttgccttggaaaggcactctagaaaggttgtacatagtctcccagtctgcatgt

SEQ ID NO: 24733 - DNA, 362 bp, Macaca Mulatta
aggtgaatacctgctcctcgtctggatgggtgtgtgttttgatctgcattgacaccagcttcttaataaatggaaacttatttattttcacagttgaaagtcatatttttgtagttttagttttcattctgtagttctcacccctttgttcatatttttaaagggaagaccttcttgctgcttttctacaattggcagatcaggtttgtctggccaactaaggataccaggagggttgtgggcaagcctgggatgtggaagctgaggaccagatgcgcacaaggcattgctctgtttgctgttctagtggtggggactcctacatgctgtatgcttctcattttgtatttcctaaccacctg

SEQ ID NO: 24734 - DNA, 903 bp, Macaca Mulatta
  misc_feature (1)...(903): n = A,T,C or G
agcccagtcctgctggcctccctgggggtggggctggtcactctgctcggcctggctgtgggctcctacttggttcggaggtcccgccggcctcaggtcactctcctggaccccaatgaaaagtacctgctacgactgctagacaagacgngactgtgagccacaacaccaagaggttccgctttgccctgcccaccgcccaccacactctggggctgcctgtgggnnnnnnnnnnnnnnnnnnnnnnnnnnnnnnnnnnnnnnnnnnnnnnnnnnnnnnnnnnnnnnnnnnnnnnnnnnnnnnnnnnnnnnnnnnnnnnnnnnnnnnnnnnnnnnnnnnnnnnnnnnnnnnnnnnnnnnnnnnnnnnnnnnnnnnnnnnnnnnnnnnnnnnnnnnnnnnnnnnnnnnnnnnnnnnnnnnnnnnnnnnnnnnnnnnnnnnnnnnnnnnnnnnnnnnnnnnnnnnnnnnnnnnnnnnnnnnnnnnnnnnnnnnnnnnnnnnnnnnnnnnnnnnnnnnnnnnnnnnnnnnnnnnnnnnnnnnnnncaggaatcaccccaatgctgcagctgatccgggccatcctcaaagtccctgaagatccaacccagtgctttctgctttttgccaaccaggttnnnnnnnnnnnnnnnnnnnnnnnnnnnnnnnnnnnnnnnnnnnnnnnnnnnnnnnnnnnnnnnnnnnnnnnnnnnnnnnnnnnnnnnnnnnnnnagattgggcntacagcaagggctttgtgactgccgacatgatccgggaacacctgcctgctccaggggatgatgtgctggtgctgctttgtgggccacccccaatggtgcagctggcctgccatcccaacttggacaaactgggctactcgcaaaagatgcgattcacctactg

SEQ ID NO: 24735 - DNA, 132 bp, Macaca Mulatta
gccggtgcgggctgggacagtgcagtgagtagcggtcttggggtgtgcgatctcgctgagcctcctcacacggttcgtcgtttcgggttcaagcccaataggcttagcccctcgccatggactcccagaaag

SEQ ID NO: 24736 - DNA, 672 bp, Macaca Mulatta
gccagccggacctcacaccctctgtaccgcctctggatccagcgcccggggtccctttgtcctttttcgctctcctcagctcctctttgttccctctgcttgtcctcatgtgctcacctcactgacctctatgctcttgcactcccctggcctgaagccgcctctctgcgcgctttttactgggctcgtctctttccggagccccagcgtctcccgcccaagttgaccgcggaaagggcccggggccgaggtgcgaccgggcgtcggcggcgcagacctcttggccttctctcacaggtcggtgcgctcgcgctgggcgttccccgcccgactgccgtgcagtccatggctagattcgccggacaggactggcggagggacccgcgctgcctgagaaagggacagaccaacacgtgtgtttgctccgcgaaccctcttgaagctgttcagaagccgcttgacgcgaggtccactgggcggggcgggggttgggacccagcgggagccgggacagcctggctccgcggcctgtactcggtttacaccgcgggctggcgcggagggaggccgcgtttccttcgctgtcagtccggtcgcttcgggcacctccgagccccggcggctggctaatgttttgattaaaagaacggtggagctttttaagagaatatt

SEQ ID NO: 24737 - DNA, 1926 bp, Macaca Mulatta
  misc_feature (1)...(1926): n = A,T,C or G
tcagttttatccaagtatgaaaaccagattactattttcactgactacctagaagaatatccagatacagatgagctggtatggatcttagggaagcagcatctccttaaaacannnnnnnnnnnnnnnnnnnnnnnnnnnnnnnnnnnnnnnnnnnnnnnnnnnnnnnnnnnnnnnnnnnnnnnnnnnnnnnnnnnnnnnnnnnnnnnnnnnnnnnnnnnnnnnnnnnnnnnnnnnnnnnnnnnnnnnnnnnnnnnnnnnnnnnnnnnnnnnnnnnnnnnnnnnnnnnnnnnnnnnnnnnnnnnnnnnnnnnnnnnnnnnnnnnnnnnnnnnnnnnnnnnnnnnnnnnnnnnnnnnnnnnnnnnnnnnnnnnnnnnnnnnnnnnnnnnnnnnnnnnnnnnnnnnnnnnnnnnnnnnnnnnnnnnnnnnnnnnnnnnnnnnnnnnnnnnnnnnnnnnnnnnnnnnnnnnnnnnnnnnnnnnnnnnnnnnnnnnnnnnnnnnnnnnnnnnnnnnnnnnnnnnnnnnnnnnnnnnnnnnnnnnnnnnnnnnnnnnnnnnnnnnnnnnnnnnnnnnnnnnnnnnnnnnnnnnnnnnnnnnnnnnnnnnnnnnnnnnnnnnnnnnnnnnnnnnnnnnnnnnnnnnnnnnnnnnnnnnnnnnnnnnnnnnnnnnnnnnnnnnnnnnnnnnnnnnnnnnnnnnnnnnnnnnnnnnnnnnnnnnnnnnnnnnnnnnnnnnnnnnnnnnnnnnnnnnnnnnnnnnnnnnnnnnnnnnnnnnnnnnnnnnnnnnnnnnnnnnnnnnnnnnnnnnnnnnnnnnnnnnnnnnnnnnnnnnnnnnnnnnnnnnnnnnnnnnnnnnnnnnnnnnnnnnnnnnnnnnnnnnnnnnnnnnnnnnnnnnnnnnnnnnnnnnnnnnnnnnnnnnnnnnnnnnnnnnnnnnnnnnnnnnnnnnnnnnnnnnnnnnnnnnnnnnnnnnnnnnnnnnnnnnnnnnnnnnnnnnnnnnnnnnnnnnnnnnnnnnnnnnnnnnnnnnnnnnnnnnnnnnnnnnnnnnnnnnnnnnnnnnnnnnnnnnnnnnnnnnnnnnnnnnnnnnnnnnnnnnnnnnnnnnnnnnnnnnnnnnnnnnnnnnnnnnnnnnnnnnnnnnnnnnnnnnnnnnnnnnnnnnnnnnnnnnnnnnnnnnnnnnnnnnnnnnnnnnnnnnnnnnnnnnnnnnnnnnnnnnnnnnnnnnnnnnnnnnnnnnnnnnnnnnnnnnnnnnnnnnnnnnnnnnnnnnnnnnnnnnnnnnnnnnnnnnnnnnnnnnnnnnnnnnnnnnnnnnnnnnnnnnnnnnnnnnnnnnnnnnnnnnnnnnnnnnnnnnnnnnnnnnnnnnnnnnnnnnnnnnnnnnnnnnnnnnnnnnnnnnnnnnnnnnnnnnnnnnnnnnnnnnnnnnnnnnnnnnnnnnnnnnnnnnnnnnnnnnnnnnnnnnnnnnnnnnnnnnnnnnnnnnnnnnnnnnnnnnnnnnnnnnnnnnnnnnnnnnnnnnnnnnnnnnnnnnnnnnnnnnnnnnnnnnnnnnnnnnnnnnnnnnnnnnnnnnnnnnnnnnnnnnnnnnnnnnnnnnnnnnnnnnnnnnnnnnnnnnnnnnnnnnnnnnnnnnnnnnnnnntcacttaaatcaggggtcattaaactttttctgtaaagggccagacggtaaatattttctttttttgcaggccatgtggcactttgttacatctactcaactctgctgttgacatgcaaaagcagtgatagactttatgcacgtaaatgagtgtggctgtaatccaagaaaactttatttacaaaaacaggtggagggctgggtttggcctgcaggctgtagcttgccaatcagcgacttaaattgttgatttttgtttggtaaattaaaaataaattgtgtttgaagtatac

SEQ ID NO: 24738 - DNA, 698 bp, Macaca Mulatta
  misc_feature (1)...(698): n = A,T,C or G
gggagaagcaaagttgttgaaagatgggaaggtcttcagagtggtgcgagagaattgctgggatccagaagttcgtattagagaaatggatcaaaaaggnnnnnnnnnnnnnnnnnnnnnnnnnnnnnnnnnnnnnnnnnnnnnnnnnnnnnnnnnnnnnnnnnnnnnnnnnnnnnnnnnnnnnnnnnnnnnnnnnnnnnnnnnnnnnnnnnnnnnnnnnnnnnnnnnnnnnnnnnnnnnnnnnnnnnnnnnnnnnnnnnnnnnnnnnnnnnnnnnnnnnnnnnnnnnnnnnnnnnnnnnnnnnnnnnnnnnnnnnnnnnnnnnnnnnnnnnnnnnnnnnnnnnnnnnnnnnnnnnnnnnnnnnnnnnnnnnnnnnnnnnnnnnnnnnnnnnnnnnnnnnnnnnnnnnnnnnnnnnnnnnnnnnnnnnnnnnnnnnnnnnnnnnnnnnnnnnnnnnnnnnnnnnnnnnnnnnnnnnnnnnnnnnnnnnnnnnnnnnnnnnnnnnnnnnnnnnnnnnnnnnnnnngtggtgccttccccttcacagtgggaagaatctcccatggattcagcatgcgcccagatctgtgtgcccaggacaacccaatgaacccgaagaaataccttggttccttttacacagatgctttggttcatgatcctctgtccctcaagctgctaacagatgtcataggaaagg

SEQ ID NO: 24739 - DNA, 616 bp, Macaca Mulatta
  misc_feature (1)...(616): n = A,T,C or G
aggagaggcttctacagccaggacctgcccctgggagcctctcaggggnnnnnnnnnnnnnnnnctgtggctgggggtgctgcggctgctgctcttcaagctgctgctgtttgacctgctcctgacctgcagccgcctgcgccaccccgagggcccactgccttcccccgcagctgccacccgcctgcgagccctcggctcccaccgactgtacctggccacggagactgggggacgagaggccaccagttcacccaggccccagcctcgggaccatggctggagtgacacccctccgggttggaagcctgggagcccagtctgggaggaggggtcttacctcagcagataccccacctgcccagcacaggcctggtgctcaagatctgacctcaggattccttcctcgagtcttggagcattttttgcatgtgacctgcctcctcctctgcaggctggagctgcctgagggcacggctctacctcccnnnnnnnnnnnnnnnnnnnnnnnnnnnnnnnnnnnnnnnnnnnnnnnnnnnnagaatggtgatccacccagttacgggggtatatagggagcagatgactgagaacattaaaaaagaacttaaatgac

SEQ ID NO: 24740 - DNA, 524 bp, Macaca Mulatta
  misc_feature (1)...(524): n = A,T,C or G
cccccttgctcccgcctaccccgttggcattttcttcttccgccagcttttactgaactttttggcactgctgtggattggagtcaattgcagtccacataactggctgcagaaaaatctaccgagcaaggaaaaggcacacacacgtttgcagaagtgtctcggtttgcatttctgttggaatgatccgaactggactcacatcctgtatggtggatggactgtatattgagggttccattcttcgcgcagtttagacatctctnnnnnnnnnnnnnnnnnnnnnnnnnnnnnnaaaggcacaaactctagatattagttgaatgttgaggctttaactttttcggtgtctttctacaactgtgttctgtgactcaattgtatcgtgttaatatcagtacagaccgtctcctctacgtgaccgtataatgtttttctcttcttgtagtctctatggcgtgtctttatggtgtaataaggttctcacgggttcaatcttttgtgtttagagaggccacagttca

SEQ ID NO: 24741 - DNA, 704 bp, Macaca Mulatta
tgagaattattactaacatgtgacatttaggtctaatatattttttgacaagtatagatgaaagcagaagaaaatccactccaatacttagttttcaagacacaatcctatatacacccctgtggctggcccgtaatatatatattagatgttatatacagtagacttaacaagtcagtagtctaagcaatcaagccacttcactgttcagtttctttacatcatgaaatgaatacttggtattaacctcccaaatgtcaagaaaatgtagaataattacagatgtatataattagcatttaactatccacaaatactttaggaaatcctatcatagacagtgtttcctctatataaaactgggaaaaaaaacaagaattaagtccttttggtgaatagagcaaggcaatgtttagttcatttttataatgcagaagtcctgatacatggtgttttcatctttgaacttccaaaaggctataaaattggctcttctcaaatattttagaatttcatttcagctatttcctttttacattcagaagattgggtgcagacactttcactttgccaggaatgtttcttgataaatctgtgtcctttacgctgcggaataagtctttttctcttgctgttgcttctttggaatgctatgaaattatgtcaaggctgtttttgtcttttccggtttttctgcactccat

SEQ ID NO: 24742 - DNA, 116 bp, Macaca Mulatta
tgtgtaatgcatcttgaagaccggttgcaggagctatacttcaaaagtaaaatgctgtctgaatacctgagggggcagatgcgtgttcatgtcaaggagctgggagtggttctggg

SEQ ID NO: 24743 - DNA, 1903 bp, Macaca Mulatta
  misc_feature (1)...(1903): n = A,T,C or G
cagcccagtttactgtcgtggggccagctagtcccatcctggccatagtgggagaaaacactacgttacgctgccatctgtcatccaagaaaaatgctgaggatatggaggtgcggtggttccggtctcagttctcccccgcagtgtttgtgtataagggcaggagagagagaacagaggagcagatggaagagtaccgaggaagaatcacgtttgtgagcaaagacatcagcaggggcagtgtggccctggtcatacacaacgtcacaacccaggagaatggcatctaccgctgttacttccaagaaggcaggtcctacgatgaggccatcctgcgcctcgtggtggcagnnnnnnnnnnnnnnnnnnnnnnnnnnnnnnnnnnnnnnnnnnnnnnnnnnnnnnnnnnnnnnnnnnnnnnnnnnnnnnnnnnnnnnnnnnnnnnnnnnnnnnnnnnnnnnnnnnnnnnnnnnnnnnnnnnnnnnnnnnnnnnnnnnnnnnnnnnnnnnnnnnnnnnnnnnnnnnnnnnnnnnnnnnnnnnnnnnnnnnnnnnnnnnnnnnnnnnnnnnnnnnnnnnnnnnnnnnnnnnnnnnnnnnnnnnnnnnnnnnnnnnnnnnnnnnnnnnnnnnnnnnnnnnnnnnnnnnnnnnnnnncagaatcctttatgcccagcacatctccgtggatggtggccctggctgtcatcctgaccacatctccctggatggtgtccatggctgtcatcctggctgttttcatcatcttcatggctgtgagcatctgttgcatcaagaaacttcaaagggaaaaaaagattctgtcaggggaaaaggaagttgaacaagaggaaaaagaaattgcacagcaacttcaagaagaattgcgatggagaacattcttacatgctgcntgctgatgtggtcctggatccagacaccactcatcccgannnnnnnnnnnnnnnnnnnnnnnnnnnnnnnnnnnnnnnnnnnnnnnnnnnnnnnnnnnnnnnnnnnnnnnnnnnnnnnnnnnnnnnnnnnnnnnnnnnnnnnnnnnnnnnnnnnnnnnnnnnnnnnnnnnnnnnnnnnnnnnnnnnnnnnnnnnnnnnnnnnnnnnnnnnnnnnnnnnnnnnnnnnnnnnnnnnnnnnnnnnnnnnnnnnnnnnnnnnnnnnnnnnnnnnnnnnnnnnnnnnnnnnnnnnnnnnnnnnnnnnnnnnnnnnnnnnnnnnnnnnnnnnnnnnnnnccctttgaaggagtccctttgctgggtgcccatcttcctggactacgaagctggagatgtctccttctacaacatgagggacagatcgcacatctacacatgtccccgttcagcattttccgtgcctgtgaggcccttcttcaggatagggtctggtgacagccccatcttcatctgccctgtactcacaggagccagtggggtcacggtgcctgacgagggcctgacacttcacagagtggggacccagcagagcctgtagaatcaattccctggactcacagccatgcagataagccctggccatctcagcagccactgcacaacactcctaatggaagacatgccctcctcccctctgctcacatgagagaacatcttcccgctgcctttttcacacccactccagccctcagccccagttttctcctcctcactaggccgtggctttagtagctcctttgcttgtaattatgggatggaatccaggcatgggaactagttgtttcatagctcccagccaagaggaaagtgtgagaaactgttgggcagcgaacctgctgtttacatcagaatgaccacattgagcccaatatgccagttggcaccagatgctatggacttggaatgaggccaacaggattcgccaggatgagagag

SEQ ID NO: 24744 - DNA, 2382 bp, Macaca Mulatta
  misc_feature (1)...(2382): n = A,T,C or G
gtcaccagtatccccaaactccacctttgagtctctcttttctttaatttcttcacattgagattttcatcttgaaatccaagtaagatggatttcaatggggaaactccagccttctccattgtcccatttccttttcccacctcttcccctgacccctcaccccagacccactccatcttttttctttgtcttcagtgctttttcccccacctgggagacctcattccctgtctctgtctttgcctctcattctctgcagactcttctcagatctcttatgcccaccaccccgtcaagagcaagaccaagacccacatttccaacttctggttgatggtttctccggatattctttcagctcctcaaattccgtcagtcaacatccatcctagtatgtttcacaaatggttatgccctttgaccatcacttcttccttggggagaccctcccacagctccatcctcagaccccagccctacctccccccgcctaacccaccttcctgctacagttctgagcatgccactagccttccctgcaaagcagggtgagtccccattacctgccaaaggtagcatccacagctgtcggcctgacatgcctctgcagaggattccagcctcctctgacagattggttccctaatgtgttcctaaccatacccactgcaaacatgcccattccccaggttcatagcactctctcgctccattgagaaagactgacatttnnnnnnnnnnnnnnnnnnnnnnnnnnnnnnnnnnnnnnnnnnnnnnnnnnnnnnnnnnnnnnnnnnnnnnnnnnnnnnnnnnnnnnnnnnnnnnnnnnnnnnnnnnnnnnnnnnnnnnnnnnnnnnnnnnnnnnnnnnnnnnnnnnnnnnnnnnnnnnnnnnnnnnnnnnnnnnnnnnnnnnnnnnnnnnnnnnnnnnnnnnnnnnnnnnnnnnnnnnnnnnnnnnnnnnnnnnnnnnnnnnnnnnnnnnnnnnnnnnnnnnnnnnnnnnnnnnnnnnnnnnnnnnnnnnnnnnnnnnnnnnnnnnnnnnnnnnnnnnnnnnnnnnnnnnnnnnnnnnnnnnnnnnnnnnnnnnnnnnnnnnnnnnnnnnnnnnnnnnnnnnnnnnnnnnnnnnnnnnnnnnnnnnnnnnnnnnnnnnnnnnnnnnnnnnnnnnnnnnnnnnnnnnnnnnnnnnnnnnnnnnnnnnnnnnnnnnnnnnnnnnnnnnnnnnnnnnnnnnnnnnnnnnnnnnnnnnnnnnnnnnnnnnnnnnnnnnnnnnnnnnnnnnnnnnnnnnnnnnnnnnnnnnnnnnnnnnnnnnnnnnnnnnnnnnnnnnnnnnnnnnnnnnnnnnnnnnnnnnnnnnnnnnnnnnnnnnnnnnnnnnnnnnnnnnnnnnnnnnnnnnnnnnnnnnnnnnnnnnnnnnnnnnnnnnnnnnnnnnnnnnnnnnnnnnnnnnnnnnnnnnnnnnnnnnnnnnnnnnnnnnnnnnnnnnnnnctctgtttcatacttttaataaatgttttatttgggggcgtgtaaagaaactaattatactacacatggaatgagggctgagaatagaatgtggctttggtctctgtgtgttctcccgcttgatttagccttgtgtaactgaaataataaaatagcttttggaatacactggaaactaccttggtctctgtgtgcatgccccaattgcagtcttagaaaaaaataattaattaattttaaaaagaaaagaaatggctttattttgctggagcattatacatagcagtaaaggtgttccttcctggcagcgtgtgctcccctgctggttttccactgcccaacagttaccaccctcgagaggctccaaccggagccatctcgaagaattgatgaagaaacctaggactttacatcttgagcgacgttcaattaataggcaatttgcttgagctacttcttgccagcaagttggcagttacctggtgatcgagaaagaacggatgtgaggttcatttgtctttcaaaccgggtggcaaagcatttgtggacgaggcggttgttcaagggctgtttcactgtgcaccacatttagttctccannnnnnnnnnnnnnnnnnnnnnnnnnnnnnnnggggaggtggtggtgaatatatgaggacatattggccttttgctatccttcctgctatgcctgaaaccgtttcctcttctctttccctggccaatggtgaatgagcttggaagttcagcatcttggggagcagcagcaagagggtgtcatggatcagaggagagacgccaaaggaggccacttggggtgggaggaggcaggggcatctccaggtgtgtagagacacaatgacctgcttcccctttagagccaatctttccttaa

SEQ ID NO: 24745 - DNA, 221 bp, Macaca Mulatta
gtcatccccaaaccaaagcttttatcactcatggtggaatgaatggggtctatgaagctatttaccatggtgtccctatggtgggagttcccattttttggtgatcagcctgataacattgctcacatgaaggccaaaggagcagctgtagaaataaacttcaaaactatgacaagtgaagatttactgagggctgtgagaacagtcattaccgattcctc

SEQ ID NO: 24746 - DNA, 564 bp, Macaca Mulatta
tcagaaatgacaaggtccccttttgcttctggacctggttctagtggggtgcagtggcttttaaagccttgcctgcagagcctcagaccttttcctatgactgcagtggactgacctggttcccagaggcttctactaacttatgccttgtcctttttccagatctagtaaagaagggcacagagacagtgtacactgaagtccggaaagctgtccctggtgagtgaggttccccagtgccccaacctggggaatggatgccccttagaatcactgatggggccttgggagtgggcagagaaaagaggaagcaaagaaggccaaaaaaggggtgccacctcttacaccagtgctctgggctccctctgtcccactgcccttaaaaagtcacctcggattacatttactattcgtttagtcaacaagcacttcttgagtgcctactgaccccagccagtgacccttacctgctccccacacaggccctggtggctggggttccccaaggtcttggacgtcaagcgttttgttttggagactcccagtagcttcagcctttcttct

SEQ ID NO: 24747 - DNA, 233 bp, Macaca Mulatta
cccttctcccctttgcagacgagatgcagcaactgtgtgtgtatgtgctgatctttgcactggctctggctgccttctctgaagcttcttggaagccccgctcccagcagccagatgcacccttaggtacaggggccaacaggaacctggagctaccctggctggaccagcaaggcctagtctctcaccaccgaaggcagctgggaccccagggtcccccacacctcgtggca

SEQ ID NO: 24748 - DNA, 2313 bp, Macaca Mulatta
  misc_feature (1)...(2313): n = A,T,C or G
gtcttcgccatcttcgcctttgccacatgcggcagctacagtggggagctccagctgagcgtggattgtgccaacaagaccgagagtgacctcagcatcgaggtcgagttcgagtaccccttcaggnnnnnnnnnnnnnnnnnnnnnnnnnnnnnnnnnnnnnnnnnnnnnnnnnnnnnnnnnnnnnnnnnnnnnnnnnnnnnnnnnnnnnnnnnnnnnnnnnnnnnnnnnnnnnnnnnnnnnnnnnnnnnnnnnnnnnnnnnnnnnnnnnnnnnnnnnnnnnnnnnnnnnnnnnnnnnnnnnnnnnnnnnnnnnnnnnnnnnnnnnnnnnnnnnnnnnnnnnnnnnnnnnnnnnnnnnnnnnnnnnnnnnnnnnnnnnnnnnnnnnnnnnnnnnnnnnnnnnnnnnnnnnnnnnnnnnnnnnnnnnnnnnnnnnnnnnnnnnnnnnnnnnnnnnnnnnnnnnnnnnnnnnnnnnnnnnnnnnnnnnnnnnnnnnnnnnnnnnnnnnnnnnnnnnnnnnnnnnnnnnnnnnnnnnnnnnnnnnnnnnnnnnnnnnnnnnnnnnnnnnnnnnnnnnnnnnnnnnnnnnnnnnnnnnnnnnnnnnnnnnnnnnnnnnnnnnnnnnnnnnnnnnnnnnnnnnnnnnnnnnnnnnnnnnnnnnnnnnnnnnnnnnnnnnnnnnnnnnnnnnnnnnnnnnnnnnnnnnnnnnnnnnnnnnnnnnnnnnnnnnnnnnnnnnnnnnnnnnnnnnnnnnnnnnnnnnnnnnnnnnnnnnnnnnnnnnnnnnnnnnnnnnnnnnnnnnnnnnnnnnnnnnnnnnnnnnnnnnnnnnnnnnnnnnnnnnnnnnnnnnnnnnnnnnnnnnnnnnnnnnnnnnnnnnnnnnnnnnnnnnnnnnnnnnnnnnnnnnnnnnnnnnnnnnnnnnnnnnnnnnnnnnnnnnnnnnnnnnnnnnnnnnnnnnnnnnnnnnnnnnnnnnnnnnnnnnnnnnnnnnnnnnnnnnnnnnnnnnnnnnnnnnnnnnnnnnnnnnnnnnnnnnnnnnnnnnnnnnnnnnnnnnnnnnnnnnnnnnnnnnnnnnnnnnnnnnnnnnnnnnnnnnnnnnnnnnnnnnnnnnnnnnnnnnnnnnnnnnnnnnnnnnnnnnnnnnnnnnnnnnnnnnnnnnnnnnnnnnnnnnnnnnnnnnnnnnnnnnnnnnnnnnnnnnnnnnnnnnnnnnnnnnnnnnnnnnnnnnnnnnnnnnnnnnnnnnnnnnnnnnnnnnnnnnnnnnnnnnnnnnnnnnnnnnnnnnnnnnnnnnnnnnnnnnnnnnnnnnnnnnnnnnnnnnnnnnnnnnnnnnnnnnnnnnnnnnnnnnnnnnnnnnnnnnnnnnnnnnnnnnnnnnnnnnnnnnnnnnnnnnnnnnnnnnnnnnnnnnnnnnnnnnnnnnnnnnnnnnnnnnnnnnnnnnnnnnnnnnnnnnnnnnnnnnnnnnnnnnnnnnnnnnnnnnnnnnnnnnnnnnnnnnnnnnnnnnnnnnnnnnnnnnnnnnnnnnnnnnnnnnnnnnnnnnnnnnnnnnnnnnnnnnnnnnnnnnnnnnnnnnnnnnnnnnnnnnnnnnnnnnnnnnnnnnnnnnnnnnnnnnnnnnnnnnnnnnnnnnnnnnnnngacagatcttgagcaaggcaagaagtgggattcaggaatgggccaaaccagggttctagacagggtggggcttagaatggagcttccatggtggtttcagaaagggcagcccctccccatggtgcagtgaagaaaatgttttacagtggctgggtttgggcagtggagaggggacttggataggagcttccagatgggttttgttagggatggaggagaatgnnnnnnnnnnnnnnnnnnnnnnnnnnnnnnnnnnnnnnnnnnnnnnnnnnnnnnnnnnnnnnnnnnnnnnnnnnnnnnnnnnnnnnnnnnnnnnnnnnnnnnnnnnnnnnnnnnnnnnnnnnnnnnnnnnnnnnnnnnnnnnnnnnnnnnnnnnnnnnnnnnnnnnnnnnnnnnnnnnnnnnnnnnnnnnnnnnnnnnnnnnnnnnnnnnnnnnnnnnnnnnnnnnnnnnnnnnnnnnnnnnnnnnnnnnnnnnnnnnnnnnnnnnnnnnnnnnnnnnnnnnnnnnnnnnnnnnnnnnnnnnnnnnnnnnnnnnnnnnnnnnnnnnnnnnnnnnnnnnnnnnnnnnnnnnnnnnnnnnnnnnnnnnnnnnnnnnnnnnnnnnnnnnnnnnnnnnnnnnnnnntccccaaggaagaacaaatatgattctcctctcccaaataaactccttaaccacctagt

SEQ ID NO: 24749 - DNA, 686 bp, Macaca Mulatta
gccggcggcggcctccttccgggatctggggagggccggcccgcgggagctgagactgcgctggggtctgtgcggggccgcagggtcgcgggggtgaggggactagggggccacgcccctcctctgctgctggacgcaggtttcggcctccgcctcggttcaggagcgtccttgggacagagcgggatgccaccagctggtccaaagggaagttccaggagctcctggtgggcatcgttgtggagaatgacactggccgcggcgagatcagcgagttgaagcaggtggaaggggaggcttcgtgcagtagtcgcaaaggaaagctgattttcttctatgagtggtacatcaaactgggctggaaaggcatcgttaaagaatctggagtgaagcacaagggattgattgaaatacccaatctttctgaggaaaatgaagtagatgacactgaggtgaacgtgagtaaaaagaaaggagatggggatatactgaaggatcttatgaaaactgcaggcaccgccaaggtcaggcaggcccttggagattacctgaaggcacttaagacggactataagctccatgagggcatggaaggtgtctgtcttgttcactgctgtatctccagcatctagcacaatgcctggcacataaatttacaatgggaatgatttaccagcgaaagctat

SEQ ID NO: 24750 - DNA, 304 bp, Macaca Mulatta
cgttgccctgctagttgcgtgttgaattatatcccttacaggcaaaacttttgaagtggtggatgtggctttttaaactcttaagtttctgtgcatccatctcttgtactaagcgatttgcttaccatcttgacatggttggtcatttctatgacaatttacttcaaactctgtactgtgtagttctatatagtttgtgttaagcatgtcattcatataaactgttgaaaatttttcagatggcctagtttcatccctcttactggtttatctgtaatgaatggttaaaaataagggttatatt

SEQ ID NO: 24751 - DNA, 777 bp, Macaca Mulatta
  misc_feature (1)...(777): n = A,T,C or G
tttcacttctcccacctgtcaatttcaccattaaagttactggtttggctcaagttcttttacgttgggaaccaaatcctgatcaagagcaaaggaatgttaatctagaatatcaagtgaaaataaacgctccaaaagaagatgantatgaaaccagaatcactgaaagcaaatgcgtaaccatcctccacaaaggattttcagcaagtgtgcggaccatcctgcagaaggaccactcactcctggccagcagctgggcttctgctgaacttcatgccccaccaggnagggtctcccggaacctcagttgtgaatttaacttgcaccacaaacactacagcagataattattcatatttaaggccataccaagtttcccttcactgcacctggcttgttggcacagatgcccctgaggacacgcagtattttctctactataggtnnnnnnnnnnnnnnnnnnnnnnnnnnnnnnnnnnnnnnnnnnnnnnnnnnnnnnnnnnnnnnnnnnnnnnnnnnnnnnnnnnnnnnnnnnnnnnnnnnnnnnnnnnnnnnnnnnnnnnnnnnnnnnnnnnnnnnnnnnnnnnnnnnnnnnnnnnnnnnnnnnnnnnnnnnnnnnnnnnnnnnnnngatcaaataaatccgccactgaatgtcacagcagagattaaaggaactcgtctctctatccaatgggagaaaccagtgtctgcctttccaatccattgctttgattatgaagtaaaaatacacaatgcaaggaacggatatttgcag

SEQ ID NO: 24752 - DNA, 1077 bp, Macaca Mulatta
cgccgccggagggtcgtcttaaagggcccgcgcgccgccgccccctcggcccgccatgctgctatccgtgccgctgctgctcggcctcctcggcttggccgccgccgagcccgccgtctacttcaaggagcagtttctggacggagacgggtggacttcccgctggatcgaatccaaacacaagtcagattttggcaaattcgtcctcagttccggcaagttctacggtgacgaggagaaagataaaggtttgcagacaagccaggatgcacgcttttatgctctgtcggccagtttcgagcctttcagcaacaaaggccagacgctggtggtgcagttcacggtgaaacatgagcagaacatcgactgtgggggcggttatgtgaagctgtttcctaatagtttggaccagacggacatgcacggagactcagaatacaacatcatgtttggtcctgatatctgtggccccggcaccaagaaggttcacgtcatcttcaactacgagggcaaaaacgtgctgatcaacaaggacatccgttgcaaggatgatgagtttacacacctgtacacactgattgtgcggccagacaacacttatgaggtgaagattgacaacagccaggtggagtcgggctccttggaagacgattgggacttcctgccacccaagaagataaaggatcctgatgcttcaaaacctgaagactgggatgagcgggccaagatcgatgatcccacagactccaagcctgaggactgggacaagcccgagcatatccctgaccccgatgctaagaaacccgaggactgggatgaagagatggatggagagtgggaacccccagtgattcagaaccctgagtacaagggtgagtggaagccccggcagatcgacaacccagattacaagggcacttggatccacccagaaattgacaatcctgagtactctcctgatcccagtatctatgcctatgataactttggtgtgctgggcctggacctctggcaggtcaagtctggcaccatctttgacaacttccttatcaccaacgatgaggcatacgccgagga

SEQ ID NO: 24753 - DNA, 331 bp, Macaca Mulatta
  misc_feature (1)...(331): n = A,T,C or G
ggctgtgcaggaaccagccagacacccgcactcgggcaggcttcacgcagtggctgtgccacctgcacaatgaagtgaaccgcaagctgggcaagcctgacttcgactgctcaaaagtggatgagcgctggcgcgacggctggaaggatggctcctgtgactagagggtggtcagccagagcccatgggacagcgagccaggcntggttggacaggggcagggcactcattaaagtgcatcagagccagagcctgttgtgtctcagttgggtggtccccaggacactgcccgtggggacctgccctgcccctgttaggtttggagcagaag

SEQ ID NO: 24754 - DNA, 406 bp, Macaca Mulatta
  misc_feature (1)...(406): n = A,T,C or G
tttcagagatcagtttcattccaggacctgactgtgaacttcacccaggaggaatggcagcaactggaccctgctcagaggctcctgtacagggatgtgatgctggagaactacagcaacttggtctccgtgggngggtatcatgttagcaaaccggatgtgattttcaaattggaacaaggagaagaaccatggatagtggaggaattctcaaatcagaactacccagnnnnnnatgatgccttagagaagaacaaggaaatccaggataaacatttgacacaaactgtattcttcggcaacaaaacactgattacagaaagagagaatgtatttgggaaaacacttaatctgggcatgaatagtgttccctcaagaaaaataccctataaatgtaatccaggag

SEQ ID NO: 24755 - DNA, 223 bp, Macaca Mulatta
agcttaatagaagaaggaggagactgggacaggagaaaccgcctcaaagtgtatcagggtctttattgtgtggctattcgtgatttcaaacaggcagctgaactcttccttgacactgtttcaacatttacatcctatgaactcatggattataaaacatttgtgacttatactgtctatgtcagtatgattgccttagaaagaccagatctcagggaaaagg

SEQ ID NO: 24756 - DNA, 303 bp, Macaca Mulatta
  misc_feature (1)...(303): n = A,T,C or G
agctatcattattaattatgcaggtaaaatgtttaaccgctgaactcagtcaatggcannnnnnnnnnnnnnnnnnnnnnnnnnnnnnnnnnnnnnnnnnnnnnnnnnnnnnnnnnnnnnnnnnnnnnnnnnnnnnnnnnnnnnnnnnnnnnnnnnnnnnnnnnnnnnnnnnnnnnnnnnnnnnnnnnnnnnnnnnnnnnnaaagagaacaacggtggttggatgaacagcaacagataatggaatctcttaatgtactacacagtgaattgaaaaataaggtcgaaacattttctgaatcaa

SEQ ID NO: 24757 - DNA, 268 bp, Macaca Mulatta
  misc_feature (1)...(268): n = A,T,C or G
agccgagccccagaaggacagttcaaccacagaagtgctgagccaggtaaagaccctgctggacaagcagttggagtgagactcaagacagctggaccacaggaccagacccaccaggatccnnnnnnnnnnnnnnnnnatcagagatgcacttgtcatgggaaatctgcgtgtgatgccaggtgagcctcagaaaaacaatggaaccacaaaagtgccaagcagggtaagggccctgtcagacaagcagttggagtaagaattaaga

SEQ ID NO: 24758 - DNA, 3123 bp, Macaca Mulatta
  misc_feature (1)...(3123): n = A,T,C or G
gtgctggcctctacctccatctcagctacacatgtccagcctccaggcgctgtgctctggcctgcccctgcggcccctcccagagaaccggggacgccaggctggggtgccccatgccccagtcaggacccccggcctcagccttgcggagaaacagnnnnnnnnnnnnnnnnnnnnnnnnnnnnnnnnnnnnnnnnnnnnnnnnnnnnnnnnnnnnnnnnnnnnnnnnnnnnnnnnnnnnnnnnnnnnnnnnnnnnnnnnnnnnnnnnnnnnnnnnnnnnnnnnnnnnnnnnnnnnnnnnnnnnnnnnnnnnnnnnnnnnnnnnnnnnnnnnnnnnnnnnnnnnnnnnnnnnnnnnnnnnnnnnnnnnnnnnnnnnnnnnnnnnnnnnnnnnnnnnnnnnnnnnnnnnnnnnnnnnnnnnnnnnnnnnnnnnnnnnnnnnnnnnnnnnnnnnnnnnnnnnnnnnnnnnnnnnnnnnnnnnnnnnnnnnnnnnnnnnnnnnnnnnnnnnnnnnnnnnnnnnnnnnnnnnnnnnnnnnnnnnnnnnnnnnnnnnnnnnnnnnnnnnnnnnnnnnnnnnnnnnnnnnnnnnnnnnnnnnnnnnnnnnnnnnnnnnnnnnnnnnnnnnnnnnnnnnnnnnnnnnnnnnnnnnnnnnnnnnnnnnnnnnnnnnnnnnnnnnnnnnnnnnnnnnnnnnnnnnnnnnnnnnnnnnnnnnnnnnnnnnnnnnnnnnnnnnnnnnnnnnnnnnnnnnnnnnnnnnnnnnnnnnnnnnnnnnnnnnnnnnnnnnnnnnnnnnnnnnnnnnnnnnnnnnnnnnnnnnnnnnnnnnnnnnnnnnnnnnnnnnnnnnnnnnnnnnnnnnnnnnnnnnnnnnnnnnnnnnnnnnnnnnnnnnnnnnnnnnnnnnnnnnnnnnnnnnnnnnnnnnnnnnnnnnnnnnnnnnnnnnnnnnnnnnnnnnnnnnnnnnnnnnnnnnnnnnnnnnnnnnnnnnnnnnnnnnnnnnnnnnnnnnnnnnnnnnnnnnnnnnnnnnnnnnnnnnnnnnnnnnnnnnnnnnnnnnnnnnnnnnnnnnnnnnnnnnnnnnnnnnnnnnnnnnnnnnnnnnnnnnnnnnnnnnnnnnnnnnnnnnnnnnnnnnnnnnnnnnnnnnnnnnnnnnnnnnnnnnnnnnnnnnnnnnnnnnnnnnnnnnnnnnnnnnnnnnnnnnnnnnnnnnnnnnnnnnnnnnnnnnnnnnnnnnnnnnnnnnnnnnnnnnnnnnnnnnnnnnnnnnnnnnnnnnnnnnnnnnnnnnnnnnnnnnnnnnnnnnnnnnnnnnnnnnnnnnnnnnnnnnnnnnnnnnnnnnnnnnnnnnnnnnnnnnnnnnnnnnnnnnnnnnnnnnnnnnnnnnnnnnnnnnnnnnnnnnnnnnnnnnnnnnnnnnnnnnnnnnnnnnnnnnnnnnnnnnnnnnnnnnnnnnnnnnnnnnnnnnnnnnnnnnnnnnnnnnnnnnnnnnnnnnnnnnnnnnnnnnnnnnnnnnnnnnnnnnnnnnnnnnnnnnnnnnnnnnnnnnnnnnnnnnnnnnnnnnnnnnnnnnnnnnnnnnnnnnnnnnnnnnnnnnnnnnnnnnnnnnnnnnnnnnnnnnnnnnnnnnnnnnnnnnnnnnnnnnnnnnnnnnnnnnnnnnnnnnnnnnnnnnnnnnnnnnnnnnnnnnnnnnnnnnnnnnnnnnnnnnnnnnnnnnnnnnnnnnnnnnnnnnnnnnnnnnnnnnnnnagacatggctgtgcagaacttcgtgggagacgcctgtcgcggagccacctgggttgcccttcacaacggagggggcgtgggctggnnnnnnnnnnnnnnnnnnnnnnnnnnnnnnnnnnnnnnnnnnnnnnnnnnnnnnnnnnnnnnnnnnnnnnnnnnnnnnnnnnnnnnnnnnnnnnnnnnnnnnnnnnnnnnnnnnnnnnnnnnnnnnnnnnnnnnnnnnnnnnnnnnnnnnnnnnnnnnnnnnnnnnnnnnnnnnnnnnnnnnnnnnnnnnnnnnnnnnnnnnnnnnnnnnnnnnnnnnnnnnaggccctgcagctctgagggagccacgagtcgcggcccctgcctctctttctcgctggcaatcctcacctgcccaaccatggcacacacccttcctgcacacccgcaccacctgcacttctcgcacatcctcacgtggcctttatggtgccctgcgcagggtgccaccacagcctcattttacagacagcccgctgaggcccagagacgtgcagccctctgtccacgaccatgccacttgcctgggagccctgaaggctgtcaaagtccatttagggctgagtcccaagcctgcctaggggccctgcggtgaacactggccaagctatctctggctgggatgatcacaccctctgcttcctggccacctgccagcctccatgcaactctgtctgtctgctgcccatctgctgtctgtgcaaacactttctggacccttggcacgctgggctgctggcctggaggagttcaggaaggaggatagacggggaaataaagggtttaacagagctgtgtgctgcactgtgggctgatggacaggcagaccaggtctgccctaaggataaatgatcacttactggggaagaaatgagaaagcaggggcaccccctgaggccggcacagcctgagnnnnnnnnnnnnnnnnnnnnnnnnnnnnnnnnnnnnnnnnnnnnnnnnnnnnnnnnnnnnnnnnnnnnnnnnnnnnnnnnnnnnnnnnnnnnnnnnnnnnnnnnnnnnnnnnnnnnnnnnnnnnnnnnnnnnnngggncatggntcatgaatctcattctcttagctgggcatgcagcggacgaacagataactcatcctaaacagagaaatgagaaagagcctgtggggtgggcctctgagggccacagaaaaccagacaccccacatgtctgtggactggagaggggcaggccannnnnnnnnnnnnnnnnnnnnnnnnnnnnnnnnnnnnnnnnnnnnnnnnnnnnnnnnnnnnnnnnnnnnnccattctcccctttcccttgtgaagaaaagcctcgttttgtgtgggcagcaatatagggtaagaaaaccgcctgattctccagcc

SEQ ID NO: 24759 - DNA, 2336 bp, Macaca Mulatta
  misc_feature (1)...(2336): n = A,T,C or G
tgagagggagacgctccaagaggctcctcagtgtgggcgagtaaaatgccctgcgtgtgagaagcaggnnnnnnnnnnnnnnnnnnnnnnnnnnnnnnnnnnnnnnnnnnnnnnnnnnnnnnnnnnnnnnnnnnnnnnnnnnnnnnnnnnnnnnnnnnnnnnnnnnnnnnnnnnnnnnnnnnnnnnnnnnatgggctgtcgggatgtccacgcagccacagtcctttccttcctatgtggaatcgcctcagtagcaggcctctttgcagggactctgcttcccaactggagaaaattacgattgatcacattcagcagaaacgagaagaacctgactgtnnnnnnnnnnnnnnnnnnnnnnnnnnnnnnnnnnnnnnnnnnnnnnnnnnnnnnnnnnnnnnnnnnnnnnnnnnnnnnnnnnnnnnnnnnnnnnnnnnnnnnnnnnnnnnnnnnnnnnnnnnnnnnnnnnnnnnnnnnnnnnnnnnnnnnnnnnnnnnnnnnnnnnnnnnnnnnnnnnnnnnnnnnnnnnnnnnnnnnnnnnnnnnnnnnnnnnnnnnnnnnnnnnnnnnnnnnnnnnnnnnnnnnnnnnnnnnnnnnnnnnnnnnnnnnnnnnnnnnnnnnnnnnnnnnnnnnnnnnnnnnnnnnnnnnnnnnnnnnnnnnnnnnnnnnnnnnnnnnnnnnnnnnnnnnnnnnnnnnnnnnnnnnnnnnnnnnnnnnnnnnnnnnnnnnnnnnnnnnnnnnnnnnnnnnnnnnnnnnnnnnnnnnnnnnnnnnnnnnnnnnnnnnnnnnnnnnnnnnnnnnnnnnnnnnnnnnnnnnnnnnnnnnnnnnnnnnnnnnnnnnnnnnnnnnnnnnnnnnnnnnnnnnnnnnnnnnnnnnnnnnnnnnnnnnnnnnnnnnnnnnnnnnnnnnnnnnnnnnnnnnnnnnnnnnnnnnnnnnnnnnnnnnnnnnnnnnnnnnnnnnnnnnnnnnnnnnnnnnnnnnnnnnnnnnnnnnnnnnnnnnnnnnnnnnnnnnnnnnnnnnnnnnnnnnnnnnnnnnnnnnnnnnnnnnnnnnnnnnnnnnnnnnnnnnnnnnnnnnnnnnnnnnnnnnnnnnnnnnnnnnnnnnnnnnnnnnnnnnnnnnnnnnnnnnnnnnnnnnnnnnnnnnnnnnnnnnnnnnnnnnnnnnnnnnnnnnnnnnnnnnnnnnnnnnnnnnnnnnnnnnnnnnnnnnnnnnnnnnnnnnnnnnnnnnnnnnnnnnnnnnnnnnnnnnnnnnnnnnnnnnnnnnnnnnnnnnnnnnnnnnnnnnnnnnnnnnnnnnnnnnnnnnnnnnnnnnnnnnnnnnnnnnnnnnnnnnnnnnnnnnnnnnnnnnnnnnnnnnnnnnnnnnnnnnnnnnnnnnnnnnnnnnnnnnnnnnnnnnnnnnnnnnnnnnnnnnnnnnnnnnnnnnnnnnnnnnnnnnnnnnnnnnnnnnnnnnnnnnnnnnnnnnnnnnnnnnnnnnnnnnnnnnnnnnnnnnnnnnnnnnnnnnnnnnnnnnnnnnnnnnnnnnnnnnnnnnnnnnnnnnnnnnnnnnnnnnnnnnnnnnnnnnnnnnnnnnnnnnnnnnnnnnnnnnnnnnaattgtgttattgggattagaatgtgctttatgacaggttagtgtttcctctgaggcagaaaacccttttttggagatatcatccatcaagcagtactcatgcccgtatacaatctcttagtggctaagagaagtaaataaaagggccataatcatttgctctctttcagacataatttagtagggtacaagaagtctgttcttcagtgactacaatagagatttactctggtgactgccttttgagttatgggtgatgtaaggtatggctttaccataaccttgattcattcacccttgattcatttcccacccctgtcactgattatttccttgagcatatatctctgcctaacactttagtaggtgctatagaggatatatgaaaagtatgagatctggtcccatccagtaagacattttaatagagaagatcaaaatgttacctgatggttggggaatagtctgacttcattggcagttggccttaacttcttaatcattgatccaggaatatttcaaccagaggcacaactttctggcagacagacaaattgtacaacaccaataatatcctggaccttgaaattctgtttacttcagtccattgtatccttaaggcacctgtgctagcctagattttgtaatagcattgatttatgagaatgggcaaaagtggtagagaaattgttccctctccacttctgaaagtatgatgatgtattaaggatggaggagttatt

SEQ ID NO: 24760 - DNA, 416 bp, Macaca Mulatta
ggacactttccagcacctgaaatctcggacctcagttgcaggcaggcacagaaaacctgtggagaggttacctttaacacagcaacagaagcacgcatctcatctctcttgcattttctgttctttaatttggccctgagtgtctgtgagacagtgggccatgctgcctctgtttgctccctacccagccactgtcaggtcagtgttgtccgtcatgtgccagaagcttctcagctgtggtgagccactggcatcgggcaggcgggccagctggccagccagggtgacccacactccatgggcagccacctgtttatatctggtttcagttataaccccgtttttaaagaaatgctgcaaaaatttaagttttttcatgtttattttaacaactccttccatcagaccaccagaca

SEQ ID NO: 24761 - DNA, 725 bp, Macaca Mulatta
ggggagaccggaacccaagatggctgcgctcttgctgagacatgttggtcgtcattgcctccgagcccactttagccctcagctctgtatcagaaatgctgttcctttgggaaccacagccaaagaagagatggagcggttctggaataagaatataagttcaaaccgtcctgtatctccccacatcactatctacagttggtctcttcccatggcgatgtccatctgccaccgtggcactggtattgctttgagtgcaggggtctctctttttggcatgtcggccctgttactccctgggaactttgagtcttatttggaactcgtgaagtccctgtgtctggggccagcactgatccacacagctaagtttgcactcgtcttccctctcatgtatcatacctggaatgggatccgacacttgatgtgggacctaggaaaaggcctgaagattccccagctataccagtctggagtggttgtcctggttcttactgtgttgtcctctatggggctggcagccatgtgaagaacggaggttcccagcatcatcttcctacaccttattacattcatccattctttctgtttttcattcttatccccagcctgggaaaagtctccttatttgttttagggtccctttttgtacttttcaaaatcccgtttgggaacaagttagagtttccctgtggtagaaccattattaagtgggaaaaaggggt

SEQ ID NO: 24762 - DNA, 486 bp, Macaca Mulatta
atggagggtagctcctcagatagcggagcgccgcccgaggggctggcggaagaggccgagcctcagggcgccgcctggagcggggacagtggcactgtgtcccagagccacagcagcgcctcggggccgtgggaggatgagggcacggaggacggtgcgccgggccgcgacctgccgctgcttcgccgcgccgctgcgggctacgccgcctgcctgctgcctggggccggggcgcggcccgaggtcgaggccctggacgcgagcctggaggacctgctcaccagagtggacgagttcgtgggcatgctggacatgcttcgcggcgactcttcccaagtcgtcagcgagggcgtgccgcgcatccacgcgaaggccgccgagatgcgacacatctacagcaggatcgaccggctggaggccttcgtgaggatggtgggcggccgcgtagccaggatggaggagcaggtcaccaaggccgaggccgag

SEQ ID NO: 24763 - DNA, 714 bp, Macaca Mulatta
tcaccacctcgaggagatttgtcccccattagcgaatgaaattggtgcagtcctacctaactcgattccctttggcttggtggataggcctgcagggcacttttgttcccgcccctggtcactcagtagtcttttactccaggaaggcacaggacggtacctaaagagaattagagaatgcacctggctggacgggggtctaatcctgcacctggctgggttggtcagtagaacctgttttcagactcaaaaaccatcttcagaaagaaaaggcccagggaaggaatgtatgagaggctctctaagataaggaagtgtattctccgtgactatgaagctcaggcctctcccttttttttaaaccaaagtctggcaaccaagagcagcagctccatgacctccttgccccagatcagcccgggtcaggggacatagtgtcattgtttggaaactgcagaccacaggtgtgggtctatcccacttcctactactccccacattccccgtcagggtttcctcacgtgggcaggtgtgctagtccaagcagttcacttgagtgtccttgtcctcatgcttcaggaatgggagccacacctgaactacagagagttcaggctggatacacgtgctcacctgctgctcttgtcttcctaagagacagagagagtggggcagatggaggagaagaaagtggggaatgggtagcatagcatt

SEQ ID NO: 24764 - DNA, 2668 bp, Macaca Mulatta
  misc_feature (1)...(2668): n = A,T,C or G
gatcatatagatcgtaccagtaagaagagaggcgagaaagnnnnnnnnnnnnnnnnnnnnnnnnnnnnnnnnnnnnnnnnnnnnnnnnnnnnnnnnnnnnnnnnnnnnnnnnnnnnnnnnnnnnnnnnnnnnnnnnnnnnnnnnnnnnnnnnnnnnnnnnnnnnnnnnnnnnnnnnnnnnnnnnnnnnnnnnnnnnnnnnnnnnnnnnnnnnnnnnnnnnnnnnnnnnnnnnnnnnnnnnnnnnnnnnnnnnnnnnnnnnnnnnnnnnnnnnnnnnnnnnnnnnnnnnnnnnnnnnnnnnnnnnnnnnnnnnnnnnnnnnnnnnnnnnnnnnnnnnnnnnnnnnnnnnnnnnnnnnnnnnnnnnnnnnnnnnnnnnnnnnnnnnnnnnnnnnnnnnnnnnnnnnnnnnnnnnnnnnnnnnnnnnnnnnnnnnnnnnnnnnnnnnnnnnnnnnnnnnnnnnnnnnnnnnnnnnnnnnnnnnnnnnnnnnnnnnnnnnnnnnnnnnnnnnnnnnnnnnnnnnnnnnnnnnnnnnnnnnnnnnnnnnnnnnnnnnnnnnnnnnnnnnnnnnnnnnnnnnnnnnnnnnnnnnnnnnnnnnnnnnnnnnnnnnnnnnnnnnnnnnnnnnnnnnnnnnnnnnnnnnnnnnnnnnnnnnnnnnnnnnnnnnnnnnnnnnnnnnnnnnnnnnnnnnnnnnnnnnnnnnnnnnnnnnnnnnnnnnnnnnnnnnnnnnnnnnnnnnnnnnnnnnnnnnnnnnnnnnnnnnnnnnnnnnnnnnnnnnnnnnnnnnnnnnnnnnnnnnnnnnnnnnnnnnnnnnnnnnnnnnnnnnnnnnnnnnnnnnnnnnnnnnnnnnnnnnnnnnnnnnnnnnnnnnnnnnnnnnnnnnnnnnnnnnnnnnnnnnnnnnnnnnnnnnnnnnnnnnnnnnnnnnnnnnnnnnnnnnnnnnnnnnnnnnnnnnnnnnnnnnnnnnnnnnnnnnnnnnnnnnnnnnnnnnnnnnnnnnnnnnnnnnnnnnnnnnnnnnnnnnnnnnnnnnnnnnnnnnnnnnnnnnnnnnnnnnnnnnnnnnnnnnnnnnnnnnnnnnnnnnnnnnnnnnnnnnnnnnnnnnnnnnnnnnnnnnnnnnnnnnnnnnnnnnnnnnnnnnnnnnnnnnnnnnnnnnnnnnnnnnnnnnnnnnnnnnnnnnnnnnnnnnnnnnnnnnnnnnnnnnnnnnnnnnnnnnnnnnnnnnnnnnnnnnnnnnnnnnnnnnnnnnnnnnnnnnnnnnnnnnnnnnnnnnnnnnnnnnnnnnnnnnnnnnnnnnnnnnnnnnnnnnnnnnnnnnnnnnnnnnnnnnnnnnnnnnnnnnnnnnnnnnnnnnnnnnnnnnnnnnnnnnnnnnnnnnnnnnnnnnnnnnnnnnnnnnnnnnnnnnnnnnnnnnnnnnnnnnnnnnnnnnnnnnnnnnnnnnnnnnnnnnnnnnnnnnnnnnnnnnnnnnnnnnnnnnnnnnnnnnnnnnnnnnnnnnnnnnnnnnnnnnnnnnnnnnnnnnnnnnnnnnnnnnnnnnnnnnnnnnnnnnnnnnnnnnnnnnnnnnnnnnnnnnnnnnnnnnnnnnnnnnnnnnnnnnnnnnnnnnnnnnnnnnnnnnnnnnnnnnnnnnnnnnnnnnnnnnnnnnnnnnnnnnnnnnnnnnnnnnnnnnnnnnnnnnnnnnnnnnnnnnnnnnnnnnnnnnnnnnnnnnnnnnnnnnnnnnnnnnnnnnnnnnnnnnnnnnnnnnnnnnnnnnnnnnnnnnnnnnnnnnnnnnnnnnnnnnnnnnnnnnnnnnnnnnnnnnnnnnnnnnnnnnnnnnnnnnnnnnnnnnnnnnnnnnnnnnnnnnnnnnnnnnnnnnnnnnnnnnnnnnnnnnnnnnnnnnnnnnnnnnnnnnnnnnnnnnnnnnnnnnnnnnnnnnnnnnnnnnnnnnnnnnnnnnnnnnnnnnnnnnnnnnnnnnnnnnnnnnnnnnnnnnnnnnnnnnnnnnnnnnnnnnnnnnnnnnnnnnnnnnnnnnnnnnnnnnnnnnnnnnnnnnnnnnnnnnnnnnnnnnnnnnnnnnnnnnnnnnnnnnnnnnnnnnnnnnnnnnnnnnnnnnnnnnnnnnnnnnnnnnnnnnnnnnnnnnnnnnnnnnnnnnnnnnnnnnnnnnnnnnnnnnnnnnnnnnnnnnnnnnnnnnnnnnnnnnnnnnnnnnnnnnnnnnnnnnnnnnnnnnnnnnnnnnnnnnnnnnnnnnnnnnnnnnnnnnnnnnnnnnnnnnnnnnnnnnnnnnnnnnnnnnnnnnnnnnnnnnnnnnnnnnnnnnnnnnnnnnnnnnnnnnnnnnnnnnnnnnnnnnnnnnnnnnnnnnnnnnnnnnnnnnnnnnnnnnnnnnnnnnnnnnnnnnnnnnnnnnnnnnnnnnnnnnnnnnnnnnnnnnnnnnnnnnnnnnnnnnnnnnnnnnnnnnnnnnnnnnnnnnnnnnnnnnnnnnnnnnnnnnnnnnnnnnnnnnnnnnnnnnnnnnnnnnnnnnnnnnnnnnnnnnnnnnnnnnnnagtcatttggagaattggtacataagccattactggtggatctcactgttgaggaaggccagaggttgaaagtgatctatggatcctgtgctggattccatgctgttgatgtggattccggatcagtctatgacatttatctaccaacac

SEQ ID NO: 24765 - DNA, 498 bp, Macaca Mulatta
ccctaaaataaactcaaatttatcctcaagtctggaagcgtctgtcaagggtagagcccagggcagcatggtgggaagaggcctctaccgccagctgccctgagcttgttgcagacacacggaggtgggagtgagtgtgctgccttgcagaaggctttgtgtgtgctccattatctgatctgggcctactgggggctcagcaaggtggtggtgggtgacggtggaaagattctggggttctcccaggggtcctccaggctggtacttcttaacattttctgggccacacaggcctttaagaacctagagaaaacagttataccaaatcttgtacatagttccagttagaagagagagtcagagctgaagttcctcttggggtgaacacacaactgtcttggaaagggctcagtgtattgtcctgagtcatatttgggggcactaccctctgtgcatgcatacccaagctcagcccagtggagagggaacagtggtcct

SEQ ID NO: 24766 - DNA, 1514 bp, Macaca Mulatta
  misc_feature (1)...(1514): n = A,T,C or G
ccgagcagaaccttcgcagccggagcagtgaggaccgtctgtgtggaccccggccaggccccgggggcggtaatggcgggccgaccggcgcggggcacgggaatcctccggggggtggagggtctggccccaaggcccgagctgcactggttccccgacccccagcgcccgctggggccctccgagagagcaccggccgaggcactggcatgaaatacagnnnnnnnnnnnnnnnnnnnnnnnnnnnnnnnnnnnnnnnnnnnnnnnnnnnnnnnnnnnnnnnnnnnnnnnnnnnnnnnnnnnnnnnnnnnnnnnnnnnnnnnnnnnnnnnnnnnnnnnnnnnnnnnnnnnnnnnnnnnnnnnnnnnnnnnnnnnnnnnnnnnnnnnnnnnnnnnnnnnnnnnnnnnnnnnnnnnnnnnnnnnnnnnnnnnnnnnnnnnnnnnnnnnnnnnnnnnnnnnnnnnnnnnnnnnnnnnnnnnnnnnnnnnnnnnnnnnnnnnnnnnnnnnnnnnnnnnnnnnnnnnnnnnnnnnnnnnnnnnnnnnnnnnnnnnnnnnnnnnnnnnnnnnnnnnnnnnnnnnnnnnnnnnnnnnnnnnnnnnnnnnnnnnnnnnnnnnnnnnnnnnnnnnnnnnnnnnnnnnnnnnnnnnnnnnnnnnnnnnnnnnnnnnnnnnnnnnnnnnnnnnnnnnnnnnnnnnnnnnnnnnnnnnnnnnnnnnnnnnnnnnnnnnnnnnnnnnnnnnnnnnnnnnnnnnnnnnnnnnnnnnnnnnnnnnnnnnnnnnnnnnnnnnnnnnnnnnnnnnnnnnnnnnnnnnnnnnnnnnnnnnnnnnnnnnnnnnnnnnnnnnnnnnnnnnnnnnnnnnnnnnnnnnnnnnnnnnnnnnnnnnnnnnnnnnnnnnnnnnnnnnnnnnnnnnnnnnnnnnnnnnnnnnnnnnnnnnnnnnnnnnnnnnnnnnnnnnnnnnnnnnnnnnnnnnnnnnnnnnnnnnnnnnnnnnnnnnnnnnnnnnnnnnnnnnnnnnnnnnnnnnnnnnnnnnnnnnnnnnnnnnnnnnnnnnnnnnnnnnnnnnnnnnnnnnnnnnnnnnnnnnnnnnnnnnnnnnnnnnnnnnnnnnnnnncaggtgctgagccagctgaccccacagacggtgatggaaatagacgggctcctgggaaacaagccgcattccaagaagtagtcggtcgcgggcgcagcgacccaaccccgtaccgctgcacccgcccaagacccgcttcccgcagccgcctctcccgctccggatccctccacgtagcggccggagccagggtagccccgcccaccaacgagtcccggcttcgagtagtgatacgcatgaacaaagccatatccttttgcagtggggtcgagagagaaagtagtacgcccgccccctgctgagtccttctaggcccttttgcaaataccgggcatgaactactcgccgtcggctatctgccacttggtctcgccccctactctcctccccttattcctgaggc

SEQ ID NO: 24767 - DNA, 517 bp, Macaca Mulatta
accctccccagaaccaacatgaaaggggccatcacactgaccatcctgctcggggtcttcatcttctgctgggccccctttgtccttcatgtcctcttaatgacattctgcccaagtaacccctactgcgcctgctacatgtccctcttccaggtgaacggcatgttgatcatgtgcaatgccgtcattgaccccttcatatacgccttccggagcccagagctcagggacgcgttcacaaagatggtcttctgcagcagtactgctagcaggactgatccctgagtttataatccatgggaataacgttgccaagtgacagaataatgtaacattccaacaaatgccagcgctcctgactggccttccttccctaatggatgcaaggatgatcccaccagctagtgcttctgatagctaggttctaggtgaacagtcttactgtaggggcgactttttaactttgtaactggagagataaaacaatgtagtacaagaaggatagaatacaaagtat

SEQ ID NO: 24768 - DNA, 759 bp, Macaca Mulatta
ttccaaatgttttgaaaggagtcaaagtaatgttactttttattttgaaaaaagaaaactgccattcttttaaacttattttcctgtgttataatagtacgttgtctctctaataggttaatactcagagcctacacaataaccttatttatttttcaggttacagaatacctatatgctaataaaatggctttccgatacccagaacctgaagacaaggccaaatatgttaaagaaagaatatggcggagtgaatatgattccctgctgccagatgtgtatgaatggccggaatctgcatcaagccctcctgtgataacagaatagaagcactcccctgataaatactttctgtgctccagggaatcccttttttcagacaagaagagataatgtcctcagttttatggtgttttctgtgttttgttctgcccagccactttggttgatgtatttttttccatgcgtctccacatctgttggggtagacgtgttgattgattgcattgcccaccagcaccctacaatcagatagttgtgatgctttaattctaacatacagcccataccacatccaggagatgtaaaaagtgtgtttgtgaatgtcttcacttgtattctaattcggacttgccaaagtatttgctatttactattatgggtaataatcttctctcgcctggttgttttagagctactaaaatagaaatttacttttatggatagaagtacagaattctaagaagaaactaaatttta

SEQ ID NO: 24769 - DNA, 485 bp, Macaca Mulatta
  misc_feature (1)...(485): n = A,T,C or G
ccaatgccggggtttaagggccagaanaggaagcaatcacggaatttaggtgtagccaggagaaaatcaggnnnnnnnnnnnnnnnnnnnnnnnnnnnnnnnnnnnnnnnnnnnnnnnnnnnnnnnnnnnnnnnnnnnnnnnnnnnnnnnnnnnnnnnnnnnnnnnnnnnnnnnnnnnnnnnnnnnnnnnnnnnnnnnnnnnnnnnnnnnnnnnnnnnnnnnnnnnnnnnnnnnnnnnnnnnnnnnnnnnnnnnnnnnnnnnnnnnnnnnnnnnnnnnnnnnnnnnnnnnnnnnnnnnnnnnnnnnnnnnnnnnnnnnnnnnnnnnnnnnnnnnnnnnnnnnnnnnnnnnnnnnnnnnnnnnnnnnnnnnnnnnnnnnnnnnnnnnnnnnnnnnnnnnngggtttcaagctagcaaacctgatgccctcaccaagttggaacaaggagaaccgctatgggcattagaagatgaaatccacagtcc

SEQ ID NO: 24770 - DNA, 130 bp, Macaca Mulatta
cagatcatgcatgcattttcagttgctccttttgaccagaatttgtcgattgatggaaagattttaagtgatgactgtgccaccctaggcacccttggcgtcattcctgaatctgtcattttattaaagg

SEQ ID NO: 24771 - DNA, 1911 bp, Macaca Mulatta
  misc_feature (1)...(1911): n = A,T,C or G
gacctctattgctgagtgcttgacataccttgataatggtgttgtgtttgtcgggtctcgcctgggtgactcccagcttgtgaagnnnnnnnnnnnnnnnnnnnnnnnnnnnnnnnnnnnnnnnnnnnnnnnnnnnnnnnnnnnnnnnnnnnnnnnnnnnnnnnnnnnnnnnnnnnnnnnnnnnnnnnnnnnnnnnnnnnnnnnnnnnnnnnnnnnnnnnnnnnnnnnnnnnnnnnnnnnnnnnnnnnnnnnnnnnnnnnnnnnnnnnnnnnnnnnnnnnnnnnnnnnnnnnnnnnnnnnnnnnnnnnnnnnnnnnnnnnnnnnnnnnnnnnnnnnnnnnnnnnnnnnnnnnnnnnnnnnnnnnnnnnnnnnnnnnnnnnnnnnnnnnnnnnnnnnnnnnnnnnnnnnnnnnnnnnnnnnnnnnnnnnnnnnnnnnnnnnnnnnnnnnnnnnnnnnnnnnnnnnnnnnnnnnnnnnnnnnnnnnnnnnnnnnnnnnnnnnnnnnnnnnnnnnnnnnnnnnnnnnnnnnnnnnnnnnnnnnnnnnnnnnnnnnnnnnnnnnnnnnnnnnnnnnnnnnnnnnnnnnnnnnnnnnnnnnnnnnnnnnnnnnnnnnnnnnnnnnnnnnnnnnnnnnnnnnnnnnnnnnnnnnnnnnnnnnnnnnnnnnnnnnnnnnnnnnnnnnnnnnnnnnnnnnnnnnnnnnnnnnnnnnnnnnnnnnnnnnnnnnnnnnnnnnnnnnnnnnnnnnnnnnnnnnnnnnnnnnnnnnnnnnnnnnnnnnnnnnnnnnnnnnnnnnnnnnnnnnnnnnnnnnnnnnnnnnnnnnnnnnnnnnnnnnnnnnnnnnnnnnnnnnnnnnnnnnnnnnnnnnnnnnnnnnnnnnnnnnnnnnnnnnnnnnnnnnnnnnnnnnnnnnnnnnnnnnnnnnnnnnnnnnnnnnnnnnnnnnnnnnnnnnnnnnnnnnnnnnnnnnnnnnnnnnnnnnnnnnnnnnnnnnnnnnnnnnnnnnnnnnnnnnnnnnnnnnnnnnnnnnnnnnnnnnnnnnnnnnnnnnnnnnnnnnnnnnnnnnnnnnnnnnnnnnnnnnnnnnnnnnnnnnnnnnnnnnnnnnnnnnnnnnnnnnnnnnnnnnnnnnnnnnnnnnnnnnnnnnnnnnnnnnnnnnnnnnnnnnnnnnnnnnnnnnnnnnnnnnnnnnnnnnnnnnnnnnnnnnnnnnnnnnnnnnnnnnnnnnnnnnnnnnnnnnnnnnnnnnnnnnnnnnnnnnnnnnnnnnnnnnnnnnnnnnnnnnnnnnnnnnnnnnnnnnnnnnnnnnnnnnnnnnnnnnnnnnnnnnnnnnnnnnnnnnnnnnnnnnnnnnnnnnnnnnnnnnnnnnnnnnnnnnnnnnnnnnnnnnnnnnnnnnnnnnnnnnnnnnnnnnnnnnnnnnnnnnnnnnnnnnnnnnnnnnnnnnnnnnnnnnnnnnnnnnnnnnnnnnnnnnnnnnnnnnnnnnnnnnnnnnnnnnnnnnnnnnnnnnnnnnnnnnnnnnnnnnnnnnnnnnnnnnnnnnnnnnnnnnnnnnnnnnnnnnnnnnnnnnnnnnnnnnnnnnnnnnnnnnnnnnnnnnnnnnnnnnnnnnnnnnnnnnnnnnnnnnnnnnnnnnnnnnnnnnnnnnnnnnnnnnnnnnnnnnnnnnnnnnnnnnnnnnnnnnnnnnnnnnnnnnnnnnnnnnnnnnnnnnnnnnnnnnnnnnnnnnnnnnnnnnnnnnnnnnnnnnnnnnggtgcggctctatgagtggacaacagagaaggagctgcgcactgagtgcaaccactacaacaacatcatggccctatacctgaagaccaagggcgacttcatcctggtgggcgacattatgcgctcagtgctgctgcttggaaacaagcccatggaaggaaactttgaaga

SEQ ID NO: 24772 - DNA, 608 bp, Macaca Mulatta
cagctcctttgatttgtctgcacttaattttaatttcttctttataggtttgtccattttctttaactccttggacttctgttttccttctccaaaaagttgctctaccttttctaacttccgtttccgtttcttctctgaagagtcctttcctttcacttttagtggtttctcttccatgctgtcatcctccatgatatgcaagaatctgtcttcagatggtgggtgtgtggcctgcaaaatccgccatatgtgttgagtctcgtccagagatacttctaggaggtctccaaacatcataagttcttccagttgtgccttagctccaggtgacaactccagcaccggaggttccaaactccggggcaccaaagggctcttccgaggttgtttccttggggtgctagaaccttgagaacaactcttggaagcagaagagtaagcatgctctgcacaaaatgaaggtgctgtccacatgtgagtcaccaactcctcagatttgatgggaatctcttcatcacaaaaaagattgggttcaagactactagaggaattcacactggctgtgtccttcatgtcgtaaccatacgtctctcgaatgtcttcat

SEQ ID NO: 24773 - DNA, 1071 bp, Macaca Mulatta
  misc_feature (1)...(1071): n = A,T,C or G
ttttcttcgaagatttggggctccgcgatacagctaggatggctgtagtacctctactgttattggggtgtttgtggagcgctgtgggtgcgtccagcctggctgtcgttacttgcggctccgtggtaaagctactcaatacgcgccacaacgtccgactgcactcacacgacgtgcgctatgggtcaggtannnnnnnnnnnnnnnnnnnnnnnnnnnnnnnnnnnnnnnnnnnnnnnnnnnnnnnnnnnnnnnnnnnnnnnnnnnnnnnnnnnnnnnnnnnnnnnnnnnnnnnnnnnnnnnnnnnnnnnnnnnnnnnnnnnnnnnnnnnnnnnnnnnnnnnnnnnnnnnnnnnnnnnnnnnnnnnnnnnnnnnnnnnnnnnnnnnnnnnnnnnnnnnnnnnnnnnnnnnnnnnnnnnnnnnnnnnnnnnnnnnnnnnnnnnnnnnnnnnnnnnnnnnnnnnnnnnnnnnnnnnnnnnnnnnnnnnnnnnnnnnnnnnnnnnnnnnnnnnnnnnnnnnnnnnnnnnnnnnnnnnnnnnnnnnnnnnnnnnnnnnnnnnnnnnnnnnnnnnnnnnnnnnnnnnnnnnnnnnnnnnnnnnnnnnnnnnnnnnnnnnnnnnnnnnnnnnnnnnnnnnnnnnnnnnnnnnnnnnnnnnnnnnnnnnnnnnnnnnnnnnnnnnnnnnnnnnnnnnnnnnnnnnnnnnnnnnnnnnnnnnnnnnnnnnnnnnnnnnnnnnnnnnnnnnnnnnnnnnnnnnnnnnnnnnnnnnnnnnnnnnnnnnnnnnnnnnnnnnnnnnnnnnnnnnnnnnnnnnnnnnnnnnnnnnnnnnnnnnnnnnnnnnnnnnnnnnnnnnnnnnnnnnnnnnnnnnnnnnnnnnnnnntctttctgagtagaggatttgctggtaaaggggcagatgtttttcattcatactgataaaacaaactgaggggaacatccctcttagctggtaaacttttactctttaggagcttggcatcatggactgttaatgtatgtgatttttcccctattttctctctccaaaatgataaaaacaataattttatta

SEQ ID NO: 24774 - DNA, 1176 bp, Macaca Mulatta
  misc_feature (1)...(1176): n = A,T,C or G
gccatgcaaccctgcacttcagatccaatgaggagcaggaaggcgtgtgctgtgnnnnnnnnnnnnnnnnnnnnnnnnnnnnnnnnnnnnnnnnnnnnnnnnnnnnnnnnnnnnnnnnnnnnnnnnnnnnnnnnnnnnnnnnnnnnnnnnnnnnnnnnnnnnnnnnnnnnnnnnnnnnnnnnnnnnnnnnnnnnnnnnnnnnnnnnnnnnnnnnnnnnnnnnnnnnnnnnnnnnnnnnnnnnnnnnnnnnnnnnnnnnnnnnnnnnnnnnnnnnnnnnnnnnnnnnnnnnnnnnnnnnnnnnnnnnnnnnnnnnnnnnnnnnnnnnnnnnnnnnnnnnnnnnnnnnnnnnnnnnnnnnnnnnnnnnnnnnnnnnnnnnnnnnnnnnnnnnnnnnnnnnnnnnnnnnnnnnnnnnnnnnnnnnnnnnnnnnnnnnnnnnnnnnnnnnnnnnnnnnnnnnnnnnnnnnnnnnnnnnnnnnnnnnnnnnnnnnnnnnnnnnnnnnnnnnnnnnnnnnnnnnnnnnnnnnnnnnnnnnnnnnnnnnnnnnnnnnnnnnnnnnnnnnnnnnnnnnnnnnnnnnnnnnnnnnnnnnnnnnnnnnnnnnnnnnnnnnnnnnnnnnnnnnnnnnnnnnnnnnnnnnnnnnnnnnnnnnnnnnnnnnnnnnnnnnnnnnnnnnnnnnnnnnnnnnnnnnnnnnnnnnnnnnnnnnnnnnnnnnnnnnnnnnnnnnnnnnnnnnnnnnnnnnnnnnnnnnnnnnnnnnnnnnnnnnnnnnnnnnnnnnnnnnnnnnnnnnnnnnnnnnnnnnnnnnnnnnnnnnnnnnnnnnnnnnnnnnnnnnnnnnnnnnnnnnnnnnnnnnnnnnnnnnnnnnnnnnnnnnnnnnnnnnnnnnnnnnnnnnnnnnnnnnnnnnnnnnnnnnnnnnnnnnnnnnnnnnnnnnnnnnnnnnnnnnnnnnnnnnnnnnnnnnnnnnnnnnnnnnnncctcggtcaccttctgctgaacagctccgccttgaccttgcttactcacggactaagccacatgacccgcaagcagagcctcagncagactgaagaggaacagtatcggtgatgtcggttgctgccacctttctgaggctctcagggctgccaccagcctggaggagctggancttgagccacaaccagattggagacgc

SEQ ID NO: 24775 - DNA, 1447 bp, Macaca Mulatta
  misc_feature (1)...(1447): n = A,T,C or G
aggccgagaggcttcgaagaatgcttggaaaggatgaggatgaaaatgtgaagaaaccaaaacatatatcagcagatgatctgaatgatggcttcgtgctagataaagatgacaggcgtttgctttcctacaaaatggaaagatgaatgtcgaggaagatggccaggaagagcaaagcaaggaagccagtgaccctgagagcaacgaggaagaaggtgacagttcaggcagggaggacacagaggagagtgatagtccagatggccactcggacctggaatccaacgtagagagcgaggaagaaaacgagaagccagcaaaagagcagcggcagactcctgggagagggccgacgagcggcaagggaagagctggaaaagctgccggagacgagctgccctacacgttcgcagnnnnnnnnnnnnnnnnnnnnnnnnnnnnnnnnnnnnnnnnnnnnnnnnnnnnnnnnnnnnnnnnnnnnnnnnnnnnnnnnnnnnnnnnnnnnnnnnnnnnnnnnnnnnnnnnnnnnnnnnnnnnnnnnnnnaaactgtttggctttcttttggagtacgttggcgatttagctacagatgacccaccagacctcagagtaattgataaattggttgtnnnnnnnnnnnnnnnnnnnnnnnnnnnnnnnnnnnnnnnnnnnnnnnnnnnnnnnnnnnnnnnnnnnnnnnnnnnnnnnnnnnnnnnnnnnnnnnnnnnnnnnnnnnnnnnnnnnnnnnnnnnnnnnnnnnnnnnnnnnnnnnnnnnnnnnnnnnnnnnnnnnnnnnnnnnnnnnnnnnnnnnnnnnnnnnnnnnnnnnnnnnnnnnnnnnnnnnnnnnnnnnnnnnnnnnnnnnnnnnnnnnnnnnnnnnnnnnnnnnnnnnnnnnnnnnnnnnnnnnnnnnnnnnnnnnnnnnnnnnnnnnnnnnnnnnnnnnnnnnnnnnnnnnnnnnnnnnnnnnnnnnnnnnnnnnnnnnnnnnnnnnnnnnnnnnnnnnnnnnnnnnnnnnnnnnnnnnnnnnnnnnnnnnnnnnnnnnnnnnnnnnnnnnnnnnnnnnnnnnnnnnnnnnnnnnnnnnnnnnnnnnnnnnnnnnnnnnnnnnnnnnnnnnnnnnnnnnnnnnnnnnnnnnnnnnnnnnnnnnnnnnnnnnnnnnnnnnnnnnnnnnnnnnnnnnnnnnnnnnnnnnnnnnnnnnnnnnnnnnnnnnnnnnnnnnnnnnnnnnnnnnnnnnnnnnnnnnnnnnnnnnnnnnnnnnnnnnnnnnnnnnnnnnnnnnnnnnnnnnnnnnnnnnnnnnnnnnnnnnnnnnnnnnnnnnnnnnncaggagctgtgtcagagcacactgaccgaaatggaaagccagaagcagctctgccggccactgacctgtgagaagagcaagcctgtcccactgaagctgttcacgccccggctggtcaaag

SEQ ID NO: 24776 - DNA, 1099 bp, Macaca Mulatta
  misc_feature (1)...(1099): n = A,T,C or G
ctccatctggtcaactgcgggagaaaaattttcgagaatttccagcaggccaggcagtggccgctttgactgcttgcttcggagatccgagacaacggagaaggcactcttatttaccgacctagaaagccctttccccgccctccgttagctaattaaaacatttttcagggacatagccatccagagnnnnnnnnnnnnnnnnnnnnnnnnnnnnnnnnnnnnnnnnnnnnnnnnnnnnnnnnnnnnnnnnnnnnnnnnnnnnnnnnnnnnnnnnnnnnnnnnnnnnnnnnnnnnnnnnnnnnnnnnnnnnnnnnnnnnnnnnnnnnnnnnnnnnnnnnnnnnnnnnnnnnnnnnnnnnnnnnnnnnnnnnnnnnnnnnnnnnnnnnnnnnnnnnnnnnnnnnnnnnnnnnnnnnnnnnnnnnnnnnnnnnnnnnnnnnnnnnnnnnnnnnnnnnnnnnnnnnnnnnnnnnnnnnnnnnnnnnnnnnnnnnnnnnnnnnnnnnnnnnnnnnnnnnnnnnnnnnnnnnnnnnnnnnnnnnnnnnnnnnnnnnnnnnnnnnnnnnnnnnnnnnnnnnnnnnnnnnnnnnnnnnnnnnnnnnnnnnnnnnnnnnnnnnnnnnnnnnnnnnnnnnnnnnnnnnnnnnnnnnnnnnnnnnnnnnnnnnnnnnnnnnnnnnnnnnnnnnnnnnnnnnnnnnnnnnnnnnnnnnnnnnnnnnnnnnnnnnnnnnnnnnnnnnnnnnnnnnnnnnnnnnnnnnnnnnnnnnnnnnnnnnnnnnnnnnnnnnnnnnnnnnnnnnnnnnnnnnnnnnnnnnnnnnnnnnnnnnnnnnnnnnnnnnnnnnnnnnnnnnnnnnnnnnnnnnnnnnnnnnnnnnnnnnnnnnnnnnnnnnnnnnnnnnnnnnnnnnnnnnnnnnnnnnnnnnnnnnnnnnnnnnnnnnnnnnnnnnnnnnnnnnaggatcaagaaatgtggtggttttgtagcttggaatagtttggggcagcctcacgtaaatggcaggcttgcgatgacaagaagtattggagatttggacattaaaaccagtggtgtcatagcagaacccgaaactaagaggattaa

SEQ ID NO: 24777 - DNA, 334 bp, Macaca Mulatta
  misc_feature (1)...(334): n = A,T,C or G
ggggccagtgggaaggtggaccctgtctatgagaccctgcgttatggcacctccctggcactgatgaaccgctccagtttcagcagcacctctgagtccccgacaaggagcctggtatgngcatccgcagctctgaggaggggcctggtgacagtggngggtacagcaggcagaagggggctcccctctccatgcccggcccagtgccctttggggtggngagattctcctgcagccccccaaagccgccctgcggaaggatgtggggcccatgtactcctatgtcgcactctacaagtttctgccccaggagaacaatgatctggctctgcag

SEQ ID NO: 24778 - DNA, 1221 bp, Macaca Mulatta
  misc_feature (1)...(1221): n = A,T,C or G
gggcctttctcgctccccggccatcttagtggctgcttttgcttgggggccgtcccgcacctgaggcaggaagatggtggccgcaaagaagacgaaaaagtcgctggagtcgatcaactctaggctccaactcgttatgaaaagtgggaagtacgtcctggggtacaagcagactctgaagatgatcagacaaggcaaagcgaaattggtcattctcgctaacaactgcccaactttgaggaaatctgaaataaaatactatgcaatgttggctaaaactggtgtctatcacaaccgtggagataatattgaacttgggcccgcaatgcggaaaattactacagagtgatgcacactgagcaattatatgctccaaagtggactcatcacaatcatatggaaaacatggctcaaaaaaaaatttggatagaacaaggttatatctcaggcaaaaaatatcttccccattatcaaaaatatatttaatttgtgatttctctggaaggtaagtatttgtcgtgtggtcagcgttattatgtgtattaaatacattagtatagaagcaccataccagtgaggaagcgccgaagtgacattagaaaaatcactttattttttattatgataaatcaagatatgtcgctgtacttttgagtgaaggatcgcactagaaaaaagtggagccccacaccagaaaaagaattaagcgggctcacaaataaataaggcgcaaataacatgatacggagtcantaatggattgaaaaaaatacaagcgaaagtatctctcacacctccatcaagtgaaaaaataagatgcccatcgagggcgccancaaaaatgaacacatatcaaaaagaataatatatattgaaaagataaaagntattatttgagtaagttgtgagcatagatatatataaagaagccnacccacgagacgagatggtcgaaactcacatacaatgaagaaacagctgactaaatgatgagccctatcaatatataccccaatctatcaagtagagaagagtatcctctcttccaaggggctaccaatcatatagcttaggagtttattcgtaatatatataatgtgtggttgagagcacacacaaaaacgtgctaaaaataccaacaacacacatataatataattcatagggtgtttaaaacatactagcgtatgtagatactaacttattctcactatcctatag

SEQ ID NO: 24779 - DNA, 562 bp, Macaca Mulatta
  misc_feature (1)...(562): n = A,T,C or G
tcacatgtttattgccctcctcattctctttatcctgagcacacttgtagtagattacattgatgaaggaagnnnnnnnnnnnnnnnnnnnnnnnnnnnnnnnnnnnnnnnnnnnnnnnnnnnnnnnnnnnnnnnnnnnnnnnnnnnnnnnnnnnnnnnnnnnnnnnnnnnnnnnnnnnnnnnnnnnnnnnnnnnnnnnnnnnnnnnnnnnnnnnnnnnnnnnnnnnnnnnnnnnnnnnnnnnnnnnnnnnnnnnnnnnnnnnnnnnnnnnnnnnnnnnnnnnnnnnnnnnnnnnnnnnnnnnnnnnnnnnnnnnnnnnnnnnnnnnnnnnnnnnnnnnnnnnnnnnnnnnnnnnnnnnnnnnnnnnnnnnnnnnnnnnnnnnnnnnnnnnnnnnnnnnnnnnnnnnnnnnnnnnnnnnnnnnnnnnnnnnnnnnnnnnnnnnnnnnnnnnnnnnnnnnnnnnnnnnnnnnnnnnnnnnnnnnnnnnnnnnnnnnnnnnnnnnnnnnnnnnnaggaatcccactgtaagatggggttatgtcgctatgcagtttgcacaggt

SEQ ID NO: 24780 - DNA, 2061 bp, Macaca Mulatta
  misc_feature (1)...(2061): n = A,T,C or G
ggaaatttttcccctttagaactagacaatgtgctgttaaagaacactgactctatagagttggctttgtcatatgctaaaacttggtcaaaatatactaagaacatagtttcatgggttgnnnnnnnnnnnnnnnnnnnnnnnnnnnnnnnnnnnnnnnnnnnnnnnnnnnnnnnnnnnnnnnnnnnnnnnnnnnnnnnnnnnnnnnnnnnnnnnnnnnnnnnnnnnnnnnnnnnnnnnnnnnnnnnnnnnnnnnnnnnnnnnnnnnnnnnnnnnnnnnnnnnnnnnnnnnnnnnnnnnnnnnnnnnnnnnnnnnnnnnnnnnnnnnnnnnnnnnnnnnnnnnnnnnnnnnnnnnnnnnnnnnnnnnnnnnnnnnnnnnnnnnnnnnnnnnnnnnnnnnnnnnnnnnnnnnnnnnnnnnnnnnnnnnnnnnnnnnnnnnnnnnnnnnnnnnnnnnnnnnnnnnnnnnnnnnnnnnnnnnnnnnnnnnnnnnnnnnnnnnnnnnnnnnnnnnnnnnnnnnnnnnnnnnnnnnnnnnnnnnnnnnnnnnnnnnnnnnnnnnnnnnnnnnnnnnnnnnnnnnnnnnngtagaagaagcaagtgaactttacaaagtttgtgtgacaaatgttgaagaaagaagaaatgatctagaaaataccaaaagagaaattttaacacaactccggacacttgttttccagtgtgatcttacccttaaagctgtannnnnnnnnnnnnnnnnnnnnnnnnnnnnnnnnnnnnnnnnnnnnnnnnnnnnnnnnnnnnnnnnnnnnnnnnnnnnnnnnnnnnnnnnnnnnnnnnnnnnnnnnnnnnnnnnnnnnnnnnnnnnnnnnnnnnnnnnnnnnnnnnnnnnnnnnnnnnnnnnnnnnnnnnnnnnnnnnnnnnnnnnnnnnnnnnnnnnnnnnnnnnnnnnnnnnnnnnnnnnnnnnnnnnnnnnnnnnnnnnnnnnnnnnnnnnnnnnnnnnnnnnnnnnnnnnnnnnnnnnnnnnnnnnnnnnnnnnnnnnnnnnnnnnnnnnnnnnnnnnnnnnnnnnnnnnnnnnnnnnnnnnnnnnnnnnnnnnnnnnnnnnnnnnnnnnnnnnnnnnnnnnnnnnnnnnnnnnnnnnnnnnnnnnnnnnnnnnnnnnnnnnnnnnnnnnnnnnnnnnnnnnnnnnnnnnnnnnnnnnnnnnnnnnnnnnnnnnnnnnnnnnnnnnnnnnnnnnnnnnnnnnnnnnnnnnnnnnnnnnnnnnnnnnnnnnnnnnnnnnnnnnnnnnnnnnnnnnnnnnnnnnnnnnnnnnnnnnnnnnnnnnnnnnnnnnnnnnnnnnnnnnnnnnnnnnnnnnnnnnnnnnnnnnnnnnnnnnnnnnnnnnnnnnnnnnnnnnnnnnnnnnnnnnnnnnnnnnnnnnnnnnnnnnnnnnnnnnnnnnnnnnnnnnnnnnnnnnnnnnnnnnnnnnnnnnnnnnnnnnnnnnnnnnnnnnnnnnnnnnnnnnnnnnnnnnnnnnnnnnnnnnnnnnnnnnnnnnnnnnnnnnnnnnnnnnnnnnnnnnnnnnnnnnnnnnnnnnnnnnnnnnnnnnnnnnnnnnnnnnnnnnnnnnnnnnnnnnnnnnnnnnnnnnnnnnnnnnnnnnnnnnnnnnnnnnnnnnnnnnnnnnnnnnnnnnnnnnnnnnnnnnnnnnnnnnnnnnnnnnnnnnnnnnnnnnnnnnnnnnnnnnnnnnnnnnnnnnnnnnnnnnnnnnnnnnnnnnnnnnnnnnnnnnnnnnnnnnnnnnnnnnnnnnnnnnnnnnnnnnnnnnnnnnnnnnnnnnnnnnnnnnnnnnnnnnnnnnnnnnnnnnnnnnnnnnnnnnnnnnnnnnnnnnnnnnnnnnnnnnnnnnnnnnnnnnnnnnnnnnnnnnnnnnnnnnnnnnnnnnnnnnnnnnnnnnnggtagtagatcatgcagaagaaaacaagatgaactccaaaaacttgggggtgatatttggaccaagtctcatcaggccaaggcccacaactgctcctatcaccatctcctcccttgccgagtattcaaaccaagcacgctt

SEQ ID NO: 24781 - DNA, 909 bp, Macaca Mulatta
  misc_feature (1)...(909): n = A,T,C or G
ggagatgcctcgttattcaaaggacttaaaagccagagtcttcctattatttgacaaaacagtacaaatggaagacttttgaaattatgcttatgtgtgtgtgtgtgactttcttctgttcatctttttaggtggcatccttagctgggcctggagggcaagtggaaatagaacagaacttccttaacaataaattgaagacaatcactgcatattttggtgacctaattcgaagaccagcctctgaaacctaactatgcagcagtgtgagaaccaaagatcatggagtggtcaaaacattcagatgagacatttggcatgtcttcctttattcgctgatatattctacccatggtcttatatcactgtatgaaatggaaacttatatgactcaaatatcagtgaaatattttgagatctttgaataattcctttagaggaattatacaaaattaatacatatgagttctttgttttttggtcgttgttgttgccgttttttgagaccaggatctccctctggccacccaggcttgggagtgcagttgccactgatccccggctcaccttggaggtctcaacccttgtgagcctcaaaacaataccttcttggcctcagtctccccccactaagccttggggctcttaggggggccaatggcccccgccacgaactacttgttcgcgattttcttaaaaacaaccaaagggccttccccttcattcgctcccggccgcgcgttccaaaactgcccctcgcgtctgtcgacgccaggcccctcccccgaccttcctgcctctctcccgagttgcctggtgggcccccctcgggtccccggtgacgcatcctgggcntccgcacccctgcctatccggaataccgcnccgcttgtctcgataacgacatgc

SEQ ID NO: 24782 - DNA, 172 bp, Macaca Mulatta
aagaccctcaagatgagaataaaattggaatagatggcatacagcagttctgtgatgacctggcactcgatccagccagcattagtgtgttgattattgcatggaagttcagagcagcaacacagtgcgagttctccaaacaggagttcatggatggcatgacagaattagg

SEQ ID NO: 24783 - DNA, 1076 bp, Macaca Mulatta
  misc_feature (1)...(1076): n = A,T,C or G
aaggctcgcaggccgccatccgcaggacagctatgaggacagcacccagtccagcatcttcacctacaccaacagcaactccaccagaggnnnnnnnnnnnnnnnnnnnnnnnnnnnnnnnnnnnnnnnnnnnnnnnnnnnnnnnnnnnnnnnnnnnnnnnnnnnnnnnnnnnnnnnnnnnnnnnnnnnnnnnnnnnnnnnnnnnnnnnnnnnnnnnnnnnnnnnnnnnnnnnnnnnnnnnnnnnnnnnnnnnnnnnnnnnnnnnnnnnnnnnnnnnnnnnnnnnnnnnnnnnnnnnnnnnnnnnnnnnnnnnnnnnnnnnnnnnnnnnnnnnnnnnnnnnnnnnnnnnnnnnnnnnnnnnnnnnnnnnnnnnnnnnnnnnnnnnnnnnnnnnnnnnnnnnnnnnnnnnnnnnnnnnnnnnnnnnnnnnnnnnnnnnnnnnnnnnnnnnnnnnnnnnnnnnnnnnnnnnnnnnnnnnnnnnnnnnnnnnnnnnnnnnnnnnnnnnnnnnnnnnnnnnnnnnnnnnnnnnnnnnnnnnnnnnnnnnnnnnnnnnnnnnnnnnnnnnnnnnnnnnnnnnnnnnnnnnnnnnnnnnnnnnnnnnnnnnnnnnnnnnnnnnnnnnnnnnnnnnnnnnnnnnnnnnnnnnnnnnnnnnnnnnnnnnnnnnnnnnnnnnnnnnnnnnnnnnnnnnnnnnnnnnnnnnnnnnnnnnnnnnnnnnnnnnnnnnnnnnnnnnnnnnnnnnnnnnnnnnnnnnnnnnnnnnnnnnnnnnnnnnnnnnnnnnnnnnnnnnnnnnnnnnnnnnnnnnnnnnnnnnnnnnnnnnnnnnnnnnnnnnnnnnnnnnnnnnnnnnnnnnnnnnnnnnnnnnnnnnnnnnncaccctctgatggctgccctgccagcctactttgccaaaagtgccactatctacaaccccattatctatgtctttatgaacccgcagncagtttcgaaactgcatcttgcagctttttggaaagaaggttgacgacggctctgaactctccagcgcctccaaaacggaggtctcatctgtgtcctcggtgtcgcctgcatga

SEQ ID NO: 24784 - DNA, 295 bp, Macaca Mulatta
caaataaaggatggtggattggccgccgtgctttctgaatgaccaccatgggatttgtcgggacttggaggagggggccctggagggctgagctgtgggtccagagaagtgtttgggggacagcaatgggggcacagtctcccttgatgctcgagggctgggctgagtgaatggatggtcagaggctgtgtgtggatgggttaatcactgggcatggtctcaggataggatggtcttatctcatgagctggatgtgtttttaggctcaaatcaaagtggtcaagactagggttgc

SEQ ID NO: 24785 - DNA, 807 bp, Macaca Mulatta
  misc_feature (1)...(807): n = A,T,C or G
gggtgtaaatttaagagaaaaattgtgaggttctaattattttcctttataaagtataattagaatgtttagctgttttgtgtacccatattttcttgaagaatttacaagactgaaaaagtactaaaattgttaaactatatcttatccatattatttcataccatgtaggtgagaatttttaacttttgcatctaacaaatcatctacttaagagaaaaaaaatcttacatgtaataatacaaagctattatatcagttatttctaggtaactccctttgtctcaattatatttccaaaaatgaacatttaaaatgttatgcaaaattttgtctaagtatatttgtgtgaggatgaaattcgtaactttcatcagattttcaaaagtatttttaatgcaaataatgtagaaagagtttaaaaccactaaaatagattgatgttcttcaaactaggcaaaacaactcatatgttaaaaccattttccagattggaaacacaaatctcttaggaagttaataagtagattcgtatcattatacaaatagtattgtggattttgtaagtttttaaaataatnnnnnnnnnnnnnnnnnnnnngtcctctaatgaggtatttcaggaggaaaatagaaaatcggaagattatggcctaaacgtactcccttacccacctgtgggcatgtttgaaagttagtccaccccttaacggaatttttcaatttcctctcacccttttgaaaagtaaataaaaaaatcttttccccggccaattgggctccttttttgggcccaaaactttaatn

SEQ ID NO: 24786 - DNA, 2400 bp, Macaca Mulatta
  misc_feature (1)...(2400): n = A,T,C or G
gatatccattaccgaaacttgacatgaacttctcattggagaatagagaagagccatgggtgaaggaattacaggattctaaagaaatgaaacaattacttgattccaagataggtnnnnnnnnnnnnnnnnnnnnnnnnnnnnnnnnnnnnnnnnnnnnnnnnnnnnnnnnnnnnnnnnnnnnnnnnnnnnnnnnnnnnnnnnnnnnnnnnnnnnnnnnnnnnnnnnnnnnnnnnnnnnnnnnnnnnnnnnnnnnnnnnnnnnnnnnnnnnnnnnnnnnnnnnnnnnnnnnnnnnnnnnnnnnnnnnnnnnnnnnnnnnnnnnnnnnnnnnnnnnnnnnnnnnnnnnnnnnnnnnnnnnnnnnnnnnnnnnnnnnnnnnnnnnnnnnnnnnnnnnnnnnnnnnnnnnnnnnnnnnnnnnnnnnnnnnnnnnnnnnnnnnnnnnnnnnnnnnnnnnnnnnnnnnnnnnnnnnnnnnnnnnnnnnnnnnnnnnnnnnnnnnnnnnnnnnnnnnnnnnnnnnnnnnnnnnnnnnnnnnnnnnnnnnnnnnnnnnnnnnnnnnnnnnnnnnnnnnnnnnnnnnnnnnnnnnnnnnnnnnnnnnnnnnnnnnnnnnnnnnnnnnnnnnnnnnnnnnnnnnnnnnnnnnnnnnnnnnnnnnnnnnnnnnnnnnnnnnnnnnnnnnnnnnnnnnnnnnnnnnnnnnnnnnnnnnnnnnnnnnnnnnnnnnnnnnnnnnnnnnnnnnnnnnnnnnnnnnnnnnnnnnnnnnnnnnnnnnnnnnnnnnnnnnnnnnnnnnnnnnnnnnnnnnnnnnnnnnnnnnnnnnnnnnnnnnnnnnnnnnnnnnnnnnnnnnnnnnnnnnnnnnnnnnnnnnnnnnnnnnnnnnnnnnnnnnnnnnnnnnnnnnnnnnnnnnnnnnnnnnnnnnnnnnnnnnnnnnnnnnnnnnnnnnnnnnnnnnnnnnnnnnnnnnnnnnnnnnnnnnnnnnnnnnnnnnnnnnnnnnnnnnnnnnnnnnnnnnnnnnnnnnnnnnnnnnnnnnnnnnnnnnnnnnnnnnnnnnnnnnnnnnnnnnnnnnnnnnnnnnnnnnnnnnnnnnnnnnnnnnnnnnnnnnnnnnnnnnnnnnnnnnnnnnnnnnnnnnnnnnnnnnnnnnnnnnnnnnnnnnnnnnnnnnnnnnnnnnnnnnnnnnnnnnnnnnnnnnnnnnnnnnnnnnnnnnnnnnnnnnnnnnnnnnnnnnnnnnnnnnnnnnnnnnnnnnnnnnnnnnnnnnnaggcaactgtatcataggtgtaaacataaagcatataaattatgacaatcctnttagaggtagggtcaatatagtggataaacatgtctatcagatgtattgattatagcagtactatagttattctgctgtcattattaaagatgattatattcattcaaagctttagatgtgtcccatgtggcaagaaaggagacagtgaattttgtcaaacaataaaaatgtgtcaggaacacaaggatgaaggggatgtcatttgcctggtaagaactgggttatttctactgaaattttttatgtttaaagaaattaagattttannnnnnnnnnnnnnnnnnnnnnnnnnnnnnnnnnnnnnnnnnnnnnnnnnnnnnnnnnnnnnnnnnnnnnnnnnnnnnnnnnnnnnnnnnnnnnnnnnnnnnnnnnnnnnnnnnnnnnnnnnnnnnnnnnnnnnnnnnnnnnnnnnnnnnnnnnnnnnnnnnnnnnnnnnnnnnnnnnnnnnnnnnnnnnnnnnnnnnnnnnnnnnnnnnnnnnnnnnnnnnnnnnnnnnnnnnnnnnnnnnnnnnnnnnnnnnnnnnnnnnnnnnnnnnnnnnnnnnnnnnnnnnnnnnnnnnnnnnnnnnnnnnnnnnnnnnnnnnnnnnnnnnnnnnnnnnnnnnnnnnnnnnnnnnnnnnnnnnnnnnnnnnnnnnnnnnnnnnnnnnnnnnnnnnnnnnnnnnnnnnnnnnnnnnnnnnnnnnnnnnnnnnnnnnnnnnnnnnnnnnnnnnnnnnnnnnnnnnnnnnnnnnnnnnnnnnnnnnnnnnnnnnnnnnnnnnnnnnnnnnnnnnnnnnnnnnnnnnnnnnnnnnnnnnnnnnnnnnnnnnnnnnnnnnnnnnnnnnnnnnnnnnnnnnnnnnnnnnnnnnnnnnnnnnnnnnnnnnnnnnnnnnnnnnnnnnnnnnnnnnnnnnnnnnnnnnnnnnnnnnnnnnnnnnnnnnnnnnnnnnnnnnnnnnnnnnnnnnnnnnnnnnnnnnnnnnnnnnnnnnnnnnnnnataatttataagtggcccagtgattctcaacctctttgaattttacttataattacannnnnnnnnnnntgctacttatataaatgttctcatgtaatcatgtaacagct

SEQ ID NO: 24787 - DNA, 4980 bp, Macaca Mulatta
  misc_feature (1)...(4980): n = A,T,C or G
ggcagcctggatatctgggccataactgtagaggaaagagcgaagcatgatcagcagttccatagtttaaagccaatatctggattcattactggnnnnnnnnnnnnnnnnnnnnnnnnnnnnnnnnnnnnnnnnnnnnnnnnnnnnnnnnnnnnnnnnnnnnnnnnnnnnnnnnnnnnnnnnnnnnnnnnnnnnnnnnnnnnnnnnnnnnnnnnnnnnnnnnnnnnnnnnnnnnnnnnnnnnnnnnnnnnnnnnnnnnnnnnnnnnnnnnnnnnnnnnnnnnnnnnnnnnnnnnnnnnnnnnnnnnnnnnnnnnnngtatgggaggtatcgccagcatgccaccgcttacagctgttgctccagtgccaatgggatccattccagttgttggaatgtctccacccctagtatcttctgttcccacagcagctgtgccccccttggctaacggggctccccctgttatacaacctctgcctgcatttgctcatcctgnngccacattgccaaagagttcttcctttagtagatctggtccagggtcacaactaaacactaaattacaaaaggcacagtcatttgacgtggccannnnnnnnnnnnnnnnnnnnnnnnnnnnnnnnnnnnnnnnnnnnnnnnnnnnnnnnnnnnnnnnnnnnnnnnnnnnnnnnnnnnnnnnnnnnnnnnnnnnnnnnnnnnnnnnnnnnnnnnnnnnnnnnnnnnnnnnnnnnnnnnnnnnnnnnnnnnnnnnnnnnnnnnnnnnnnnnnnnnnnnnnnnnnnnnnnnnnnnnnnnnnnnnnnnnnnnnnnnnnnnnnnnnnnnnnnnnnnnnnnnnnnnnnnnnnnnnnnnnnnnnnnnnnnnnnnnnnnnnnnnnnnnnnnnnnnnnnnnnnnnnnnnnnnnnnnnnnnnnnnnnnnnnnnnnnnnnnnnnnnnnnnnnnnnnnnnnnnnnnnnnnnnnnnnnnnnnnnnnnnnnnnnnnnnnnnnnnnnnnnnnnnnnnnnnnnnnnntaacgtttgaagataagaagagggagaactttgaacgtggcaacctggaactggagaaacgaaggcaagctctcctggagcagcagcgcaaagagcaggagcgcctggcccagctggagcgggcagagcaggagaggaaggagcgtgagcgccaggagcaagagcgcaaaagacaactggaactggagaagcaactggaaaagcagcgggagctagaacggcagagagaggaggaaaggaggannnnnnnnnnnnnnnnnnaggctgcaaaacgggaacttgaaaggcaacgacaacttgaaaaggaacggaatcgaaggcaagaactactaaatcaaagaaaaaaggaacaagaggacatagttgtannnnnnnnnnnnnnnnnnnnnnnnnnnnnnnnnnnnnnnnnnnnnnnnnnnnnnnnnnnnnnnnnnnnnnnnnnnnnnnnnnnnnnnnnnnnnnnnnnnnnnnnnnnnnnnnnnnnnnnnnnnnnnnnnnnnnnnnnnnnnnnnnnnnnnnnnnnnnnnnnnnnnnnnnnnnnnnnnnnnnnnnnnnnnnnnnnnnnnnnnnnnnnnnnnnnnnnnnnnnnnnnnnnnnnnnnnnnnnnnnnnnnnnnnnnnnnnnnnnnnnnnnnnnnnnnnnnnnnnnnnnnnnnnnnnnnnnnnnnnnnnnnnnnnnnnnnnnnnnnnnnnnnnnnnnnnnnnnnnnnnnnnnnnnnnnnnnnnnnnnnnnnnnnnnnnnnnnnnnnnnnnnnnnnnnnnnnnnnnnnnnnnnnnnnnnnnnnnnnnnnnnnnnnnnnnnnnnnnnnnnnnnnnnnnnnnnnnnnnnnnnnnnnnnnnnnnnnnnnnnnnnnnnnnnnnnnnnnnnnnnnnnnnnnnnnnnnnnnnnnnnnnnnnnnnnnnnnnnnnnnnnnnnnnnnnnnnnnnnnnnnnnnnnnnnnnnnnnnnnnnnnnnnnnnnnnnnnnnnnnnnnnnnnnnnnnnnnnnnnnnnnnnnnnnnnnnnnnnnnnnnnnnnnnnnnnnnnnnnnnnnnnnnnnnnnnnnnnnnnnnnnnnnnnnnnnnnnnnnnnnnnnnnnnnnnnnnnnnnnnnnnnnnnnnnnnnnnnnnnnnnnnnnnnnnnnnnnnnnnnnnnnnnnnnnnnnnnnnnnnnnnnnnnnnnnnnnnnnnnnnnnnnnnnnnnnnnnnnnnnnnnnnnnnnnnnnnnnnnnnnnnnnnnnnnnnnnnnnnnnnnnnnnnnnnnnnnnnnnnnnnnnnnnnnnnnnnnnnnnnnnnnnnnnnnnnnnnnnnnnnnnnnnnnnnnnnnnnnnnnnnnnnnnnnnnnnnnnnnnnnnnnnnnnnnnnnnnnnnnnnnnnnnnnnnnnnnnnnnnnnnnnnnnnnnnnnnnnnnnnnnnnnnnnnnnnnnnnnnnnnnnnnnnnnnnnnnnnnnnnnnnnnnnnnnnnnnnnnnnnnnnnnnnnnnnnnnnnnnnnnnnnnnnnnnnnnnnnnnnnnnnnnnnnnnnnnnnnnnnnnnnnnnnnnnnnnnnnnnnnnnnnnnnnnnnnnnnnnnnnnnnnnnnnnnnnnnnnnnnnnnnnnnnnnnnnnnnnnnnnnnnnnnnnnnnnnnnnnnnnnnnnnnnnnnnnnnnnnnnnnnnnnnnnnnnnnnnnnnnnnnnnnnnnnnnnnnnnnnnnnnnnnnnnnnnnnnnnnnnnnnnnnnnnnnnnnnnnnnnnnnnnnnnnnnnnnnnnnnnnnnnnnnnnnnnnnnnnnnnnnnnnnnnnnnnnnnnnnnnnnnnnnnnnnnnnnnnnnnnnnnnnnnnnnnnnnnnnnnnnnnnnnnnnnnnnnnnnnnnnnnnnnnnnnnnnnnnnnnnnnnnnnnnnnnnnnnnnnnnnnnnnnnnnnnnnnnnnnnnnnnnnnnnnnnnnnnnnnnnnnnnnnnnnnnnnnnnnnnnnnnnnnnnnnnnnnnnnnnnnnnnnnnnnnnnnnnnnnnnnnnnnnnnnnnnnnnnnnnnnnnnnnnnnnnnnnnnnnnnnnnnnnnnnnnnnnnnnnnnnnnnnnnnnnnnnnnnnnnnnnnnnnnnnnnnnnnnnnnnnnnnnnnnnnnnnnnnnnnnnnnnnnnncggagtcttcccttctaactatgtgaggcttaaagattcagaggnnnnnnnnnnnnnnnnnnnnnnnnnnnnnnnnnnnnnnnnnnnnnnnnnnnnnnnnnnnnnnnnnnnnnnnnnnnnnnnnnnnnnnnnnnnnnnnnnnnnnnnnnnnnnnnnnnnnnnnnnnnnnnnnnnnnnnnnnnnnnnnnnnnnnnnnnnnnnnnnnnnnnnngcacgtgggaaaaagcgccagataggctggttcccagctaattatgtaaaacttctaagccctgggacgagcaaaatcactccaacagagccacctaagtcaacagcgttagcggcannnnnnnnnnnnnnnnnnnnnnnnnnnnnnnnnnnnnnnnnnnnnnnnnnnnnnnnnnnnnnnnnnnnnnnnnnnnnnnnnnnnnnnnnnnnnnnnnnnnnnnnnnnnnnnnnnnnnnnnnnnnnnnnnnnnnnnnnnnnnnnnnnnnnnnnnnnnnnnnnnnnnnnnnnnnnnnnnnnnnnnnnnnnnnnngtgttcagacttacatctcttggatatgttgaccccaactgaaagaaagcgacaaggatacatccacgagctcattgtcacagaggagaactacgtgaacgacctgcagctggtcacagagnnnnnnnnnnnnnnnnnnnnnnnnnnnnnnnnnnnnnnnnnnnnnnnnnnnnnnnnnnnnnnnnnnnnnnnnnnnnnnnnnnnnnnnnnnnnnnnnnnnnnnnnnnnnnnnnnnnnnnnnnnnnnnnnnnnnnnnnnnnnnnnnnnnnnnnnnnnnnnnnnnnnnnnnnnnnnnnnnnnnnnnnnnnnnnnnnnnnnnnnnnnnnnnnnnnnnnnnnnnnnnnnnnnnnnnnnnnnnnnnnnnnnnnnnnnnnnnnnnnnnnnnnnnnnnnnnnnnnnnnnnnnnnnnnnnnnnnnnnnnnnnnnnnnnnnnnnnnnnnnnnnnnnnnnnnnnnnnnnnnnnnnnnnnnnnnnnnnnnnnnnnnnnnnnnnnnnnnnnnnnnnnnnnnnnnnnnnnnnnnnnnnnnnnnnnnnnnnnnnnnnnnnnnnnnnnnnnnnnnnnnnnnnnnnnnnnnnnnnnnnnnnnnnnnnnnnnnnnnnnnnnnnnnnnnnnnnnnnnnnnnnnnnnnnnnnnnnnnnnnnnnnnnnnnnnnnnnnnnnnnnnnnnnnnnnnnnnnngcaacttgtgttcaattcagtgaccaactgcttggggccgcgcaaatttctgcacagtgggaagctctacaaggccaagagcaacaaggaactgtatggtttccttttcaacgacttcctcctgctgactcagatcacgaagcccttgggatcttctggcaccgacaaagtcttcagccccaaatcaaacctgcagtataaaatgtacaaaacnnnnnnnnnnnnnnnnnnnnnnnnnnnnnnnnnnnnnnnnnnnnnnnnnnnnnnnnnnnnnnnnnnnnnnnnnnnnnnnnnnnnnnnnnnnnnnnnnnnnnnnnnnnnnnnnnnnnnnnnaggactgcctgggtgcagaaaatcaaagctgcttctgaactctacatagagactgagaaaaagaagcgcgagaaggcgtacctggnnnnnnnnnnnnnnnnnnnnnnnnnnnnnnnnnnnnnnnnnnnnnnnnnnnnnnnnnnnnnnnnnnnnnnnnnnnnnnnnnnnggaaagagcaacccctactgcgaggtgaccatgggttcccagtgccacatcaccaagacgatccaggacactctgaaccccaagtggaattccaactgccagttcttcatccgagacctggagcaggaagtcctctgcatcactgtgttcgagagggaccagttctcaccagat

SEQ ID NO: 24788 - DNA, 469 bp, Macaca Mulatta
  misc_feature (1)...(469): n = A,T,C or G
cagaagaatttaaaggtgaaattgcagtcaatgcattatggcctaaaacagnnnnnnnnnnnnnnnnnnnnnnnnnnnnnnnnnnnnnnnnnnnnnnnnnnnnnnnnnnnnnnnnnnnnnnnnnnnnnnnnnnnnnnnnnnnnnnnnnnnnnnnnnnnnnnnnnnnnnnnnnnnnnnnnnnnnnnnnnnnnnnnnnnnnnnnnnnnnnnnnnnnnnnnnnnnnnnnnnnnnnnnnnnnnnnnnnnnnnnnnnnnnnnnnnnnnnnnnnnnnnnnnnnnnnnnnnnnnnnnnnnnnnnnnnnnnnnnnnnnnnnnnnngtgctgttccagaattcaaagaagagaaaccgcagccgcaaccaaaaccacgttctggagctgtggaaaaaacatttagaattgttaaggattctctcagtgatgatattgttaaagccactcaagcaatctatctgtttgaactctccggt

SEQ ID NO: 24789 - DNA, 1707 bp, Macaca Mulatta
  misc_feature (1)...(1707): n = A,T,C or G
agggatgcaggtcacaaatgtccagttgacaatgaaatactgctggaaaatcaactatttccagacaattttgcaaaacgtgagattctttctctgatggtgaagtgtccaaatgaaggttgtttgcataagatggaactgaggcatcttgaggnnnnnnnnnnnnnnnnnnnnnnnnnnnnnnnnnnnnnnnnnnnnnnnnnnnnnnnnnnnnnnnnnnnnnnnnnnnnnnnnnnnnnnnnnnnnnnnnnnnnnnnnnnnnnnnnnnnnnnnnnnnnnnnnnnnnnnnnnnnnnnnnnnnnnnnnnnnnnnnnnnnnnnnnnnnnnnnnnnnnnnnnnnnnnnnnnnnnnnnnnnnnnnnnnnnnnnnnnnnnnnnnnnnnnnnnnnnnnnnnnnnnnnnnnnnnnnnnnnnnnnnnnnnnnnnnnnnnnnnnnnnnnnnnnnnnnnnnnnnnnnnnnnnnnnnnnnnnnnnnnnnnnnnnnnnnnnnnnnnnnnnnnnnnnnnnnnnnnnnnnnnnnnnnnnnnnnnnnnnnnnnnnnnnnnnnnnnnnnnnnnnnnnnnnnnnnnnnnnnnnnnnnnnnnnnnnnnnnnnnnnnnnnnnnnnnnnnnnnnnnnnnnnnnnnnnnnnnnnnnnnnnnnnnnnnnnnnnnnnnnnnnnnnnnnnnnnnnnnnnnnnnnnnnngtatgtaagtgaggttcaaacgaaccatttcgaaccccttgaggacaaaagttgctgaaattgaagcacagcagtgcaatggaatttacatttggaagattggcaactttggaatgcatttgaaatgtcaagaagaggagaaacctgttgtgattcatagccctgggttctacacaggcaaacccgggtacaaactctgcatgcgcttgcaccttcagttaccgactgctcagcgctgtgcgaactatatatccctttttgtccacacgatgcaaggagagtatgacagccacctcccttggcccttccagggtacaatacgccttacaattcttgatcagtccgaagcacctgtaaggcaaaaccatgaagagataatggatgccaaaccagacctgcttgctttccagcgacccacaatcccacggaacccaaaaggttttggctatgtaactttcatgcatctggaagccctaagacaaagaactttcattaaggatgacacattattagtgcgctgtgaggtctccacccgctttgacatgggtagccttcggagggagggttttcagccacgaagtactgattcaggggtgtagctgccctcacttgttcaaaaacaactacctggagaaaacagtgcctttccttgccctgttctcaataacatgcacatgagccgcaggaaagatgtagtatctactagtgagtgttgttagagaggtcacttactattcctgttacaaatgatctgaggcagttttttcctgggaatccacacgttccatgctttttcagaaatggttaggtctgaagtgcctgtggcatgttgcagcagctattttgtcaattagtatacctctttgttgtgctttcttgggcttttgctctggtgtattttattgtcagaaagcccagactcaagagtactaaacttttaataataatggactttccttaaaacttagtccattttatagtattatatgtaatatattaaacgtggaaaatcactaccgccttg

SEQ ID NO: 24790 - DNA, 755 bp, Macaca Mulatta
  misc_feature (1)...(755): n = A,T,C or G
aggtaagttctcttctacgctgtatgagactggtggctgtgatatgtcacttgtgaattttgaaccagcagcaagaagagcatccaatatctggnnnnnnnnnnnnnnnnnnnnnnnnnnnnnnnnnnnnnnnnnnnnnnnnnnnnnnnnnnnnnnnnnnnnnnnnnnnnnnnnnnnnnnnnnnnnnnnnnnnnnnnnnnnnnnnnnnnnnnnnnnnnnnnnnnnnnnnnnnnnnnnnnnnnnnnnnnnnnnnnnnnnnnnnnnnnnnnnnnnnnnnnnnnnnnactttgctgtcctccatttgctctctttttctaagtcctttgataagaaaccaccctacaaggttaagaagccttgggatagagtattttaaaaagtattttggaaagtatttgtcagtgcttagagatagaaatgactgtgttatatattggaagtaaattttctcaactatacccagatacatgtttgaaaagtaaaaaccgtccctactttttgtctatagtgtattccaggaaactccataggaaagcaaacatgggaagatgattgttttattgttttctacttttaaatggtatgggaaccttgagatagcaaaatgctgcctagtgctgtgccagatacagtcaacttttgatgctttctgaggaaaagaagactggtaaactgatgaatggatgagttgaagttaaaagaaatgtagtgtagtaatttgtatagcctcaggtgagcagcttgccaaaacaaac

SEQ ID NO: 24791 - DNA, 171 bp, Macaca Mulatta
tgaggatgtctgatactgttactgtaaaagatgaaactgcaacaatgaaggatttggaggcagaagtgaaagatacaaccagagttgaaaatcttatcaaatcagaaaactatgggaagattttggtagagaagaatgaacattgtattgagaacaatatagatctgcagg

SEQ ID NO: 24792 - DNA, 273 bp, Macaca Mulatta
tcctgcctggctctgggtccccgagccccctcctctggccgagcccgactccctcctccttcccggaccatccggctcgggctccttccctggcgatggctggccgctgagccatggctcagtacggccaacccagtccgctcggcatggctgcgagagaggagctgtacagcaaagtcaccccccggaggaaccgccagcagcgccccggcaccatcaagcatggatcggcgctggacgtgctcctctccatggggttccccagagcccgcg

SEQ ID NO: 24793 - DNA, 525 bp, Macaca Mulatta
  misc_feature (1)...(525): n = A,T,C or G
gttgcgctgaaatagcagatgaagtttacatggaagtcattgtaggggaagaggaaggaacttctctccctgagattcagcttgaggactctgatgttaataaaacagttgtccctgttgtctgggctgcggcatatgngaaatactttggactcagcattagaaagcagaagtagtacagcagcacagtaccttcaaatttgtgacagcattaatacaaataaagtacttaaacaaaaagccaagaagaggagaaggggagaaaccaggcagtggcaaacagnagctgntataataagtcctgatggacagcccctcacagtgtacccttgccatatttgcacaaaaaagtttaaatccaggggaatttctaaaagacacatgaagaatcatcctgatcatttaatgagaaaaaaatatcagtgtacagattgtgactttacaactaacaagaaagtgagtttcccataacacttaaaaagccataagcttataaacaaagtcgaacaaaacccatgaatttac

SEQ ID NO: 24794 - DNA, 146 bp, Macaca Mulatta
  misc_feature (1)...(146): n = A,T,C or G
ncagatgtggacgagtgcagctccggtctgcatcagtgtgacaattccaccgtctgcttcaacaccgtgggttcgtacacctgccgctgccgcccaggctgggagcccaaacacggaatcccgaataaccaaaaggacactgtctg

SEQ ID NO: 24795 - DNA, 157 bp, Macaca Mulatta
gatctcctttttgatgaagaggaaggagcggtttccacaaggggcacctctgttcagagcattgaactggtcctcccaccccacgcaaaccatcacggaaatacattcggtggccagattatggcttggatggagacggtggctactatttctgcaa

SEQ ID NO: 24796 - DNA, 248 bp, Macaca Mulatta
  misc_feature (1)...(248): n = A,T,C or G
caggggccggagcatgggggccagcgtggagacacccacgggaaccccagggtcctgcacggtgagcttgagcctcacgaccacgcttcctgcctggagagacacgatctgcattctcagtttcccacttcggtacaagtcagacaccgccggcgggaaggagctctcgacctagccaagaagaggcaacagcnacagcagacgtccatcaacgtcttcacgaccgttaagcagggttccaggtgtga

SEQ ID NO: 24797 - DNA, 257 bp, Macaca Mulatta
ggtttggtttcagaacagaagagccaagtggaaacgaaatcagagggtgctcatgttgagaaacattgctgccgccgccctggcccgccctgcggaggtgttcttgggtggcccctataatgccactccttctctggatcctgctttgtgtgttcatctggtgccacaactaccaagaccacctgtgccacctatgccacccaggccacccatggtccctatgcaacccaggccacccatggcacctatgccacccg

SEQ ID NO: 24798 - DNA, 2324 bp, Macaca Mulatta
  misc_feature (1)...(2324): n = A,T,C or G
caaggatgacattgatcttgatgcattggctgcagaaatagaaggagctggtgctgccaaagaacaggagcctcnnnnnnnnnnnnnnnnnnnnnnnnnnnnnnnnnnnnnnnnnnnnnnnnnnnnnnnnnnnnnnnnnnnnnnnnnnnnnnnnnnnnnnnnnnnnnnnnnnnnnnnnnnnnnnnnnnnnnnnnnnnnnnnnnnnnnnnnnnnnnnnnnnnnnnnnnnnnnnnnnnnnnnnnnnnnnnnnnnnnnnnnnnnnnnnnnnnnnnnnnnnnnnnnnnnnnnnnnnnnnnnnnnnnnnnnnnnnnnnnnnnnnnnnnnnnnnnnnnnnnnnnnnnnnnnnnnnnnnnnnnnnnnnnnnnnnnnnnnnnnnnnnnnnnnnnnnnnnnnnnnnnnnnnnnnnnnnnnnnnnnnnnnnnnnnnnnnnnnnnnnnnnnnnnnnnnnnnnnnnnnnnnnnnnnnnnnnnnnnnnnnnnnnnnnnnnnnnnnnnnnnnnnnnnnnnnnnnnnnnnnnnnnnnnnnnnnnnnnnnnnnnnnnnnnnnnnnnnnnnnnnnnnnnnnnnnnnnnnnnnnnnnnnnnnnnnnnnnnnnnnnnnnnnnnnnnnnnnnnnnnnnnnnnnnnnnnnnnnnnnnnnnnnnnnnnnnnnnnnnnnnnnnnnnnnnnnnnnnnnnnnnnnnnnnnnnnnnnnnnnnnnnnnnnnnnnnnnnnnnnnnnnnnnnnnnnnnnnnnnnnnnnnnnnnnnnnnnnnnnnnnnnnnnnnnnnnnnnnnnnnnnnnnnnnnnnnnnnnnnnnnnnnnnnnnnnnnnnnnnnnnnnnnnnnnnnnnnnnnnnnnnnnnnnnnnnnnnnnnnnnnnnnnnnnnnnnnnnnnnnnnnnnnnnnnnnnnnnnnnnnnnnnnnnnnnnnnnnnnnnnnnnnnnnnnnnnnnnnnnnnnnnnnnnnnnnnnnnnnnnnnnnnnnnnnnnnnnnnnnnnnnnnnnnnnnnnnnnnnnnnnnnnnnnnnnnnnnnnnnnnnnnnnnnnnnnnnnnnnnnnnnnnnnnnnnnnnnnnnnnnnnnnnnnnnnnnnnnnnnnnnnnnnnnnnnnnnnnnnnnnnnnnnnnnnnnnnnnnnnnnnnnnnnnnnnnnnnnnnnnnnnnnnnnnnnnnnnnnnnnnnnnnnnnnnnnnnnnnnnnnnnnnnnnnnnnnnnnnnnnnnnnnnnnnnnnnnnnnnnnnnnnnnnnnnnnnnnnnnnnnnnnnnnnnnnnnnnnnnnnnnnnnnnnnnnnnnnnnnnnnnnnnnnnnnnnnnnnnnnnnnnnnnnnnnnnnnnnnnnnnnnnnnnnnnnnnnnnnnnnnnnnnnnnnnnnnnnnnnnnnnnnnnnnnnnnnnnnnnnnnnnnnnnnnnnnnnnnnnnnnnnnnnnnnnnnnnnnnnnnnnnnnnnnnnnnnnnnnnnnnnnnnnnnnnnnnnnnnnnnnnnnnnnnnnnnnnnnnnnnnnnnnnnnnnnnnnnnnnnnnnnnnnnnnnnnnnnnnnnnnnnnnnnnnnnnnnnnnnnnnnnnnnnnnnnnnnnnnnnnnnnnnnnnnnnnnnnnnnnnnnnnnnnnnnnnnnnnnnnnnnnnnnnnnnnnnnnnnnnnnnnnnnnnnnnnnnnnnnnnnnnnnnnnnnnnnnnnnnnnnnnnnnnnnnnnnnnnnnnnnnnnnnnnnnnnnnnnnnnnnnnnnnnnnnnnnnnnnnnnnnnnnnnnnnnnnnnnnnnnnnnnnnnnnnnnnnnnnnnnnnnnnnnnnnnnnnnnnnnnnnnnnnnnnnnnnnnnnnnnnnnnnnnnnnnnnnnnnnnnnnnnnnnnnnnnnnnnnnnnnnnnnnnnnnnnnnnnnnnnnnnnnnnnnnnnnnnnnnnnnnnnnnnnnnnnnnnnnnnnnnnnnnnnnnnnnnnnnnnnnnnnnnnnnnnnnnnnnnnnnnnnnnnnnnnnnnnnnnnnnnnnnnnnnnnnnnnnnnnnnnnnnnnnnnnnnnnnnnnnnnnnnnnnnnnnnnnnnnnnnnnnnnnnnnnnnnnnnnnnnnnnnnnnnnnnnnnnnnnnnnnnnnnnnnnnnnnnnnnnnnnnnnnnnnnnnnnnnnnnnnnnnnnnnnnnnnnnnnnnnnnnnnnnnnnnnnnnnnnnnnnnnnnnnnnnnnnnnnnnnnnnnnnnnnnnnnnnnnnnnnnnnnnnnnnnnnnnnnnnnnnnnnnnnnnnnnnnnnnnnnnnnnnnnnnnnagattgataggttatatgattggaaaaagagtcccgactcagatgtggctgctactttaaagaagcagaaaaagaatacaaaagatgaatttgagg

SEQ ID NO: 24799 - DNA, 580 bp, Macaca Mulatta
  misc_feature (1)...(580): n = A,T,C or G
atctggaactttcagcaatggactcactgtctactgcccccatctgtttcaaccccttccctttgctcactaatttgttcaagtttctttgacatacaccatgctcctttttcctttaggattttcgcacaccttatttctttcaccttaaaactcttactggtcaactttatccaccctctggatcccaatactgagaccttatcctcagggaatcctcacttagactcctgtaacttaggctaaatcttcatggtgttctgtttcctaggaatttctttctattctactgtttatgacaactcaagttaagaagtgtttatatttcccacctactcaacgtagttccaagattagggttagtctgtaattctgtggaccaccgtaaaccagggcctacttcagtgtctgcctcatgggaaacttccaataaatacctttactcaannnnnnnnnnnnnnncagtggctcacgcctgtattcccaggactttgggaggctgaagcaggtggattgcctgaggtcaggagtccgagaccagtctggctaacatgatgaaacactgtctctatcaaaaata

SEQ ID NO: 24800 - DNA, 626 bp, Macaca Mulatta
ccacaattggaataaatttcaagatggtaacagccccatgaagtaccgctttaattccttgctggtaatctaatagaatcagattaagaaaattaacacaattttgccatttgacatactcttcattgaatttggtttgtctaaaatagtctcacaggtaaaaaacataataatgaccaccattgtctttgatacatgtattttaattcttaagtggccaaataacagattagataaaatgagattacatgaaaaggttctaaaatgatatatttagatgcaataattaaccatatgctagaatgcccacctctaagccaattggattctttagctctctttttctttcctttgtctaccttcttcccttttttgcctctgtctttaccctttagaaactggcatgtgttagggcccagatttcaccagatacacaatcctcaggctgacataaagtttacgaggactactactataactgagagtgctgacccagcaaagaaacatttagttgatggtgcttgatatttttggtgggtgggggaaatctttttctcaccatcaaatctttgcagtaatcctctgcaagtcttagaaacacattggctctgtcagcatttgtaatt

SEQ ID NO: 24801 - DNA, 746 bp, Macaca Mulatta
aatttctttctgcgaaacggccacggagctgatgctgcattgggaaaggggggacacagctctcatttgcagggagctgacgctgtggcaggagtggggggaggacgccatctcattggcacttctctcctctgtcaccctgcaggagcagtttgagttcgcgctgacagccgtggctgaagaggtgaacgccatcctcaaggcccttccccagtgagcggcggcctcggggcctcgggggagcccccaccccacggatgtcgtcaggaatcgtgatctgactttaattgtgtgtcttctattataactgcatagtaatagggcccttagctctcccgtagtcagcgcagtttagcagttaagcagttaaaatgtgtatttttgtttaatcaaacaataataaagagagatttgtggaaaaatccagttataggtggaggagaatcagttcatcgattttcacttgcttaaaaaaaatactttttcttaaagcacccattcccgttcttagctgcaagtaatgttgcgtgaacaatgcggtagccagtacgttcaaggcagtttgcaggaagagtgtgcttgtcatctgccgcttttgggagggtgggtctgctgtgcaggaggggccggggaagccggcagcactcagtgaggccgcccggcgcacaagacacatttggcatttgtctttaagacagtttatcattgggagaagccacggggtcagaactgaacatcctgcagct

SEQ ID NO: 24802 - DNA, 297 bp, Macaca Mulatta
ggagtcgaagggggctgcagagaaggtagagaaggcattttgcaggtgaatggctggggccccaaatccaggagattttcttcagaggtgggtgggtgttcacaatatttattttttcatttggtaatgggaggggggcctggggtatttatttaggaggcagtgtggtttccttagagggtataatctccagccctctaaggctggggctggtgatcagccccaacagagaaagtgaggagtttagagttgcagctggggaagggggttgaaggaagttggaagttgggaggggtg

SEQ ID NO: 24803 - DNA, 1394 bp, Macaca Mulatta
  misc_feature (1)...(1394): n = A,T,C or G
gcattctgtgtctggctgactctgctgggagctgaaacccaggactccagggnnnnnnnnnnnnnnnnnnnnnnnnnnnnnnnnnnnnnnnnnnnnnnnnnnnnnnnnnnnnnnnnnnnnnnnnnnnnnnnnnnnnnnnnnnnnnnnnnnnnnnnnnnnnnnnnnnnnnnnnnnnnnnnnnnnnnnnnnnnnnnnnnnnnnnnnnnnnnnnnnnnnnnnnnnnnnnnnnnnnnnnnnnnnnnnnnnnnnnnnnnnnnnnnnnnnnnnnnnnnnnnnnnnnnnnnnnnnnnnnnnnnnnnnnnnnnnnnnnnnnnnnnnnnnnnnnnnnnnnnnnnnnnnnnnnnnnnnnnnnnnnnnnnnnnnnnnnnnnnnnnnnnnnnnnnnnnnnnnnnnnnnnnnnnnnnnnnnnnnnnnnnnnnnnnnnnnnnnnnnnnnnnnnnnnnnnnnnnnnnnnnnnnnnnnnnnnnnnnnnnnnnnnnnnnnnnnnnnnnnnnnnnnnnnnnnnnnnnnnnnnnnnnnnnnnnnnnnnnnnnnnnnnnnnnnnnnnnnnnnnnnnnnnnnnnnnnnnnnnnnnnnnnnnnnnnnnnnnnnnnnnnnnnnnnagatgtggacgagtgcagctccggtctgcatcagtgtgacaattccaccgtctgcttcaacaccgtgggttcgtacacctgccgctgccgcccaggctgggagcccaaacacggaatcccgaataaccaaaaggacactgtctgnnnnnnnnnnnnnnnnnnnnnnnnnnnnnnnnnnnnnnnnnnnnnnnnnnnnnnnnnnnnnnnnnnnnnnnnnnnnnnnnnnnnnnnnnnnnnnnnnnnnnnnnnnnnnnnnnnnnnnnnnnnntccagagcatcttaaaggagctgaatgagagctggaggcccccggggacctggagaccatgccccgctttcagcagcactgtgtggccactcacatgctggatggcctagaggatgtcctcagaggcctgagcaagaacctttccattgggctcttgaacttcagttatcctgcaggcacannnnnnnnnnnnnnnnnnnnnnnnnnnnnnnnnnnnnnnnnnnnnnnnnnnnnnnnnnnnnnnnnnnnnnnnnnnnnnnnnnnnnnnnnnnnnnnnnnnnnnncccaggtgctgtgtgccatcatcgccagtgccttgcattatctctacctggcggccttcacctggatgctgctggaggccctgtacctcttcctcactgcacggaacctgatggtggtcaactactcgagcatcaacagattcacgaagaagctcatgttccctgtgggctatggagtcccagctgtgacagtggccatttctgcagcctccaggcctcacctttatggaacaccttccc

SEQ ID NO: 24804 - DNA, 750 bp, Macaca Mulatta
  misc_feature (1)...(750): n = A,T,C or G
tttgctgggggagtcactgtagagtgcatctctgttcagcagtttcagggcacgtctcacacattntctgttccttattcattgttgacataggggacaggtgatccattacttgctgtagaatatccttactttcactaggaggcagattactgaaatagtattgtggtaccagttgcataaatagttcaggagagatttctgaggtaatcctgatgtagttgttctcagaaatgctgaattgatggaagaggacccactctggcatcttcttggtgattgagtaaccagataggggatgcagctgagcaacctgcttatgtgtcagcattaagtagttacctgatccatcaacatcccgagcaatctgcataaagtaaccagacagaagagctttctttatgtttagacagttttccttggagccaaaagcaggttctgcatagggaagctcaattcgcttgataatttctaagagttcagctcggataacatctgccattctgagtgctgaacagttgaggaagtaatcatgacaccacttttcaacacagtactcactggtagaattcagagttgtgtcttggtaggccttgtagatgctgatgagggtaaagtgatctccttcgggatgtaaaaatgtcttccaacaagtcaaggcagcctcttcagctccatgtggcacatgtgaaaagcaatttggagctgttaccatggcagcaattgttagcacttcatctacacagtccc

SEQ ID NO: 24805 - DNA, 915 bp, Macaca Mulatta
  misc_feature (1)...(915): n = A,T,C or G
agggaagtccctcccaagagaagatgcttcgggagacaacccccagttatcccagcagnccaggggaacattccagattttaccaacaagtctctctcatcttccaaggagaatgaggagaacatccagtgtgggagaacttcatggacatagagtgctccatgtccctgaaccccagccagcagctggccattgcagtcctgtccctcacgctgggcaccttcacggtcctggagaacctcctggtgctgtgtgtcatcctccactcccgcagcctccgctgcaggccttcctaccacttcatcggcagcctggcggtggcagacctcctggggagcgtcatttttgtctacagcttcattgacttccatgtgttccaccgcaaagatagccgcaatgtgtttctgttcaaactgggcttgaataacagcctccttcactgcctctgtgggcagcctgttcctcacggccatcgacaggtacatatccattcacaggcccctggcctataagaggatcgtcaccaggcccaaggctgtggtggcgttttgcctgatgtagaccatagccattgtgattgccgtgctgcctctcctgggctggaactgtgacaaactgcaatctgtttgctcagacattttcccacacattgatgaaacctacctgatgttctggatcagggtcaccaccgtgctgcttctgttcatcgtgtatgcgtacatgtacattctctggaaggctcacagccacgccgtccgcatgattcagagtggcacccataagagcatcatcatccacacgtctgaagatgggaaggtacaggtgacccggccagaccaagcccgcatggacattaggttagccaagaccctggtcctgatcctggtggtgtgatcatctgctggggccctctgc

SEQ ID NO: 24806 - DNA, 89 bp, Macaca Mulatta
gaaacctggagggcttatgtttccagaccgggcagctttgtacgtggtagcgattgaagacagacagtacaaggacttcaaaatccact

SEQ ID NO: 24807 - DNA, 1287 bp, Macaca Mulatta
  misc_feature (1)...(1287): n = A,T,C or G
agttatcagggaatacgaagggcagagagagcatccaggaacctagatttgattactacaaccatgaagttcctgatattgacctcagtgattgtgaattcccacatgtcattgaaatttatgactttccccaagaatttcgtactgaagaccttctacgggttttctgcagttatcnnnnnnnnnnnnnnnnnnnnnnnnnnnnnnnnnnnnnnnnnnnnnnnnnnnnnnnnnnnnnnnnnnnnnnnnnnnnnnnnnnnnnnnnnnnnnnnnnnnnnnnnnnnnnnnnnnnnnnnnnnnnnnnnnnnnnnnnnnnnnnnnnnnnnnnnnnnnnnnnnnnnnnnnnnnnnnnnnnnnnnnnnnnnnnnnnnnnnnnnnnnnnnnnnnnnnnnnnnnnnnnnnnnnnnnnnnnnnnnnnnnnnnnnnnnnnnnnnnnnnnnnnnnnnnnnnnnnnnnnnnnnnnnnnnnnnnnnnnnnnnnnnnnnnnnnnnnnnnnnnnnnnnnnnnnnnnnnnnnnnnnnnnnnnnnnnnnnnnnnnnnnnnnnnnnnnnnnnnnnnnnnnnnnnnnnnnnnnnnnnnnnnnnnnnnnnnnnnnnnnnnnnnnnnnnnnnnnnnnnnnnnnnnnnnnnnnnnnnnnnnnnnnnnnnnnnnnnnnnnnnnnnnnnnnnnnnnnnnnnnnnnnnnnnnnnnnnnnnnnnnnnnnnnnnnnnnnnnnnnnnnnnnnnnnnnnnnnnnnnnnnnnnnnnnnnnnnnnnnnnnnnnnnnnnnnnnnnnnnnnnnnnnnnnnnnnnnnnnnnnnnnnnnnnnnnnnnnnnnnnnnnnnnnnnnnnnnnnnnnnnnnnnnnnnnnnnnnnnnnnnnnnnnnnnnnnnnnnnnnnnnnnnnnnnnnnnnnnnnnnnnnnnnnnnnnnnnnnnnnnnnnnnnnnnnnnnnnnnnnnnnnnnnnnnnnnnnnnnnnnnnnnnnnnnnnnnnnnnngaggcagagtagggggtgatagagagtggttagtacaaagagacagaacaatgtctggtttacttggcctacacagaatctacactgctggttccagaactccaaagttggtgaactacaggagatgtgggtagttagactccaaagtttatactgagctcagtgcctgggaccgttccagctgtactgcagccaggggggatgccagcttcattcctcagagtaaaccaaccttgggagctgtgtgccagttccggtgtaagcagtaataccatgttgtaagagcggacattaaagcccattttatgaca

SEQ ID NO: 24808 - DNA, 2786 bp, Macaca Mulatta
  misc_feature (1)...(2786): n = A,T,C or G
cagtgaccaggagttaaactttgaggtgtgcccgtgatgttggaccaccaggacttagaagccgaagtccaccccttgaaaaatgaagaaagaaaatcgcaggaaaatctgggaaacccatcgaaaaatgaggataagttgaaaagcacacctccacagtcccggctctcccgatgccgaacggtggcgttttttctttcattgtttctctgcctttttgtggtgtttgtcatctcattcgtcatcccgtgtccagaccggccagcgtcacagcgaatgtggaggatcgactacaatgccgctgnnnnnnnnnnnnnnnnnnnnnnnnnnnnnnnnnnnnnnnnnnnnnnnnnnnnnnnnnnnnnnnnnnnnnnnncaccaacagcagcaacaatttcaaccgatcctgtgtggatgaaggnaggcttttcctctccctgcgcctttgccgctgctgtgtcgggggccaacggcagcacgctctgggagagacctgtggcccaagacgtggccctggtggagtgtgctgtgccccagccaagaggcagtgaggcaccttctgcctgcatccttgtgggcagacccggttctttcattgcagtcgactcgttcacaggnnnnnnnnnnnnnnnnnnnnnnnnnnnnnnnnnnnnnnnnnnnnnnnnnnnnnnnnnnnnnnnnnnnnnnnnnnnnnnnnnnnnnnnnnnnnnnnnnnnnnnnnnnnnnnnnnnnnnnnnnnnnnnnnggttagtggccacctctactcaggcagcaccgggcaccagattggcctcagaggcggccttggtgtggacggagaaagtggcttcctccttcacgtcaccaggacgggtgcccactacatcctctttccctgcgnnnnnnnnnnnnnnnnnnnnnnnnnnnnnnnnnnnnnnnnnnnnnnnnnnnnnnnnnnnnnnnnnnnnnnnnnnnnnnnnnnnnnnnnnnnnnnnnnnnnnnnnnnnnnnnnnnnnnnnnnnnnnnnnnnnnnnnnnnnnnnnnnnnnnnnnnnnnnnnnnnnnnnnnnnnnnnnnnnnnnnnnnnnnnnnnnnnnnnnnnnnnnnnnnnnnnnnnnnnnnnnnnnnnnnnnnnnnnnnnnnnnnnnnnnnnnnnnnnnnnnnnnnnnnnnnnnnnnnnnnnnnnnnnnnnnnnnnnnnnnnnnnnnnnnnnnnnnnnnnnnnnnnnnnnnnnnnnnnnnnnnncagatcctgttcctggaccttggcactggagctgtcctgtgtagcctagccctcccgagcctccctgggggtccactgtccgccagcctgccgaccgcagaccaccgctcagccttcttcttctggggcctccacgagctgggcagcaccagcgagacggnnccggggaggcccggcatagcctgtatatgttccaccctaccctgccacgtgtgctgctggagctggccaatgtctctacccacattgtcgccttnnnnnnntcctgtttgagccaagccgccatgctgcctacatcctcctgacaggcccagcagactcagaggcacccggcctggtctctgtgatcaagcacaaggtgcgggacctcgtcccaagcagcagggtggtccacctgggtgagggtgagccagacagtgatcaggccatcagggaccggttctcccggctacggtaccggagggaggcgtagaggtacgcccgccagagcctgtgggagagactccgcctgctgacactanacgtcctgggaagtgggccccttcctgggtctccgcactgactcccccactcttgaccctggtgatggtcgccnnnnnnnnnnnnnnnnnnnnnnnnnnnnnnnnnnnnnnnnnnnnnnnnnnnnnnnnnnnnnnnnnnnnnnnnnnnnnnnnnnnnnnnnnnnnnnnnnnnnnnnnnnnnnnnnnnnnnnnnnnnnnnnnnnnnnnnnnnnnnnnnnnnnnnnnnnnnnnnnnnnnnnnnnnnnnnnnnnnnnnnnnnnnnnnnnnnnnnnnnnnnnnnnnnnnnnnnnnnnnnnnnnnnnnnnnnnnnnnnnnnnnnnnnnnnnnnnnnnnnnnnnnnnnnnnnnnnnnnnnnnnnnnnnnnnnnnnnnnnnnnnnnnnnnnnnnnnnnnnnnnnnnnnnnnnnnnnnnnnnnnnnnnnnnnnnnnnnnnnnnnnnnnnnnnnnnnnnnnnnnnnnnnnnnnnnnnnnnnnnnnnnnnnnnnnnnnnnnnnnnnnnnnnnnnnnnnnnnnnnnnnnnnnnnnnnnnnnnnnnnnnnnnnnnnnnnnnnnnnnnnnnnnnnnnnnnnnnnnnnnnnnnnnnnnnnnnnnnncccccagcaggatgggtggggcctgctctggagctgagcccgaggctgctcacaggtgtccttagtggagttgcagccgtgtgctggctgcacgtgccgtgaatatcccgagggactggctgtgggatgcgtgtttgggtcaggctgtgccctctcagtaaacactggagctgctccatccctgaagaggccccgtgccccaggcatggcaggcacctcgcctctccctttccggtgctcacacgcccgccgtgtcacctgatgcaggtctcacctctgtgccttgctgctcctgaggcccaagggcagccgtggggctctgtgctgctcggaccgcccaggccacagagcctgagcttcgtagccaaagcagcctgatgacccacccaccaaggaaaaaagcagaataaacatttttgcctgaaaaaccccggtggtcaggctgagcct

SEQ ID NO: 24809 - DNA, 782 bp, Macaca Mulatta
  misc_feature (1)...(782): n = A,T,C or G
gggggactcctctaaagatggtgcagacgcttcctgggcagtcccagctccccctgcccaccaggacccacccttggctgccgtccagttggtacccaagcacctgaagcctcaaagctggattcgcccatagcatccctcctctcctgcgtccacttggccgtctcctccccaccgatcgctgttccccacatctggggcacctttgggttggaaaaccaccccacactgggaatagccaccttgctcttgtggaatccatccgtccattcacccatccgtccatccatccatgtccccattgaccgcccggcaccactagctggctgggtgcacccaccatcaacctggttgacctgtcatggcagcctgtgccctgcctccacccccatcctacactcccccagggtgtgcagggctgtgcagactggggtgctaggcatctcctccccacctggggtgtccccacatgcagtactgtatcccccccatccctccctcggtccactgaacttcagagcagttcccactcctgccccatctttttgtgtctcgctgtgatagatcaatnnnnnnnnnnnnnnnnnncctggatatttggggattatttttgattgttgatgttctcttttggttttatttttgtgggttcattgnnnnnnnnnnnnnnnnnnnnnnnnnnatttgggggaagctgtatccccccagtagaaaaaaatcattttaatcaactctggatataaactcttggaatgaaaaacacannnnnnnnnnnnnnnnnn

SEQ ID NO: 24810 - DNA, 175 bp, Macaca Mulatta
caaggggatcgggatgacctgctgatggagattccagcttgccaggggatttagggtttatcctggttttgtttgcttcttggttaccaaattctattttctgtacaattagtcagactaaagttttcactgtgtttgtttggcaaaacaaattaaacaaaaagtaaggttttta

SEQ ID NO: 24811 - DNA, 516 bp, Macaca Mulatta
atttactcattgttagcaaaatcaagatgtgactgaagatcagaggctcagttattaacctatgttgtagcagtgatgtcagtccattgattgtctttagagagttaatgttacaaaaaaagaattcttaataatcagacaaacatgatctgctgaggacacatgcgcttttgtagaatttaacatctggtgtttttctgaaaaaatatatatacatatattgctttatttgaaacaaattaaaatatgctgcatttgacacctggctagtttcttttattgatacccacctagttattgaatgtactgtttagtgctttcaaaaaaaaactttagagactagaggttgtggcgcaaagctctgtataataaatactgtttctcttgagacaagtactttttcaggaaaaaaaacaaaatatatatatgccctttcaattagattacacacaaatagatggatatgcaccctgattgtcttagacacaccatgtggcagttgggcagttggaaacg

SEQ ID NO: 24812 - DNA, 298 bp, Macaca Mulatta
  misc_feature (1)...(298): n = A,T,C or G
tgaatgagttttataaaaaaagtggcaatttctaccagaacactgtgggtgatctgctaaagttcatccggaatttgggagaacacattgatgaagaaaagcataaaaagngatgaaattaaaaattggagacccttcccggtattttcagaagacatttccagatctggtgatctatgtctatacaaaactacagaacacagaatatagaaagcatttcccccaaacccacagttcaaacaagcctcagtgtgatggagctggtgggaccagtaggttggccagccctgggtgctga

SEQ ID NO: 24813 - DNA, 1538 bp, Macaca Mulatta
  misc_feature (1)...(1538): n = A,T,C or G
gcctcccagcatggtgctcaaggccttcttccccacgtgctgcgtctcggtggacagcggcctgctggtgggaaggtgggttccggagcacagcagcgccgtggtcctggcggtcctgcactttcccttcatccccatccaggtcaagcagctcctggctcaagtgcggcaggccagccaggtgggcgtggccgtgctgggtacctggtgccactgccagcaggagcccgaggagagcctgggccgcttcctggagggcctgggtgccgtcttcccccatgagccctggctgcagctgtgccgggagagaggcggcacgttctggagctgcgaggtcacccaccggcaagcgcccgctgcccccagtgcccctggtgaggaccaggtcatgctcatcttctatgaccagcgccaggtgctgctgtcacagctacacccgcccaccgtcctgcccgaccgccaggctggagccacccctgccagcacggagggcctggctgtggtctttgacacagtggcacgcagtgaggtcctcttccgcagcgaccgcttcgatgagggccccgtgcggctgagccactggcagtcggagggcgtggaggccagcatcctcgtggagctggccaggcgagcctcgggacccgtctgtctgctgctggccagcctgctgtcactggtctcagcnnnnnnnnnnnnnnnnnnnnnnnnnnnnnnnnnnnnnnnnnnnnnnnnnnnnnnnnnnnnnnnnnnnnnnnnnnnnnnnnnnnnnnnnnnnnnnnnnnnnnnnnnnnnnnnnnnnnnnnnnnnnnnnnnnnnnnnnnnnnnnnnnaggaaggccaacacagtggcctccgtgctgctggacgtggccctgggcctcacgctactgtcctggctccacgggagaagccgcattgggcatctggccgacgccctcgttcctgtggctgannnnnnnnnnnnnnnnnnnnnnnnnnnnnnnnnnnnnnnnnnnnnnnnnnnnnnnnnnnnnnnnnnnnnnnnnnnnnnnnnnnnnnnnnnnnnnnnnnnnnnnnnnnnnnnnnnnnnnnnnnnnnnngctacatccacctcatgtcccccttcgtcgagcacatcctgtggcacgtgggcctctcggcctgcctgggcctcacggtggccctgtccctgctctcggatatcatcgccctcctcaccttccacatctactgcttctacgtctatggcgccagnnnnnnnnnnnnnnnnnnnnnnnnnnnnnnnnnnnnnnnnnnnnnnnnnnnnnnnnnnnnnnnnnnnnnnnnnnnnnnnnnnnnnnnnnnnnnnnnnnnnnnnnnnnnnnnnnnnnnnnnnnnnnnnnnnnnnnnnnnnnnnnnnnnnnnnnnnnnnnnnnnnnnnnnnnnnnnnnnnnnnnnnnnnnnnnctccggctcctggtggtcgctgtgcagggcctgatccatctgctcgtggacctcatcaactccctgccgctgtactcactgggtcttcggctctgccggccctacaggctggcgg

SEQ ID NO: 24814 - DNA, 441 bp, Macaca Mulatta
  misc_feature (1)...(441): n = A,T,C or G
gggacttcgcggccttgctgcaggcggggctttccgtgcgccaagcgctggtgctgaacctggcctctgcgctcacggccttcgcgggtctctacgtggcactcgcggttggagtcggcgaggagagcgaggtctggatcctggcagtggccaccggcctgttcctctacgtggcactctgcgacatgngctcccggccatcttgaaagtacgggacccacggccctggctcctctttctgctgcacaacgtgggcctgctgggcggctggaccgtcctgctgctgctgtccttgtacgaggatgatatcaccctctgataccctgccctagtctcccacctttgacccaagatcccacaccccacaaacctacagcccagaaaccagaagcccctatagaggccccagtcctaactccaataaagacactcttgtccttg

SEQ ID NO: 24815 - DNA, 241 bp, Macaca Mulatta
ggggccatggcttggcactgggggcttgaagactggtttctagcactactggtcatggccatgtcctagaagggtccagaagattattttacgttgagtccatttttaatgttctgatcacctgacagggcacccaaaacccccaactcccaataaaagccgtgacgttcggacaaaccgcgtattgtgaaccttctggccccaaagccccagtccggccagggtgggagtgtctcctcct

SEQ ID NO: 24816 - DNA, 302 bp, Macaca Mulatta
atggctcgtggtcccaagaagcatcagaagcaggtagcagctccaaagcttggatgctgaataaattgagcagtgtgtttgctcctcgtccatcctccagtccccacaagttgagagagtgtctccccctcatcattttcctaaggaacagacttaagtatgccctgacaggcaatgaagtaaagaagatttgcatgcagcggttcatgaagatcgacggcagggtttgtaccgatataacctaccctgctggattcatggatatcagcaccattgacaagaggggagagaatttctgtctg

SEQ ID NO: 24817 - DNA, 865 bp, Macaca Mulatta
ggggacaactcggtggtggccactgctcagaccagacttcgctcgttttcgtgcgcctcgctccgcttttcctccgcaaccatgtctgacaaacccgatatggctgagatcgagaaattcgataagtcgaaactgaagaagacagagacgcaagagaaaaatccactgccttccaaagaaacgattgaacaggagaagcaagcaggcgaatcgtaatgaggcgtgcgccgccaatatgcactgtacattccacaagcattgccttcttattttacttcttttagctgtttaactttgtaagatgcaaagaggttggatcaagtttaaatgactgtgctgcccctttcacatcaaagaactactgacaacgaaggccgcgcctgcctttcccatctgtctatctggctggcagggaaggaaagaacttgcatgttggtgaacgaagaagtggggtggaagaagtggggggtgggacgacgtcgcaatccccaagtccaacgagcctggctccaggcggcccgcacggctgcactgcagtttcaacccagcgcggctttattctttgcgtcaaaggatcttcattccccgcaaggtcacttctctgtcacgtcccagtaaaacggctccgcacccccgcaccccgcctacctgaatcacggactgtgcctcttcgtgccttcttccttcctctcctaaaaactgttccatccccctttccgtggtggcccggccgcgttccggctatgccttgttcggacacccgtgccacattccgctgtcccccttccccccgtcctccgcggctctaacccctctgggcgcccggccccccgcggtgccgttgagcagcccactccccccttgt

SEQ ID NO: 24818 - DNA, 1246 bp, Macaca Mulatta
  misc_feature (1)...(1246): n = A,T,C or G
aggatgaggtgctactgatccaggaggccaagagggagtgccgggggtcgtggtacctgcctgcggggagaatggagccgggggagaccatcgtggaggcgctgcagcgggaggtgaaggaggaggcggggctgcactgtgagcccgagacactgctgtccgtggaggagcggggcccctcctgggtccgcttcgtgttcctcgctcgccccacaggtncaggtggaattctcaagacttccaaggaggccgatgnnnnnnnnnnnnnnnnnnnnnnnnnnnnnnnnnnnnnnnnnnnnnnnnnnnnnnnnnnnnnnnnnnnnnnnnnnnnnnnnnnnnnnnnnnnnnnnnnnnnnnnnnnnnnnnnnnnnnnnnnnnnnnnnnnnnnnnnnnnnnnnnnnnnnnnnnnnnnnnnnnnnnnnnnnnnnnnnnnnnnnnnnnnnnnnnnnnnnnnnnnnnnnnnnnnnnnnnnnnnnnnnnnnnnnnnnnnnnnnnnnnnnnnnnnnnnnnnnnnnnnnnncagaggggtggcatgaagatggccatcctgcggctcgttgcaggagtgtctgaccctgcaccacttggtggtggagatcaaggggttgcttggactgcagcacctgggccgagatcacagtgatggtatctgtctgaatgtgctggtgactgtggcttttcggagcccagggatccaggatgaacccccaaagattcggggtgagaacttcttttggtggaaggtgactgaggaagacctgcaaagccagctcctcaagcggcttcagggatcctctgttgtcccagtgaacagatagggaggtggaggaggtgacaaggagctaggcagccatgctccctccagtgcagacatgtctctctctgagggaggcaagaggctggcgatcagggatcttgttgcattgggagcaggggcggctctcctggttcccgggagagatgctttgaggagcattcctctacattgcacaagggacagtgcctttaaccaagcaaggagtccaaagctcaggacctcacaaccctgagggcacactgacacctctccccagggggatggggagctttctgcaccaccagtggcatctcctcctcatgctctgtgccctccttgggaaaggcctgcatcctgatccttccaggcccttggagcctggaggggcactggggaaggtgtcctgagggaggagccccttgctgagtaaagaggtgttacttaccttgc

SEQ ID NO: 24819 - DNA, 432 bp, Macaca Mulatta
  misc_feature (1)...(432): n = A,T,C or G
agggattcctgaacctaaagtggtcacgctttgcccgagtgattctgactcgctctattgccatcatccccactctgcttgttgctgtcttccaagatgtagagcatctaacagggacgaatgacttcctgaatgttctacagagcttacannnnnnnnnnnnnnnnnnnnnnnnnnnnnnnnnnnnnnnnnnnnnnnnnnnnnnnnnnnnnnnnnnnnnnnnnnnnnnnnnnnnnnnnnnnnnnnnnnnnnnnnnnnnnnnnnnnnnnnnnnnnnnnnnnnnnnnnnnnnnnnnnnnnnnnnnnnnnnnnnnnnnnnnnnnnnnnnnnnnnnnnnnnnnnnnnnnnnnnnnnnnnnnnnnnnnnnnnnnnnnnnnnnggttggcaatgtttgattgcactgggcatgtccttcctggactgtgggcatacg

SEQ ID NO: 24820 - DNA, 708 bp, Macaca Mulatta
cgctcgctctatggggacctggacagtgcgctgtcagccgaggagctggcggatgccccccactcgcgggagaccgagctgaaggtgcacctgaagctggtggaggaggaagccaatctgctgagccgccgcattgtcgagctggaggtggagaaccgaggcctgcgggctgagatggacgacatgaaggatcacggaggtggctgtgggggtcctgaggcacgcctggccttctccgcgctgggtggcagcgaatgcggggagagcttggcagagctgcggcgacacctgcagttcgtggaagaggaggctgagctgctgcggcgctcttctgccgagcttgaggaccagaacaagctgctgctgaacgagctggccaagttccgctcggagcacgagctggacgtggcgctgtcggaagacagttgctccgtgctcagcgaaccttcgcaggaggagctggcggccgccaagctgcagatcggcgagctcagcggcaaggtcaagaagctgcagtacgagaaccgcgtgctcctctccaacctccagcgctgcgacctcgcctcctgccagagtacgcggcccatgctggagacggacgccgaggccggggactctgcccagtgtgagcctgctcccctgggcgagacacacgagtcccatgcggcccgcctctgcagagccagggaggctgaggcgctgcctggg

SEQ ID NO: 24821 - DNA, 759 bp, Macaca Mulatta
gggagttatcagtgtaatatgatgcattttaagatggagtccctctctcctacttccctcactccctttctcctttgcttatttttctttccttcccttcgtcttgtctccccccttcctccctctttgtttccttccttccttatttcctttagtttccttccttacccgatttgaatggtgggaatcaatgctgtttcactcaaaagtgttgcatgcaaacacttctctttattctgcatttattgtgatttttggaaacaagtatcaaccttcacagttgggtgaacaagtgttgtcctacagatgtccaatttatttgcatttttaaacattagcctatgatagtaatttaatgtagaatgaagatattaaaaacagaggcaaattatttgaagctctctaatttgtggtacgatattgcttattgtgactttggcatgtatttttgctagcaaaatgctgtaagatttataccattcattgatcttttttgctatatttgtatacagtacagtaagcacagttggcactgtacatctaaaaatattacagtagaatctgagtgtaatatgtgtaaccaaaatgagaaagaatacaagaaatgtttctggagctaggtatgtgtctcacagttttgtagaatcttacagcatctttgataaacttctcagtgaaaatgttggctaggcaagttcagttaaaatatagtagaaatgtttatccctggttaatctctaaattatacattttaaattg

SEQ ID NO: 24822 - DNA, 596 bp, Macaca Mulatta
  misc_feature (1)...(596): n = A,T,C or G
agctgtggaatcagcaatgtttttggttggcaacaaacgagatctttgtcatgtgcgagaggttggctggttagaagggcaaaagctggcactggataaccgatgccaattctgtgaactgtctgcagcagagcagtctctggaagtggaaatgatgtttatcagaattatcaaggacatcctgataaacttcaaactcaaagaaaagagacgacccagtggatctaaatcaatggccaaattgatcaataatgtatttggaaagagaaggaaatctgtttagtagacannnnnnnnnnnnnnnnnnnnnnnnnnnnnnnnnnnnnnnnnnnnnnnnnnnnnnnnnnnnnnnnnnnnnnnnnnnnnnnnnnnnnnnnnnnnnnnnnnnnnnnnnnnnnnnnnnnnnnnnnnatgaaccacagctatgttttcaaacatgtagtttgcctttttgtttgttgtatcctgttcactctccttcacacagaacctttcatttattgtacaacattgcactcaccctaacctactggtggacagctatccagtttgccttgacaaatatactctgcttatgtgaatttattaaacgacca

SEQ ID NO: 24823 - DNA, 1506 bp, Macaca Mulatta
  misc_feature (1)...(1506): n = A,T,C or G
agaatgaagcgacttccggtggctgtgggctcctgcacacctcccgaaagnagtacctgaagttaaagaacttcaaggaagagatccgtgcgcaccgcgacctagatggcttcctggcacaggccagcatcgtcctgaacgagacggccacctccctggataacgtgctgcggtccatgcttcaccgctttgcccaggaccctgacaacaccgagccagactgcaacctagacctgcttatggccatgctcttcaccgatgccggcgcacccatgcagggtaaagnagtccacctgctgtcagataccatccaagnnnnnnnnnnnnnnnnnnnnnnnnnnnnnnnnnnnnnnnnnnnnnnnnnnnnnnnnnnnnnnnnnnnnnnnnnnnnnnnnnnnnnnnnnnnnnnnnnnnnnnnnnnnnnnnnnnnnnnnnnnnnnnnnnnnnnnnnnnnnnnnnnnnnnnnnnnnnnnnnnnnnnnnnnnnnnnnnnnngaaaagcactaagactgccatggaggtggcgcgcacatttgccaccatgttctcggatatcgccttccgccagaagctcctggagacccgcacagaggaggaattcaaggaggccttggtgcatcagagacagctgctcaccatggtgagccacggtccagtggcgctgagaatgaaggaacacagcacagtctccttccctgcccacagacacccagannnnnnnnnnnnnnnnnnnnnnnnnnnnnnnnnnnnnnnnnnnnnnnnnnnnnnnnnnnnnnnnnnnnnnnnnnnnnnnnnnnnnnnnnnnnnnnnnnnnnnnnnnnnnnnnnnnnnnnnnnnnnnnnnnnnnnnnnnnnnnnnnnnnnnnnnnnnnnnnnnnnnnnnnnnnnnnnnnnnnnnnnnnnnnnnnnnnnnnnnnnnnnnnnnnnnnnnnnnnnnnnnnnnnnnnnnnnnnnnnnnnnnnnnnnnnnnnnnnnnnnnnnnnnnnnnnnnnnnnnnnnnnnnnnnnnnnnnnnnnnnnnnnnnnnnnnnnnnnnnnnnnnnnnnnnnnnnnnnnnnnnnnnnnnnnnnnnnnnnnnnnnnnnnnnnnnnnnnnnnnnnnnnnnnnnnnnnnnnnnnnnnnnnnnnnnnnnnnnnnnnnnnnnnnnnnnnnnnnnnnnnnnnnnnnnnnnnnnnnnnnnnnnnnnnnnnnnnnnnnnnnnnnnnnnnnnnnnnnnnnnnnnnnnnnnnnnnnnnnnnnnnnnnnnnnnnnnnnnnntcttctggaagtactactatgggcatcacttggacgactaccagacaaaaaggacttcatccctggtcagcctgtcaggcctcggtgccagcctcaacgccagcctccacactgccctcaacgccagcttccggaccagccccacggagctgcccttggccacgcactcaggccaggcgaccgctgtgctcagcctcctcatcatgctgggcacactctggctgggctacaccctctaccaattcaagaaga

SEQ ID NO: 24824 - DNA, 783 bp, Macaca Mulatta
  misc_feature (1)...(783): n = A,T,C or G
gggggcttccgccggggaggtctcctatccgcggtcatgggtcgcttcaagtttgtcgatattggtatcaacttgactgaccctatgttcagaggaatttataggggggttcaaaagcatcaagatgacttacaggatgtaatagggagagctgtcgagattggtgttaaaaagtttatgattacaggtggaaatctacaagacagtaaagatgcactgcatttggcacaaacaaatgatatgtttttcagtacagttggatgtcatcctacaagatgtggtgaatttgaaaagaataaccctgatctttacttaaaggagttgctaaatcttgctgaaaacaataaagagaaagttgtggcaataggagaatgtggacttgattttgaccgactacagttttgtcccaaagatactcaactcaaatattttgaaaaacaatttgaactgtcagaacaaacaaaattaccaatgtttcttcattgtcgaaactcacatgctgaatttttggacataatgaaaagaaatagagatcgctgtgtagggggagtggtgcattcatttgatggtaccaaggaaagcagcagcctgctttgattgatttgggatctttatatanggtttaatgggttgttccactggaaacctgaaagctaatttgggaaagtttttgaaagttcaatttccctagtggaaaaaaatttaatggatttgaagaccaggatgcaaccccttggggtggttgggaggtccaaaaaaggtaacaacagtgccctgggaaaa

SEQ ID NO: 24825 - DNA, 924 bp, Macaca Mulatta
  misc_feature (1)...(924): n = A,T,C or G
gtcctggtgtggctgtccgggaagacacctaccctgtgggcactcaggatgtgcccagcctggtcccagctcagggaagacctcagggttcctggagattcctggagtggaactcgatgccccggctcccgacggacctggatgtagggggcccttggttcccccattatgatttcgaacagagctgttgggtccgtgnnntatcccaggaagaccagctggccacctgctggcaggcggaacactnnnnnnnnnnnnnnnnnnnnnnnnnnnnnnnnnnnnnnnnnnnnnnnnnnnnnnnnnnnnnnnnnnnnnnnnnnnnnnnnnnnnnnnnnnnnnnnnnnnnnnnnnnnnnnnnnnnnnnnnnnnnnnnnnnnnnnnnnnnnnnnnnnnnnnnnnnnnnnnnnnnnnnnnnnnnnnnnnnnnnnnnnnnnnnnnnnnnnnnnnnnnnnnnnnnnnnnnnnnnnnnnnnnnnnnnnnnnnnnnnnnnnnnnnnnnnnnnnnnnnnnnnnnnnnnnnnnnnnnnnnnnnnnnnnnnnnnnnnnnnnnnnnnnnnnnnnnnnnnnnnnnnnnnnnnnnnnnnnnnnnnnnnnnnnnnnnnnnnnnnnnnnnnnnnnnnnnnnnnnnnnnnnnnnnnnnnnnnnnnnnnnnnnnnnnnnnnnnnnnnnnnnnnnnnnnnnnnnnnnnnnnnnnnnnnnnnnnnnnnnnnnnnnnnnnnnnnnnnnnnnnnnnnnnnnnnnnnnnnnnnnnnnnnnnnnnnnnnnnnnnnnnnnnnnnnnnnnnnnnnnnnnnnnnnnnnnnnnnnnnnnnnnnnnatctcaagtcaaatgcaagacatgtgggcatataagtgtccgatttgaccctttcaattttttgtctttgccactaccaatggacagttatatgcacttagaaataaca

SEQ ID NO: 24826 - DNA, 417 bp, Macaca Mulatta
  misc_feature (1)...(417): n = A,T,C or G
cttttaaatgttgtgaccatttaccagtgtaatataaaaaatttaggctcttcacaaatataaagtaaaataataatgcnngtagagtggtagaataaatctccatgctccnggcaaagattatttgcatctggataccagcaatgcaaaatggtatgagatttctaaggattgatcacattgggatgggagatcaagcaaagaaagctttgtagaggaggggaaatggatccacaggggatatacagggggatggattttcaagttggattgattctaagttgagatctttgcagagaaggtgtggtgaaagaggttaggattttgtggtttcctgacataaagtagttaaatgatgtatcttggagctaacctgtataaggaaagaattaagtcaggagacgactaaaaattgag

SEQ ID NO: 24827 - DNA, 466 bp, Macaca Mulatta
  misc_feature (1)...(466): n = A,T,C or G
caggaacctctgttttatgaggcccccccttttgtggattggagagagaaaggctacgtgactcctgtnnnnnnnnnnnnnnnnnnnnnnnnnnnnnnnnnnnnnnnnnnnnnnnnnnnnnnnnnnnnnnnnnnnnnnnnnnnnnnnnnnnnnnnnnnnnnnnnnnnnnnnnnnnnnnnnnnnnnnnnnnnnnnnnnnnnnnnnnnnnnnnnnnnnnnnnnnnnnnnnnnnnnnnnnnnnnnnnnnnnnnnnnnnnnnnnnnnnnnnnnnnnnnnnnnnnnnnnnnnnnnnnnnnnnnnnnnngaagaatcctgtaagtacaatcccgagtattctgttgctaatgacaccggctttgtggacatccctaagcaggagaaggccctgatgaaggcagttgcaactgtggggcccatttctgttgctattgatgcaggtcatgagtccttcatgttctataaagaag

SEQ ID NO: 24828 - DNA, 145 bp, Macaca Mulatta
agaaacatgattcccgtgacagaattccggcagttctctgagcagcagcctgccttccgagtgctgaagccatggtgggatgtgtttaccgattacctctcggtagccatgctcatgatcggcgtgtttggatgtactttacagg

SEQ ID NO: 24829 - DNA, 501 bp, Macaca Mulatta
tcaccccaagtcttccagctggtggatctgggcccagcgaagactgttctcctcctggggtcaccaccttcccaggcctcccgccagactgcctgggtcctggcgcctggcggtcacctggtgcctactgtccgacaggacgccctgatccttgtgcaacccgccctgtgtgtcctccctagactgagttctggcagctccccaaggtgcctggggtaccctctagattcagggatgtttgctctccacttttcaagtgggtcttgggtacgagaattccctcacctctctctgctgtaaagtgattttgtttgcaggtaagaaaacaatagatgactcaccacacctctacgactggggagatcaggcccagccccataaaggagaatctgcgctggtcctcagggcgtgttaaagagatcttgggcctcgtgtagctcaccctggtcacacacgaaggcgaaggtgggtcagaggcaaatactccgccattatctcaat

SEQ ID NO: 24830 - DNA, 3062 bp, Macaca Mulatta
  misc_feature (1)...(3062): n = A,T,C or G
cagaagtttacctaaggagagaacttatttgctggggagacagtgttaaattgcgctatgggaataaaccagaggactgtccttttctctgggcacacatgaaaaaatacactgaaataactgcaacttatttccagggagtacgtcttgataactgccactcaacacctcttcatgtagctgagnnnnnnnnnnnnnnnnnnnnnnnnnnnnnnnnnnnnnnnnnnnnnnnnnnnnnnnnnnnnnnnnnnnnnnnnnnnnnnnnnnnnnnnnnnnnnnnnnnnnnnnnnnnnnnnnnnnnnnnnnnnnnnnnnnnnnnnnnnnnnnnnnnnnnnnnnnnnnnnnnnnnnnnnnnnnnnnnnnnnnnnnnnnnnnnnnnnnnnnnnnnnnnnnnnnnnnnnnnnnnnnnnnnnnnnnnnnnnnnnnnnnnnnnnnnnnnnnnnnnnnnnnnnnnnnnnnnnnnnnnnnnnnnnnnnnnnnnnnnnnnnnnnnnnnnnnnnnnnnnnnnnnnnnnnnnnnnnnnnnnnnnnnnnnnnnnnnnnnnnnnnnnnnnnnnnnnnnnnnnnnnnnnnnnnnnnnnnnnnnnnnnnnnnnnnnnnnnnnnnnnnnnnnnnnnnnnnnnnnnnnnnnnnnnnnnnnnnnnnnnnnnnnnnnnnnnnnnnnnnnnnnnnnnnnnnnnnnnnnnnnnnnnnnnnnnnnnnnnnnnnnnnnnnnnnnnnnnnnnnnnnnnnnnnnnnnnnnnnnnnnnnnnnnnnnnnnnnnnnnnnnnnnnnnnnnnnnnnnnnnnnnnnnnnnnnnnnnnnnnnnnnnnnnnnnnnnnnnnnnnnnnnnnnnnnnnnnnnnnnnnnnnnnnnnnnnnnnnnnnnnnnnnnnnnnnnnnnnnnnnnnnnnnnnnnnnnnnnnnnnnnnnnnnnnnnnnnnnnnnnnnnnnnnnnnnnnnnnnnnnnnnnnnnnnnnnnnnnnnnnnnnnnnnnnnnnnnnnnnnnnnnnnnnnnnnnnnnnnnnnnnnnnnnnnnnnnnnnnnnnnnnnnnnnnnnnnnnnnnnnnnnnnnnnnnnnnnnnnnnnnnnnnnnnnnnnnnnnnnnnnnnnnnnnnnnnnnnnnnnnnnnnnnnnnnnnnnnnnnnnnnnnnnnnnnnnnnnnnnnnnnnnnnnnnnnnnnnnnnnnnnnnnnnnnnnnnnnnnnnnnnnnnnnnnnnnnnnnnnnnnnnnnnnnnnnnnnnnnnnnnnnnnnnnnnnnnnnnnnnnnnnnnnnnnnnnnnnnnnnnttgcctccaaattaactttggctgagctaaatcagatcctttaccgatgtgaatcagaagaaaaggaagatggtggagggtgctatgacataccaaactggtcagcccttaaatatgcaggtcttcaaggnnnnnnnnnnnnnnnnnnnnnnnnnnnnnnnnnnnnnnnnnnnnnnnnnnnnnnnnnnnnnnnnnnnnnnnnnnnnnnnnnnnnnnnnnnnnnnnnnnnnnnnnnnnnnnnnnnnnnnnnnnnnnnnnnnnnnnnnnnnnnnnnnnnnnnnnnnnnnnnnnnnnnnnnnnnnnnnnnnnnnnnnnnnnnnnnnnnnnnnnnnnnnnnnnnnnnnnnnnnnnnnnnnnnnnnnnnnnnnnnnnnnnnnnnnnnnnnnnnnnnnnnnnnnnnnnnnnnnnnnnnnnnnnnnnnnnnnnnnnnnnnnnnnnnnnnnnnnnnnnnnnnnnnnnnnnnnnnnnnnnnnnnnnnnnnnnnnnnnnnnnnnnnnnnnnnnnnnnnnnnnnnnnnnnnnnnnnnnnnnnnnnnnnnnnnnnnnnnnnnnnnnnnnnnnnnnnnnnnnnnnnnnnnnnnnnnnnnnnnnnnnnnnnnnnnnnnnnnnnnnnnnnnnnnnnnnnnnnnnnnnnnnnnnnnnnnnnnnnnnnnnnnnnnnnnnnnnnnnnnnnnnnnnnnnnnnnnnnnnnnnnnnnnnnnnnnnnnnnnnnnnnnnnnnnnnnnnnnnnnnnnnnnnnnnnnnnnnnnnnnnnnnnnnnnnnnnnnnnnnnnnnnnnnnnnnnnnnnnnnnnnnnnnnnnnnnnnnnnnnnnnnnnnnnnnnnnnnnnnnnnnnnnnnnnnnnnnnnnnnnnnnnnnnnnnnnnnnnnnnnnnnnnnnnnnnnnnnnnnnnnnnnnnnnnnnnnnnnnnnnnnnnnnnnnnnnnnnnnnnnnnnnnnnnnnnnnnnnnnnnnnnnnnnnnnnnnnnnnnnnnnnnnnnnnnnnnnnnnnnnnnnnnnnnnnnnnnnnnnnnnnnnnnnnnnnnnnnnnnnnnnnnnnnnnnnnnnnnnnnnnnnnnnnnnnnnnnnnnnnnnnnnnnnnnnnnnnnnnnnnnnnnnnnnnnnnnnnnnnnnnnnnnnnnnnnnnnnnnnnnnnnnnnnnnnnnnnnnnnnnnnnnnnnnnnnnnnnnnnnnnnnnnnnnnnnnnnnnnnnnnnnnnnnnnnnnnnnnnnnnnnnnnnnnnnnnnnnnnnnnnnnnnnnnnnnnnnnnnnnnnnnnnnnnnnnnnnnnnnnnnnnnnnnnnnnnnnnnnnnnnnnnnnnnnnnnnnnnnnnnnnnnnnnnnnnnnnnnnnnnnnnnnnnnnnnnnnnnnnnnnnnnnnnnnnnnnnnnnnnnnnnnnnnnnnnnnnnnnnnnnnnnnnnnnnnnnnnnnnnnnnnnnnnnnnnnnnnnnnnnnnnnnnnnnnnnnnnnnnnnnnnnnnnnnnnnnnnnnnnnnnnnnnnnnnnnnnnnnnnnnnnnnnnnnnnnnnnnnnnnnnnnnnnnnnnnnnnnnnnnnnnnnnnnnnnnnnnnnnnnnnnnnnnnnnnnnnnnnnnnnnnnnnnnnnnnnnnnnnnnnnnnnnnnnnnnnnnnnnnnnnnnnnnnnnnnnnnnnnnnnnnnnnnnnnnnnnnnnnnnnnnnnnnnnnnngagtggctgtggcctattggatattttcttcgtgcaaaattatatttttccagattgatgggcccggagactactgcaaagactatagttttggttaaaaatgttctttcccgacactatgttcatcttgaga

SEQ ID NO: 24831 - DNA, 751 bp, Macaca Mulatta
ctgccgcggctccccgagctgttcgaaacgggcaaacagttactggacgaagtagaagtagcgactgaacctgccggttcccggatagtccaggagaaggtgttcaagggcctggacctccttgagaaggctgccgaaatgttatcgcagctcgacttgttcagccgaaatgaagatttggaagagattgcttccaccgacctgaagtacctgttggtgccagcgtttcaaggagccctcaccatgaaacaagtcaaccccagcaagcgtctagatcatttgcagcgggctcgagaacactttatgaactacttaactcagtgccattgctatcatgtggcagagtttgagctgcccaaaaccaagaacaactcagctgaaaatcacactgccaattcttccatggcttatcctagcctcgttgctatggcatctcaaagacaggctaaaatagagagatacaagcagaagaaggagttggagcataggttgtctgcaatgaaatctgctgtggaaagtggtcaagcagatgatgagcgtgttcgtgaatattatcatcttcaccttcagaggtggattgatatcagcttagaagagcattgagagcattgaccaggaaataaagatcctgagagaaagagactcttcaagagaggccatcaacttctaactcatctcgccaagagaggcctccagtgaaacccttcatttctcactcggaacacggcccaaggcaaagtatttggagctg

SEQ ID NO: 24832 - DNA, 407 bp, Macaca Mulatta
catgtattctggagaacaccatccctgatttcccacaaactgcaccacatcagtataactgcatttttagtttctatatagtgcaataaagcatagattctataaattcttacttgtctaagacaagtaaatctgtgttaaacaagtagtaataaaagttaatgcagtctaatttttctctgtggacattgttggcattggttaaaaattttgcctagaaatgttatctatgaggtgttcattatactcagagagttctgcccccgagatgaagagccataggcatggctcaaggatagaaaatactttcagtccttagttgacagttactaaccatgcattgaaagaaccaagtataagttgagattcttggaagggaggtagaaattttctagtaagaaggaaaa

SEQ ID NO: 24833 - DNA, 659 bp, Macaca Mulatta
gccaccggcaaagatggcggctgcagggctggggcgacggtgacacgggatgtgtagtccaggcgcctagcctcttccctgcggaaataagggagaggactacgataaagatggcgaccttgcccctcgacctctgcgccggtgcttgctgggaaatgtagttccctgccgagcgcaacagagaaagtacgtcgctgttgaaatgtgaatccctgcggacacgccaaattgcgagccgacggatacggaaagactcttttctcttctccccaccgcccacctctgaacagcctggcgggaaatgtagtcccaagctttcactcgcgagtggagggggaggatttatttcaccggtggggatcagtgaggctaggggagaaagacgtcgggcgatccaggaataaagaatgtccgcctccccatagggtgaggacttcgcgtttcaggggagggcccttaaaggaaggcagcaggaatccatcagtcttgtcgaccaggggggcgtggttctcgtcgagagtgcatttacactcttgtaccctagaaagcctgggcgcctcccactcgattcctgctcctcagacctccgggaaccagtgtcttacaaggcgtgcgggctccagggaaaaggacctggagtcacagcgaatccccgcccc

SEQ ID NO: 24834 - DNA, 1540 bp, Macaca Mulatta
  misc_feature (1)...(1540): n = A,T,C or G
aaacacatcatccatggccttttacctgcagccagcattgctccgaaggcagcagtgccacgtacacctcctccccgcagccccaacccgtctccagagagaccaannnnnnnnnnnnnnnnnnnnnnnnnnnnnnnnnnnnnnnnnnnnnnnnnnnnnnnnnnnnnnnnnnnnnnnnnnnnnnnnnnnnnnnnnnnnnnnnnnnnnnnnnnnnnnnnnnnnnnnnnnnnnnnnnnnnnnnnnnnnnnnnnnnnnnnnnnnnnnnnnnnnnnnnnnnnnnnnnnnnnnnnnnnnnnnnnnnnnnnnnnnnnnnnnnnnnnnnnnnnnnnnnnnnnnnnnnnnnnnnnnnnnnnnnnnnnnnnnnnnnnnnnnnnnnnnnnnnnnnnnnnnnnnnnnnnnnnnnnnnnnnnnnnnnnnnnnnnnnnnnnnnnnnnnnnnnnnnnnnnnnnnnnnnnnnnnnnnnnnnnnnnnnnnnnnnnnnnnnnnnnnnnnnnnnnnnnnnnnnnnnnnnnnnnnnnnnnnnnnnnnnnnnnnnnnnnnnnnnnnnnnnnnngatggtaaatactctgttctgaatttaaaggnaggatgaaaaacctccattacgtgagaaacctccaccctccccagnnnnnnnnnnnnnnnnnnnnnnnnnnnnnnnnnnnnnnnnnnnnnnnnnnnnnnnnnnnnnnnnnnnnnnnnnnnnnnnnnnnnnnnnnnnnnnnnnnnnnnnnnnnnnnnnnnnnnnnnnnnnnnnnnnnnnnnnnnnnnnnnnnnnnnnnnnnnnnnnnnnnnnnnnnnnnnnnnnnnnnnnnnnnnnnnnnnnnnnnnnnnnnnnnnnnnnnnnngttgctgcacctgaattactttatctgcgaaaacaagctcaagaactggtggatgaaaatgatggattgaaaatgactgtccatcgtttgaatgtagaactcagtcgatatcagacaaaattcaggcatttgtccaaggaagagnnnnnnnnnnnnnnnnnnnnnnnnnnnnnnnnnnnnnnnnnnnnnnnnnnnnnnnnnnnnnnnnnnnnnnnnnnnnnnnnnnnnnnnnnnnnnnnnnnnnnnnnnnnnnnnnnnnnnnnnnnnnnnnnnnnnnnnnnnnnnnnnnnnnnnnnnnnnnnnnnnnnnnnnnnnnnnnnnnnnnnnnnnnnnnnnnnnnnnnnnnnnnnnnnnnnnnnnnnnnnnnnnnnnnnnnnnnnnnnnnnnnnnnnnnngcgtcagcttcagactcaagcaaaactggttttagaggaaaacaagttgttgctggagcagctggagattcagcaaaggaaagccaaggacagccaccaggagcacctccaagaaagtttctaagctgactaaacaactaatgctcctggagacgaaaacccagggccaggaaaaggagctggtggagaacagggaacagctggagattttacgtgccaaatgccgagaactcaaaacacactcggatggcaaaatcgcaatggaagttcataaatcaattgtaaatgaattaaaaa

SEQ ID NO: 24835 - DNA, 748 bp, Macaca Mulatta
gtggaggagacaggcagggcgctgtgggcatgccagctcagacaggggcctgtgcagctgcaggggccagaggccaatcactgtcacagcagagtcgccttagaaattggacagctgcatgttctgtgctctccagtttgtcccttccaatatgaataaacttcccttctaaatatatttatttgcaagaccaaatacatgtctttaattctaacctgggactgtcagtaggcgtcaaagtgagtgccccaaggcgaagggaaacttgggagagagtggggaagccatcccgcagccccgtcccagggggctctgtccttcccagaacttctgggacgccctggcatgccctgaaaagcagaactgctttcctgggtgagggcctcaggccaccagggctccaggccctcaggtacagtttgatgctgaggacctaacatccctccccagttcccttaatccacttagcccaaccctctcatatcatggacaggatgcaccccagctactaaagtcgtcaggaatagaagtgaaagccccggagtgttgcacacagaccaggagggtggtgtcaagggtccgtgtggatgctggggagggagccagagaaaaagtatcaggcagagggaggcgggtctgggaaggatgggcaggtgagtaccggaccccacctccaccgtgtatctccagcccactcccctgttctgaaaatctacctgctgcactcagaaacctacccaggcactgg

SEQ ID NO: 24836 - DNA, 648 bp, Macaca Mulatta
  misc_feature (1)...(648): n = A,T,C or G
tggtgtgggacaatcctttcattagttggaacccaaaagagtgtgttggcatcaataaactcacggtattagctgaaaacctgtggctcccagacatctttatcatggaatnnnnnnnnnnnnnnnnnnnnnnnnnnnnnnnnnnnnnnnnnnnnnnnnnnnnnnnnnnnnnnnnnnnnnnnnnnnnnnnnnnnnnnnnnnnnnnnnnnnnnnnnnnnnnnnnnnnnnnnnnnnnnnnnnnnnnnnnnnnnnnnnnnnnnnnnnnnnnnnnnnnnnnnnnnnnnnnnnnnnnnnnnnnnnnnnnnnnnnnnnnnnnnnnnnnnnnnnnnnnnnnnnnnnnnnnnnnnnnnnnnnnnnnnnnnnnnnnnnnnnnnnnnnnnnnnnnnnnnnnnnnnnnnnnnnnnnnnnnnnnnnnnnnnnnnnnnnnnnnnnnnnnnnnnnngtggccatcaggcacaggcccagcctctacatcataaacctgctggtgcccagtagctttctgattgccattgacgccctcagcttctacctgccagcagagagcgagaatcacgccccattcaagataacgcttctgctgggctgcaacgtcttcctgctcatgatgaatgacttgcttcctgccagtggcaaccccttcatcag

SEQ ID NO: 24837 - DNA, 480 bp, Macaca Mulatta
tgagatcattaagaatctgtctcttttaattagaaaataaataagataattgaactattaacattctctaggttcttttttctcattttaataaaataatttagattatgtcattatatataagtataccaatggggccttattgacaagtttgagggtcaaaccaaaaaagaaactccgtgtattaaggtgtcctgttgttcccttttaggagattgtaagaacaacgctcttgtaccaggaaccattcaagtaaatggccatggaggacagccatcaaaacttgtgaagaggggacctggaaggaaacctaaagtagaagttaacaccaatagtggtgaaattatacacaagaaaaggggtagaaagcccaaaaagctacagtatgcaaagccagaaaatttagagcaaaataatgtgcatcccatcagagatgaagtacttccttcttcaacatgcaattttctttctgaaactaat

SEQ ID NO: 24838 - DNA, 765 bp, Macaca Mulatta
  misc_feature (1)...(765): n = A,T,C or G
acccaaaaatttaggttctggtgcaaaatttcatgnnnnnnnnnnnnnnnnnnnnnnnnnnnnnnnccctttagagtaaaaaaagaaacgcccactggggtgtacgataaaagcccccacaaacccagggttacaaaacggggctttccgggtttcggcgacaaagtaaaagacgctgttctcccccattgctgtgggtcaataagggtttcattaaaataaaactataaaattctcctgggttacaataagtcagacacggtctggaacacagtgcttaacaacagtaatgccaactatcagtgctaacataaaaacattttagaaggtcaaaaacaattgaactggaaaccaaagccttattttccctggatgagcaaaactgaaaatgaaaggggtcccacctcccagtaggagtgaannnnnnnnnnnnnnnnnnnnnnttggaggtggggtacatggtgcagctggttctgtcgttgctcagcctagttggcgtccagcttggccatttcctgcacgtagatgcctatactctcgctgtcaaaaagcacgaagtacaccgttttgatggaagaggacattgtggacacgaagtaactggagatggccttcagaatcagctgagctgctgtctgctttggaaaaccgttcctgccgctgccgatggatggaaatgcaatggatttcagcttcttatcatcagccagggccaagcagtttttcactgtcttttccagaagttcttcacatttgtctgcaccc

SEQ ID NO: 24839 - DNA, 583 bp, Macaca Mulatta
  misc_feature (1)...(583): n = A,T,C or G
tactttaggatggagctgatgcatgcggaaaaactgaggaaagagaaggaagaatttgaaaaagccagtatggatgtgnnnnnnnnnnnnnnnnnnnnnnnnnnnnnnnnnnnnnnnnnnnnnnnnnnnnnnnnnnnnnnnnnnnnnnnnnnnnnnnnnnnnnnnnnnnnnnnnnnnnnnnnnnnnnnnnnnnnnnnnnnnnnnnnnnnnnnnnnnnnnnnnnnnnnnnnnnnnnnnnnnnnnnnnnnnnnnnnnnnnnnnnnnnnnnnnnnnnnnnnnnnnnnnnnnnnnnnnnnnnnnnnnnnnnnnnnnnnnnnnnnnnnnnnnnnnnnnnnnnnnnnnnnnnnnnnnnnnnnnnnnnnnnnnnnnnnnnnnnnnnnnnnnnnnnnnnnnnnnnnnnnnnnnnnnnnnnnnnnnnnnnnnnnnnnnnnnnnnnnnnnnnatcaccttttgcttgtaaagatttactaagaagtcaaatagtgggttccttagagggaagnagaggttggaaagaaccatgacttcattcaggaaggcacatgaactgaagcttctgtcagaatgccaatacaagcagttg

SEQ ID NO: 24840 - DNA, 556 bp, Macaca Mulatta
aatgaggtgggagggccgtgacggaggggccaagttggctggaggggacgctgagcacgggcacgtgggtcctgctcagcccccgccacctcctacaggtgctgcacagttcctggccttctgctggaggcagtggggccctttctaagcgcccggccagctttttaggacaggccggtgagggaacaggcatcctgaacctggtcacgctcgtcagccccctgtgccacgtgacgtggtgtctgctcagagttggacctcacttttcttctccaggacagaaacagtacaacgtccacgtgggaactgctggatcaaaggacaaaagaccaaaaaccagtgggctgaggatgcagcacagccatgaacctgctcacgacaagatgcacctgtgctttatgttaaaggctttatgttaaagcttcctgtcggggctgctagatcagcattaaagtaagggaaccaacagtgtccctctggcatctgttagtaattaagcctaaacattcactgcgttctgtggctacagactgtcgactgagtgaagtggtgtcaa

SEQ ID NO: 24841 - DNA, 1373 bp, Macaca Mulatta
  misc_feature (1)...(1373): n = A,T,C or G
cattgctaggaagaactctgggtacaataatgaatacaacgtacgtgatgatggctcagatcttaagatctcacctgataaaggctacagtgattcctaatcaagtgaaaatgcttccatatattggtatcattagaaatagaatgatgtcaacccataaatccaaaaagaagatcagagaatattataggctgctgaacgtggaagaaggctgctctgcagatgaagtcagggaatcttttcataagcttgccaagcaatatcatcctgacggtggctctaatacggctgattctgcaacatttataaggattgaaaaagcttatagaaaggtgctctcccatgtgatagaacaagcaaatgcgagtcagaataaaggtgaagaagaagaagatgtagaaaaattcaaatataaaacaccccaacaccggcattatttaagttttgaaggtattggttttgggactccaactcaacgagagaagcaatataggcaatttagggcagaccgtgctactgaacaagtgatggaatatcaaaagcagaaactacaaagccagtattttcctgatagtataactgttaaaaatataaaacagagcaaacagcaaaagataactcaggctatagagcgtttagtggaggacctcattcaagaatccatggcaaaaggagactttgacaatctcagtgggaaaggaaaacctctgaaaaagttttctgactgttcttacatcgatcccatgactcacaacctgaaccgaatactgatcgataacggataccaaccagaatggatccttatgcaaaaggaaatcagcgatactattgagcaactcagagaggcaattttagtgtctaggaaaaaacttgggaatccaatgacaccaactgaacagaaacagtggaaacatgtttgtgagcagtttcaagaaaacannnnnnnnnnnnnnnnnnnnnnnnnnnnnnnnnnnnnnnnnnnnnnnnnnnnnnnnnnnnnnnnnnnnnnnnnnnnnnnnnnnnnnnnnnnnnnnnnnnnnnnnnnnnnnnnnnnnnnnnnnnnnnnnnnnnnnnnngtcacagatggaaacccaaataaccttgatcaaggagaagaagagaaaacacctgaaatcaagaaaggttttttaaactggatgaatctgtggaaatttattaaaatacgatcattttgatgtttactatcataaatcattcttagttccactgacacttaacatggaaaatgagatttattgctatattaagaactgtgccattgtacttttcacaaaactaatcacatacccaatgatgtgtgagtgagacaccgatcaggtttgtcctgaggatatagcaagaaaataaaataa

SEQ ID NO: 24842 - DNA, 381 bp, Macaca Mulatta
  misc_feature (1)...(381): n = A,T,C or G
cagaggctctgtgtttggaggtcccgctatcacggccccccagatggggcctggacgatgcctcctgacggccttgctgcttctggctctggcgtcactgccggaagcctcccagtactgcggccgccttgaatactggaacccagacaacaagtgctgcagcagctgcctgcatcgcttcgggccgcccccctgcccggngactatgagttccgggaaaactgcgggctcaatgaccacggcgatttcgtaacgctcccgttccgagagtgttcttctgggcagtgcaaccccgacggtgcggagctatgtagcccctgcggcggcggagccgtgacccctactcccgccgcgggcgggggcagaaccctgaggcgctgc

SEQ ID NO: 24843 - DNA, 75 bp, Macaca Mulatta
gggagttctcactcttctgaaccagctaaccaaagttttgagagctgtgttaagataaattcatacagctacagg

SEQ ID NO: 24844 - DNA, 2512 bp, Macaca Mulatta
  misc_feature (1)...(2512): n = A,T,C or G
agaggacaatccttacactcccacctaccagtttcctgcatctactcctagtcctannnnnnnnnnnnnnnnnnnnnnnnnnnnnnnnnnnnnnnnnnnnnnnnnnnnnnnnnnnnnnnnnnnnnnnnnnnnnnnnnnnnnnnnnnnnnnnnnnnnnnnnnnnnnnnnnnnnnnnnnnnnnnnnnnnnnnnnnnnnnnnnnnnnnnnnnnnnnnnnnnnnnnnnnnnnnnnnnnnnnnnnnnnnnnnnnnnnnnnnnnnnnnnnnnnnnnnnnnnnnnnnnnnnnnnnnnnnnnnnnnnnnnnnnnnnnnnnnnnnnnnnnnnnnnnnnnnnnnnnnnnnnnnnnnnnnnnnnnnnnnnnnnnnnnnnnnnnnnnnnnnnnnnnnnnnnnnnnnnnnnnnnnnnnnnnnnnnnnnnnnnnnnnnnnnnnnnnnnnnnnnnnnnnnnnnnnnnnnnnnnnnnnnnnnnnnnnnnnnnnnnnnnnnnnnnnnnnnnnnnnnnnnnnnnnnnnnnnnnnnnnnnnnnnnnnnnnnnnnnnnnnnnnnnnnnnnnnnnnnnnnnnnnnnnnnnnnnnnnnnnnnnnnnnnnnnnnnnnnnnnnnnnnnnnnnnnnnnnnnnnnnnnnnnnnnnnnnnnnnnnnnnnnnnnnnnnnnnnnnnnnnnnnnnnnnnnnnnnnnnnnnnnnnnnnnnnnnnnnnnnnnnnnnnnnnnnnnnnnnnnnnnnnnnnnnnnnnnnnnnnnnnnnnnnnnnnnnnnnnnnnnnnnnnnnnnnnnnnnnnnnnnnnnnnnnnnnnnnnnnnnnnnnnnnnnnnnnnnnnnnnnnnnnnnnnnnnnnnnnnnnnnnnnnnnnnnnnnnnnnnnnnnnnnnnnnnnnnnnnnnnnnnnnnnnnnnnnnnnnnnnnnnnnnnnnnnnnnnnngaaacttttagcggaccagagacgacttaagcgcgagcaagaagaggctgatattgcagctcgacgccnnnnnnnnnnnnnnnnnnnnnnnnnnnnnnnnnnnnnnnnnnnnnnnnnnnnnnnnnnnnnnnnnnnnnnnnnnnnnnnnnnnnnnnnnnnnnnnnnnnnnnnnnnnnnnnnnnnnnnnnnnnnnnnnnnnnnnnnnnnnnnnnnnnnggagcttcctctgcagaagggagatattgtttacatttataagcaaattgatcagaactggtatgaaggagaacaccacggccgggtgggaatcttcccacgcacctnnnnnagcttcttcctcctgctgagaaggctcagcccaaaaagttgacaccagtgcaggttttggaatatggagaagctattgctaagtttaactttaatggtgatacacaggtagaaatgtccttcagaaagnnnnnnnnnnnnnnnnnnnnnnnnnnnnnnnnnnnnnnnnnnnnnnnnnnnnnnnnnnnnnnnnnnnnnnnnnnnnnnnnnnnnnnnnnnnnnnnnnnnnnnnnnnnnnnnnnnnnnnnnnnnnnnnnnnnnnnnnnnnnnnnnnnnnnnnnnnnnnnnnnnnnnnnnnnnnnnnnnnnnnnnnnnnnnnnngttttccagtcacagcaagctcatcacgccagcaccctcatctctgccccactcccgccgagccctgtcccctgagatgcacgccgtcacctctgagtggatctcgctgactgtgnnnnnnnnnnnnnnnnnnnnnnnnnnnnnnnnnnnnnnnnnnnnnnnnnnnnnnnnnnnnnnnnnnnnnnnnnnnnnnnnnnnnnnnnnnnnnnnnnnnnnnnnnnnnnnnnnnnnnnnnnnnnnnnnnnnnnnnnnnnnnnnnnnnnnnnnnnnnnnnnnnnnnnnnnnnnnnnnnnnnnnnnnnnnnnnnnnnnnnnnnnnnnnnnnnnnnnnnnnnnnnnnnnnnnnnnnnnnnnnnnnnnnnnnnnnnnnnnnnnnnnnnnnnnnnnnnnnnnnnnnnnnnnnnnnnnnnnnnnnnnnnnnnnnnnnnnnnnnnnnnnnnnnnnnnnnnnnnnnnnnnnnnnnnnnnnnnnnnnnnnnnnnnnnnnnnnnnnnnnnnnnnnnnnnnnnnnnnnnnnnnngaggaaagcagagagggaggcaggccagagaggccctggcggacccgagatctctaagaagagctgcttgaagccttcagacgtggtcaggtgcctgagtactgaacacagactctcagatctcaacaccactgaggagagccggcccggcaagcccctgggtagcgcttttccaggaagtgaggctgagcagacagagcggcatagaggtggcgagcaggcggggaggaaagctgctcggagaggtgggagccagnnnnnnnnnnnnnnnnnnnnnnnnnnnnnnnnnnnnnnnnnnnnnnnnnnnnnnnnnnnnnnnnnnnnnnnnnnnnnnnnnnnnnnnnnnnnnnnnnnnnnnnnnnnnnnggaactacgcgatggagatatcgttgatgtcatggaaaaatgtgacgatggatggtttgttggt

SEQ ID NO: 24845 - DNA, 1623 bp, Macaca Mulatta
  misc_feature (1)...(1623): n = A,T,C or G
caggaaaacgtggataatattattgaagaagttaaaaatatatgcagtgttctagggtgtgtggaaaccaaacaaattacagatgcagtaaatgaactaagtctaattcttcagagaaaagcagannnnnnnnnnnnnnnnnnnnnnnnnnnnnnnnnnnnnnnnnnnnnnnnnnnnnnnnnnnnnnnnnnnnnnnnnnnnnnnnnnnnnnnnnnnnnnnnnnnnnnnnnnnnnnnnnnnnnnnnnnnnnnnnnnnnnnnnnnnnnnnnnnnnnnnnnnnnnnnnnnnnnnnnnnnnnnnnnnnnnnnnnnnnnnnnnnnnnnnnnnnnnnnnnnnnnnnnnnnnnnnnnnnnnnnnnnnnnnnnnnnnnnnnnnnnnnnnnnnnnnnnnnnnnnnnnnnnnnnnnnnnnnnnnnnnnnnnnnnnnnnnnnnnnnnnnnnnnnnnnnnnnnnnnnnnnnnnnnnnnnnnnnnnnnnnnnnnnnnnnnnnnnnnnnnnnnnnnnnnnnnnnnnnnnnnnnnnnnnnnnnnnnnnnnnnnnnnnnnnnnnnnnnnnnnnnnnnnnnnnnnnnnnnnnnnnnnnnnnnnnnnnnnnnnnnnnnnnnnnnnnnnnnnnnnnnnnnnnnnnnnnnnnnnnnnnnnnnnnnnnnnnnnnnnnnnnnnnnnnnnnnnnnnnnnnnnnnnnnnnnnnnnnnnnnnnnnnnnnnnnnnnnnnnnnnnnnnnnnnnnnnnnnnnnnnnnnnnnnnnnnnnnnnnnnnnnnnnnnnnnnnnnnnnnnnnnnnnnnnnnnnnnnnnnnnnnnnnnnnnnnnnnnnnnnnnnnnnnnnnnnnnnnnnnnnnnnnnnnnnnnnnnnnnnnnnnnnnnnnnnnnnnnnnnnnnnnnnnnnnnnnnnnnnnnnnnnnnnnnnnnnnnnnnnnnnnnnnnnnnnnnnnnnnnnnnnnnnnnnnnnnnnnnnnnnnnnnnnnnnnnnnnnnnnnnnnnnnnnnnnnnnnnnnnnnnnnnnnnnnnnnnnnnnnnnnnnnnnnnnnnnnnnnnnnnnnnnnnnnnnnnnnnnnnnnnnnnnnnnnnnnnnnnnnnnnnnnnnnnnnnnnnnnnnnnnnnnnnnnnnnnnnnnnnnnnnnnnnnnnnnnnnnnnnnnnnnnnnnnnnnnnnnnnnnnnnnnnnnnnnnnnnnnnnnnnnnnnnnnnnnnnnnnnnnnnnnnnnnnnnnnnnnnnnnnnnnnnnnnnnnnnnnnnnnnnnnnnnnnnnnnnnnnnnnnnnnnnnnnnnnnnnnnnnnnnnnnnnnnnnnnnnnnnnnnnnnnnnnnnnnnnnnnnnnnnnnnnnnnnnnnnnnnnnnnnnnnnnnnnnnnnnnnnnnnnnnnnnnnnnnnnnnnnnnnnnnnnnnnnnnnnnnnnnnnnnnnnnnnnnnnnnnnnnnnnnnnnnnnnnnnnnnnnnnnnnnnnnnnnnnnnnnnnnnnnnnnnnnnnnnnnnnnnnnnnnnnnnnnnnnnnnaggctggagatgatcttcgtcaggatatgcttgttctgcagattattcaagtgatggacaacatttggctgcaagaaggcttggatatgcaaatgatcatttatagatgtctatccacaggaaaagaccaag

SEQ ID NO: 24846 - DNA, 567 bp, Macaca Mulatta
cttcctgaccctcaacttcagtctgcctggagtcacactgggctgaggggactatggacagcaccaccacaggtcacagccacttgggtggggctgaagtccccatttgtttcaccactgggctatttctgcaggctgcttggtctaactcagttacgccttgaccttcggcaacatttctgtggcctcgctctcagggctggaaaggttggtgccaggggaactggctctgtggcccataaaggtcatatagtgtctgctgtgtgaataggctggggacagaggggctaaggacacctattccttccggcacagggatgtcagaccaggcaatcatggagctgaacctgcccacggggatccccattgtgtatgagctgaacaaggagctgaagcccaccaagcctatgcagttcctgggtgatgaggaaacggtgcggaaggccatggaggctgtggcagcccagggcaaggccaagtgaggggttgggcttgggcaataaaggcacctcctcccacagcctggactccagcgcagccgggcatgccaggctcaccccaccatca

SEQ ID NO: 24847 - DNA, 1072 bp, Macaca Mulatta
  misc_feature (1)...(1072): n = A,T,C or G
aggttcaaccttcagattcgctggagcctgagtttaccaggaagtgccagtccctgctgaaccgctggcgggagaaggtgtttnnnnnnnnnnnnnnnnnnnnnnnnnnnnnnnnnnnnnnnnnnnnnnnnnnnnnnnnnnnnnnnnnnnnnnnnnnnnnnnnnnnnnnnnnnnnnnnnnnnnnnnnnnnnnnnnnnnnnnnnnnnnnnnnnnnnnnnnnnnnnnnnnnnnnnnnnnnnnnnnnnnnnnnnnnnnnnnnnnnnnnnnnnnnnnnnnnnnnnnnnnnnnnnnnnnnnnnnnnnnnnnnnnnnnnnnnnnnnnnnnnnnnnnnnnnnnnnnnnnnnnnnnnnnnnnnnnnnnnnnnnnnnnnnnnnnnnnnnnnnnnnnnnnnnnnnnnnnnnnnnnnnnnnnnnnnnnnnnnnnnnnnnnnnnnnnnnnnnnnnnnnnnnnnnnnnnnnnnnnnnnnnnnnnnnnnnnnnnngctgtcccctaccaccaccagtcacagacgtaagccttgagctgcagcagctgcgggaagaacggaaccgcctggatgcagaactgcagctgagtgcccgcctcattcagcaggaggtgggccgggctcgggaacaaggnaggggaggcagagcggcagcagctgagcaaggtggcccagcagctggagcaggagctgcagcagacccaggagtccctggctagcttggggctgcagctggaggtggcacgccagggccagcaggagagcacagaggaggctgccagtctgcggcaggagctgacccagcagcaggacctctacaggcaagnagccctgcaagagaaggtggctgaagtggaaactcggctgcgggagcaactgtcagacacagagaggaggctgaacgaggctcggagggagcatgccaaggccgngtggtctccttgcgccagattcagcgcagagccgcccaggaaaaggagcggagccaggaactcaggcgtctgcaggaggaggcccggaaggaggaggggcagcgactggcccggcgcttgcaggagctggagagggataagaacctcatgctgg

SEQ ID NO: 24848 - DNA, 2151 bp, Macaca Mulatta
  misc_feature (1)...(2151): n = A,T,C or G
cggcccgtgagaagccactcaagtgcccagactgcgagaaacgcttcaagtacgcgtcagacctgcagcggcaccggcgggtacacacgggcgagaagccctacaagtgccccaactgtgacaaggccttcaagcagcgggagcatctcaacaagcaccagggcgtgcacgcccgcgagcagcagttcaagtgcgtatggtgcggggagcgcttcatagacgtggccttgttgcaggagcacagcgcgcagcatattgccgccgccgccgcatcggagggcgcctaccaggtagccgcctgcctgccctgagtctgcggctgtggcccnnnnnnnnnnnnnnnnnnnnnnnnnnnnnnnnnnnnnnnnnnnnnnnnnnnnnnnnnnnnnnnnnnnnnnnnnnnnnnnnnnnnnnnnnnnnnnnnnnnnnnnnnnnnnnnnnnnnnnnnnnnnnnnnnnnnnnnnnnnnnnnnnnnnnnnnnnnnnnnnnnnnnnnnnnnnnnnnnnnnnnnnnnnnnnnnnnnnnnnnnnnnnnnnnnnnnnnnnnnnnnnnnnnnnnnnnnnnnnnnnnnnnnnnnnnnnnnnnnnnnnnnnnnnnnnnnnnnnnnnnnnnnnnnnnnnnnnnnnnnnnnnnnnnnnnnnnnnnnnnnnnnnnnnnnnnnnnnnnnnnnnnnnnnnnnnnnnnnnnnnnnnnnnnnnnnnnnnnnnnnnnnnnnnnnnnnnnnnnnnnnnnnnnnnnnnnnnnnnnnnnnnnnnnnnnnnnnnnnnnnnnnnnnnnnnnnnnnnnnnnnnnnnnnnnnnnnnnnnnnnnnnnnnnnnnnnnnnnnnnnnnnnnnnnnnnnnnnnnnnnnnnnnnnnnnnnnnnnnnnnnnnnnnnnnnnnnnnnnnnnnnnnnnnnnnnnnnnnnnnnnnnnnnnnnnnnnnnnnnnnnnnnnnnnnnnnnnnnnnnnnnnnnnnnnnnnnnnnnnnnnnnnnnnnnnnnnnnnnnnnnnnnnnnnnnnnnnnnnnnnnnnnnnnnnnnnnnnnnnnnnnnnnnnnnnnnnnnnnnnnnnnnnnnnnnnnnnnnnnnnnnnnnnnnnnnnnnnnnnnnnnnnnnnnnnnnnnnnnnnnnnnnnnnnnnnnnnnnnnnnnnnnnnnnnnnnnnnnnnnnnnnnnnnnnnnnnnnnnnnnnnnnnnnnnnnnnnnnnnnnnnnnnnnnnnnnnnnnnnnnnnnnnnnnnnnnnnnnnnnnnnnnnnnnnnnnnnnnnnnnnnnnnnnnnnnnnnnnnnnnnnnnnnnnnnnnnnnnnnnnnnnnnnnnnnnnnnnnnnnnnnnnnnnnnnnnnnnnnnnnnnnnnnnnnnnnnnnnnnnnnnnnnnnnnnnnnnnnnnnnnnnnnnnnnnnnnnnnnnnnnnnnnnnnnnnnnnnnnnnnnnnnnnnnnnnnnnnnnnnnnnnnnnnnnnnnnnnnnnnnnnnnnnnnnnnnnnnnnnnnnnnnnnnnnnnggtctctggctgcccatgaggctcatggagcagagggtgtcccggtcatagggagcagaaggagcaagtgggttacggaagcctgtgggggacctggcggatggagttgaccaacatcgctgggtggccacggccctccttaggaagcccagaaggacctttattattaaataatcatttttaaccctgctctatcccctgccctcttccagccccacccctccctggtcttgaaagaagactaatcagtggacacaccaagggccccgaggggcagggagatgccaccgtgcttctctgtcaccgtaaggctgaccagccaagtccacctcctctgtctgactgagttcaaaaaagaggccacagggaggggctggtccttcccctcggtgctggctctctgtcacaatgcctcaaaagacacagaacccaggcctacaaccgtcccaactgctaattcttttcctttcattttgctttctgaaagcagtttgttatactattcataacactgtagagtttaatttcatgtcattttggatcttatataaaaatgtgaggatttggatttttaaaaacgaatgactccattttagatagccacttttgatgttaatatatagtgagtccaatgtatgctttagaagtaaagacattgaccgtcagagacc

SEQ ID NO: 24849 - DNA, 966 bp, Macaca Mulatta
  misc_feature (1)...(966): n = A,T,C or G
gaatcctccacaactgccacgacgacgcggccaagttcgtgcatctgctcatgagccctggctgcaactacctggtgcaggaagacttcgtccccttcctgcagnnnnnnnnnnnnnnnnnnnnnnnnnnnnnnnnnnnnnnnnnnnnnnnnnnnnnnnnnnnnnnnnnnnnnnnnnnnnnnnnnnnnnnnnnnnnnnnnnnnnnnnnnnnnnnnnnnnnnnnnnnnnnnnnnnnnnnnnnnnnnnnnnnnnnnnnnnnnnnnnnnnnnnnnnnnnnnnnnnnnnnnnnnnnnnnnnnnnnnnnnnnnnnnnnnnnnnnnnnnnnnnnnnnnnnnnnnnnnnnnnnnnnnnnnnnnnnnnnnnnnnnnnnnnnnnnnnnnnnnnnnnnnnnnnnnnnnnnnnnnnnnnnnnnnnnnnnnnnnnnnnnnnnnnnnnnnnnnnnnnnnnnnnnnnnnnnnnnnnnnnnnnnnaggcagaaaagcgcagaaggaagggaagatcagctacgcagactttgtctggtttttgatctctgaggaagacaagaaaacgccgaccagncagcatcgagtactggttccgctgcatggacctggacggggacggcgccctgtccatgttcgagctcgagtacttctacgaggagcagtgccggaggctggacagcatggccatcgaggccctgcccttccaggactgcctctgccagatgctggacctggtcaagccgaggannnnnnnnnnnnnnnnnnnnnnnnnnnnnnnnnnnnnnnnnnnnnnnnnnnnnnnnnnngacaccttcttcaacatcgagaagtacctggatcacgagcagaaggagcagatctcgctgctcaggnnnnnnnnnnnngcggccccgagctcttggactgggagaagtacgcggccgaggagtacgacatcctggtggccgaggagacggcgggggagccctgggaggacggg

SEQ ID NO: 24850 - DNA, 280 bp, Macaca Mulatta
aggggagagagttgggcgagggagagcccccggccggctgccagaagatcgcggcgggaggaagcccttgtgtcacttgaattccacccaaggagcggacgcctgggatcagagcgccctgtttagcaataacggctggagcacgtcctacaagttacgggagagtcggctgtgaaggagacgttcgcttgtcccctgtgttcccgctccatataacctccagaccccagccttgcctcgcgctgggaggggagatccagaatgaaaggcaagaaaggta

SEQ ID NO: 24851 - DNA, 104 bp, Macaca Mulatta
tttaccagcagccccagcagcatccggtggcccagtcctatggtggctacaaggagcctgcagccccagtctccatacagcgcagcgccccaggtggtggcggg

SEQ ID NO: 24852 - DNA, 750 bp, Macaca Mulatta
gactgggctagctctgtaggctcggagagcctggggagggtgccaaccccacctctagtattttgggagatagggaaagtgaacagacttccccttccccatacccctcagggtggttccctaccagccaggcttactactagaagagagcagagcgccagggagtgagactgcatccctgggcttggaagtgaaggagaggagacttgtttagtattttgccatcggcacaaggaaaaccaggagagagtctgcctccaggactctgagccttctgcttcgtatgttcagaaggtggataggtcttcccactccagcatggcttgaactcttaggggtctgcagtgctccatctccattgatggccccagctcagtaactatacctggtacatttcctgtgtgcaatcagtaccttgaaggcagaacattctgaataaagttggaaaaagaacagctttgctttgcaaagattgatgacagactggttcctcagaggcctaggttcccatcacccctttttccagagcgagggcctggaatgaaggcagtttatcctctgtccctagagcctggggtttgctttggctccttgaggtggaagagactaagagggcagctgcccagagcggctctgtgtgtacctggttcctctcaggcttcctgatcccttccattgcactgcgccttatccctcagccagccagacggcctccttgctcctgaccagaagatacgtttcggggtggtt

SEQ ID NO: 24853 - DNA, 534 bp, Macaca Mulatta
  misc_feature (1)...(534): n = A,T,C or G
ctcactctctctggtataacttcaacatcactcatnnnnnnnnnatggacaacagtggtgtgaggtccagggccaggctgatcagaagaatttcctctcctatgactgtggcagtgacaaggtcttatctatgggtcacctagaagagcagctggatgtcacagatgcctggggaaaacaattggaaatgctgaaagaggtggggcggaggctcagaatgaaactggctgacaataagctggaggatttcacacccagnggacccctcacgctgcaggccaggatgtcttgtgagtgtgaagtcgacggacccatccgtggatcttggcagttcagcttcaatggacagaagttcctcctctttgactcaaacaacagaaagtggacagtggttcaggctggagccaagcggatgaaagagaagtgggaggacagcgaactaaccatgttcttccagaaggtctcgatgggagactgcaagagctggcttaaggacttcctgatgcacaggaagaaaaggctggaacccacagn

SEQ ID NO: 24854 - DNA, 1274 bp, Macaca Mulatta
  misc_feature (1)...(1274): n = A,T,C or G
gggctaccttggtaggaaacttatttacaaaccatattaaaaggctaatttaaatataaataatataaagtgctctgaataaagcagaaatatattacagttcattccacaaaaagcatccaaacgacccaaatgaccaagacatgcatagtatttggaggaatcagaggtttggaaggagtaggaaggagaatgaaggaaaatgcaaccagcacaattatagtgtgttcatttagataaaattaaaggcgcaggagaggtagcaaaggccaggcttttctttggttttcttcaaacataagtgaaaaaagcactgccattcacaagtcaaggaacctagggccagctggaagtgtggagcacatatgctgtggagattgtagtgtgtctgaagtttgtgtagtagtggaagattttaggtatgtagagcaagttgaaaatggattgagactgcatggtggcataaatgagaaattgcctgtaggatctagtctacttgaaggaagtggagacataaggagagacaaaaacaggtttgtgccataaagtattttttcgaaggcaacaagatgtggtgaatgaaaattattagttcacttccgtgctgccatgaaactgcctttaagaaggtgctggatttcaaggtttataaaggtatctcggtaaagactgctttttgaatgcatatgattttgcatcagctagactgagttgattctgaccagacttgatggttttaagtcggaaccnnnnnnnnnnnnnnnnnnnnnnnntaagttgacctagtagtataaaatatgaagctttaatggtactttgctatgaaaagaaaacactgtattccttatgcaaaacacatgtatctttcattatttataataagtggcctctcttagctcagttactcaattcatacgtagtattttttaaagtaattttatatctgtgtgccaccacatgtatttaatattactgttttcacatgtacaagcttttctactttcttttgttaagaacaccaaccaaccaaggtttaagtgagtaataggcttgagcaccgggtggcagatgttctatgcagtgtggttcaagtttcttcaaccacacttcaatgcattgctaatatggaatttaagataccatacacagtctctcatggacctatctctattgtagaataatgacttatgtcttacttgccaaattgttctgaatgtgacttttatagctgatatgctggggctgggattaactagcattattttgccaccttt

SEQ ID NO: 24855 - DNA, 1137 bp, Macaca Mulatta
gggcagttcggcggtcccgcgggtctgtctcttgcttcaacagtgtttggacggaacagatccggggactctttcttccagcctccgatcgccctccgatttcctctccacttgtaacctccgggaccatcttctcggccatctcctgcttctgggacctgccagcaccgtttttgtggttagctccgtcttgccgaccaaccatgagctcccagattcgtcagaattattccaccgacgtggaggcagccgtcaacagcctggtcaatatgtacctgcaggcctcctacacctacctctaactgggcttccatttcgaccgcaatgatgtggctctggaaagcgtgagccacttctttccgcgaattggcctgatgaataaacctcgaagggcttacgatctgtccccctggaaggatgccaaaaaacctttccgtggtcggtcccatctcctctcttttttctcaagggaaacttcctaaaaaaagccccagacgcgtaaaacgattttatattgtggggggtaaaacaacaaccccctggttaatctgcccccctgtgcaataaagcacctgtgcactatttggggggcaccccttttgcggtgttgcatacaacaacttaacccttgttgcacctctcccccgagggggggacccccccccccctctcttttgtagggaaaaaatttttttgtttcaacctgcgagggcacaccctttgtgatgagaaaatttttatattagtcacacactctttacatattccaacgagagattttctcttttccacacagatattgcgcttaatagttttaatacaaagtttttacacctcgggaaacacaaaatatttcttacacaactattttagtccctccttcagacgcgccacaggaataaagatggtctacaagatctttcgccttcttctgtaccattaacacatacactcggtggttgtgaaaccctcaccacacatgggtaaaaagaaaaaccttcaaaataaatagagacctctagagacacaactgcgatacactataatatgtgtctgtgtgcgcctctcgtggtcacgcgagataaatctatacaattttttacacaaccggagggctacatcacttctataagaaca

SEQ ID NO: 24856 - DNA, 772 bp, Macaca Mulatta
  misc_feature (1)...(772): n = A,T,C or G
gggatagaatttctttataatttgatagagattatattgtttgtgttttattttgagtgagaagaattttaaaacctttttatgtgaattaccatcttgtttctttcacctttgaaacagtggattgtagcagagacattgtagcaacccagagttatgcttttggaatgtggtcctcactgtgcaggagaacatggggatcctttgttaacattcccagtgtgcacacactttctgcttcctccgtccagttgctcaagttcttagtattttagcctaacgtttttatcacctacttttcttgaaaagtgttccttttgtcacttagttactgattttcctgggtttgacatactaagtattctatgagatgatatatatgctttttttgaaagctaattctcatgaattcaagtagctgagttcctttgtttcttttattcactaaagtagctggcacaaaacacagaaacctagagcagtagttttatgtcaatgctcatgagtttgtatcgataatataattgttgatccacttataattcgtgcaatactgtatgtatgtagacattgagttgtcaattaaagaaaatgtggccctctttgtgatcaacnnnnncannnnnnnnnnnnnnnnnnnnctaacccccacaaacaaccctcacaccaaccananccctttgtcgggcggccctcgggccctccgagagtgcttttctaaaacctttctttttgggccccccgggcccccaatagggtaaaatgaaacctg

SEQ ID NO: 24857 - DNA, 528 bp, Macaca Mulatta
tctcttataggaacaattggcttctttgcatgcttttggtttgttaccaaaatatacagtgtggtgaaggttgactgaagaagtccagtgtgtccagttaaaacagaaataaattaaactcttcatcaacaaagacctgtttttgtgactaccttgagttttatcagaattattggcctagtaatccttcagaaacaccgtaattctaaatacacctcttcccacatacctttcccccatgagatgtgtcttcaacactataaagcatttgtattgtgatttgattaagtatatattcggttgttctcaatgaagagcaaatttaaatattatgtgcatttgtaaatacagtagctataaaattttccatacttctaatggcagaatagaggaggccatgttaaataatactgatgaaaggcaggacacaggattgtaaataggattttctaggctcagtaggtggaaagaattatttttctttgaaggaaatgacttattgtcatggtaattttgaaggatgattcc

SEQ ID NO: 24858 - DNA, 1909 bp, Macaca Mulatta
  misc_feature (1)...(1909): n = A,T,C or G
tctatctatctatctctccctctctggagaaactaaagtctagactggacagcatccacaagagaagcacctagaaggagaattttccccagcagcttgctcaggaccctgcaggagccgcagctgggactggacctgctgttaaccatgaactcttcctgctgcctgtcttctgtttctccgatgctgcctaacctctctgagcaccctgcagcccctcctgccagcaaccggagcggcagtgggttctgtgagcaggtcttcatcaagccggaggtcttcctggctctgggcatcgtcagtctgatggaaaacatcctggtgatcctggctgtggtcaggaatggcaacctgcactctcccatgtacttcttcctgtgcagcctggctgcagccgacatgctggtgagcctgtccaactccctggagaccatcatgatcgccgtgatcaacagcgactccctgaccttggaggaccagtttatccagcacatggataatatcttcgactctatgatttgcatctccctggtggcctccatctgcaacctcctggccattgccatcgacaggtacgtcaccatcttctatgcccttcggtaccacagcatcatgacagtgaggaaagccctcaccttgatcggggtcatctgggtctgctgcggcatctgcggcgtgatgttcatcatctactccgagagcaagatggtcatcgtgtgtctcatcaccatgttcttcgccatggtgctcctcatgggcaccctatatatccacatgttcctcttcgccaggctccacgtccagcgcatcgcagtgctgccccctgctggcgtggtggccccacagcagcactcctgcatgaagggggctgtcaccatcactatcctgctgggtgttttcatcttctgctgggcgcctttcttcctccacctggtcctcatcatcacctgccccaccaatccctactgcatctgctacacggcccatttcaacacctacctggttctcatcatgtgcaactccgtcatcgaccccctcatctacgccttccgcagcctggagctgcgcaacacgttcaaggagattctctgcggctgcaacagcatgaacttgggctaggatgcccgtggaggtgttccacatccagccaagagacaaaaacaacgctcagacgggacgtaaaagggtgttaggagctggaactgtgcttggcttcgtctgtaagctcgtggccctttgcagacgggacacggcgtaggatgggctgtctgtgaggatctgtgtgtgggtaagtcagtttgatctagcacatagcctggaagaatcaggcaaagcagccctgagtgtcatctgtgttcattgctaggcacccagggtttgtggcccctgcctgcttattggctttgtaccagtaactgtgcttcaagccaaccagaccggagggctctcgtgagcagaaagagtgcttagacttccggcaagcatcctggctcacagcggccacctcctgaccactaccgggagagctttgcacatattctgtgggagattgagtgaagccctgaaaacaatgtgatatttgctgctcccttccagaacttacatctgtgccagcctccccgaacccctgcacagagacatgacccccttctccctgtgccgttgtcatggttgttattattgttggagttttgttcgttaaaatctaagcttgggcccgaacaaaaactcatctcagaagaggatctgaatagcgccgtcgacnnnnnnnnnnnnnnnnnntgagtttaaacggtctccagcttaagtttaaacnnnnnnnnnnnnnnnnnnnnnnnnnnnnnnnnnnnnnnnnnnnnnnnnnnnnnnnnnnnnnnnnnnnnnnnnnnnnnnnnnnnnnnnnnnnnnn

SEQ ID NO: 24859 - DNA, 1079 bp, Macaca Mulatta
  misc_feature (1)...(1079): n = A,T,C or G
gggattccagcggcagacagcactggggccgagatgtctcgctcaatggccttagccgtgctggcgctactctctctttctggcctggaggctatccagcgtactccaaagattcaggtttactcacgccatccaccagagaatggaaagccaaatttcctgaattgctatgtgtctggatttcatccatctgatattgaagttgacttactgtataatggagcagaacaatgggaaaagtggcagcattcagaaacttgtctttcagcaaagactgggtctttctatctcttgtactacactgaattcaccccctatgaaaaaaatgagtatgcctgacgtgtgaaccaagtgactttgtcaggggcccaggataagttaaaatgggattagaaatcaataaagctatccttttggaaggattagagaaaatgaccgcccttttgccaattggagaggcaaattaccaaaaattaggggctatacctctgggcatgtttgttaatacgttgaaggattggccttatggtaccgtaatcttttctcgcctctaaagataatgggtgtataactgtgttatatataatagagagagtggagttttatgaaaggactctgtgggcctgngagcgcagataaacatacgatcactttaagtttgtgttctaaaaactattcgctcatgacaccagccatggaatcccaacctcaggcccttcagagaaacagtgcgtcgatttgctcacatctgtcttgaaaaaaggggcggaatctccggggagaggtaagacagcatcttaatggaccttctaaatattcggaagaaagcaggatccatgtagggagaaacacaatttataatagtcgatgaattgaggggcggtcactgcacatgaaagagatgaaattatcctagttcgataaggtaaagctatattcgtgttttaggatcggaagcagagctgtggtggcggcncaaaatcgctagataaggtggagtcagatctgcgacactagtactatgtggggaccgatatgaaanagaccctagtagaggtaaaagtcgtgcgtctgtctgc

SEQ ID NO: 24860 - DNA, 513 bp, Macaca Mulatta
  misc_feature (1)...(513): n = A,T,C or G
ctcagatgtctctggcgtgtgggtaggtggtggcagcgcagcctctcccgcagaagggaactgcctgggctcccttgtgcctgggtgaagccgctgctgggttttcctcccggagaggggacggtcaatcctgtgggtgaaccacagagggaaacgcagcagctcctctccactgaaggaagtgggacttcctgtcgccggagagcctgtgcggcctacgggagccagcgcagcttggatggagattccgtgagaagccgtgngtggaaccaggagcctcaccaaatccactccacaccagcgctgatgcccagtaaagatgtccactgaggaatgatgaatctccctttatggattcatttattatttcaatgtgactttcattttttcaatggataagcctgtctatggtacaaaaatcaaaaagcattcaagagtgtacagtgaaaactctccctttccagaatttcaagtcacctccttaaggtagtcacgcttgttgttttgaggttc

SEQ ID NO: 24861 - DNA, 788 bp, Macaca Mulatta
gggagaccagctgaagagcgaggagccagtggcagtcgctgatctcaccgccgctcagggtttttagaacttcagccataaaaatgggcagaattttccttgatcatatcggtggtacccgtctattttcttgtgcaaactgtgatacgatcctgaccaaccgctcagaactcatctccactcgtttcacaggcgccactggcagagcgtttctttttaacaaggtagttaacctgcagtacagtgaagttcaagatcgggtcatgctcactggccgccacatggttcgagatgtgagctgcaaaaactgcaatagcaaactgggatggatctatgagtttgccactgaagacagccagcgatataaggaaggccgcgtgatcctggaacgtgctctagttcgagagagtgagggctttgaagagcatgttccatctgataactcttgaagatacagagagaaatccatcttttcccaggtctccttcactgaaaaccaaaatctacttacatacactgtcaccttagcatccgagtcggattaaatgaatgccggaacaagaagttggtggagaatctaagatggaaacctttcctttcacttagcttactatttcgctaaatttttggaatttcccaccccaaacagctttgtgtaaagagtaattttttggcgattgcccgttaaatttttttaccctaaggtttacctccctggagggcaaaaaaattccgtcacccttagaggggggggcctttggtaaagggaaaaaaattctgtgggcctg

SEQ ID NO: 24862 - DNA, 2214 bp, Macaca Mulatta
  misc_feature (1)...(2214): n = A,T,C or G
aaaaacaaggggagaagggacgacactaacattattgcctaccttctaaatgctaggtacttttcctaagacagtttattaacatttacctggatctttatatagttttgtaaaaatattnnnnncttctttcacccattgtattaagtaagtattgttgttttcattttttagatttgtttgtttatttagcaaccatttcctgagcatccattctgtggggtaggtgtacactgagcagtagttacaaatgggagcctgaggctcactgagcagaagcatcaccttcaatttctcactgctagtaactattggagctagaataataataatcgagcatttaccctgggcccagcactgtggtaaccattttacaaaaagagaatactcagttaaagacgagaaaagtgaggctcagaaaggtatagtaacttactcaaggtcacacagatagtgaatgacagatctaagattcaaaatccaggtctatttgactgtatatggttcccttggatgatttcatccactctcatgttttcaagcatcgtctacatgctgatgacattccagtttgtatctttagcccagaccagtcccctgactttcagatgatatttcctagatgccccatagacatctcaaatataacatgtcttctctccattggcagtaccagcaagccagacactccagctaggaactcaaggggtcagcctagacctcacatctcccactctgagccaaccaagtcctagtggtttgattaggttggtgcagaagtaattgtggtttttgcccattacttctaaatgtattacttctttgcatttgctgttccagttgcaatgctctttccccagacatctgcatgttcttgtcctcatttgatttaggtctctctttcccttatcaaaaaggcctttgccgactaccctaaatacaatagcactcccccctaactattctttaatgctgtacctggctttatttttcttcagaatatttattactctttaacatagttatttatttctttattgtctatctccccactcccagaatgtaagcttcatgaaagcagagtctttgttctgtttcctgctatatctccagcatctggaacagagcctgggacaagctaggtcttcataactatttattggatagttgagtgactgattgtggatgtacaggataagcatctaattctatcagagagtgcttcctggaggagctgatacctgtgttcagtcttaaagggcaggagtttggataggggaatgttagttaatataatgaaaatttcaaaattaaagggcaggagtaattaattgggtggttgagatgcatgcctggcagagcaagcagagtatggaaaaacccagaagtggagatatctggaaggtgattggtatggctggagtagaggacactggcaggagagtagccggagatgaggcaggagaggaaggcaagaaccaggaccaggtctgaagggtcttgagcatcaggagaaggcattagactgattcaaagcaggaactgctcagttttgtattaataggctatgtggaagagaagccgggatagggagactggaagtagcaagcctcatgtttaaaaaacgaaagagttctgctaacttaggaacccagagtaagttgaaaacaaattgctctctggctgaaagccttcagtggtgatagttggaaagtagaatgattgcagagatgtgctttggagatttggaaagcaggctgtgttatttgtggctgttttctccttgatgcatgtgcagaatttccatgaacgctaatggagctattctgagcatttgctgaagggaaggaagcttgcagacatccctcccaatcttgcccacacaccgagaagtacctcggagctacagtctgttaaaaatgagaaggttgaagccgggcacattgattcatgcctataatcccagcactttgggaggtcgaggcaggcagatcacctgaggtcagaagtttgaaaccagcctgcccaacatggtgaaaccccggctctactaaaaatacaaaaattggccagatgtggtggcaggcgcctgtaatctcagctacttgggaggctgaggcataagaatcgcttgaacctgggagacagaggctgcagtgaaccaagatcgcaccactgcactccagcctgagcaacagagtgagactctgtctc

SEQ ID NO: 24863 - DNA, 608 bp, Macaca Mulatta
gggagcgggcgagtaggagggggccccgggctatatatatagcggctcggcctcgggccggcctggcgcgcagggaggcgcgcactgctccgcagggtcccagctccagccgcgcgctttacgcccggctcgccgctccatgcagccggggtagcgcccggcgcccgggggccccgtcgctcgcctcccgctcctactcggctacgcattcccgcacgagctctgctgtgcgctcccgcgggccgccacaggcgcagctctgccccccagcttcccgggcgcacggaccgcctgacggacgcgcggccctcgggccgggatgtcggggcccgggacggccgcggcggcgctgctcccggcggtcccgctggccttgctagcgccctgggccgggccgagggggcgccgccgcacccaccgcacccaacggcaccctggaggccgagctggagcgccgctgggagagcctggtggcgcgctcgttggcgcgcctgccggtggcagcgcagcccaaggaggcggccgtccagagcggcgccggcgactacctgctgggcatcaagcggctgcggcggctctactgcaacgtgggcatcggcttccacctc

SEQ ID NO: 24864 - DNA, 152 bp, Macaca Mulatta
  misc_feature (1)...(152): n = A,T,C or G
ggtctgttcctggcctctgacgtccagcagctgcggcaggcgatcgaggagtgcaagcaggtgattctggagctgcccgagcagtctgagaagcagaaggatgccgtggtgcgtctcatccacctccggctgaagctccaggagctgaaggn

SEQ ID NO: 24865 - DNA, 1759 bp, Macaca Mulatta
  misc_feature (1)...(1759): n = A,T,C or G
atagacgattcatcaatgacatggtgaagatttattctatcacagccactaatgcagttgatggggtggcgtcctcatgccgtgcctgtgccctcggttctgaacagtcgggttcatcgtgtgtcccctgccctccaggccactacattgagaaagaaaccaaccagtgcaaggaatgtccacctgacacctacctgtccatacatcaggtctatggcaaagaggcttgtattccatgtgggcctgggagtaaaagcaatcaggnnaggaccattcggtttgctatagtgactgctttttctaccatgaaaaagaaaatcagagtttgcactatgactttagcaacctcagcagtgtgggctcattaatgaatggccccagcttcacctccaaaggaacaaaatacttccatttcttcaatatnnnnnnnnnnnnggggaagaagatggctctctgtaccaacaatataacagactttacagtaaaagaaatagtggcagggtcagatgattacacaaatttggtaggggcatttgtatgccagtcaacaattattccttctgaaagtaagggtttccgagcagccttgtcatcacaatccatcattctggcagatacattcttaggnnnnnnnnnnnnnnnnnnnnnnnnnnnnnnnnnnnnnnnnnnnnnnnnnnnnnnnnnnnnnnnnnnnnnnnnnnnnnnnnnnnnnnnnnnnnnnnngtcttctacaacgacaacatcttgtattaatggccgatcaactgctgtgaaaatgaggtgtaatcctactaaatctggagcaggagtgatttcagtccccannnnnnnnnnnnnnnnnnnnnnnnnnnnnnnnnnnnnnnnnnnnnnnnnnnnnnnnnnnnnnnnnnnnnnnnnnnnnnnnnnnnnnnnnnnnnnnnnnnnnnnnnnnnnnnnnnnnnnnnnnnnnnnnnnnnnnnnnnnnnnnnnnnnnnnnnnnnnnnnnnnnnnnnnnnnnnnnnnnnnnnnnnnnnnnnnnnnnnnnnnnnnnnnnnnnnnnnnnnnnnnnnnnnnnnnnngccggtgtgggagcttttactgctgttttgctggtggctctgacctgctactntctggaaaaagaatcaaaactggaatacaaatattccaagttagtaatgacgactaactcaaaagagtgtgaactcccagctgcagacagttgtgctatcatggaaggagaagataatgaagaagaagttgtatattccaataaacagtcactactaggaaaactcaaatctttggcaaccaaggtgagannnnnnnnnnnnnnnnnnnnnnnnnnnnnnnnnnnnnnnnnnnnnnnnnnnnnnnnnnnnnnnnnnnnnnnnnnnnnnnnnnnnnnnnnnnnnnnnnnnnnnnnnnnnnnnnnnnnnnnnnnnnnnnnnnnnnnnnnnnnnnnnnnttggtgatctcacagaggagggccatgctgccgaaaaggttaaggagattgaaacatttgattgccttatcacatggtcaagtaccttgccaaataaaagaaagcaaatgatttgggtctcaactgaagatgaagctcaactcaggaagagatttatctgtatatacacgtaactgaaaactaagtttaagcccaccaatgcactgctgatgcatgccatataattaatgggtaacttttattctttataatgtctacataacaagtgtgatttggagggcacatgtgagcatatgcattatgatccaattt

SEQ ID NO: 24866 - DNA, 136 bp, Macaca Mulatta
agagaggcagatgaaggctgtaaaaaacctttagaaagattgctgaacatctggcaagaacgaagtgtgtatggcggcgagttcatacagcagctgaagctgtctatggaggactccaagagccctccccccaaag

SEQ ID NO: 24867 - DNA, 852 bp, Macaca Mulatta
  misc_feature (1)...(852): n = A,T,C or G
gggtgaagacaggttcatgatgcagtttagtaaaatcgagaggctcatgcagaagatgaccatcatggctttcattgggaactttgctgaaagcattcagatgctgactcctcaactacatgcgattatagcagcatctgtctctataaagtcgtcccagaaactcaagaaaattctggagatcatcttagcccttggaaactacatgaatagcagtaaaagaggagcagtttatggatttaaacttcagagtttagatctgctcttagatacaaagtcaacagacagaaagcaaacactgttgcactatatatccaatgtggtgaaagaaaaatatcaccaagtgtccctgttttataatgagcttcattatgtggaaaaagctgctgcagtctcccttgagaatgttttgctggatgtcaaggagctccagaggggaatggacttgaccaagagagagtacaccatgcatgaacacaacacactgctgaaaggagttcatccctcaacaatggagggaaagctgaaaaaaagctgccaggaatgaagccaaaaattgcaccaggaagccctttgaagaaagtttgtgaaagtaannnnnnnnnnnnnnnnnnagacaacccccccccctcggtctttcttttcccgtccttcgtcccgttttgggaaaaacctaccagccaaggccgaaaaaggggaaaacgagcctttgggaaaaaaggccgggaacaaaccttccccagggaaaaaaacactcccgggaaccaaagaaaacttcttgaatgggagacacccagggatttcaaaaaggcctccccttcccccctaaaatccaaaaaaagcgcccccccg

SEQ ID NO: 24868 - DNA, 200 bp, Macaca Mulatta
ggtgtctgtgataaggcccctgacttcctctccccgtctgaagaccaggtgctgaggcctgccttgggcagctcagtggctctgaactgcacagcttgggtagtctctgggccccactgctccctgccttcagtccagtggctgaaagatgggcttccattgggaaatgggggccactacagcctccacgagtactcctg

SEQ ID NO: 24869 - DNA, 174 bp, Macaca Mulatta
  misc_feature (1)...(174): n = A,T,C or G
actcatcgaggagacaaccagcaccgagtgtcgccaggacgtggccacgaacctgctcaagctcttcctggggcaggggctggccaaggacttcctggacctactcttccagctggagctgagtcgcaccagtgagngtgaaaccaacaccctgttccgaagcaactctctggc

SEQ ID NO: 24870 - DNA, 282 bp, Macaca Mulatta
gactttgcattgggcacataagaggttcttattcatctgtagagaacaaatttccagtattttttatttcttgcttattttaattatcaaatagaccgttaaagaatgttctataaccatttttaaattccaatcttcaccaggagaggaatatgtgatatgaatggaatggcaaaaggaaaataaatccacctcaaattcattgattccaatgagaaatgtctatcttttaaatcaagagtaatactcttgttaactataccttatgtttttgtatagttt

SEQ ID NO: 24871 - DNA, 864 bp, Macaca Mulatta
  misc_feature (1)...(864): n = A,T,C or G
acgaggtggccctggaatacttgaattctggctgatggcgtaaacagctctgcaaacanatccctttcataccacaaagccaagacgttccgtggtatttgtgcagaagagatgaagacttctcaatatgcttattttgctttgcataattggctctttttaagagcccaagaaagtgtttctgaaactgcttgcactgcccaatcccagtaatgctgctgcctgacagaaacacacacacagccacagtcgccaaatcccgtgctccttgccaccggcttcctagagcagcgtagacatctggtaaactgaagagcacaactatattcttatgaaggaatttgtacctttggggtattattttgtggcccgtgacccttgttattgttacagctgagtgtgtttttgttctgtggagaatgctgtctggcattatgataatatattattttaggtaatatttgtactttaacatgttgcataatatatgcttatgtagctttccaggactaacagataaatgtgtaatgaacaaagacatgttgtatgagtcgtcgtttctatcagatttgtattgtttccaagggaaaagcttgggggaggactcagttcacaaaatgcaaaactcgacgatcggattcacggacctagagcttttccatgtgtttatattgtaaatatttttgatttcatcaaattatttattcattaaaagaaatttttgtgaagcacagtgagtgacagtcatttttcttaaggcctggaaacgattttctgtatgatgttactctatgtgaattctncactcaataaatgatgacccgtaagcagccgtggcgtgttcctggtgtcccagcgcacagg

SEQ ID NO: 24872 - DNA, 3577 bp, Macaca Mulatta
  misc_feature (1)...(3577): n = A,T,C or G
ctttaatttccaagattgcacccctcctcctctagcccagatcattaatcctccctccggcctgggctgctggatgcagcggcggccggacttggtcccaggagcagggagagtgcgatgccggccctcctagccgcgtgcccgggccatggtgcggcnnnnnnnnnnnnnnnnnnnnnnnnnnnnnnnnnnnnnnnnnnnnnnnnnnnnnnnnnnnnnnnnnnnnnnnnnnnnnnnnnnnnnnnnnnnnnnnnnnnnnnnnnnnnnnnnnnnnnnnnnnnnnnnnnnnnnnnnnnnnnnnnnnnnnnnnnnnnnnnnnnnnnnnnnnnnnnnnnnnnnnnnnnnnnnnnnnnnnnnnnnnnnnnnnnnnnnnnnnnnnnnnnnnnnnnnnnnnnnnnnnnnnnnnnnnnnnnnnnnnnnnnnnnnnnnnnnnnnnnnnnnnnnnnnnnnnnnnnnnnnnnnnnnnnnnnnnnnnnnnnnnnnnnnnnnnnnnnnnnnnnnnnnnnnnnnnnnnnnnnnnnnnnnnnnnnnnnnnnnnnnnnnnnnnnnnnnnnnnnnnnnnnnnnnnnnnnnnnnnnnnnnnnnnnnnnnnnnnnnnnnnnnnnnnnnnnnnnnnnnnnnnnnnnnnnnnnnnnnnnnnnnnnnnnnnnnnnnnnnnnnnnnnnnnnnnnnnnnnnnnnnnnnnnnnnnnnnnnnnnnnnnnnnnnnnnnnnnnnnnnnnnnnnnnnnnnnnnnnnnnnnnnnnnnnnnnnnnnnnnnnnnnnnnnnnnnnnnnnnnnnnnnnnnnnnnnnnnnnnnnnnnnnnnnnnnnnnnnnnnnnnnnnnnnnnnnnnnnnnnnnnnnnnnnnnnnnnnnnnnnnnnnnnnnnnnnnnnnnnnnnnnnnnnnnnnnnnnnnnnnnnnnnnnnnnnnnnnnnnnnnnnnnnnnnnnnnnnnnnnnnnnnnnnnnnnnnnnnnnnnnnnnnnnnnnnnnnnnnnnnnnnnnnnnnnnnnnnnnnnnnnnnnnnnnnnnnnnnnnnnnnnnnnnnnnnnnnnnnnnnnnnnnnnnnnnnnnnnnnnnnnnnnnnnnnnnnnnnnnnnnnnnnnnnnnnnnnnnnnnnnnnnnnnnnnnnnnnnnnnnnnnnnnnnnnnnnnnnnnnnnnnnnnnnnnnnnnnnnnnnnnnnnnnnnnnnnnnnnnnnnnnnnnnnnnnnnnnnnnnnnnnnnnnnnnnnnnnnnnnnnnnnnnnnnnnnnnnnnnnnnnnnnnnnnnnnnnnnnnnnnnnnnnnnnnnnnnnnnnnnnnnnnnnnnnnnnnnnnnnnnnnnnnnnnnnnnnnnnnnnnnnnnnnnnnnnnnnnnnnnnnnnnnnnnnnnnnnnnnnnnnnnnnnnnnnnnnnnnnnnnnnnnnnnnnnnnnnnnnnnnnnnnnnnnnnnnnnnnnnnnnnnnnnnnnnnnnnnnnnnnnnnnnnnnnnnnnnnnnnnnnnnnnnnnnnnnnnnnnnnnnnnnnnnnnnnnnnnnnnnnnnnnnnnnnnnnnnnnnnnnnnnnnnnnnnnnnnnnnnnnnnnnnnnnnnnnnnnnnnnnnnnnnnnnnnnnnnnnnnnnnnnnnnnnnnnnnnnnnnnnnnnnnnnnnnnnnnnnnnnnnnnnnnnnnnnnnnnnnnnnnnnnnnnnnnnnnnnnnnnnnnnnnnnnnnnnnnnnnnnnnnnnnnnnnnnnnnnnnnnnnnnnnnnnnnnnnnnnnnnnnnnnnnnnnnnnnnnnnnnnnnnnnnnnnnnnnnnnnnnnnnnnnnnnnnnnnnnnnnnnnnnnnnnnnnnnnnnnnnnnnnnnnnnnnnnnnnnnnnnnnnnnnnnnnnnnnnnnnnnnnnnnnnnnnnnnnnnnnnnnnnnnnnnnnnnnnnnnnnnnnnnnnnnnnnnnnnnnnnnnnnnnnnnnnnnnnnnnnnnnnnnnnnnnnnnnnnnnnnnnnnnnnnnnnnnnnnnnnnnnnnnnnnnnnnnnnnnnnnnnnnnnnnnnnnnnnnnnnnnnnnnnnnnnnnnnnnnnnnnnnnnnnnnnnnnnnnnnnnnnnnnnnnnnnnnnnnnnnnnnnnnnnnnnnnnnnnnnnnnnnnnnnnnnnnnnnnnnnnnnnnnnnnnnnnnnnnnnnnnnnnnnnnnnnnnnnnnnnnnnnnnnnnnnnnnnnnnnnnnnnnnnnnnnnnnnnnnnnnnnnnnnnnnnnnnnnnnnnnnnnnnnnnnnnnnnnnnnnnnnnnnnnnnnnnnnnnnnnnnnnnnnnnnnnnnnnnnnnnnnnnnnnnnnnnnnnnnnnnnnnnnnnnnnnnnnnnnnnnnnnnnnnnnnnnnnnnnnnnnnnnnnnnnnnnnnnnnnnnnnnnnnnnnnnnnnnnnnnnnnnnnnnnnnnnnnnnnnnnnnnnnnnnnnnnnnnnnnnnnnnnnnnnnnnnnnnnnnnnnnnnnnnnnnnnnnnnnnnnnnnnnnnnnnnnnnnnnnnnnnnnnnnnnnnnnnnnnnnnnnnnnnnnnnnnnnnnnnnnnnnnnnnnnnnnnnnnnnnnnnnnnnnnnnnnnnnnnnnnnnnnnnnnnnnnnnnnnnnnnnnnnnnnnnnnnnnnnnnnnnnnnnnnnnnnnnnnnnnnnnnnnnnnnnnnnnnnnnnnnnnnnnnnnnnnnnnnnnnnnnnnnnnnnnnnnnnnnnnnnnnnnnnnnnnnnnnnnnnnnnnnnnnnnnnnnnnnnnnnnnnnnnnnnnnnnnnnnnnnnnnnnnnnnnnnnnnnnnnnnnnnnnnnnnnnnnnnnnnnnnnnnnnnnnnnnnnnnnnnnnnnnnnnnnnnnnnnnnnnnnnnnnnnnnnnnnnnnnnnnnnnnnnnnnnnnnnnnnnnnnnnnnnnnnnnnnnnnnnnnnnnnnnnnnnnnnnnnnnnnnnnnnnnnnnnnnnnnnnnnnnnnnnnnnnnnnnnnnnnnnnnnnnnnnnnnnnnnnnnnnnnnnnnnnnnnnnnnnnnnnnnnnnnnnnnnnnnnnnnnnngcctcccaggacatgctggcaagggaggagggccggccagcacttggtaggccatcagtctggccatctgtcatgtcacagaagcaaaccgtgccttctggctctgcgccccatattcccagcatcatagacatccaacagcaccagcaggagagtgggctggcctgctggatgctgttcgtgcctgtccctgctctgcctcccacccagttgcctgaatcatcccagctcagatgcagccactgtctcttgtcaagtgggacctcatgctaattctcagaaggctaacttgagaggtctggggccttgttccctagagggtccccagggactctgcagtgtccttcgcaaatccccactgtactcaatgccctacatcctcctctatggtctctcccctggcttgcttcatggccactgaaccagtcactttgtatgctatgttcctactgtgatggaaaactaaatgactataacttattttatatccatattcagattatatagagaatattctatgtatctatgatgtgcttactactgcagtgcattggtcattagtcttcaggttaatacagtacatttattctttggta

SEQ ID NO: 24873 - DNA, 207 bp, Macaca Mulatta
  misc_feature (1)...(207): n = A,T,C or G
cctgaggcctcccgtccgcctcgccactcgcccggcgggcctggggtcgctgcccgtcggtctggaaaggtnnnnnnnnnnnnnnnnntcacaatctgtacgtgagaaaggacatgaggagactaaagacctgggattttgccgatcagaatgaaaccaatgttgaaagacttttcaaatctattgttggtggtgctctgtgactat

SEQ ID NO: 24874 - DNA, 856 bp, Macaca Mulatta
  misc_feature (1)...(856): n = A,T,C or G
ggggagggggaggaagagggcggcggcggcggtggtgactgagcggagcccggtgacaggatgttggtgttggtattaggagatctgcacatcccacaccggtgcaacagtttgccagctaaattcaaaaaactcctggtgccaggaaaaattcagcacattctctgcacaggaaacctttgcaccaaagagagttatgactatctgaagactctggctggtgatgttcatattgtgagaggagacttcgatgagaatctgaattatccagaacagaaagttgtgactgttggacagttcaaaattggtctgatccatggacatcaagttattccatggggagatatggccagcttagccctgttgcagaggcagtttgatgtggacattcttatctcgggacacacacacaaatttgaagcatttgagcatgaaaataaattctacattaatccaggttctgccactggggcatataatgccttggaaacaaacattattccatcatttgtgttgatggatatccaggcttctacagtggtcacctatgtgtatcagctaattggagatgatgtgaaagttagaacgaattgaatacaaaaaatctttaaggccaggcctgtccttgatgatttttttttttcattggtcctattgaaaatcaagtaaattaaaccttttaagagcccacaaaaattggtttcgctttttataaatatttttgcccgtaaaatataatttaccctccttcctctggttaataacataatttggcttcaaaatctttccttggtatattttgtaaatttgtttttttttttcgtccncaccctgacccccttgncctctnttgagt

SEQ ID NO: 24875 - DNA, 2546 bp, Macaca Mulatta
  misc_feature (1)...(2546): n = A,T,C or G
agtcacacagctgactggtaggtgactggaggtgttccctgatgtggccccaaccctgcctccctccccaccccgcgatgttagaagaaactcgagagcgcaaattggcagcagccaagaaaaaggtaaannnnnnnnnnnnnnnnnnnnnnnnnnnnnnnnnnnnnnnnnnnnnnnnnnnnnnnnnnnnnnnnnnnnnnnnnnnnnnnnnnnnnnnnnnnnnnnnnnnnnnnnnnnnnnnnnnnnnnnnnnnnnnnnnnnnnnnnnnnnnnnnnnnnnnnnnnnnnnnnnnnnnnnnnnnnnnnnnnnnnnnnnnnnnnnnnnnnnnnnnnnnnnnnnnnnnnnnnnnnnnnnnnnnnnnnnnnnnnnnnnnnnnnnnnnnnnnnnnnnnnnnnnnnnnnnnnnnnnnnnnnagacaatcaacatcctcacattggaaaagacagacttgaagaccaccctttaccatactaaaggtgctgccagacactnnnagaagagtccaaggatctggctggccgcctgcaatactctttacagcgtattcaagaattggagcgggctctctctgctgtgtctacacagcagcgggaagaggacaggnnnnnnnnnnnnnnnnnnnnnnnnnnnnnnnnnnnnnnnnnnnnnnnnnnnnnnnnnnnnnnnnnnnnnnnnnnnnnnnnnnnnnnnnnnnnnnnnnnnnnnnnnnnnnnnnnnnnnnnnnnnnnnnnnnnnnnnnnnnnnnnnnnnnnnnnnnnnnnnnnnnnnnnnnnnnnnnnnnnnnnnnnnnnnnnnnnnnnnnnnnnnnnnnnnnnngcttgtctgaactcaaaaaccagatggngctgagcccccatcctcggcacccccagtagggacctctgaggtggaacagctacaagatgaggccaaacacctgaggaaggaggtggaaagtctggagggaaagctccaatcccaggtggaaaacaatcaggccttgagtctcctgagcaaggaacaaaaggagaggctccagaagcaggannnnnnnnnnnnnnnnnnnnnnnnnnnnnnnnnnnnnnnnnnnnnnnnnnnnnnnnnnnnnnnnnnnnnnnnnnnnnnnnnnnnnnnnnnnnnnnnnnnnnnnnnnnnnnnnnnnnnnnnnnnnnnnnnnnnnnnnnnnnnnnnnnnnnnnnnnnnnnnnnnnnnnnnnnnnnnnnnnnnnnnnnnnnnnnnnnnnnnnnnnnnnnnnnnnnnnnnnnnnnnnnnnnnnnnnnnnnnnnnnnnnnnnnnnnnnnnnnnnnnnnnnnnnnnnnnnnnnnnnnnnnnnnnnnnnnnnnnnnnnnnnnnnnnnnnnnnnnnnnnnnnnnnnnnnnnnnnnnnnnnnnnnnnnnnnnnnnnnnnnnnnnnnnnnnnnnnnnnnnnnnnnnnnnnnnnnnnnnnnnnnnnnnnnnnnnnnnnnnnnnnnnnnnnnnnnnnnnnnnnnnnnnnnnnnnnnnnnnnnnnnnnnnnnnnnnnnnnnnnnnnnnnnnnnnnnnnnnnnnnnnnnnnnnnnnnnnnnnnnnnnnnnnnnnnnnnnnnnnnnnnnnnnnnnnnnnnnnnnnnnnnnnnnnnnnnnnnnnnnnnnnnnnnnnnnnnnnnnnnnnnnnnnnnnnnnnnnnnnnnnnnnnnnnnnnnnnnnnnnnnnnnnnnnnnnnnnnnnnnnnnnnnnnnnnnnnnnnnnnnnnnnnnnnnnnnnnnnnnnnnnnnnnnnnnnnnnnnnnnnnnnnnnnnnnnnnnnnnnnnnnnnnnnnnnnnnnnnnnnnnnnnnnnnngccaaggggcagtgccaacacgcggcaccagcagttggaggatatcatcaggctggaccagaacgaggaggagattaaggtnaggtgaatctactggagctgcagaagctgctgttgacacttgtgggtgaccatgagggacatgacaaattcctccctgctgcccacaaccctgctgatgagcctgctccaggggccccagccccccaggagattggggctgcnnnnnnnnnnnnnncgtggagcctgcaccgggacaggccagggagggttctccccatgacaaccccactgcacagaagaccctgcagctgcttcctgtaacgcaggacacccaggagcacccaggcttggccaccaaaccctgcgtgccattcttttaccgggcagccgagaacagagagataaacatcatcattatctgagagctggtcaagaaattttaaaaaaacaacaacaaaaagttatggggttaatcccctacacagttcatctacttcattggaatgttagagcccctcatgtttgtgtttctaatttacagattaaatttatttctgaaaagtaagggagagtgggtctttccctgatgttcactctggcatccgtcagcatttttgtttttaattgataattgtaggtcattagctcgcatatcgagtttgcccttacatggtgggagttcaaactcacaaagacccactatttgcacaaaactattcttactggttcggaataggctgccctgct

SEQ ID NO: 24876 - DNA, 559 bp, Macaca Mulatta
  misc_feature (1)...(559): n = A,T,C or G
tcccgggatcggccgnnnnnnnnnnnnnnnnnnnnnnnnncaggtaaccggaacctttaattttattatgtggaatgcttaacgcagagttaataggggctagagtggctaggagaggggactactgagataaataacaggagacagtaatgatttacatgtggatttggggggctgcagaacaggaaaatggggggcagatatagctacatactttattcaaataccactgggaggcaaggggcaagaggcaagggcagaatgtacaggtcaggattctagtgtcttcagcctgctgccagcaacctgggtgctgggccctgtgtctcctggagcaaagggttcaggcctgagcagctgtcactctctgggaagcccagggagtggggctgacagagcaggggacgtagagcctantaagggaagagggagcgggcaaggagcccagggaggaaggctctgtgaattgggtatgattcctttcctggagcccctgcctnctcacctcctgggatgcgcctcaaggtcacagaggttgtaatggaggaggactgggggc

SEQ ID NO: 24877 - DNA, 1491 bp, Macaca Mulatta
  misc_feature (1)...(1491): n = A,T,C or G
gtccgttgtaccagctgggtcatggatctctcccgcctgaaatctgactccacccaccaaaagtctgagcctgcaggcctagatttcgactctgctggccaagattatttctctgcagcccaagaattcgactctttctaccaagaattgaacctagactctcttaatgaagatcttctttcccagttcatgccacatgccaggacagagacctctgtgggcacatatgaatcccactcgacttctgaactggaggatctgacagagcctgagcaaagagagctcaaagccaaactcactaaattggaggctgaaattgtaaccttaaggcaggtactagcagccaaagatagacgctggggaagcacaggaggaagttaggcttcacagctttggtagggnnnnnnnnnnnnnnnnnnnnnnnnnnnnnnnnnnnnnnnnnnnnnnnnnnnnnnnnnnnnnnnnnnnnnnnnnnnnnnnnnnnnnnnnnnnnnnnnnnnnnnnnnnnnnnnnnnnnnnnnnnnnnnnnnnnnnnnnnnnnnnnnnnnnnnnnnnnnnnnnnnnnnnnnnnnnnnnnnnnnnnnnnnnnnnnnnnnnnnnnnnnnnnnnnnnnnnnnnnnnnnnnnnnnnnnnnnnnnnnnnnnnnnnnnnnnnnnnnnnnnnnnnnnnnnnnnnnnnnnnnnnnnnnnnnnnntttattcaaagcctatctcagatcctactatgtatcaagagctgtcccaggttctcaaggcatagaagtaaattagacattgtatgtgctctatagaaacactcagactttcaaatcattataattcagtgagtgctaaaatagagctgggtgccagatataaaagaagtcctgaggaaggggtgttcaactctgtcttggtaggtcaataaagcctttagagagacagaaagtcttagaggaccaggagaagtttgcagacagacaagaatagaatattccagacaacatccagaggaactgagtcacaaaggaatgtataagaatggcatattctaggaactaacagtacatcactgcggctagagaggaaggggaaatggtgttacatgagtngaggaaggggaaatggtgttacatgagtaagaaaaaataagcagggggcaaaaatcataagtagtcttacatactaccttagatattaatatttaagcctttaggaaatgggaggcattgaagcacttaagtaaaaaagtaactatcaaatttttgttttagattactctggtcatcagagaaatagattaagtattaaagaggtagaatcagacttaggaaccaactgcatgaggtcgggagagggggataaatttgcaagataataaggctgtagcattgaaaaggcctgatattattgaaactggagttgcacattcattttgctttggcttttttgtatcagtggtcatgggcaccaaataaaatgcttccatgaacatttggattctggctctaaa

SEQ ID NO: 24878 - DNA, 260 bp, Macaca Mulatta
tgttattattacttgatgaagtactaggaagaacaaatggtttaatttatatacccacctcgttccaaagacaacttaatgtgccagtgaagataaacacaatgctgaaagtcgaaataagaacatgaaatgaaatagctgtttttgaaaattttgtctttgggaaaagatatttatgtggcatgaatacagaaagtacctctgctatgccccttaatttttagtgatgtcctgtactgtttacattgcaaatggtaact

SEQ ID NO: 24879 - DNA, 105 bp, Macaca Mulatta
gatttcacagagatgatgagagccctgggataccctcgacatatttctatggaaaatttccgtacacccaattttggacttgtataagaagtgcttctctggctt

SEQ ID NO: 24880 - DNA, 728 bp, Macaca Mulatta
tgggttttgaggattcctcagatattctctctgctcaaaacacacaggagtaagataaaccttggctacccacactggagattgccccgtcctcctgcctttgccatcccatgagaatggtgggagatcccgagaaaggctacgttttctgaactacgctttccccttcattctctcctaagttgcaaacagaaatttccttcacaagttttctagattgtaaaagaaagttctttactatgggtgtggacattccttcttaatgccaatttcaactttatgtttattaagggatttttcattactcctaaagagtgtctcaaatgtggctagaacaagcaggttagttcactaaatgtaagctacctggcctggaatctaaggatccagttatctctattctgcataagaagagccaggtgctggctaaatgctgtgcacactcacacagcactgatgaggcctcctgataagaacccacactggggtatctcaaagcagacagacatgtccagtcttctgttgccctgtttcctccatgattatatgtccttaacacaaaaatttacatttttcttcttatgtatatgagaagtttctatataatacctgcaatccattctgactggttataatttctctgatattcatatttatatactgattccttctaaatccctatcatgatatcattgacaactgaggcggaagatccctgtattttgagt

SEQ ID NO: 24881 - DNA, 85 bp, Macaca Mulatta
gctcatcaacagagcagacgagcagaccgtttattagctgcaggcaaatacgaagaggctatttcttgtcacaaaaaggctgcag

SEQ ID NO: 24882 - DNA, 2000 bp, Macaca Mulatta
  misc_feature (1)...(2000): n = A,T,C or G
agtcgtgcaggagcagagctcacggcagccggcggccggtgtcccctcgcccagagatagccgtcctcttgcagggtctgccgtgctggagggaaggctgctgctggannnnnnnnnnnnnnnnnnnnnnnnnnnnnnnnnnnnnnnnnnnnnnnnnnnnnnnnnnnnnnnnnnnnnnnnnnnnnnnnnnnnnnnnnnnnnnnnnnnnnnnnnnnnnnnnnnnnnnnnnnnnnnnnngtggacgaccgccaggacttctgccggcagctccactgggccatggaccctccccaggtggtgtttgggcagcccccgcccttggagacagnnnnnnnnnnnnnnnnnnnnnnnnnnnnnnnnnnnnnnnnnnnnnnnnnnnnnnnnnnnnnnnnnnnnnnnnnnnnnnnnnnnnnnnnnnnnnnnnnnnnnnnnnnnnnnnnnnnnnnnnnnnnnnnnnnnnnnnnnnnnnnnnnnnnnnnnnnnnnnnnnnnnnnnnnnnnnnnnnnnnnnnnnnnnnnnnnnnnnnnnnnnnnnnnnnnnnnnnnnnnnnnnnnnnnnnnnnnnnnnnnnnnnnnnnnnnnnnnnnnnnnnnnnnnnnnnnnnnnnnnnnnnnnnnnnnnnnnnnnnnnnnnnnnnnnnnnnnnnnnnnnnnnnnnnnnnnnnnnnnnnnnnnnnnnnnnnnnnnnnnnnnnnnnnnnnnnnnnnnnnnnnnnnnnnnnnnnnnnnnnnnnnnnnnnnnnnnnnnnnnnnnnnnnnnnnnnnnnnnnnnnnnnnnnnnnnnnnnnnnnnnnnnnnnnnnnnnnnnnnnnnnnnnnnnnnnnnnnnnnnnnnnnnnnnnnnnnnnnnnnnnnnnnnnnnnnnnnnnnnnnnnnnnnnnnnnnnnnnnnnnnnnnnnnnnnnnnnnnnnnnnnnnnnnnnnnnnnnnnnnnnnnnnnnnnnnnnnnnnnnnnnnnnnnnnnnnnnnnnnnnnnnnnnnnnnnnnnagactccaggacccacgaagcccctgccctggacagcgggaaggcacggtgaggatggtgccaggccgaggctgcagcccagcaggagtgacccaccctgcctgcgccccacgccccgcggctcctgcctgccctactcgtgtgtccagggcactttcaggaactcgcccatctctcacccgccgagcccatcccccagtgcctactccagccggaccagcagacctgtgcggaatgtcggtgaggaccaggtgcaccctcccctctgccactttccccaggggagtctgtttcaccggctccctcagcctggagctcagcgttttgccacgaggggctatcccatggaggacgtgaagctgcagggagtgccgatgcctccgggggacctgtgcggtccgacgctgctgctagatgtgcccatcaagatggagaaggactctgggtctgaggatgctgcagacggctgtgtgcccagccaggtgtggctgggggccagtgacaggagccatccagccaccttccctaccaggatgcacctgaaaacagagccagactctcggcaacaggtgtacatctcgcacctggggcacggcgtgcgggggactcagcctcatggcagggccactgttgggcgcagcaaggagctgacccctttccaccctgcacactgtgcctgcctggagcccatgcacggccttgcccagccagagcctccccaccagctctgtgcacggggccaaggcgaacagtcctgcgcctgcagagctgctgaggccacccctgtggtcaagcgggagcccctggactcacccccgtgggctactcacagccagggagcggtgcctgggatgtttcccaaaagtgccttggcaacgctggtcctgccccaagcttcggagtgcacgttcctcccgtagcacagtgaccaccgcccaggcccagatccgtccgtctacgctcagatgcgtcagtggctgggctgccctgcgcctggtcaggccagagcccatccta

SEQ ID NO: 24883 - DNA, 335 bp, Macaca Mulatta
aacaaggagcctccaagcaaatcatccactgctcatcttaggaaaacgggttgagaatccctaatttgagggtcagttcctgcagaagtgccctttgcctccactcaatgcctcaatttgttttctgcgtgactgagggtcccagtgttggaacagtatttatgtatgagattttcctatttattttgagtctgtgaggccttcttgtcatgggagtgtggttgtgaatgatttctttctgatgatatattgtagtagatgttacaattttgtcgccaaactaaacttgatgcttaatgacttgctcacatctagtaaaacatggagtatttgta

SEQ ID NO: 24884 - DNA, 159 bp, Macaca Mulatta
tgacagagaaggatgtagtgggagcagtgatgcgctaacattcattacattctgcagtaatgaatctgtttaatggggcagacactgttttcagtagcatgacagtgggggcataggtgagctaagaggtgctaaagcttgctctgattgtctctttct

SEQ ID NO: 24885 - DNA, 1461 bp, Macaca Mulatta
  misc_feature (1)...(1461): n = A,T,C or G
cccagtctctaccagttcaggctcagatgagtccgcttcccgctcagcactgtttgcgcaaattaatcagggggagagcatcacacatgccctgaagcacgtatctgatgacatgaagactcacgaagaaccctgccctgaaggctcagagtggtccagtacgcagtggccccaagccattctctgcacctaaaccccaaaccagcccgtcccccaaaccagccacaaagaaggagccagctgtacttgaactggagggcaagaaatggagagtggaaaatcaggaaaatgtttccaacctggtgattgatgacacagagctgaaacaggtggcttacatatacaagtgtgtcaacacgacattgcaaatcaagggcaaaattaactccattacagtagataactgtaagaaacttggtctggtattcgatgacgtggtgggcattgtggagataatcaacagtagggatgtcaaagttcaggtaatgggtaaagtgccaaccatatccatcaacaaaacagatggctgccatgcttacctgagcaagaattccctggattgtgaaatagtcagtgccaaatcttccgagatgaatgtcctcattcctacagaaggcggtgactttaatgaattcccagttcctgagcagttcaagaccctctggaatgggcagaagttggtcaccacagtgacagaaattgctggataagcgaagtgccactgggttctttgccctcccttcacaccatgggataaatctgtatcaagacggttcttttctagatttcctctacctttctgctcttaaaactgcttctctgctctgagaagcacagctacctgccttcactgaaatatacctcaggctgaaatttggggtgggatagcaggtcagttgatcttctgcaggaaggtgcagcttttccatatcagctcaaaccacgccgcccagtccattcttaaggaactgccgactaggactgatgatgcattttagctttgagcttttgggggttattctaccaacaaacaaacagtccattggaaagaaaacagtcccaggaattaacagatcagaatgttcacactggttaatctttttctaacagtgagcatgaatgtagcagaagctggtgtgtttccagatggttcttctaaccaaactaattttcactgttgacaagtgaggcaagggttgcactggaccgaaggctgaggcttggccatctagcattccatgcagaatggtttcccataagcattccttttattctctgttctatcctgggtctgcctcaaccatgagataggagagtctcccgtactagctgctatccagggcaagttaatggaagtcttgaaaccctttcctttctctgggatcccctggactagcacctttccttattgaagatgacatttnnnnnnnnnnnnnnnnnnnnnnnnnnnnnnnnnnncca

SEQ ID NO: 24886 - DNA, 705 bp, Macaca Mulatta
gtgagcggcaggtggcgctgtgggacacaaaacacctggaggagccgctgtccctgcaggagctggacaccagcagcggtgtcctgctgcccttcttcgaccctgacaccaacattgtctacctctgtggcaagggtgacagctcgatccggtactttgagatcacttctgaggccccgttcctgcattatctctccatgttcagttccaaggagtcccagcggggcatgggctacatgcccaaacgtggcctggaggtgaacaagtgtgagattgccaggttctacaagctgcacgagcggaggtgtgagcccattgccatgacagtgcctcgaaaggtgatgctcccccgccccaccccgggcttcgggctgcgcaccgacttcgcggtcttgcaggggggtgtcctggcataagcgctttcctcactagccctggccttgcccacagtcggacctgttccaggaggacctgtacccacccactgcagggcccgaccctgccctcacggctgaggagtggctggggggtcgggatgctgggcccctcctcatctccctcaaggatggctacgtacccccaaagagccgggagctgagggtcaaccggggcctcgacaccgggcgcaggagggcagcaccagaggccagtggcactcccagctcggatgctgtgtcccggctggaggaggagatgcggaagctc

SEQ ID NO: 24887 - DNA, 667 bp, Macaca Mulatta
aaattcagtttcctgctattttactgcataacatgaacagtgattaaattctcaggcaggcttaggcagtctgtgttattggctgggcttagtcagtggtgggaagtagaagataccagacttgggaaaggaacagcaactaaccaaggagtagagacagccaagaaatcccagagtattgatctcacccctcgacttggccaagaacttctctacctagtgggcccctctgccctgttaagctcccttggctttttaaaaatctgccctcattttcgtctccagtctttattgcactagcccatccacaagcctggctcatctgtttttcccattcctgtgcccatcttgccaaacgcgggatgaaaatctccagctgcccttaaaggtcatcgtaaatgagctgttgatgttgcaaagcagtgcacttccatggacttagtgcccttattaatctccagctgccgctgcagacctcaactttgtttttcagaggacagagatgtagcacataaacctgttcttgcttgcccaaatgtgtcagatcatgtcaggtttgcttgccagtctcaggaagatgtgcccctgcttcatggggtctactgtcacacaccttttcctcaatccagtccctcccgtctcagtgtcaattatcctgccttgtgat

SEQ ID NO: 24888 - DNA, 1318 bp, Macaca Mulatta
  misc_feature (1)...(1318): n = A,T,C or G
acgtggatcttgggaagcgggcacctacacccatccgggaaaaggaagtcannnnnnnnnnnnnngccaggagcccttcaattctatcaccaaacgcaggcaccactgcaaggcctgcgggcatgtgnnnnnnnnnnnnnnnnnnnnnnnnnnnnnnnnnnnnnnnnnnnnnnnnnnnnnnnnnnnnnnnnnnnnnnnnnnnnnnnnnnnnnnnnnnnnnnnnnnnnnnnnnnnnnnnnnnnnnnnnnnnnnnnnnnnnnnnnnnnnnnnnnnnnnnnnnnnnngaaacaggcctcggtggctgcggagaacagtgtcatctgcagcttcctgcactacatggagaagggtggcaaaggatggcacaaggcatggttcgtggtccctgaaaatgaacctttggtgctgtatatctacggagcccctcaggnnnnnnnnnnnnnnnnnnnnnnnnnnnnnnnnnnnnnnnnnnnnnnnnnnnnnnnnnnnnnnnnnnnnnnnnnnnnnnnnnnnnnnnnnnnnnnnnnnnnnnnnnnnnnnnnnnnnnnnnnnnnnnnnnnnnnnnnnnnnnnnnnnnnnnnnnnnnnnnnnnnnnnnnnnnnnnnnnnnnnnnnnnnnnnnnnnnnnnnnnnnnnnnnnnnnnnnnnnnnnnnnnnnnnnnnnnnnnnnnnnnnnnnnnnnnnnnnnnnnnnnnnnnnnnnnnnnnnnnnnnnnnnnnnnnnnnnnnnnnnnnnnnnnnnnnnnnnnnnnnnnnnnnnnnnnnnnnnnnnnnnnnnnnnnnnnnnnnnnnnnnnnnnnnnnnnnnnnnnnnnnnnnnnnnnnnnnnnnnnnnnnnnnnnnnnnnnnnnnnnnnnnnnnnnnnnnnnnnnnnnnnnnnnnnnnnnnnnnnnnnnnnnnnnnnnnnnnnnnnnnnnnnnnnnnnnnnnnnnnnnnnnnnnnnnnnnnnnnnnnnnnnnnnnnnnnnnnnnnnnnnnnnnnnnnnnnnnnnnnnnnnnnnnnnnnnnnnnnnnnnnnnnnnnnnnnncaataccctagcacagatcctgcctccacccaattccccacaaagcaccagaggtaggaaacctggattcaactgccaactctgccactgaccctggggccccgacccacccctgcctcctcagccagtgtcttcacacgtacaactccacgtggggtggcaactagacctctcctgcctctcccatggcttacagcttcgacccggccccaaggctacccagtattttatcgtccagacccatggcagggccaccgggcaggacaggggaacggggggaagacaatggatact

SEQ ID NO: 24889 - DNA, 336 bp, Macaca Mulatta
tggggcttctgctataaggctgtgctggtgacggtgcccaatgaggggagttgaggtgccttcatcagcgaactcccagcaccacccagccacttcagacaaacacaatctaagctaaaaccccttgccacacaaacgcagaggcctccaatctctaaatccccaacacaccacacgtgcttgcctgcacgatgccttcccaatctgtatggctgtctttggccccatctataaagatgctggtgccgccactgggtggaactgtcagatttcaggttctcccagtctgcagatttggggccatctttgctactcccactctgtgtgtatttaaaa

SEQ ID NO: 24890 - DNA, 824 bp, Macaca Mulatta
  misc_feature (1)...(824): n = A,T,C or G
tgtaagaaggtgccatatttttaaatctcanctggcaatattttcccacaaangggtgtttcaaagttgggtgtcttaacaaaggtatggtagacactcctgagctggacttagattttattcttccttgcagaatagtgttggaataaatggcctacagaaaaaaaggttctgggatctacatggcagggagggccgcactgacattgatgcctgggggaccttttgcctcgaggctaagctggaaaatcttgnnnnnnnnnnnnnnnnnnnnntggcacattcaggttgaatacaagaactatttttgtgactagtttttgatgacctaagggaactgaccattgtaatttttgtatcagtgaaccaggagatttagtgcttttatactcatttccttgcatttaaaaaaatatgaaagcttaaggaattatgtgagcttaaaactagtcaagcagtttagaaccaaaggcctatattaataaacacaactatgctgaaaagtacaaagtagtacagtatattgttatgtacatatcattgttaatacagtcctgctactctgtacatatatgtattacatttctacatttttaatacatgagcttctgcattaagtttaattgtgataaatctgtgctgtttcagtatatgcaatacactttaatgttttattccttgtaacataaaaagtgcaatatgggaaatgtatacagtcctttactatattaaggtttaaaaaccggttttaaaaaaatttcatccttttttgccaaaaaccgggtggaaatatgttaaattggggcaaaaacaataaaatccca

SEQ ID NO: 24891 - DNA, 526 bp, Macaca Mulatta
tgaaatggcccccatgaggcatcctcagcctgggggactccacggcggaagggttccaggaaggcgggagttggggctgttcttacccctgccaggaggtcctgtccaccctctagcttccctctccctgaccccccaccactgcccattcccagtaaggcacctattctctttgccaccctgacgccaagtcactgttcagcttgttggcgacagagccggaagcatggaaaaatctcatgcagctcccgaagtccagggagagctcaaagcaggctgcgtggaaaaaggcccagagctgtggccagacagagtagaccccgaccaaccacagagccaccttgacaggagccagggcactgtcctgagacgagcctcatccctggagggcagcaatggaccatccacgtgtctaagcccccatcaccagctggggccccagtgactcagagcctgctcttcctgaacccactcggcaggaagaaaactgaaggcccgaaagccccagccacactatgacctggag

SEQ ID NO: 24892 - DNA, 826 bp, Macaca Mulatta
  misc_feature (1)...(826): n = A,T,C or G
ggagtttgggtcaaaacttcatgttaaacaactctgcattggttatggtggtagacatatgacggtagaaaatgtatacagagctagagacaactaacattcttggaaatactgcttttgttttactgtggaccattcctttcatgcattgaaatggagaaatttaaagtaaaagaattctgtttttcaagcaagcttaataaacattacattatacatatatttttatacatctgtcttgatcatttagtttactttctcaattattgtcaaaatttnnnnnnnnnnnnnnnnnnnnnnnnngatggagtctcactctgttgcctgtggagtgcagtggcgggacnnnnnnnnnnnnnnnnnnnnnnnnnnnnnnnnnnnnnnnnnnnnctgactcagcctctggagtagctgggactacgggcacatgccaccatgcctgactaattttttgtgtttttagtagagacaatgtttcacccatgttagccaggaatggttttgatctcctgaactcgtgatccgcccgcatcgggcttcccaaaatgctggggtttacaggggtgaacccaaaatttcctgacctttttttttttcgcttttgagacagggtcttcccctttgttacacccaggccttgaattgccaagtggccataaattcatgggggtttaatgggagaccctttaaccccttccaaggggctcaagtgatattcgcacctcagccctgcaaatagcttgagactaccgatttgtgcccaccatggccgggccaaattttggaattttcgggaaaaacccaggggtttgcccatgtttgttca

SEQ ID NO: 24893 - DNA, 775 bp, Macaca Mulatta
gggggaagcaaggggtcccagtgaagagccactgccattagagaatatgaaatatagataaagcatctttgaaatttttatgtaaattatcaggcaaatttgcatgaaattacagaaatttaattcagaaccccaactactgtcttatgcaaaagcaagctgattaaatgacactcatataattatgtgttgtaagcgacaggctcactggtcacagatttgtgtctataacttttgtgaaagggagaagtgacattgtatcaaagcatcttgcattatgcaatttttatattaaccagatatatattcatcggtattcatccgagttaaatgtagagtttttaaacatcaatctttaaaccaattgctgctacttatataattgccaaaaagtgaaataatgagtagttcatgtaaataatacattatatttctattttattatgaagaaggtgaatagccatatttgtaaaatgacaatcatgtgtgttatcccagtactttccgttcgtgaaaacacatttgctttttgtgatatgcacaatgtagataagtgttctgtctttcttttttgatacagaagtataaagaattgtggtttatatatttaaaagtgtcaagctgagtatcaaaatgtctgcatgttgtctaagaaaattgaatacttgaatgtgtttcacagtttgaaataagctatttgatgttatacttcttgtgtgtatgcacatgaactttagattttacatgaagtatttttttccgtattatatgtacc

SEQ ID NO: 24894 - DNA, 1859 bp, Macaca Mulatta
  misc_feature (1)...(1859): n = A,T,C or G
aggtgatcgccatgatcaaaggcctgcaggtgctcatgggcaggatggagagtgtcttcaaccaggccatcaggaacaccatctacgcggcattgcaggacttcgcccaggtgacgctgcgtgagcccctgcggcaggcggtacggaagaagaagaacgtcctcatcannnnnnnnnnnnnnnnnnnnnnnnnnnnnnnnnnnnnnnnnnnnnnnnnnnnnnnnnnnnnnnnnnnnnnnnnnnnnnnnnnnnnnnnnnnnnnnnnnnnnnnnnnnnnnnnnnnnnnnnnnnnnnnnnnnnnnnnnnnnnnnnnnnnnnnnnnnnnnnnnnnnnnnnnnnnnnnnnnnnnnnnnnnnnnnnnnnnnnnnnnnnnnnnnnnnnnnnnnnnnnnnnnnnnnnnnnnnnnnnnnnnnnnnnnnnnnnnnnnnnnnnnnnnnnnnnnnnnnnnnnnnnnnnnnnnnnnnnnnnnnnnnnnnnnnnnnnnnnnnnnnnnnnnnnnnnnnnnnnnnnnnnnnnnnnnnnnnnnnnnnnnnnnnnnnnnnnnnnnnnnnnnnnnnnnnnnnnnnnnnnnnnnnnnnnnnnnnnnnnnnnnnnnnnnnnnnnnnnnnnnnnnnnnnnnnnnnnnnnnnnnnnnnnnnnnnnnnnnnnnnnnnnnnnnnnnnnnnnnnnnnnnnnnnnnnnnnnnnnnnnnnnnnnnnnnnnnnnnnnnnnnnnnnnnnnnnnnnnnnnnnnnnnnnnnnnnnnnnnnnnnnnnnnnnnnnnnnnnnnnnnnnnnnnnnnnnnnnnnnnnnnnnnnnnnnnnnnnnnagtgtcctgttggataaacgttttcgagctgagtgtaagaattatggcgtcatcattccttatccaccgtccaatcgctatgaaacactgctgaaacagagacacgtccagnnnnnnnnnnnnnnnnnnnnnnnnnnnnnnnnnnnnnnnnnnnnnnnnnnnnnnnnnnnnnnnnnnnnnnnnnnnnnnnnnnnnnnnnnnnnnnnnnnnnnnnnnnnnnnnnnnnnnnnnnnnnnnnnnnnnnnnnnnnnnnnnnnnnnnnnnnnnnnnnnnnnnnnnnnnnnnnnnnnnnnnnnnnnnnnnnnnnnnnnnnnnnnnnnnnnnnnnnnnnnnnnnnnnnnnnnnnnnnnnnnnnnnnnnnnnnnnnnnnnnnnnnnnnnnnnnnnnnnnnnnnnnnnnnnnnnnnnnnnnnnnnnnnnnnnnnnnnnnnnnnnnnnnnnnnnnnnnnnnnnnnnnnnnnnnnnnnnnnnnnnnnnnnnnnnnnnnnnnnnnnnnnnnnnnnnnnnnnnnnnnnnnnnnnnnnnnnnnnnnnnnnnnnnnnnnnnnnnnnnnnnnnnnnnnnnnnnnnnnnnnnnnnnnnnnnnnnnnnnnnnnnnnnnnnnnnnnnnnnnnnnnnnnnnnnnnnnnnnnnnnnnnnnnnnnnnnnnnnnnnnnnnnnnnnnnnnnnnnnnnnnnnnnnnnnnnnnnnnnnnnnnnnnnnnnnnnnnnnnnnnnnnnnnnnnnnnnnnnnnnnnnnnnnnnnnnnnnnnnnnnnnnnnnnnnnnnnnnnnnnnnnnnnnnnnnnnnnnnnnnnnnnnnnnnnnnnnnnnnnnnnnnnnnnnnnnnnnnnnnnnnnnnnnnnnnnnnnnnnnnnnnnnnnnnnnnnnnnnnnnnnnnnnnnnnnnnnnnnnnnnnnnnnnnnnnnnnnnnnnnnnnnnnnnnnnnnnnnnnnnnnnnnnnnnnnnnnnnnnnnnnnngagggggagcgcctggaggtccggatgaaacgtctggaagccaagtatgccccactccacctggtccctctgatcgagcggctggggacccctcag

SEQ ID NO: 24895 - DNA, 1592 bp, Macaca Mulatta
  misc_feature (1)...(1592): n = A,T,C or G
ttcggcatcagactatcctcaatctgtctccctccagtcagggcctggacactatgcggtacccactcctcgggtaaccgagactggaccaagaacagaatcatcccgccattcctctcctcctagaaagaaccagcaaactcagacactggcttcccatgcttcaggcagactacggaatgttagtccacctggagaggaagcagcacgaagaggcggtgagagcaagtcagggcgcgaggtcggccatcatgcctcatcaatcccagatgccaaatctactcgtcggttgagttttcaagatcagaaggataacttacagtcacgaatcttacaggatgacccaccatccaaggtccagaacccccaaggagtcagagttccccgtaggattttgacttacccaaaggatgaagcagtacaaactgagcccatccaaaggattaccactgctagcgagatcagatctccgaggagtccctctcgcccagagcacagaagcagctgtgtctctgcagactatcacacagcccagagaaaggtacctgtagaagaatcagaaacaggtccttacagttcaattccttcaaaacccaaggccttgtataggaatatgaacttggactcatcactcaaactctctgtccttaaagattctgatggtgtacaccgagtttctacacgggtagaacctgagtctcttcacaagtattctgtctatcctnnnnnnnnnnnnnnnnnnnnnnnnnnnnnnnnnnnnnnnnnnnnnnnnnnnnnnnnnnnnnnnnnnnnnnnnnnnnnnnnnnnnnnnnnnnnnnnnnnnnnnnnnnnnnnnnnnnnnnnnnnnnnnnnnnnnnnnnnnnnnnnnnnnnnnnnnnnnnnnnnnnnnnnnnnnnnnnnnnnnnnnnnnnnnnnnnnnnnnnnnnnnnnnnnnnnnnnnnnnnnnnnnnnnnnnnnnnnnnnnnnnnnnnnnnnnnnnnnnnnnnnnnnnnnnnnnnnnnnnnnnnnnnnnnnnnnnnnnnnnnnnnnnnnnnnnnnnnnnnnnnnnnnnnnnnnnnnnnnnnnnnnnnnnnnnnnnnnnnnnnnnnnnnnnnnnnnnnnnnnnnnnnnnnnnnnnnnnnnnnnnnnnnnnnnnnnnnnnnnnnnnnnnnnnnnnnnnnnnnnnnnnnnnnnnnnnnnnnnnnnnnnnnnnnnnnnnnnnnnnnnnnnnnnnnnnnnnnnnnnnnnnnnnnnnnnnnnnnnnnnnnnnnnnnnnnnnnnnnnnnnnnnnnnnnnnnnnnnnnnnnnnnnnnnnnnnnnnnnnnnnnnnnnnnnnnnnnnnnnnnnnnnnnnnnnnnnnnnnnnnnnnnnnnnnnnnnnnnnnnnnnnnnnnnnngatgtctcagaggaaatgtacaatcgtgtcatctggtggctgaaaggtctgtgcttttccctcctatgggtccactgtgggagcttgggggatgggaggacaggtgaggagtggcatctatgtatctacagaaaggggtcgtttaggaggtaaatgctgggattttgacctgaagaagcagaggaacttctcatcttgctgaaaatttcaccgttag

SEQ ID NO: 24896 - DNA, 632 bp, Macaca Mulatta
atcaagttttataaaaccgtagaattttggctctcttttttaagttatgttgttagcacataggacacttccttgttgtcttttgtggaaagggcaaataccactaatagggtgtatctcagaaactgaattgaaataggggaaaataggattttctgtcctgtttgaagattattcttgattcccttgattcccaggagagattctctgacattcacatgtcagccactttggcacagaagccttacagtgtggggaaccaaaacttcgtgtctcctctttccctgatgccatcagcatagacttgacttccttaaaccaagagtcttgatgtggccttggcaatcctaaaatcaactgtgttaggtaacaaaactcaggctttctgttgataacatcgagatggtgtcactcaaaagagccaagattcctgttttcagtttgtggatccatcctgctggttttactgtattccctccatgtcgaagcgggcctgtgaaaagctcatacaggcctcatgtgaagtgtccaccctttctgaaaatctttcttgttcaaaacagcaacaacctatgttgttaacttttacagtgacttttagaggaggggagtttggaaattgtataatgtta

SEQ ID NO: 24897 - DNA, 243 bp, Macaca Mulatta
gtttttgtgtttctttctgcaggccgctacgtccaagacatctgtgtatatggaccaggagacctgccatggctcattcagtcgtcttctctgtttgcctacaaattcgaaccctcgacagacccgcttgtagttacctgcttagagcggcggcacagacttcaagtgctgaggcaggcagaagttcccatagagccacactggcattttcaccagcagagtcatttcaacatgagaatgaac

SEQ ID NO: 24898 - DNA, 723 bp, Macaca Mulatta
  misc_feature (1)...(723): n = A,T,C or G
gggtcctttcttcggtccgtaagtccgaaatgacaaagaaaagaaggaacaacggtcgtgccaaaaagggccgcggccatgtgcagcctattcgctgcactaactgtgcccgatgcgtgcccaaggacaaggccattaagaaattcgtcattcgaaacatagtggaggccgcagcggtcagggacatttctgaagcgagcgtctttgatgcctatgtgcttcccaagctgtatgtgaagctgcattactgtgtgagttgtgcaattcacagccaaagtagtcagggaatcgattctcgtggaaaccccgcaagggaccgaaacaaccccccctccccgaattttaaacccggccggggggcctgcccccccacgtcccccccacccaaaacccccaagggtaaaagggaacccttaaaattccctttaaaaaaaactggggaaaacccgaaccctttttccccctnnnnnnnnnnnnnnnnnnnnnncgtggggaaaaattttgttctcccccnccgcacccctctttgtgatccccctcctttcccagatcaattcaccccccttttgttctgggggcccttccttttttggggggccctcttttggaaaaaaagcccctttttttccccaaaaaacacccttttccctctttttnnnnnnnnnnnnnnnnnnnnnnnntnnnnnnnnnnnnnnnnnnnnnnnnnnnnnnnnnnnngcataa

SEQ ID NO: 24899 - DNA, 157 bp, Macaca Mulatta
cccatccccccaccacacaatcgcgcagacgcctaatgccttgcggcaagtgagaccgcccgtcagtaggattaggggccaacagagggttctggcagcggatgcaggcagtttggagaaggggctgggtacgagctgaggcagacaagggaggctg

SEQ ID NO: 24900 - DNA, 1118 bp, Macaca Mulatta
  misc_feature (1)...(1118): n = A,T,C or G
tcataagggaaactttctgaagctatgctgaagggtaacgctgnctctgtctcttgcaaccaggaaactggagatcccctgatggctgggaccttgtggtctctcacttntgcaacggcctcatcgccgcccagctgctcttctactggaatgcaagccttccccacaggcagaaaaaggcagagtagagccagctactggagtcattccgtttccactcattcacccaacttcagggttctccccatctgagccagctngctggtgtgacttactcatcctccattcctctgcatttgcagactntctaagccagggttggctgtagtggaaacaaatggttgatggatccagatccttagaaaaggagaggatgggggtagagtctcctaagccaaaattttgacatttgagtgcttttctaagccctgtacatgaactattaactcagtcattcagccaagcctcctcctctagcagcaatttccagctgtttaacaccatcctgggtaaatgttttaccctgtcctccagcctccctgcttcccttctggccttagaagatggagcctggaaggcagagtggaggggactgggggcctgtggctgcctccccgcctcagcccggctgggactgtctcccagaccccagtgctgaggtgggggaagggggacggagaatgactcaggcagggccccagggtggggtgaggaggttcctgctctggcaggtctaggcggaagggagtggagatggggctggttcctgctgcagtgaggggaacagatgggacaataaagactggagactcagttgaataatacaaaactgtgtttaatactaccaaaaatataactgtgtgttgtgcggctctccctggctttcgtgggaggactgcaggcggcgtctgcactgtagtccaacaggagaaagggttgacagcctggggtaggggatgctgctggattaaaaaaggaggatgaggcacgtccggtgaggtctgagtccacgagagttagaggtgggttagagcgatgggggcaccagaaaggggaggattgtatggagtgaagaggccagggggcaggtagtgggtataggggggcagcagctcccc

SEQ ID NO: 24901 - DNA, 983 bp, Macaca Mulatta
  misc_feature (1)...(983): n = A,T,C or G
tggggaagttgaaaagctcgaagaaagtgctgtgactgtaatgtttgataaagtgcagttcagcaacaagtcagcgaacatggatcactggcagcagaggtccccacacatgtcacagatgtggccactgtgtgccggcagctagcagagaagagaatgctggatccatccattaagggaaccttcactggtctggcaatgaacagatgactaagtatgaaatggcgtgtgccaattgcaggatgccttcaagctccccagcagtcacttaagacctattactgacagccctgtcctaggagcacagcgtccaagaaatgctcagcttgactgctccaaattggagaccttgggcattggccaacgaacaccatttcgaattggaatcaaagaatcactttggcctttcctcattgacaagagatggagacaaacggtctttcattagtttatttgtgtagggtctaggcaaatacaaacagtagtaatgaaaagtatagtatgtggcactttttaaagaacaaaggaaatagttttgtatgagtactttaattgtgactcttaggatctttcaggtaaatgatgctcttgcactagtgaaattgtctaaagaaactaaaagggcaatgttgccnctgtttgcagtaatttttctttttatcattttgtttgtcctggctaaacttggagtttggagtatagtaaattatgatccttaaatctttgagagccaggatgaagcagatctgctgtagacttttcagatgaaacgcattgttcattctcataacctccatattttcaggatttttgaagctgttgaccttttcatgttgattaattttaaattgtgtgaaaatggtataaaaacccattggtggttcattattttgctttgcctggagctcagatcaaaatggtttgaagaaaagaactttattttttgcaaagttacgtacagttttttatgcttgaaaaaattt

SEQ ID NO: 24902 - DNA, 824 bp, Macaca Mulatta
  misc_feature (1)...(824): n = A,T,C or G
atgctcatgcccaatggccccatgcggataaccagtggtccctttgaacctgacctctacaagtctgagatggaggtccaggatgcagagctaaaggccctcctccagagttctgcaagtcgaaaaaccnnnnnnnnnnnnnnnnnnnnctcctccaagactgcagagaatgccaccagtggggaaacattagaagaaaattattcttgggatctgaggaccgccagcagagcgggggtctccctggcccccaccccagttccccaacccactcccttccaacaacaaccagctccaactgactctggtcttgggaggcgaggcttcccaaccacggaagactactttaaatgaaaaaaagaaattgaataataaaatcaggagtcaaaattcatcgtcttcaagcccctctttctagccttttctactactatgcttggtcaaggtttgtgccctactacagaacagggctaaattagccatcaccactgaaaactcagctgaattttttataccactctgatgtcagcatttttccatctgtttggggccttttcctctttttttccattctccccaggtattttatctggcttcaaaattaggaggattatttttcagattgtttttattcagtgtggccgattcctcatctgattcaggctgtccagtcaggcccctcccattttaggagctggagccttcatttatgaagagattctcatctatgaaatggatcctcatttgtaaatcttttttcttccattttcacaaagctgtacagaaataatccatctcaaacttacccttttctctggagtcag

SEQ ID NO: 24903 - DNA, 1268 bp, Macaca Mulatta
  misc_feature (1)...(1268): n = A,T,C or G
gggactgctctgggcgattcgtgcgaggtacctctgatgaaattatgaccaggtgggcccgagttagtaccacatgtaacaagagacccttgcctgcaacatcatgggaggacatgaagaagggatcctttgagggaacaagccaaaacctaccaaagcataaacaacttgaagccaataggctatccgtcaaaaatgatgcatcccaagcaaaacnnnnnnnnnnnnnnnnnnnnnngtacttaaatgaagatgtgaatggattcatggaatacctaagacagaattcacagatggttcacaatgggcaaattgtagcaacagacagtgaggaagtaagggaagaaattgcagttgctttaaagaaagacagtcgacgggaaggaagaagattaaaaagacaagcggcaaagaaaaatgcaatggtgtgtttccattgtagaaaacctggtcatggaattgcagattgccctgccgcccttgaaaatcaagacatgggcactgggatatgttacaggtgtgggtccacagagcacgaaataaccaagtgtaaggctaaagtagacccagctcttggcgaatttccttttgcaaaatgttttgtttgtggagaaatggggcacctgtctagatctttgtccggataatcccaaaggcctctatgcctgatggtggcggctgcaaactttgtggctctgtgggacatttaaagaaagattgcccctgaaagttagaattcagagcgaatggccacagttggtcgctgggcaaagggaatgagtgcagactatgaagaaattttggatgcacctaaaccacaaaaacccaaaacaaaaatacctaaagttgttaatttttgataacaactagcactatcattagttaccacctcatcgttactttctaaaccaggcccacttcacgagttagagttgagctcccttgtagccaggactatactgtagatatcactatgatctgggtgtggtcgaaaacaattttgtttattctgtccatcaaattgtacttctactactgtttggagaaaaattgagaanagaataagatgattaaatggattatctaaaagaacatatttttagagacagaacttagacataaccaagtagttgtatacctgattgtaacaatcatcttttataaaagcaaaattatgcataaatgtaaaacactccctaaccaaggggtacaaatgaaatttttgggttataatcatttttccttggcctcaaaagtatcaattttat

SEQ ID NO: 24904 - DNA, 604 bp, Macaca Mulatta
gtggtcaagaggccccggaaggtccaggtggccccgcttcaggccagccctcccctggatcaggatgaccgggcttttgaggtgatggacgagtttgacggcagaagtttccggagtgggtacagcgagaggagccggctgagcagccatggggggcgcagccgcagctgggaggacagcccagaaagggggcgtccccacgagcgggctcggagccgggagcgggacctcagccgggaccggagccgcggccggagcctggagcggggcctggaccaagaccatgggcgcgcccgagaccgcagccgtggccggagcctggagcggggcctggaccacgactttgggccatcccgggaccgcgaccgcagccgcggccgaagcattgaccaggactatgagcgggcttatcaccaggcctacgacccggactacgagcgggcctacagcccggagtacaggcgtggggcccgccacgacgcccgctctcgggggccccgaagccgcagccgcgagcacccgcgctcacgcagccccagccctgagccgaggggacggccggggcccatcggggtcctcctgacgaaaagcagagcgaacgaag

SEQ ID NO: 24905 - DNA, 330 bp, Macaca Mulatta
  misc_feature (1)...(330): n = A,T,C or G
caggtgccacatcatctcacagttcaaccaaggcttttacgactgtgtcatagcaactgatgccgaagtcctgggggccccggtcaagggcaagcgtcggggccgaggacccaaaggggacaannnnnnnnnnnnnnnnnnnnnnnnnnnnnnnnnnnnnnnnnnnnnnnnnnnnnnnnnnnnnnnnnnnnnnnnnnnnnnnnnnnnnnnnnnnnnnnnnnnnnnnnnnnnnnnnnnnnnnnnnnnnnnaacaacccaggcatagtcttaacctttgtgctgcccacggagcagtcccacttaggcaagattgaggagcttctcagtgga

SEQ ID NO: 24906 - DNA, 503 bp, Macaca Mulatta
  misc_feature (1)...(503): n = A,T,C or G
gggctttctgaccacccagggcagccggaacctgcgggccgcccgtgcccttgagcacacatttgcccctgtgaatgacggggccatctccacattgctgggtctgctcatgcttgctggttcccactttgacttcattgtaaggtanaggtacttctttgcggcgctgacggtgctcacgctcctgggcctcctccatggacttgtgctgctgcctgtgctgctgtccatcctnnnnnnnnnnnnnnaggtgatacagatgtacaaggaaagcccagaggtcctgagtccaccagctccacagggaggcgggcttaggtggggggcatccccctccctgccccagagctttgccagagtgactacctccatgaccgtggccatccacccaccccccctacctggtgcctatgtccatccagcctctgatgagcatccttggtcccctgctaccannnnnnnnnnnacctcagttccaggggaccaggtccagccagtgggtg

SEQ ID NO: 24907 - DNA, 2657 bp, Macaca Mulatta
  misc_feature (1)...(2657): n = A,T,C or G
aattacagaagccaaatcagggactgctactccacagagatcgggatcagttagcaactatcgatcttgccaaaggagtgattcagatgctgaggctcaaggaaaatcctcagaagtttctcttacctcatctgtgacctcacttgactcttctcctgttgacctaactccaagacctggaagtcacacaatagaattttttgagatgtgtgcaaatctaattaaaattcttgcacaataaacagaaaactttgcttatttcttttgtagcaataagcatgcataataagtcatagccaaatgcttccatttgtaatcaagttatacataattataactgagggctggcgttttgaaatgcaatttgcacagggattggaacatgatttatagttaaaagctaatatgcagaaatgacttaagatcattttgttcattgtgcagtacgtatatagcataatatacacagtgaattataggtctctcaggctcacctgatttttggctattttatatttagtgtacacagggctttgaaaatattaatttacataaaggccttcatatattattacatgttatatatttgcttcataaatttattcaataaatatttgcctagaattctcaagacctttataggtgattttgttttctgggctccttaacttcttaaatagctagtatcttccagcagtactaacagtctagataacttcttccatatccctccctctttgtttttttgagacagagtctcactctgtcacccaggctggagtnnnnnnnnnnnnnnnnnnnnnnnnnnnnnnnnnncctcccgggttcaagtgattctcccgcctcagcttcctgagtagctggaactaccggcgcgtgcccacacacccgggttatttttttgtatttttagtagagaccgggtttccctgtgttggccaggctagtctcgaactcctgaccccgtgatccaccacctnnnnnnnnnnnnnnnnnnnnnnnnnnnnnnnnnnnnnnnnnnnnnnnnnnnnnnnnnnnnnnnnnnnnnnnnnnnnnnnnnnnnnnnnnnnnnnnnnnnnnnnnnnnnnnnnnnnnnnnnnnnnnnnnnnnnnnnnnnnnnnnnnnnnnnnnnnnnnnnnnnnnnnnnnnnnnnnnnnnnnnnnnnnnnnnnnnnnnnnnnnnnnnnnnnnnnnnnnnnnnnnnnnnnnnnnnnnnnnnnnnnnnnnnnnnnnnnnnnnnnnnnnnnnnnnnnnnnnnnnnnnnnnnnnnnnnnnnnnnnnnnnnnnnnnnnnnnnnnnnnnnnnnnnnnnnnnnnnnnnnnnnnnnnnnnnnnnnnnnnnnnnnnnnnnnnnnnnnnnnnnnnnnnnnnnnnnnnnnnnnnnnnnnnnnnnnnnnnnnnnnnnnnnnnnnnnnnnnnnnnnnnnnnnnnnnnnnnnnnnnnnnnnnnnnnnnnnnnnnnnnnnnnnnnnnnnnnnnnnnnnnnnnnnnnnnnnnnnnnnnnnnnnnnnnnnnnnnnnnnnnnnnnnnnnnnnnnnnnnnnnnnnnnnnnnnnnnnnnnnnnnnnnnnnnnnnnnnnnnnnnnnnnnnnnnnnnnnnnnnnnnnnnnnnnnnnnnnnnnnnnnnnnnnnnnnnnnnnnnnnnnnnnnnnnnnnnnnnnnnnnnnnnnnnnnnnnnnnnnnnnnncattctcctaaaatccataatatcattgtaaaattaataattccccaatatcatctaatcaagccatatttaaatttctgaagttacctccaaatttctttatagctgattatttcaaaccaggatccaattaaactttacatatgacacttggtgataactctttagttggatataacattattattattttgataaaatgtggaacaaagcaattctattaataagtggtcacatttgttttgggcttgaagtactttttaaagatactggattttcctaagatttctgatttacattgatannnnnnnnnnnnnnnnntaattgcatcacacaatagatgtaaatgaagatttagtcacctcagataaaattggtatcatgtgtatgataatattgtatcatttgtatttgccttatgttaactttaagaaattgatttttttgtattaatcattttcccattgcaacagagctatattttttctattttaagaatcatattttaggattatttttggcaaatacagtgagcacttatgtaaccagatgataatgaactcaaatgtcatgatagcttgcataaatggtgactctagtagatttgacttaagcacttctagaatcatgcactgaattcaaaagaaaaatcttgctgctttttatccggggcttgttctattcaacttctaatttgaaagctgtacaaagtaatagaagttccatttaaatatgagttcaaaactgtatttataacttgttatgtagccctctctgtaggggattctaattttacttagggtctctaaatgcagcataatgttcctgatgttaacagaagactgtatttttaaagttacaaatttgtatatagaattaagtaatggcgctatgtaagctgttgtggggaggagggaagaaaaggaggaaccaattaaataggaccttctaaaaattgttaattttgtaaactt

SEQ ID NO: 24908 - DNA, 344 bp, Macaca Mulatta
agtagagaaatggtcagaaggaacgacaccacagaagaaattagaatgtttaaaagaaccagaaaaaacatctgtagaatctaaagtacctacccagatggaaaaatctacagacacagacgaggacaatgtaaccagaacagaatatagtgacaaaaccacccagtttccatcagtttatgctgagccaggtgctgagcaaactgaagcagttggtgattcttcttccaaaccagccacccctaaggctactaccccaccctcatcaccacctccaacagctgtctcaccagagtttgcctacgtcccagctgacccagctcagcttgctgctcagatgttag

SEQ ID NO: 24909 - DNA, 1797 bp, Macaca Mulatta
  misc_feature (1)...(1797): n = A,T,C or G
ggctggatcctcatagaccgttgtggaaagcactttggcaccattttgaattacctccgagatgacaccatcaccctccctcagaaccggcaagaaatcaaggaattgatggctgaagcaaagtattacctcatccaggggctggtgaacatgtgccagagtgccctgcaggnnnnnnnnnnnnnnnnnnnnnnnnnnnnnnnnnnnnnnnnnnnnnnnnnnnnnnnnnnnnnnnnnnnnnnnnnnnnnnnnnnnnnnnnnnnnnnnnnnnnnnnnnnnnnnnnnnnnnnnnnnnnnnnnnnnnnnnnnnnnnnnnnnnnnnnnnnnnnnnnnnnnnnnnnnnnnnnnnnnnnnnnnnnnnnnnnnnnnnnnnnnnnnnnnnnnnnnnnnnnnnnnnnnnnnnnnnnnnnnnnnnnnnnnnnnnnnnnnnnnnnnnnnnnnnnnnnnnnnnnnnnnnnnnnnnnnnnnnnnnnnnnnnnnnnnnnnnnnnnnnnnnnnnnnnnnnnnnnnnnnnnnnnnnnnnnnnnnnnnnnnnnnnnnnnnnnnnnnnnnnnnnnnnnnnnnnnnnnnnnnnnnnnnnnnnnnnnnnnnnnnnnnnnnnnnnnnnnnnnnnnnnnnnnnnnnnnnnnnnnnnnnnnnnnnnnnnnnnnnnnnnnnnnnnnnnnnnnnnnnnnnnnnnnnnnnnnnnnnnnnnnnnnnnnnnnnnnnnnnnnnnnnnnnnnnnnnnnnnnnnnnnnnnnnnnnnnnnnnnnnnnnnnnnnnnnnnnnnnnnnnnnnnnnnnnnnnnnnnnnnnnnnnnnnnnnnnnnnnnnnnnnnnnnnnnnnnnnnnnnnnnnnnnnnnnnnnnnnnnnnnnnnnnnnnnnnnnnnnnnnnnnnnnnnnnnnnnnnnnnnnnnnnnnnnnnnnnnnnnnnnnnnnnnnnnnnnnnnnnnnnnnnnnnnnnnnnnnnnnnnnnnnnnnnnnnnnnnnnnnnnnnnnnnnnnnnnnnnnnnnnnnnnnnnnnnnnnnnnnnnnnnnnnnnnnnnnnnnnnnnnnnnnnnnnnnnnnnnnnnnnnnnnnnnnnnnnnnnnnnnnnnnnnnnnnnnnnnnnnnnnnnnnnnnnnnnnnnnnnnnnnnnnnnnnnnnnnnnnnnnnnnnnnnnnnnnnnnnnnnnnnnnnnnnnnnnnnnnnnnnnnnnnnnnnnnnnnnnnnnnnnnnnnnnctaggaaatgaatagttctaaatctagtaacgaggaaactgggcatttcttttgccctccagggtgccaagaccctacatatggcagaacccttggcccttctccatgcctgtgggatctgtttctttaaagcactttgtactgttattcaggaggttgatattctccctgacccatgtctttctaccctaatccctgcttccctgcagaatagaggataaagaggggataaagaggaagcaataaaaaaacatccaacaaagcagctctggctttgccagcctggccagcagctcagagtgcaccgaggagggaaggatggctaagctgggacctgcagtcctcacagggtgcctgtgagaaaggacattttacctccccatcttagagtcacatcactggctcctaggtctagcatgactgctctttgtggttctcttgagtacccctggcttccagccatgctgtcctcacatacggtaaagccaaagagctgtcacaggggccagaaacatgagccacggcaggaagaccgtgaagcctgtgggtactgcatggtgttggctggcatgcccatcacctgaggacagcaaact

SEQ ID NO: 24910 - DNA, 430 bp, Macaca Mulatta
tgaggaatttttataaaacaaatgttagaaatggaagatccgtctactcactaagaagtgagactaggataaaataatctcacaaattcatatcaacggcatccttatccatatccttgactggctaaagcatccagataagcaagtgagtccttctaggctcacaaaaagaatacacctaccactgtatttactaaaaattcttaccattgaactgatgggggttataatttgaagtggaaggaacatgctatcgctcataatagaatcttgttgtgtagttatataccacagacctgaaaatgattcagtattgaagtgtaattttttttctacagctttgagtgactgttactagtatctgcggtttcagggccacagatgtctaattcttatggctgaaatctgatagaatctcaaagtctgccca

SEQ ID NO: 24911 - DNA, 740 bp, Macaca Mulatta
  misc_feature (1)...(740): n = A,T,C or G
tggtggcagccagaacctgcgcttctactggaaggagtttgtgaatgaggtggatgtgctggtgtttgtggtggactcagctgaccgactgcgactgccctgggcccgacaggagctgcacaagctgctggacaaggaccctgacctgcctgtcgtggtggtggccaacaagcaggnnnaggacctcagcgaggccatgagtatggtggagctgcagcgggagctgggcctccaggctgtcgacaaccagcgggaggttttcctcttggcagccagcattgcccctgcgggacccagcttcgaagagcctggcactgttcacatctggaaactgctcttggagcttctctcctaggctggagctctcctgctcgccacctgcctgtcaagaccacagttgtactgctgctgcttcattgccagactgggcctggggcaagagccacatggcagcatttctcttctgccctcctttccctctcaagagcagggcctgggcaaggccgagaaccatgcagaagctttcctggtgaggtggccgtgaagccggagcagggaggtgggtgagacagagggtgnnnnnnnnntgtctagctcattccaagctggaatgtggatccagctttcccttctcttacctgtacagtgagatgctcagtgggctcagttctccgctgcgggtcccggtagctgaggaaccagtgtaggtgtcagagatgctcctagagcctcaaggtctc

SEQ ID NO: 24912 - DNA, 790 bp, Macaca Mulatta
tttttttggaaaattagggttgttccaggaaaccatccaaaggggttaaacctcccattgggccatgggaaggagaaacggcagttcttccctggacctggtggttttccaggtcaaccgtcttttaatttcataggggattacgacgaagttcacccttcactgtgcagtgtcactctgggactcagaaaagtactccaaggtttctttgttgctcacgcaagtcacccttgctttcgttgtcatcctagaatggaagttgctggagactattatccttcattgttgtcagctcaatgtgtggcttcaagattcaccttggcaagggaagacagcatggagaatcccaccctagctcttccgtgcttctgcctgaagtgacacgtattgcttctgttcccacttcattggtcaatgcaagccagatggttgtaactgacttttagagatgaggaagcaccaacttcccgtgtgcctgttgtcccagctccttgggaggctgaagcaggaggatcacttgagcctggaaggttgaggctgcagtgagctgtgattgtgccactgcactgcaggctgggtgacagagtgagttcctggttgacagtagtccccagagaaaataaatcaccggccgcgttgcatagggcaagtaaagtcatcttgaagcttcagtttcatggttaacctgcctcttttcgtcctttaaacaatcaaagggcagatgcactggtgtctgcagtctttgctgatgcacaagcattccattctttaactcatcttaatgcccccc

SEQ ID NO: 24913 - DNA, 359 bp, Macaca Mulatta
tcccaaggaactcgtctcaaccttctgaggcactggtggccagagcagggtggaagaccctagtcaaagtccctatggagagaacggcccattccaagcgcgggaggacattgctctcagcctctgggaaacttctgagctgagaggccccggacaggcatgtgggaggcccagacatggcaccctgccccgtccaggacaggtccaggatctgcccctctctccatactctgggggactccttctcccccggcctcaccactactgcacccaccttcctctcctgggcccctccagccattccccttgaagacaccccccaaccaacccaagccacaataatgatggtgagagctcct

SEQ ID NO: 24914 - DNA, 802 bp, Macaca Mulatta
  misc_feature (1)...(802): n = A,T,C or G
aggcctcgtctgaaagttctggtcataaacgatcttccagttggggacgcacgtactccttcacaagtgcaatgagcagagggtgtgtgacagaggaggaaaatacaaatgtgaaagctggcgtccaggctttgttgcaggtannnnnnnnnnnnnnnnnnnnnnnnnnnnnnnnnnnnnnnnnnnnnnnnnnnnnnnnnnnnnnnnnnnnnnnnnnnnnnnnnnnnnnnnnnnnnnnnnnnnnnnnnnnnnnnnnnnnnnnnnnnnnnnnnnnnnnnnnnnnnnnnnnnnnnnnnnnnnnnnnnnnnnnnnnnnnnnnnnnnnnnnnnnnnnnnnnnnnnnnnnnnnnnnnnnnnnnnnnnnnnnnnnnnnnnnnnnnnnnnnnnnnnnnnnnnnnnnnnnnnnnnnnnnnnnnnnnnnnnnnnnnnnnnnnnnnnnnnnnnnnnnnnnnnnnnnnnnnnnnnnnnnnnnnnnnnnnnnnnnnnnnnnnnnnnnnnnnnnnnnnnnnnnnnnnnnnnnnnnnnnnnnnnnnnnnnnnnnnnnnnnnnnnnnnnnnnnnnnnnnnnnnnnnnnnnnnnnnnnnnnnnnnnnnnnnnnnnnnnnnnnnnnnnnnnnnnnnnnnnnnnnnnnnnnnnnaggctgtgttctagatcctcagaaaggaaccactgtggggagatccttttctctcagctggcggagccacccagatgtgaccgaaccgatgcgatttaggagtgccaccacgtctggagcaccgggagtggaaaaggcgagaaatattgttcgccaaaaagcaact

SEQ ID NO: 24915 - DNA, 768 bp, Macaca Mulatta
ggggctcttccagaggcaagaccaaccaagatgagtgctctgggagctgttgttgccctcctgctctggggacagctttttgcagtggactcaggcaacgatgtcacggatatcgcagatgacggctgcccaaagccccccatgatcgcaaatggctacgtggagcactcggttcgctaccggtgtaagaactactacaggctgcgcacagaaggagatggagtgtacaccttaaacaatgagaagcagtggacaaataaggctgttggagataaacttcctgaatgtgaagcagtatgtgggaagcccaagaatccggcagatgcagtgcagcggatcctgggtggacacctggatgccaaaggcagctttccctggcaggctaagatggtttcccgccataatctcaccacaggggccacgctgatcaatgaacaatggctgctgaccacggctaaaaatctcttcctgaaccattcagaaaatgcaacagcgaaagacattgcccctactttaacactctatgtggggaaaaagcagcttgtagagattgagaaagtggttctacaccctaactactccagggtagatattgggctcatcaaactcaaacagaaagtgcctgtttaatgagagagtgatgccccatcttcttacctttaaaggattatgccaaattagggcgtgtggggtttacttgtcctggcctggggggcgcaaatgccaaatttttaaatttttcctgaacccatcctggaaggaatgtcc

SEQ ID NO: 24916 - DNA, 805 bp, Macaca Mulatta
tttgcagcttttattaaaaatataaatattcaacattctcttacacaaccaaactgaccaaggactggaaagatgttttattactgaaacgtttacaagaaaaagttgtttcaaagagcttacagatttagtcttacccacccaagagaatggcattctctttggttcaaaccacaacaaaaacaattgggtgacttctgtctgctttttcaaacaaaacgttttctcactggtctacattctctttaaaacaccactaaaaacacctggaaacggaaactaaacgtagacaaaacgaataacattgtgttgttactgcacatgaatacactttgtgcatgctaagtaaggggtataggctctctccctctctccctctatgtttcaagctatataaaaataaacaaatggcgtaagagcagcgctatggtacagaatactgtatttttttgtgtgtgctaaatgcagaatctttttggccaaacgcaccgtttcatttcccaataatctccatgagtttcctgttgctgtgagcttgctgcgctaactgctcggccctggccatttccaagacttcccggaggaggtggaaggtgagatccagggagatgggaggctcctcggaccgcctctccctctccgttgcctcctggtggccgccgagggcgttctcggcgccgcgctccgcgagagccgcggggctgtcgagcgagcgccgaggcagcagcagctgctgcagcaacacgcggaaaagttggcggccgcctgctccggcgaagggcggcagccgctgccgccggcgaga

SEQ ID NO: 24917 - DNA, 518 bp, Macaca Mulatta
atctagctcagggcagtcttccagctacggtcagcatggctctggctcacatcagtcttccggccatggccgacatgggtctggatctggccagtctcctagtcacggccgacatgggtccggttccgggcactcttctagctactgccaacatgggtctggctcaagtcgttcttccagccatggctcatatgagtctggttcaagtcactcttctggcttaggtcaacatgagtcaggctcagcacagtcctctggctatagtcagcatggttctggctcaggtcactcctctagccagggcacaacatggatctacatcagggcattcgtcaagctctggccaacatggctctagctcaggtcagtcttccagctatggtcagcatgagtctggctcccatcagtatttgggtcgcggccagacatgggtctggatctggacagtcttcaggccgtggccgacgtgggtctgggtcagggcagtctcccagctacggccaacatgggtctggctc

SEQ ID NO: 24918 - DNA, 96 bp, Macaca Mulatta
agtggtgggaaagacagctgctataatatgatgcagtgcattgctgctgggcatcagatcgttgctttagcaaatctgagaccagctgaaaaccaa

SEQ ID NO: 24919 - DNA, 714 bp, Macaca Mulatta
ggagtctttatttgtgtaattcattttgaggaaaaaacaactccatgtatttattaaagtctacaatggaaaaaaaagcagtgaagcattaggtgctggtaaaaactagaggagacacagtgagattagtacctccaacttcctttctttcctaccatgtaaccctgctttgggaatatggatgtaaagaagtaacttgtgtctcatgaaaatcagtaaaatcacacaagaaggatgaaatgccgtaacaaaaatgaggtgtgtagaacagggtcccacaggtttggggacattgagatcacttgtggtggggaggctgctgaggggtagcaggtccatctccagcagctggtccaacagtcatatcctgatgaatgtctggtcagctcttctgtgagaatacgattttttccatatgtatgtagtaaaatatgttactataaattacatgtactttataagtattggtttgggtgttccttccaagaaggactatagttagtaataaatgcctataataacatatttatttttatacatttatttctaatgaaaaaacttttaaattatatcgctttttgtgaaagtgcatataaaatagagtatttatacaatatatgttactagaaataaaagaacacttttgggaatgtgtgtgtcctgttttttgaagtgggaaataatttcctggggaaaggaaacttggaaacacaa

SEQ ID NO: 24920 - DNA, 376 bp, Macaca Mulatta
tgaagttgaaggacacaaaatcaaggccaaaggcatcaaactatggcaaatttcagacaaagggaatcaaagttgtgggaaaatggaaggaagtgaagattgacccaaatatgtttgtagatggacagatggatgatttggtatgctttgaggaattgacagattaccagttggtctctcctgccaagaatccctccagtctcttctcaaaggaggcacccaagagaaaggcacaagctgtttcagaagaagaggaggagggagagtctagctcaccaaagaaaaagatgaagttgaagaaaagtaaaaatgtagcaactgaaggaactagtacccagaaagaggttgaagtcaaagattctgagctggaggccca

SEQ ID NO: 24921 - DNA, 193 bp, Macaca Mulatta
actctgcttttctctccctgacacccttatcacccgcttctgtgatctgaaggcacatccccgcccttcaaaggacctggagcaacctttgtatgctctgctaacaaagatctgtagcttgtagggagatcctggctcctcacagaccttcatgcccaggcctgcgactcccaggtccaccctctctcacctc

SEQ ID NO: 24922 - DNA, 137 bp, Macaca Mulatta
ggatcttgaagcaagagcaccccgagttggcagtcctggcagactcggttgaccttcaggagtccacagggatagcctccgacagctccagcgactcttccagctcctccagctccagctcgtcagactccgactca

SEQ ID NO: 24923 - DNA, 140 bp, Macaca Mulatta
ggtttaggcttcagtatcgcaggaggtgtggggaaccaacacattcctggagacaacagcatttatgtaactaaaattatagatggaggagctgcacaaaaagatggaaggttgcaagtaggagatagactactgatggt

SEQ ID NO: 24924 - DNA, 789 bp, Macaca Mulatta
  misc_feature (1)...(789): n = A,T,C or G
tctagaccccctacagagccacacttgttctccgttggcgactgctttttcccttctcagggttacttcgtgacaagctgggctcctatgacgtggcattctacctcgctggagtccctccccttattggaggtgctgtgctttgttttatcccatggatccatagtaagaagcaaagagagatcagtaaaaccactggaaaagaaaagatggagaaaatgttggaaaaccagaactctctgctgtcaagttcatctggagtgttcaagaaagaatctgactctattatttaatatcttacatacctccaccagactggacttgctttttgaattttaagcaagtttcctttccttttatacgaattgcaaatttcatatttttttaatcacatcctaggaatagcacaataattgggaaatagaacccttatcactataagaaccattttctgccactgaatatctctgatgtttccgtgagtctgagggcagagaccccagtatatgaaaacatgtctgaaagtcacatattgtgaaaatttgaagctatctcagtaaaaagcaactttggaaactgtgaatgatctttagcttgtacaaacatttaaaaatacctcaagctatactgaaagggttgcagtttggttaggagtggaagtattttgtttgttaatgatgtcttcagttctggtacctctgttttactttcttatgctctgtggaaactttttgcanaatttaagcctgggttctaggtaataccagatgtaccgaaacctccagtctg

SEQ ID NO: 24925 - DNA, 698 bp, Macaca Mulatta
atggcgcggggtaggagcgcagcgacaggcgctctaggcttggcgctgcggctgctgctcggcctcggactaggcctggaggtcgccgccaccccgctttccacccggacctctgcccaggcctcaggccccagctcaggctcgtgcccacccaccaagttccagtgccgcaccagtggcttatgcgtgcccctcacctggcgctgtgacagggacttcgactgcagcgatggcagcgatgaggaggagtgcaggattgagccgtgtacccagaacgggcaatgcccaccgccccctggcctcccctgcccctgcacgggcgtcagtgactgctccgggagaaccgacaagaaactgcgcaactgcagccgcccggcctgcccagcaggcgagctccgttgcacgctgagcgatgactgcattccactcacgtggcgctgcgacggccacccagactgtcctgactccagcgatgagctcggctgtggaaccaacgagaccctcctgaaaggggatgccacaaccacggggccccctgcgaccccggagagtgtcacctctgtcgggaatgtcacgtcctcctctgccggggaccagtctggaagctcaggtgtctatggggttattgcagcttgctgcggtgctcagtgcaagcctggtcgccgtcacctcctccttttgtcctggctccgagccca

SEQ ID NO: 24926 - DNA, 452 bp, Macaca Mulatta
  misc_feature (1)...(452): n = A,T,C or G
gaatcctcctgtcttagcctcccaaggnnnnnnnnnnnnnnnnnngtgctaccgcacccggctcttcatttctttttaagacaaaggccattcaaggctttttaaaaaattgatgtgtgttgttatactttaacagtcagtggcttttaattccaaaaggtaatactttatgctctgagctatatgtgagatgagccccaaaacagtgtgtacaaataaaattatgatttgcgtattctaaggagacataccatttacagaaactccttttgataaaattaaggtttcacttttcacatttgcttaaatcacagtaagcctgtaaactagctcctcgatccaccacttaaaaacaaaagcctccttaacaatgcaaaaggttgcattcactgtatttatggttccatcaaaggctaaatagcttatctaaaatacatctgagtgatctattc

SEQ ID NO: 24927 - DNA, 258 bp, Macaca Mulatta
  misc_feature (1)...(258): n = A,T,C or G
acgtagccccagtgcgcttcgcagcgcaccattacgcggcaaaccctgcgcgcactcgaggtgcgcgcagccgcttcagccaagctgaacgccgcgctggaggagctggcggcgcgctgcgcggccctgcgcgaggtgcatgcnttctgcgtgtgagccactcgtgctgggaagccttccgcgcgcatgtccgcgcctgcgcacctataccctcaagctcacgcgcgaaccgcatccctggcggcccacgctggtggc

SEQ ID NO: 24928 - DNA, 4185 bp, Macaca Mulatta
  misc_feature (1)...(4185): n = A,T,C or G
ggtgcaggaggaacaaagaaagggactcctgcagcgtccggctgacctggcccttgtcacatacctcatccttgctggcttcttcactctgttccggggcctggtnnnnnnnnnnnnnnnnnnnnnnnnnnnnnnnnnnnnnnnnnnnnnnnnnnnnnnnnnnnnnnnnnnnnnnnnnnnnnnnnnnnnnnnnnnnnnnnnnnnnnnnnnnnnnnnnnnnnnnnnnnnnnnnnnnnnnnnnnnnnnnnnnnnnnnnnnnnnnnnnnnnnnnnnnnnnnnnnnnnnnnnnnnnnnnnnnnnnnnnnnnnnnnnnnnnnnnnnnnnnnnnnnnnnnnnnnnnnnnnnnnnnnnnnnnnnnnnnnnnnnnnnnnnnnnnnnnnnnnnnnnnnnnnnnnnnnnnnnnnnnnnnnnnnnnnnnnnnnnnnnnnnnnnnnnnnnnnnnnnnnnnnnnnnnnnnnnnnnnnnnnnnnnnnnnnnnnnnnnnnnnnnnnnnnnnnnnnnnnnnnnnnnnnnnnnnnnnnnnnnnnnnnnnnnnnnnnnnnnnnnnnnnnnnnnnnnnnnnnnnnnnnnnnnnnnnnnnnnnnnnnnnnnnnnnnnnnnnnnnnnnnnnnnnnnnnnnnnnnnnnnnnnnnnnnnnnnnnnnnnnnnnnnnnnnnnnnnnnnnnnnnnnnnnnnnnnnnnnnnnnnnnnnnnnnnnnnnnnnnnnnnnnnnnnnnnnnnnnnnnnnnnnnnnnnnnnnnnnnnnnnnnnnnnnnnnnnnnnnnnnnnnnnnnnnnnnnnnnnnnnnnnnnnnnnnnnnnnnnnnnnnnnnnnnnnnnnnnnnnnnnnnnnnnnnnnnnnnnnnnnnnnnnnnnnnnnnnnnnnnnnnnnnnnnnnnnnnnnnnnnnnnnnnnnnnnnnnnnnnnnnnnnnnnnnnnnnnnnnnnnnnnnnnnnnnnnnnnnnnnnnnnnnnnnnnnnnnnnnnnnnnnnnnnnnnnnnnnnnnnnnnnnnnnnnnnnnnnnnnnnnnnnnnnnnnnnnnnnnnnnnnnnnnnnnnnnnnnnnnnnnnnnnnnnnnnnnnnnnnnnnnnnnnnnnnnnnnnnnnnnnnnnnnnnnnnnnnnnnnnnnnnnnnnnnnnnnnnnnnnnnnnnnnnnnnnnnnnnnnnnnnnnnnnnnnnnnnnnnnnnnnnnnnnnnnnnnnnnnnnnnnnnnnnnnnnnnnnnnnnnnnnnnnnnnnnnnnnnnnnnnnnnnnnnnnnnnnnnnnnnnnnnnnnnnnnnnnnnnnnnnnnnnnnnnnnnnnnnnnnnnnnnnnnnnnnnnnnnnnnnnnnnnnnnnnnnnnnnnnnnnnnnnnnnnnnnnnnnnnnnnnnnnnnnnnnnnnnnnnnnnnnnnnnnnnnnnnnnnnnnnnnnnnnnnnnnnnnnnnnnnnnnnnnnnnnnnnnnnnnnnnnnnnnnnnnnnnnnnnnnnnnnnnnnnnnnnnnnnnnnnnnnnnnnnnnnnnnnnnnnnnnnnnnnnnnnnnnnnnnnnnnnnnnnnnnnnnnnnnnnnnnnnnnnnnnnnnnnnnnnnnnnnnnnnnnnnnnnnnnnnnnnnnnnnnnnnnnnnnnnnnnnnnnnnnnnnnnnnnnnnnnnnnnnnnnnnnnnnnnnnnnnnnnnnnnnnnnnnnnnnnnnnnnnnnnnnnnnnnnnnnnnnnnnnnnnnnnnnnnnnnnnnnnnnnnnnnnnnnnnnnnnnnnnnnnnnnnnnnnnnnnnnnnnnnnnnnnnnnnnnnnnnnnnnnnnnnnnnnnnnnnnnnnnnnnnnnnnnnnnnnnnnnnnnnnnnnnnnnnnnnnnnnnnnnnnnnnnnnnnnnnnnnnnnnnnnnnnnnnnnnnnnnnnnnnnnnnnnnnnnnnnnnnnnnnnnnnnnnnnnnnnnnnnnnnnnnnnnnnnnnnnnnnnnnnnnnnnnnnnnnnnnnnnnnnnnnnnnnnnnnnnnnnnnnnnnnnnnnnnnnnnnnnnnnnnnnnnnnnnnnnnnnnnnnnnnnnnnnnnnnnnnnnnnnnnnnnnnnnnnnnnnnnnnnnnnnnnnnnnnnnnnnnnnnnnnnnnnnnnnnnnnnnnnnnnnnnnnnnnnnnnnnnnnnnnnnnnnnnnnnnnnnnnnnnnnnnnnnnnnnnnnnnnnnnnnnnnnnnnnnnnnnnnnnnnnnnnnnnnnnnnnnnnnnnnnnnnnnnnnnnnnnnnnnnnnnnnnnnnnnnnnnnnnnnnnnnnnnnnnnnnnnnnnnnnnnnnnnnnnnnnnnnnnnnnnnnnnnnnnnnnnnnnnnnnnnnnnnnnnnnnnnnnnnnnnnnnnnnnnnnnnnnnnnnnnnnnnnnnnnnnnnnnnnnnnnnnnnnnnnnnnnnnnnnnnnnnnnnnnnnnnnnnnnnnnnnnnnnnnnnnnnnnnnnnnnnnnnnnnnnnnnnnnnnnnnnnnnnnnnnnnnnnnnnnnnnnnnnnnnnnnnnnnnnnnnnnnnnnnnnnnnnnnnnnnnnnnnnnnnnnnnnnnnnnnnnnnnnnnnnnnnnnnnnnnnnnnnnnnnnnnnnnnnnnnnnnnnnnnnnnnnnnnnnnnnnnnnnnnnnnnnnnnnnnnnnnnnnnnnnnnnnnnnnnnnnnnnnnnnnnnnnnnnnnnnnnnnnnnnnnnnnnnnnnnnnnnnnnnnnnnnnnnnnnnnnnnnnnnnnnnnnnnnnnnnnnnnnnnnnnnnnnnnnnnnnnnnnnnnnnnnnnnnnnnnnnnnnnnnnnnnnnnnnnnnnnnnnnnnnnnnnnnnnnnnnnnnnnnnnnnnnnnnnnnnnnnnnnnnnnnnnnnnnnnnnnnnnnnnnnnnnnnnnnnnnnnnnnnnnnnnnnnnnnnnnnnnnnnnnnnnnnnnnnnnnnnnnnnnnnnnnnnnnnnnnnnnnnnnnnnnnnnnnnnnnnnnnnnnnnnnnnnnnnnnnnnnnnnnnnnnnnnnnnnnnnnnnnnnnnnnnnnnnnnnnnnnnnnnnnnnnnnnnnnnnnnnnnnnnnnnnnnnnnnnnnnnnnnnnnnnnnnnnnnnnnnnnnnnnnnnnnnnnnnnnnnnnnnnnnnnnnnnnnnnnnnnnnnnnnnnnnnnnnnnnnnnnnnnnnnnnnnnnnnnnnnnnnnnnnnnnnnnnnnnnnnnnnnnnnnnnnnnnnnnnnnnnnnnnnnnnnnnnnnnnnnnnnnnnnnnnnnnnnnnnnnnnnnnnnnnnnnnnnnnnnnnnnnnncccgggcatgtttgtcgtcgtcctacaaatgaggaacccgaggctatggcatgccctggcctttttagatatgcgagcaatgagctcctcttttgtcctctgagaccccatctccattctcnnnnnnnnnnnnnnnnnnnnnnnnnnnnnnnnnnnnnnnnnnnnnnnnnnnnnnnnnnnnnnnnnnnnnnnnnnnnnnnnnnnnnnnnnnnnnnnnnnnnnnnnnnnnnnnnnnnnnnnnnnnnnnnnnnnnnnnnnaagtcctcggcgtggacaggcagctggggggacacgatccatggacaaggccatcccggccatgggagaccccagtcgtgaggtcttgcctgcaggagtactggggtcccccctggagccctatttacggtcacgtcatctataggaaacctatctctgagtnnnnnnnnnnnnnnnnnnnnnnnnnnnnnnnnnnnnnnnnnnnnnnnnnnnnnnnnnnnnnnnnnnnnnnnnnnnnnnnnnnnnnnnnnnnnnnnnnnnnnnnnnnnnnnnnnnnnnnnnnnnnnnnnnnnnnnnnnnnnnnnnnnnnnnnnnnnnnnnnnnnnnnnnnnnnnnnnnnnnnnnnnnnnnnnnnnnnnnnnnnnnnnnnnnnnnnnnnnnnnnnnnnnnnnnnnnnnnnnnnnnnnnnnnnnnnnnnnnnnnnnnnnnnnnnnnnnnnnnnnnnnnnnnnnnnctgttgcccaggcttgagtgaagtggcacaatctcagctcactgcagcctccgcctcctgggttcaagtgatcctcctacctcagcctcccaagtagctgggattacaggtgcacaccaccacacccagctaattttttgtatttttagtagagatggggtttcaccatgttggtcaggctggtcttgaactcctgacctcgtgatccacctgccttggcctcccaaagtggcaggattacaggcatgagcccctgcgcctggc

SEQ ID NO: 24929 - DNA, 429 bp, Macaca Mulatta
tctggctctgaggggtccgtcccagactcccccgacatggatgttgtactggagtccctcaagtgcctgtgcaacctcgtgctcagcagccctgtggcacagatgctggcagcagaggcccgcctagtggtgaagctcacagagcgtgtggggctgtaccgggagaggagcttcccccacgatgtccagttctttgacttgaggctcctcttcctgctaacggcactccacaccgatgtgcgccagcagctgtttcaggagctgaaaggagtgcatctgctgactgacacactggagctgacgctgggggtgactcctgaagggaacccacccaagctccttccttcccaagagactgagcgggccatggagatcctcaaagtgctcttcaacatcaccctcgactccatcaagggggaggtggacgag

SEQ ID NO: 24930 - DNA, 288 bp, Macaca Mulatta
ttacagatacggaaacaggctcggaggtgcaatctctggctgtgtagacagaacagggagttggaactcggccttatgcctttccctcctcactctcacataccagcgggcaggaagagatccagggaggagttgcacttgcccccccggaaatctccaaaaatctgcaaaaacggattccctggtaccgctttccgctcctgtcccaacagaaattccgagaccgaaaggggtgcgcgttgcggcccggggtgagggtctggaccgcttcctcctcggtggacaaat

SEQ ID NO: 24931 - DNA, 2230 bp, Macaca Mulatta
  misc_feature (1)...(2230): n = A,T,C or G
ggccgggccgggaggcggggacccccagccccaccgcccgcacctgcggggccatcggcgctcgggcgccgcaaccgctcagcacctgcggctgccgcagggagccgggcgcggggcnnnnnnnnnnnnnnnnnnnnnnnnnnnnnnnnnnnnnnnnnnnnnnnnnnnnnnnnnnnnnnnnnnnnnnnnnnnnnnnnnnnnnnnnnnnnnnnnnnnnnnnnnnnnnnnnnnnnnnnnnnnnnnnnnnnnnnnnnnnnnnnnnnnnnnnnnnnnnnnnnnnnnnnnnnnnnnnnnnnnnnnnnnnnnnnnnnnnnnnnnnnnnnnnnnnnnnnnnnnnnnnnnnnnnnnnnnnnnnnnnnnnnnnnnnnnnnnnnnnnnnnnnnnnnnnnnnnnnnnnnnnnnnnnnnnnnnnnnnnnnnnnnnnnnnnnnnnnnnnnnnnnnnnnnnnnnnnnnnnnnnnnnnnnnnnnnnnnnnnnnnnnnnnnnnnnnnnnnnnnnnnnnnnnnnnnnnnnnnnnnnnnnnnnnnnnnnnnnnnnnnnnnnnnnnnnnnnnnnnnnnnnnnnnnnnnnnnnnnnnnnnnnnnnnnnnnnnnnnnnnnnnnnnnnnnnnnnnnnnnnnnnnnnnnnnnnnnnnnnnnnnnnnnnnnnnnnnnnnnnnnnnnnnnnnnnnnnnnnnnnnntaataaagggcttgacgcgccgcaaagtcccctagccgctggccaccagcnttccagcccttacggcccacgctgcgatcctggtgaccgagaagnnnnnnnnnnnnnnnnnnnnnnnnnnnnnnnnnnnnnnnnnnnnnnnnnnnnnnnnnnnnnnnnnnnnnnnnnnnnnnnnnnnnnnnnnnnnnnnnnnnnnnnnnnnnnnnnnnnnnnnnnnnnnnnnnnnnnnnnnnnnnnnnnnnnnnnnnnnnnnnnnnnnnnnnnnnnnnnnnnnnnnnnnnnnnnnnnnnnnnnnnnnnnnnnnnnnnnnnnnnnnnnnnnnnnnnnnnnnnnnnnnnnnnnnnnnnnnnnnnnnnnnnnnnnnnnnnnnnnnnnnnnnnnnnnnnnnnnnnnnnnnnnnnnnnnnnnnnnnnnnnnnnnnnnnnnnnnnnnnnnnnnnagggatgaagctgacggcagattcagcagccagnnnnnnnnnnnnnnnnnnngccccccgccagctccctgacaatgagaccgactgtggctgggcaccatttggtaagnnnnngataagaacaactatcagcagctgcttggggccctggactactccttcctgtgcgcctatgccgtggggatgtacctcannnnnnnnnnnnnnnnnnnnnnnnnnnnnnnnnnnnnnnnnnnnnnnnnnnnnnnnnnnnnnnnnnnnnnnnnnnnnnnnnnnnnnnnnnnnnnnnnnnnnnnnnnnnnnnnnnnnnnnnnnnnnnnnnnnnnnnnnnnnnnnnnnnnnnnnnnnnnnnnnnnnnnnnnnnnnnnnnnnnnnnnnnnnnnnnnnnnnnnnnnnnnnnnnnnnnnnnnnnnnnnnnnnnnnnnnnnnnnnnnnnnnnnnnnnnnnnnnnnnnnnnnnnnnnnnnnnnnnnnnnnnnnnnnnnnnnnnnnnnnnnnnnnnnnnnnnnnnnnnnnnnnnnnnnnnnnnnnnnnnnnnnnnnnnnnnnnnnnnnnnnnnnnnnnnnnnnnnnnnnnnnnnnnnnnnnnnnnnnnnnnnnnnnnnnnnnnnncactcaaaaggctctgagaatggtacaaacagattgagactccagaagcaaatcttgaagaccgaaaagaacaggcctctggnnnnnnnnnnnnnnnnnnnnnnnnnnnnnnnnnnnnnnnnnnnnnnnnnnnnnnnnnnnnnnnnnnnnnnnnnnnnnnnnnnnnnnnnnnnnnnnnnnnnnnnnnnnnnnnnnnnnnnnnnnnnnnnnnnnnnnnnnnnnnnnnnnnnnnnnnnnnnnnnnnnnnnnnnnnnnnnnnnnnnnnnnnnnnnnnnnnnnnnnnnnnnnnnnnnnnnnnnnnnnnnnnnnnnnnnnnnnnnnnnnnnnnnnnnnnnnnnnnnnnnnnnnnnnnnnnnnnnnnnnnnnnnnnnnnnnnnnnnnnnnnnnnnnnnnnnnnnnnnnnnnnnnnnnnnnnnnnnnnnnnnnnnnnnnnnnnnnnnnnnnnnnnnnnnnnnnnnnncttctccaccatcagcaagatggggctcgaggccaccatcg

SEQ ID NO: 24932 - DNA, 211 bp, Macaca Mulatta
ggttctcccctggacccggcctccaccaccgccccacgggccgcagccttggctcctggaaacaagccgcttttcttcagaaagcccccggtgtccagatcggtcccgtcggtcacctccgtccccagcaccacctccaccgggctgcagttcccggcaagtggcgccccgactgctgggccacccgcctgcgctcggacgacgcccttgg

SEQ ID NO: 24933 - DNA, 534 bp, Macaca Mulatta
  misc_feature (1)...(534): n = A,T,C or G
agtcttttttagcactggtgaacttgttatcctatcctgctatttatgagctgataaagaatcaagatcttcctaataaaacagaatattctcttcgtgaagtcccaacatgtgttattgnnnnnnnnnnnnnnnnnnnnnnnnnnnnnnnnnnnnnnnnnnnnnnnnnnnnnnnnnnnnnnnnnnnnnnnnnnnnnnnnnnnnnnnnnnnnnnnnnnnnnnnnnnnnnnnnnnnnnnnnnnnnnnnnnnnnnnnnnnnnnnnnnnnnnnnnnnnnnnnnnnnnnnnnnnnnnnnnnnnnnnnnnnnnnnnnnnnnnnnnnnnnnnnnnnnnnnnnnnnnnnnnnnnnnnnnnnnnnnnnnnnnnnnnnnnnnnnnnnnnnnnnnnnnnnnnnnnnnnnnnnnnnnnnnnnnnnnnnnnnnnnnnnnnnnnnnnnnnnagagtgataatccatatccttggccaatgttttcatcatatcctttgccaaactgctatctgtcagacattacaagaaatgctggcataaaacaag

SEQ ID NO: 24934 - DNA, 694 bp, Macaca Mulatta
ggaacaatattaaatactagataaacaagacaattatttcagaaaaacagtctagcaagagtcccttctgtatgtaaaaagcacattataaatatgagaatgcagcacacagatagagcatctcttttacttgaaaaggccctgtctgaccttaattacactattctttgaagatttgaaaataaaatgaaagaaaatgctctgcccaaataaaatgtgcatataataggcccaaaacatttaagaaaatgtataaagttcagaatctttaattgaatgttctactttactaataattatgttgcataattttttacttataagattacttagtttttaataatttagaaacttttcagtaagagtaactcatttctaaaaataaaatttagaccattagatttatgttttgataaactttgcagtacaaataaagaaaatcaaaatatttccaaataaatcaagtatcttaattcttgttgatagatctttctttccctgttaattgcagctggcattcctgcacctatatatttcggtgctttaatggattccacatgtttacactggggaactttgaaatgtggtgagtcaggggcatgcaggatatatgattccaccaccttcaggtaaagataataatgggtttaaaattgttttataagcatagactgtgcataacacagcacctttc

SEQ ID NO: 24935 - DNA, 171 bp, Macaca Mulatta
ccgcgcagcacggagcacgcggcgccctggatccccgacaaggccacggacatctgcatgcgctgcacgcagacgcgcttctccgccctcacgaggcgccaccactgccgcaagtgcggcttcgtggtctgcgctgagtgctcgcgccagcgcttcttgctcccgcgcctg

SEQ ID NO: 24936 - DNA, 328 bp, Macaca Mulatta
  misc_feature (1)...(328): n = A,T,C or G
atgctgatggcacaggaggccctggcgttcctnnnnnnnnnnnnnnnnnnnnnnnnnnnnnnnnnnnnnnnnnnnnnnnnnnnnnnnnnnnnnnnnnnnnnnnnnnnnnnnnnnnnnnnnnnnnnnnnnnnnnnnnnnnnnnnnnnnnnnnnnnnnnnnnnnnnnnnnnnnnnnnnnnnnnnnnnnnnnnnnnnnnnnnnnnnnnnnnnnnnnnnnnnnnnnnnnnnnnnacatcacgatgcctttctcatcgcccatggaagcggagctggtccgcagggtcctgtccccggatgccacaccgctcccccgaccaggggcggttctg

SEQ ID NO: 24937 - DNA, 5577 bp, Macaca Mulatta
  misc_feature (1)...(5577): n = A,T,C or G
cctattcaggcctgttctgtgtggtcatcaatccttacaagaacctgcccatctactctgaagagattgtggaaatgtacaagggcaagaagaggcacgagatgccccctcacatctatgccatcacagacaccgcctacaggagtatgatgcaagnnnnnnnnnnnnnnnnnnnnnnnnnnnnnnnnnnnnnnnnnnnnnnnnnnnnnnnnnnnnnnnnnnnnnnnnnnnnnnnnnnnnnnnnnnnnnnnnnnnnnnnnnnnnnnnnnnnnnnnnagggtgagctggagcggcagctgctgcaggccaaccccattctggaggccttcgggaacgccaagaccgtgaagaatgacaactcttcccgcttcgnnnnnnnnnnnnnnnnnnnnnnnnnnnnnnnnnnnnnnnnnnnnnnnnnnnnnnnnnnnnnnnnnnnnnnnnnnnnnnnnnnnnnnnnnnnnnnnnnnnnnnnnnnnnnnnnnnnnnnnnnnnnnnnnnnnnnnnnnnnnnnnnnnnnnnnnnnnnnnnnnnnnnnnnnnnnnnnnnnnnnnnnnnnnnnnnnnnnnnnnnnnnnnnnnnnnnnnnnnnnnnnnnnnnnnnnnnnnnnnnnnnnnnnnnnnnnnnnnnnnnnnnnnnnnnnnnnnnnnnnnnnnnnnnnnnnnnnnnnnnnnnnnnnnnnnnnnnnnnnnnnnnnnnnnnnnnnnnnnnnnnnnnnnnnnnnnnnnnnnnnnnnnnnnnnnnnnnnnnnnnnnnnnnnnnnnnnnnnnnnnnnnnnnnnnnnnnnnnnnnnnnnnnnnnnnnnnnnnnnnnnnnnnnnnnnnnnnnnnnnnnnnnnnnnnnnnnnnnnnnnnnnnnnnnnnnnnnnnnnnnnnnnnnnnnnnnnnnnnnnnnnnnnnnnnnnnnnnnnnnnnnnnnnnnnnnnnnnnnnnnnnnnnnnnnnnnnnnnnnnnnnnnnnnnnnnnnnnnnnnnnnnnnnnnnnnnnnnnnnnnnnnnnnnnnnnnnnnnnnnnnnnnnnnnnnnnnnnnnnnnnnnnnnnnnnnnnnnnnnnnnnnnnnnnnnnnnnnnnnnnnnnnnnnnnnnnnnnnnnnnnnnnnnnnnnnnnnnnnnnnnnnnnnnnnnnnnnnnnnnnnnnnnnnnnnnnnnnnnnnnnnnnnnnnnnnnnnnnnnnnnnnnnnnnnnnnnnnnnnnnnnnnnnnnnnnnnnnnnnnnnnnnnnnnnnnnnnnnnnnnnnnnnnnnnnnnnnnnnnnnnnnnnnnnnnnnnnnnnnnnnnnnnnnnnnnnnnnnnnnnnnnnnnnnnnnnnnnnnnnnnnnnnnnnnnnnnnnnnnnnnnnnnnnnnnnnnnnnnnnnnnnnnnnnnnnnnnnnnnnnnnnnnnnnnnnnnnnnnnnaggtggattacaaagctgacgagtggctgatgaagaacatggaccccctgaatgacaacatcgccacgctgctccaccagtcctctgacaagtttgtctcggagctgtggaaggatnnnnnnnnnnnnnnnnnnnnnnnnnnnnnnnnnnnnnnnnnnnnnnnnnnnnnnnnnnnnnnnnnnnnnnnnnnnnnnnnnnnnnnnnnnnnnnnnnnnnnnnnnnnnnnnnnnnnnnnnnnnnnnnnnnnnnnnnnnnnnnnnnnnnnnnnnnnnnnnnnnnnnnnnnnnnnnnnnnnnnnnnnnnnnnnnaggccggcaagctggacccgcatcttgtgctggaccagctgcgctgcaacggcgtccttgagggcatccgcatctgccgccagggcttccccaacagggtggtcttccaggagtttcggcagannnnnnnnnnnnnnnnnnnnnnnnnnnnnnnnnnnnnnnnnnnnnnnnnnnnnnnnnnnnnnnnnnnnnnnnnnnnnnnnnnnnnnnnnnnnnnnnnnnnnnnnnnnnnnnnnnnnnnnnnnnnnnnnnnnnnnnnnnnnnnnnnnnnnnnnnnnnnnnnnnnnnnnnnnnnnnnnnnnnnnnnnnnnnnnnnnnnnnnnnnnnnnnnnnnnnnnnnnnnnnnnnnnnnnnnnnnnnnnnnnnnnnnnnnnnnnnnnnnnnnnnnnnnnnnnnnnnnnnnnnnnnnnnnnnnnnnnnnnnnnnnnnnnnnnnnnnnnnnnnnnnnnnnnnnnnnnnnnnnnnnnnnnnnnnnnnnnnnnnnnnnnnnnnnnnnnnnnnnnnnnnnnnnnnnnnnnnnnnnnnnnnnnnnnnnnnnnnnnnnnnnnnnnnnnnnnnnnnnnnnnnnnnnnnnnnnnnnnnnnnnnnnnnnnnnnnnnnnnnnnnnnnnnnnnnnnnnnnnnnnnnnnnnnnnnnnnnnnnnnnnnnnnnnnnnnnnnnnnnnnnnnnnnnnnnnnnnnnnnnnnnnnnnnnnnnnnnnnnnnnnnnnnnnnnnnnnnnnnnnnnnnnnnnnnnnnnnnnnnnnnnnnnnnnnnnnnnnnnnnnnnnnnnnnnnnnnnnnnnnnnnnnnnnnnnnnnnnnnnnnnnnnnnnnnnnnnnnnnnnnnnnnnnnnnnnnnnnnnnnnnnnnnnnnnnnnnnnnnnnnnnnnnnnnnnnnnnnnnnnnnnnnnnnnnnnnnnnnnnnnnnnnnnnnnnnnnnnnnnnnnnnnnnnnnnnnnnnnnnnnnnnnnnnnnnnnnnnnnnnnnnnnnnnnnnnnnnnnnnnnnnnnnnnnnnnnnnnnnnnnnnnnnnnnnnnnnnnnnnnnnnnnnnnnnnnnnnnnnnnnnnnnnnnnnnnnnnnnnnnnnnnnnnnnnnnnnnnnnnnnnnnnnnnnnnnnnnnnnnnnnnnnnnnnnnnnnnnnnnnnnnnnnnnnnnnnnnnnnnnnnnnnnnnnnnnnnnnnnnnnnnnnnnnnnnnnnnnnnnnnnnnnnnnnnnnnnnnnnnnnnnnnnnnnnnnnnnnnnnnnnnnnnnnnnagagtggaagaggaagctgcccagaagaacatggcccttaagaagatccgggagctggaatctcagatctcggaactccaggaagacctggagtctgaacgtgcttccagaaataaagctgagaagcagaaacgggaccttggggaagagctagaggcgctgaaaacagagttggaggacacgctggataccacagctgcccagcaggagctcaggtncaggtcgaaacgtgagcaggaggtgaacatcctgaagaagaccttggaggaggaggccaagacccacgaggcccagatccaggagatgagacagaagcactcgcaggccgtggaggagctggcggagcagctggagcagacgaagcgggtgnaagccaacctcgagaaggcaaagcagaccttggagaatgagcggggggagctggccaatgaggtgaaggtgctgctgcagggcaaaggggactcggagcacaagcgcaagaaagtggaggcgcagctgcaggagctgcaggtcaagttcaacgagggagagcgcgtgcgcacggagctggccgacaaggtcaccaagctgcaggtgntgcaggtggagctggacaacgtgaccgggcttctcagccagtccgacagcaagtccagcaagctcaccaaggacttctccgcgctggagtcccagctgcaggacactcagnnnnnnnnnnnnnnnnnnnnnnnnnnnnnnnnnnnnnnnnnnnnnnnnnnnnnnnnnnnnnnnnnnnnnnnnnnnnnnnnnnnnnnnnnnnnnnnnnnnnnnnnnnnnnccaagcacaacctggagaagcagatcgccaccctccatgcccaggnnnnnnnnctgcccaggtggccgacatgaagaagaagatggaggacagtgtggggtgcctggaaaccgctgaggaggtgaagaggaagctccagaaggacctggagggcctgagccagcggcacgaggagaaggtggccgcctacgacaagctggagaagaccaagacgcgactgcagcttgagcgggtgacctgctggtggaccnnnnnnnnnnnnnnnnnnnnnnnnnnnnnnnnnnnnnnnnnnnnnnnnnnnnnnnnnnnnnnnnnnnnnnnnnnnnnnnnnnnnnnnnnnnnnnnnnnnnnnnnnnnnnnnnnnnnnnnnnnnnnnnnnnnnnnnnnnnnnnnnnnnnnnnnnnnnnnnnnnnnnnnnnnnnnnnnnnnnnnnnnnnnnnnnnnnnnnnnnnnnnnnnnnnnnnnnnnnnnnnnnnnnnnnnnnnnnnnnnnnnnnnnnnnnnnnnnnnnnnnnnnnnnnnnnnnnnnnnnnnnnnnnnnnnnnnnnnnnnnnnnnnnnnnnnnnnnnnnnnnnnnnnnnnnnnnnnnnnnnnnnnnnnnnnnnnnnnnnnnnnnnnnnnnnnnnnnnnnnnnnnnnnnnnnnnnnnnnnnnnnnnnnnnnnnnnnnnnnnnnnnnnnnnnnnnnnnnnnnnnnnnnnnnnnnnnnnnnnnnnnnnnnnnnnnnnnnnnnnnnnnnnnnnnnnnnnnnnnnnnnnnnnnnnnnnnnnnnnnnnnnnnnnnnnnnnnnnnnnnnnnnnnnnnnnnnnnnnnnnnnnnnnnnnnnnnnnnnnnnnnnnnnnnnnnnnnnnnnnnnnnnnnnnnnnnnnnnnnnnnnnnnnnnnnnnnnnnnnnnnnnnnnnnnnnnnnnnnnnnnnnnnnnnnnnnnnnnnnnnnnnnnnnnnnnnnnnnnnnnnnnnnnnnnnnnnnnnnnnnnnnnnnnnnnnnnnnnnnnnnnnnnnnnnnnnnnnnnnnnnnnnnnnnnnnnnnnnnnnnnnnnnnnnnnnnnnnnnnnnnnnnnnnnnnnnnnnnnnnnnnnnnnnnnnnnnnnnnnnnnnnnnnnnnnnnnnnnnnnnnnnnnnnnnnnnnnnnnnnnnnnnnnnnnnnnnnnnnnnnnnnnnnnnnnnnnnnnnnnnnnnnnnnnnnnnnnnnnnnnnnnnnnnnnnnnnnnnnnnnnnnnnnnnnnnnnnnnnnnnnnnnnnnnnnnnnnnnnnnnnnnnnnnnnnnnnnnnnnnnnnnnnnnnnnnnnnnnnnnnnnnnnnnnnnnnnnnnnnnnnnnnnnnnnnnnnnnnnnnnnnnnnnnnnnnnnnnnnnnnnnnnnnnnnnnnnnnnnnnnnnnnnnnnnnnnnnnnnnnnnnnnnnnnnnnnnnnnnnnnnnnnnnnnnnnnnnnnnnnnnnnnnnnnnnnnnnnnnnnnnnnnnnnnnnnnnnnnnnnnnnnnnnnnnnnnnnnnnnnnnnnnnnnnnnnnnnnnnnnnnnnnnnnnnnnnnnnnnnnnnnnnnnnnnnnnnnnnnnnnnnnnnnnnnnnnnnnnnnnnnnnnnnnnnnnnnnnnnnnnnnnnnnnnnnnnnnnnnnnnnnnnnnnnnnnnnnnnnnnnnnnnnnnnnnnnnnnnnnnnnnnnnnnnnnnnnnnnnnnnnnnnnnnnnnnnnnnnnnnnnnnnnnnnnnnnnnnnnnnnnnnnnnnnnnnnnncaggcgcggggacctgccgtttgtcatgccccgccgaatggcccggaaaggcgctggcgatggttccgacgaggaggtggatggcaaagcggatggggctgaggccaaacctgccgaataa

SEQ ID NO: 24938 - DNA, 172 bp, Macaca Mulatta
agagttatgaacaagaaaaatatacccttcaaagagaagttgaactcaagagccgaatgttagaaagtttgagctgtgaatgtgaagctattaaacaacaacaaaaaatgcacctggagaaattggaagaacaactaagcagaagccatggacaggaagtgaatgaactaaa

SEQ ID NO: 24939 - DNA, 86 bp, Macaca Mulatta
gcctggaggagaaccatctccaggatgaaggtgtatgttgtctcgcagaaggactgaagagaaattccagtttgaaaatcctgaag

SEQ ID NO: 24940 - DNA, 1844 bp, Macaca Mulatta
  misc_feature (1)...(1844): n = A,T,C or G
gtgcagaaatcatatgcgaagcacgaaatgcgttaagaacagttagaacccaaagaccatttacaccacaggaagcccaaagaaaactatttggacctgcatcctcaagaacgtcagaaaatagacctccttcctccttcagnnnnnnnnnnnnnnnnnnnnnnnnnnnnnnnnnnnnnnnnnnnnnnnnnnnnnnnnnnnnnnnnnnnnnnnnnnnnnnnnnnnnnnnnnnnnnnnnnnnnnnnnnnnnnnnnnnnnnnnnnnnnnnnnnnnnnnnnnnnnnnnnnnnnnnnnnnnnnnnnnnnnnnnnnnnnnnnnnnnnnnnnnnnnnnnnnnnnnnnnnnnnnnnnnnnnnnnnnnnnnnnnnnnnnnnnnnnnnnnnnnnnnaaagaagacagtggaatccaaagaaacagttatgatgggggactctgtggtgaaaataaatgggatttatttaacaaaatcaaatgctatttgccacttnnnnnnnnnnnnnnnnnnnnnnnnnnnnnnnnnnnnnnnnnnnnnnnnnnnnnnnnnnnnnnnnnnnnnnnnnnnnnnnnnnnnnnnnnnnnnnnnnnnnnnnnnnnggaccaggggaagagacatgcgagggcctcatcacgccccagtagctcagacctgagcaggctgcaaaccaaagcagnnnnnnnnnnnnnnnnnnnnnnnnnnnnnnnnnnnnnnnnnnnnnnnnnnnnnnnnnnnnnnnnnnnnnnnnnnnnnnnnnnnnnnnnnnnnnnnnnnnnnnnnnnnnnnnnnnnnnnnnnnnnnnnnnnnnnnnnnnnnnnnnnnnnnnnnnnnnnnnnnnnnnnnnnnnnnnnnnnnnnnnnnnnnnnnnnnnnnnnnnnnnnnnnnnnnnnnnnnnnnnnnnnnnnnnnnnnnnnnnnnnnnnnnnnnnnnnnnnnnnnnnnnnnnnnnnnnnnnnnnnnnnnnnnnnnnnnnnnnnnnnnnnnnnnnnnnnnnnnnnnnnnnnnnnnnnnnnnnnnnnnnnnnnnnnnnnnnnnnnnnnnnnnnnnnnnnnnnnnnnnnnnnnnnnnnnnnnnnnnnnnnnnnnnnnnnnnnnnnnnnnnnnnnnnnnnnnnnnnnnnnnnnnnnnnnnnnnnnnnnnnnnnnnnnnnnnnnnnnnnnnnnnnnnnnnnnnnnnnnnnnnnnnnnnnnnnnnnnnnnnnnnnnnnnnnnnnnnnnnnnnnnnnnnnnnnnnnnnnnnnnnnnnnnnnnnnnnnnnnnnnnnnnnnnnnnnnnnnnnnnnnnnnnnnnnnnnnnnnnnnnnnnnnnnnnnnnnnnnnnnnnnnnnnnnnnnnnnnnnnnnnnnnnnnnnnnnnnnnnnnnnnnnnnnnnnnnnnnnnnnnnnnnnnnnnnnnnnnnnnnnnnnnnnnnnnnnnnnnnnnnnncagcaaacttacttcttaccgtgactgctgtgcagccttggccggctattccagatgttatgccttatttctgaatctaattaacaaataccagaagaagcagnnnncaggatttagtcgtccgtgttgtttttattcttggcaacctgacggcgaaaaataaccaggctcgtgaacaattttccaaagagaaagggagcatccaaactctgctgtcattattccagacgttccatcagctggatctgcattcccagaagccggcgggccaacgaggcgagcagcacagggcgcagaggccgccgtcagaggcagaggacgtgctcatcaagctgacccgcgtgctggccaacattgccatccacccgggcgtgggcccggtactggctgccaacccggggatagtgggcctgctcctgaccacgctgg

SEQ ID NO: 24941 - DNA, 2568 bp, Macaca Mulatta
  misc_feature (1)...(2568): n = A,T,C or G
aggttggatagcactgacggggatggggcctggtgccccgcagggtcggtgtttcccaaggaggaggagtacttgcaggtggatctacaacggctgcacctggtggctctggtgggcacccagggacggcatgctgggggcctgggcaaggagttctcccggagctaccggctgcgttactcccgggacggtcgccgctggatggactgttttgaccgctggggtcaggaggtgannnnnnnnnnnnnnnnnnnnnnnnnnnnnnnnnnnnnnnnnnnnnnnnnnnnnnnnnnnnnnnnnnnnnnnnnnnnnnnnnnnnnnnnnnnnnnnnnnnnnnnnnnnnnnnnnnnnnnnnnnnnnnnnnnnnnnnnnnnnnnnnnnnnnnnnnnnnnnnnnnnnnnnnnnnnnnnnnnnnnnnnnnnnnnnnnnnnnnnnnnnnnnnnnnnnnnnnnnnnnnnnnnnnnnnnnnnnnnnnnnnnnnnnnnnnnnnnnnnnnnnnnnnnnnnnnnnnnnnnnnnnnnnnnnnnnnnnnnnnnnnnnnnnnnnnnnnnnnnnnnnnnnnnnnnnnnnnnnnnnnnnnnnnnnnnnnnnnnnnnnnnnnnnnnnnnnnnnnnnnnnnnnnnnnnnnnnnnnnnnnnnnnnnnnnnnnnnnnnnnnnnnnnncaggtccactgtaacaacatgcacacgctgggagcccgtctgcctggcggggtggaatgtcgcttccggcgtggccctgccatggcctgggagggggagcctatgcgccacaacctggggggcaacctgggggaccccagagcccgggctgtctcagtgccccttggtggccgtgtagctcgctttctgcagtgccgcttcctctttgcggggccctggttactcttcagcgaaatctccttcatctctnnnnnnnnnnnnnnnnnnnnnnnnnnnnnnnnnnnnnnnnnnnnnnnnnnnnnnnnnnnnnnnnnnnnnnnnnnnnnnnnnnnnnnnnnnnnnnnnnnnnnnnnnnnnnnnnnnnnnnnnnnnnnnnnnnnnnnnnnnnnnnnnnnnnnnnnnnnnnnnnnnnnnnnnnnnnnnnnnnnnnnnnnnnnnnnnnnnnnnnnnnnnnnnnnnnnnnnnnnnnnnnnnnnnnnnnnnnnnnnnnnnnnnnnnnnnnnnnnnnnnnnnnnnnnnnnnnnnnnnnnnnnnnnnnnnnnnnnnnnnnnnnnnnnnnnnnnnnnnnnnnnnnnnnnnnnnnnnnnnnnnnnnnnnnnnnnnnnnnnnnnnnnnnnnnnnnnnnnnnnnnnnnnnnnnnnnnnnnnnnnnnnnnnnnnnnnnnnnnnnnnnnnnnnnnnnnnnnnnnnnnnnnnnnnnnnnnnnnnnnnnnnnnnnnnnnnnnnnnnnnnnnnnnnnnnnnnnnnnnnnnnnnnnnnnnnnnnnnnnnnnnnnnnnnnnnnnnnnnnnnnnnnnnnnnnnnnnnnnnnnnnnnnnnnnnnnnnnnnnnnnnnnnnnnnnnnnnnnnnnnnnnnnnnnnnnnnnnnnnnnnnnnnnnnnnnnnnnnnnnnnnnnnnnnnnnnnnnnnnnnnnnnnnnnnnnnnnnnnnnnnnnnnnnnnnnnnnnnnnnnnnnnnnnnnnnnnnnnnnnnnnnnnnnnnnnnnnnnnnnnnnnnnnnnnnnnnnnnnnnnnnnnnnnnnnnnnnnnnnnnnnnnnnnnnnnnnnnnnnnnnnnnnnnnnnnnnnnnnnnnnnnnnnnnnnnnnnnnnnnnnnnnnnnnnnnnnnnnnnnnnnnnnnnnnnnnnnnnnnnnnnnnnnnnnnnnnnnnnnnnnnnnnnnnnnnnnnnnnnnnnnnnnnnnnnnnnnnnnnnnnnnnnnnnnnnnnnnnnnnnnnnnnnnnnnnnnnnnnnnnnnnnnnnnnnnnnnnnnnnnnnnnnnnnnnnnnnnnnnnnnnnnnnnnnnnnnnnnnnnnnnnnnnnnnnnnnnnnnnnnnnnnnnnnnnnnnnnnnnnnnnnnnnnnnnnnnnnnnnnnnnnnnnnnnnnnnnnnnnnnnnnnnnnnnntcagctacccaatgctgttgcatgtggcagcccagatcgcctccggcatgcgctatctggccacactcaactttgtacatcgcgacctggccacgcggaactgcctagttggggaaaatttcaccatcaaaatcgcagactttggcatgagccggaacctctatgctggggactattaccgtgtgcagggccgggcagtgctgcccatccgctggatggcctgggagtgcatcctcatgnnnnnnnnnnnnnnnnnnnnnnnnnnnnnnnnnnnnnnnnnnnnnnnnnnnnnnnnnnnnnnnnnnnnnnnnnnnnnnnnnnnnnnnnnnnnnnnnnnnnnnnnnnnnnnnnnnnnnnnnnnnnnnnnnnnnnnnnnnnnnnnnnnnnnnnntgtcccggccgcctgcctgcccgcagggcctctatgagctgatgcttcggtgctggagccgggagtctgagcagcgaccacccttttcccagctgcatcgcttcctggcagaggatgccctcaacacggtgtga

SEQ ID NO: 24942 - DNA, 780 bp, Macaca Mulatta
caattcaaaatgtggccccctgggtcagcctcgcagccaccgccctcacctgccacggccacaggtctgcatccagcggctcgcccagagcccccgcagtgccggctcagcatgtgtccagcgcgcagcctcctccttgtggccaccctagtcctcctggactacctcagtttggccagaaacctctccgtggccaccccaggcccagaaatgttcccgtgccttcaccactcccaaaacctgctgaaggccgccagcaacacgcttcagaaggccagacaaattctagaattttacccttgcacttctgaagagattgatcatgaagatatcacaaaagataaaaccagcacagtagaggcctgtttaccattggaattaatcaagaatgagagttgcctaaattccagagagacttctttcataactaatgggagttgcctggcctccagaaagacctcttttatgatggccctgtgccttaggagtatttatgaagacttgaagatgtaccaagtggagttcaagaccatgaatgcaaagcttctgagggatcctaagaggcagatctttctagatcaaaacatactgggagttattgatgagctgatgcaggccctgaatttcaacagtgagactgtgccacaaaaatcctcccttgaagaaccggatttttataaaactaaaatcaagctctgcatacttcttcatgctttcagaattcgggcagtgactattgatagagtgatgagctatctgaatgcttcctaaaaagcgagg

SEQ ID NO: 24943 - DNA, 263 bp, Macaca Mulatta
  misc_feature (1)...(263): n = A,T,C or G
acaggcccaagtatgtgttcatgccttttagtgttgaggacagcaccgatgtccacgtgcttatcgtggatcaccgcattgtgttcagntcagctgcaagaatgacgatggagtggagttatacaatgagattgagttctatgccaaagtgaactccaaggnaggactcccaggataagcgctcttcccgctctattacttgctttgtgaggaaatggaaggaaaaggtggcctggccccggcttaccaaggaggatatcaag

SEQ ID NO: 24944 - DNA, 189 bp, Macaca Mulatta
aggagctgatctgcctccgggccatccgtgacgtgaatgtacccaagttcctgcaggaggacctcaagctcttctctgggatcgtgtccgacctgtttcccaccatcaaggaggaggacacggactatggcatcctggacgaggccatccgcgaggcctgcaggaagagcaacctcaaggacgtggagg

SEQ ID NO: 24945 - DNA, 124 bp, Macaca Mulatta
aagtggtgacacgcatctttttgataaggtcagaggctatgacatcaagctgcttcgatacctgtcagtcaaatacatctgtgacctgatggtggagaacaagaaggtgaagtttggcatgaag

SEQ ID NO: 24946 - DNA, 594 bp, Macaca Mulatta
ttcctcctcacttgctgcccaggttaagacagatttcaaataccagcctttggagggatccttgtgtctccccttctaattcctaacatatgtctgtttttttgtttcagggtccaattctcaggctgtagtgactcaggagccctcaatgactgtgtccccaggagggacagtcactctcacctgtgcttccagcactggagcagtcaccagtggtcactctccacactggttccagcagaaacctggacaagcccccaagacactgatttataatacaaactacaaacactcctggactcctgcccggttctcaggctccctccttgggggtaaagctgccctgacactgtcaggtgcgcagcctgaggacgaggctgagtattactgctggctgtactatagtggtgctcagcacagtgacggactcataagagaaaccaagacataaacctccctaggcccttgtgatgtggagatcacatgatcagacacgccggctcccaagacagcctacatggggagcagccatagaaaggggaaggaaagggtctgagttgatttctatctctgcttgtgccttgaagtggagga

SEQ ID NO: 24947 - DNA, 1155 bp, Macaca Mulatta
  misc_feature (1)...(1155): n = A,T,C or G
gatcacannctaaataggatctcatgacagttacatacgcagccatttcacctaaactgtggcacagagtgctctgccatgagtcacaagaagcacagtgatcatcacccacaaggacaggttgctggggtgaggcgccctttgctttcatgtttagattcttctcagctgcatctcactttcctaaaggccccagccacacagttcttttagggattaaagtaggaggaaaaaaataaagagaagccaacatccatccttaaagaaaaaaagtaaatccatttgatggtgaacttcacccatggacaaatttgggatcagtgttctccagtctgaacatagtcttctgtgacctgggagagtgtggtcaggtactgccagctcagggcagccaagagcatgacaaacgacaggtagatgggggagtagtggcttcgggagatcagctgacaattgggaagattctgcgtccggatggtggagatgatctcccttgttttactagaagatgggtctgattcggggattctatgataaatctcttccatatactgatatatgatggctttgacagctggcatattggtggcatccatcatcagggtcaccgcttgccctttccgaatcttcactgcccctttgaacacctgctggttattgtaacaggcagccaaagtggcaatggccatcacctgtggaatagcacagaagttaaacacactctggtcttctgagtcttgaaaggtaggtgatgacatctgggatgtggtgcagtgcattggttataagttcattcaggcactgcacggccaagtcaatattctcaggcttagcaaaatcccctaacttcttaacatacctgctccaaacctcttgaggccaaaactctcttccttcttgctggtcttccagatagtcacgaatgatgtttgttttctgcagaaacaggcccatagagttggcacgttccgtatcttcaccaactaaggggtcttcgaactctgaagccgagaagaggcgggaaaggccgattcctaccagcccagcgacatagtggcagtacttgtcccactcctgctcagaggtcacatgcttatccaaaaattctgccatcccaattcccattctctggcaaatgtcggcaatcaccgtttg

SEQ ID NO: 24948 - DNA, 300 bp, Macaca Mulatta
tacatgtatcacattccagctacagtacttccatttattaaaagcacattaaccatttctatagcatgatttcttcaagtaaaaggcaaaagatatgaattttataattgacttgagtactttaagccttgtttaaaacatttcttacttaacttttgcaaattaaacccactgtagcttacctgtaatatacatagtagtttacctttaaaagttgtaaaaatattgctttaaccaacactgtaaatatttcagataaacattatattcttgtatataaactttacatcctgttttacc

SEQ ID NO: 24949 - DNA, 343 bp, Macaca Mulatta
  misc_feature (1)...(343): n = A,T,C or G
agtatgcagnttgttacttcgcgtgagatcctgctgtaagacctacctatagnaaaaaagaatccagaaatgccatgcacgctaatgcttgatcattggcttctttgtgaaaattgatccattcctatatactcatgtggtggctgaatacattttggaagagagtttttcatcttagagattggtgaacaagtgtgagagtgtgagaagctcacagagtacaaatttgcctgtatattttgtgggtttcttttcctttcaagatgttttctatttctaaattaaagtaatttcaannnnnnnnnnnnnnnnnnnnnnnnnnnnnnnnnnnnnnnnnnnnnnn

SEQ ID NO: 24950 - DNA, 136 bp, Macaca Mulatta
ccattttaatgcatcctgttaaatcaagttaaaagaggggaaagcaaaaccaaaaagataaaaaggcacagagcgagagacagcccagcacaggacccccagcaaggcaagcagtgacactccagcagccgggctg

SEQ ID NO: 24951 - DNA, 585 bp, Macaca Mulatta
  misc_feature (1)...(585): n = A,T,C or G
gattccaagatcgcgtctgaaagtgcagtacatcgtttgtacctgaaactgccgccacatgcactcctccaccgctgagagttgaatagcttttcttctgcaatgggagttgggagtgatgcgtttgattctgcccacagggcctgtgccaaggcaatcagatctttatgagagcagtattttctgtgttttctttttaatttacagcctttcttattttgatatttttttaatgttgtggatgaatgccagctttcagacagagcccacttagcttgtccacatggatctcaatgccaatcctccattcttcctctccagatatttttgggagtgacaaacattctctcatcctacttagcctacctagatttctcatgacgagttaatgcatgtccgtggttgggtgcacctgtagttctgtttattggtcagtggnnnnnnnnnnnnnnnnnnnnnnnnnnnnnnnnnnnnnnnnnnnnnnnnnnnnnnnannnnnnnnnnnnnnnnnnnnnnnnnnnnnnnnnnnnnnnnnnnnnnnnnnnnnnnnnnnnnnnnnngcgttaccaacttaatcgccttgca

SEQ ID NO: 24952 - DNA, 607 bp, Macaca Mulatta
  misc_feature (1)...(607): n = A,T,C or G
tcagtattcggctggccaccaggagcactatgtcgatgctgatctcaatgaatgctgtcctggggaaggtcaacttggtgcagttggtggtgatggagctggtggagctgacagtctttggcaccatgaggatagtcatcaataatatcttcannnnnnnnnnnnnnnnnnnnnnnnnnnnnnnnnnnnnnnnnnnnnnnnnnnnnnnnnnnnnnnnnnnnnnnnnnnnnnnnnnnnnnnnnnnnnnnnnnnnnnnnnnnnnnnnnnnnnnnnnnnnnnnnnnnnnnnnnnnnnnnnnnnnnnnnnnnnnnnnnnnnnnnnnnnnnnnnnnnnnnnnnnnnnnnnnnnnnnnnnnnnnnnnnnnnnnnnnnnnnnnnnnnnnnnnnnnnnnnnnnnnnnnnnnnnnnnnnnnnnnnnnnnnnnnnnnnnnnnnnnnnnnnnnnnnnnnnnnnnnnnnnnnnnnnnnnagacttatatgcacaatgcagcgttggcaggaggtgtggctctgagtgcctcatgtcacgtgatccattctccttggattgccatggtgctaggtcttgtggctgggctgatctccatcgggggagccaagtgcctgccg

SEQ ID NO: 24953 - DNA, 119 bp, Macaca Mulatta
tggtataagctgaaatccaaaccaggaaagaaggacaaggagcgaggagaaattgaggttgacattcagtttatgagaaacaacatgactgccagcatgtttgacctttctatgaaaga

SEQ ID NO: 24954 - DNA, 2565 bp, Macaca Mulatta
  misc_feature (1)...(2565): n = A,T,C or G
agtgaaacccctgcctccgaagaatgggtaagacgttttcacagttgggctcttggcgggaggacgagaacaagtcaatcctgccctccaatccagccattggcagccaggctgtcagctacttcagcaccggtagcagcaagtctctttgttcctgtgtgccttgtgaaggaactgctggtgccagctttgtgacttgtcccacctgccagggcagtggcaagattccccaannnnnnnnnnnnnnnnnnnnnnnnnnnnnnnnnnnnnnnnnnnnnnnnnnnnnnnnnnnnnnnnnnnnnnnnnnnnnnnnnnnnnnnnnnnnnnnnnnnnnnnnnnnnnnnnnnnnnnnnnnnnnnnnnnnnnnnnnnnnnnnnnnnnnnnnnnnnnnnnnnnnnnnnnnnnnnnnnnnnnnnnnnnnnnnnnnnnnnnnnnnnnnnnnnnnnnnnnnnnnnnnnnnnnnnnnnnnnnnnnnnnnnnnnnnnnnnnnnnnnnnnnnnnnnnnnnnnnnnnnnnnnnnnnnnnnnnnnnnnnnnnnnnnnnnnnnnnnnnnnnnnnnnnnnnnnnnnnnnnnnnnnnnnnnnnnnncagatgttttacgcagtagccaccaagataccggatgaaaacacnnnaaaatctgtacctggctggaaatcaaagtccaccatgtgcttttgcacatccagnnnnnnnnnnnnnnnnnnnnnnnnnnnnnnnnnnnnnnnnnnnnnnnnnnnnnnnnnnnnnnnnnnnnnnnnnnnnnnnnnnnnnnnnnnnnnnnnnnnnnnnnnnnnnnnnnnnnnnnnnnnnnnnnnnnnnnnnnnnnnnnnnnnnnnnnnnnnnnnnnnnnnnnnnnnnnnnnnnnnnnnnnnngactaaggaaggactacagaggctttgccaaaggagaagccctgcttcatcacacccttaacctcccacccgctcaggaagcttgctttgaagttaacttcatacacacacactcatatcctccaatttcccccagattctttcaggggctgccatcagattctgcccttggttagnnnnnnnnnnnnnnnnntagagacagagtctcactgttggcccaggttggtcttgaactcctgggctcaagcgatcttcccttcttggcctcccaaagcacttggattacagatgtgagccactgtgcctggctggtctttcttcaggaaaatctgacctggcatcttcttgaggcaccttagattccctggagtggcacctggcctttctgtactgagcacctggtgagtctgaaggggccatttcaccccagctccatcagggctggccgtcctgtctgaatggggagagagctgtagttttatctggcttttaaaacatagacctgccggctgggcgcagtggcttatgcctgtaatcccagcacttcgggaggccgaagcgggtggatcacttgaggtcaggagttcatgaccagcctggccaacatggtgaaaccttgtctctactgaaaatgcaaaaattagccgggtgtggtggcgcgcgcctgtaatctcagctactccggaggctgaggcaggagaatcacttgaaaccggaaggcagaagttgcagtgagccaagatcatgccactgcaatccagcctgggcaaaagagcaaaactctgtctcnnnnnngacccttttcaagttttctactctctgataggaaaatttggggacatccagtgccatctccaaggactttctggggatcatagatgctttcctgtgcctgtctgctttgaccatgtgaaaaagtgannnnnnnnnnnnnnnnggtaacttgtctgccacccatctgagagatgagccaaggccccttagccctctgtcctttctggttattgactgtccctggttcctaggaagacagctgttctccagctaaagcttctcctctctataaagcagtttcactattcttttcatagcgggagccaaaatagtagaggaggggagggaggcacctggcattctgtgggtctgcacaggaaaaaaagagccaaagtcagattcattgtataagatatttattgaaggagaacctgtaagtccacatcctgagcccatgtgagtagacacaggcaggtcaaacggtgggcccagctgctctcatctgaaagcctgcaggagatgaagctgtcagtatccagctgaggctgctgggttctgttccaccaccaccttagcaccagggcccactctggtcccagaggcctcatccttccttgggctttgacaatgtggagcagcacgtcggcagggactggtctagaccctccctttcctgtcactcagctagggctaagccccagataacccctggtttcccactggctcctagtagaaaggtttctgtactttagcagaacaggaaggatatttgctcattaaaggtggcttggtcttacagctgggtgcagtggtatacacctgtagtcctagctactcaggaagctgaggtgggaggatctctggagcccaggagttcaactcttacaagagcagcaacattagcaagaccctgtt

SEQ ID NO: 24955 - DNA, 488 bp, Macaca Mulatta
tccagcctccacagcgagcctgagagggccggcctcgggcctgcgcccgggacagagagttcgcagacagaattctggacagacggacagactgagccctcggcagctggccttggagtagagaccgagaggcccaagcaaaagacggagccagacaggtccagcctccggacgcatccagaaaggagctggtcagagctggagacgacctgtccttggacggaggccgggacagatggcctttggacaaataaagcgcaggtccgacctccagtttcagcccgaggaggacaaaccctggacacagccaggggttgataggccctggacagagctggaaacacatgggtcacagactcagccagagagggtcaagtcctgggctgataacctctggacccaccagaacagttccaacctccagactcacccagaaggagcctgtccctcaaaagagccaagtgctgatggctcctggaaagaattgt

SEQ ID NO: 24956 - DNA, 645 bp, Macaca Mulatta
gttttattacccacatcttactgtctcagaaaggttaacttgcctggagtcacagatacttaccaaatagcagttgtaatttttaaatgcaagactttacctcacaacatcctgctgcagtatgtcaataatatactcactcaagtgcatatgaattttaccttttcagcatatcattaccttagggattttggatcttttcttaaaaggctggtttctgtattattaagagaaaagattttcggtttggtaaaacaaggtaatttttcaggctttttttgccttgttttacccttatcattaacactcaatcatccaagtgtttccttcatgaaatacttgtaataacaggacttaccaagatgatgggaattctgaaaggtcttgaatgaacagaaatgttttttctccccatattcaccaataatagaaatagtttgctaatagtatcatagcaattattttttaaatttatcacaaacatttggacttaattttacttttgagcaatgatatttatgatgtcacttaaattttatatttcatagacaagagaagaaagaaaaatggaagcaattttgcaagcttttgccagacttgaaaagagagagaaaagaagagaacaagcttggaaaggatcagcac

SEQ ID NO: 24957 - DNA, 139 bp, Macaca Mulatta
aaaggttgatggaaagttattatgctggctctgtactttatcgtacaaaagagttttacagaagacgaaagaacagaggaagagcctgggatcttcacattcaaattcatcatcttcatctctaactgagaaagaccag

SEQ ID NO: 24958 - DNA, 328 bp, Macaca Mulatta
gtatcccagaaaataaaggcacatgatatagcacctcttgcttattggctctcatatttcatgaataattataacttaattggaatatagaaaagaatctaactttgttaagggtgaagagaacttgtcaggattttcttttcttgctcctgaccagaaatattgcataagtagttttggggggccatctcccagactttgccagggaatagctttcatgaagccaaactttcctggtgagattacctgtcagttccataccttgtctcctttgtacacatgaggaaactgaggatgtcaaaataaatatgacaccggattaaaacat

SEQ ID NO: 24959 - DNA, 394 bp, Macaca Mulatta
gtggaagacagatgatgctcaaatttcttttccattaagcagttgtttctggtgatgaagaatgatttggtaaagcagttaacaaaacattttccaaagacaccagagggtctgtatagtactgcaaagcaggactgaatcccttctgctgcaaatactggattcgaccttggtcaatcagcaatttacaaagatgccctattttcttcttttcttcaacactaagaagcctaaattgaataaacacatacaaaacattgttaaaattttgtaaaagtttataaaaaattatttttgtcacttccatttattgagagaatgttaactaacccgtaaagtactaagtactttatcccatgcttccaagacacattatatttatgaccacaataag

SEQ ID NO: 24960 - DNA, 580 bp, Macaca Mulatta
  misc_feature (1)...(580): n = A,T,C or G
tcccccgcggggtcccagcagcaattcggctactccccagggcagcagcagacccacccccagnnagggttctccaaggacatctacaccatttggatcagggcgtgttagagaaaaaagaatgtctaatgagttggaaaattatttcaagccttcaatgcttgaagatccttgggctggcctagaaccagtatctgtagtggatataagccaacaatacagcaatactcaaacattcacaggcaaaaaaggaagatacttttgttaacatttctgaaattcaactggaagcttcatgtgtcaggaacatcttggacaaaactttaacttgtgttgatataaatttacccaaagatgatgactttggatgattagtaaggtctttttgttatttttcatcgtatcaggtattgttgatattacagaaaaaaagtaggataatttgcaacatttagctctgcaagtacctaccacattttagagatttacagtttccatatatttaacattcctggttatataatggacatttgtcttttaatgttttttcaatgttttaaaataaaacattttgtcttct

SEQ ID NO: 24961 - DNA, 766 bp, Macaca Mulatta
ggaacattgaaccgttcttcggaattggcgtggtatatttatttaaccacgggagtgtgtctggaaatgcaaactatcattaatttcatactagtttgtaccgtatctgtaggcatcctgtaaataattcctacaggggatactaaacgaggacgtgggttgtttcctgccaagttgagtggggctcacgcgctagggcgagatgtcagaaagtgcttgtattttaaacaaccaaaaagaattgtaagggtggcttgctgccaggcttgcactgccgttgctgcgggtgtgcatcttcgggaaaggtggtgacggggcgtccactaggtttcctgtcccctgctgctctttccgtaagaaaatgaaatattctatgcctagtactcacacgcaacatttcttgtactttgtaagtcgtttgcgagactgcagaccacttcacaaaactaaacggtaaagagattttacttttggtctccgtgagtcgcatctctattaaggtttacacaggaattccacctgaagacttgtgttaaaattccacagcgctcactgttaattgaacgtctttttcttcagcctatacacggatccttgttttgagctctctgaatcactcagacaacattttgtaactgctgctgtttgcttctacgtccaccttataaagtgggcatttcaaaagaaataaaagaaggtgtcacagtttttaaccagaagggtggcactctgtgggctcccttgtagtatttatagctatactggg

SEQ ID NO: 24962 - DNA, 596 bp, Macaca Mulatta
actctatttggtgcatcaaactactatacacagagtatgattactgattgtttgcttagttttcaaaggaatttattctaactttcccattcacaggtttgagcttttggaagacggaaaaggaaatatgaactgtgcttattttcataatgggaaaatgcaccctaccttctgtgaaaacaaacattatttaatgtgtgagaggaaggctggcatgaccaaggttgaccaactaccttaatgcaaagagatggataggataacacagataagggctttattgtacaataaaagatatgtatgaatgaatcagtagctgaaaattgcgtatttctccctttcttctctttggagttatttttaatattatctttcctatcagaattccctagtctcttctttgaatatacagaaacaataacatgagtttatcatttacttcccaattattctattttcctttaattttcattcttcttgtcctccatttctaattacctgaacatagtatgatttactgcatcttcagatatatacacataaaatcaaaatcaggccaacatgggttagggcttaattaatataagttgtgcaaa

SEQ ID NO: 24963 - DNA, 532 bp, Macaca Mulatta
  misc_feature (1)...(532): n = A,T,C or G
agaagttgggatatctaaagcggaagccttagaaactctgcagattatcagaagagaaagtctcacaaataaaccaagatatgctggtacatctgagtcaggcaagaagtgtacagcactggaacttcttgagcaggagcatacccagggaatcataannnnnnnnnnnnnnnnnnnnnnnnnnnnnnnnnnnnnnnnnnnnnnnnnnnnnnnnnnnnnnnnnnnnnnnnnnnnnnnnnnnnnnnnnnnnnnnnnnnnnnnnnnnnnnnnnnnnnnnnnnnnnnnnnnnnnnnnnnnnnnnnnnnnnnnnnnnnnnnnnnnnnnnnnnnnnnnnnnnnnnnnnnnnnnnnnnnnnnnnnnnnnnnnnnnnnnnnnnnnnnnnnnnnnnnnnnaggttcgactagtgatagtggatggtattgcttttccgtttcgtcatgacctagatgacctgtctcttcgtactcggttattaaatggcctagcccagcaaatgatcagccttgcaaataatcacagattagctgtaagt

SEQ ID NO: 24964 - DNA, 2237 bp, Macaca Mulatta
  misc_feature (1)...(2237): n = A,T,C or G
gaggactaagaggggagcaaggcgaggnnncgcggcgggcgcagcgggcacctgggccgggctgccccagcgagcaaggcgccgccattccgctgctcgggnnnnnnnnnnnnnnnnnnnnnnnnnnnnnnnnnnnnnnnnnnnnnnnnnnnnnnnnnnnnnnnnnnnnnnnnnnnnnnnnnnnnnnnnnnnnnncctgcagcggcccttcctgcgcagcccgctgggcgtgttgcggctgctgcagctgctggccggcgccgccttctggatcactatcgccaccagcaagtaccagggccccgtgcaagacgcgctcttcgtgtcggtgctcttctggctgcttactctgggcctctacttcctcacgctgctgggcaagaaggagctggtccccgtgctgggctcgcgctggctcgtggtcaaggtggcgcacgatgtgctggcggcnnnnctctacggcgccgcgaccggcattatgagtgaccagatgcagcgccacagctactgcaacctcaaggattacccgctgccctgcgcctaccacgccttcctggcggccgccgtctgcggcggcgtctgccacggcctctacctgctgtcggcgctctacggctgcgggcgtcgctgccagggcaagcaggaggtggcgtgaggccgcccgcgcccgccgcggccctgatcggggcgggggacccccggagaccagcgcccccagtccctcccctcgccgccgccccgcgcgggtgcgccctggcaccctctccctgtttccactgtcgcccgcgtccagggaccctgacgcgcaccttccgcccgacggcagcgccgccgccgcccagaatcccagccactgcccagaatcccgacagccgcgccggacgtcgcagtctcgcgggaccagcgcaggctgcgatccgacgggcggatgcacactcgcagaccagccgctccgaggcgaaacctcgcggttcctcttcccttccctgctgagactaagacgtggacgggcgccgcgtagatccggaggaggctcccaaattggaaccaggcttccgcctgcccccttccctccctccccgcggtcggaagagcacccccttccccggccgctctcccagcctccggtgctgtgaaacgcaggcgctgggccgcgggcggagctgaggacaggccttggctggtcgcaggatgagcgaagagtttggttttagctgggggttgtgcgggcatcctgcgaggcccttctcagtctgtctctcggtgcttggttgtcctggggtgggggcccatccgccgaggtggggacggataggaggagccggtgggctgtacacatacacttgtggagtctcctcgtgcctctgcctactccgcctttgtccttcaggtttttgcaggccagtcccgaacacacgctaactgtcctggcctctctgtgacacaagtttcttcccaaccttcctcacaggcttctgccgcccccctcatcctcatcccccctatctgtttgcattaggagtcccacgaccatggcggaatgttaaggtgaaccccaccccttcttacagatggggacccagagcctgctcttgggaacagccagagtaagattagaacccagacttgcagtccagcgctgttttcattaaaagggtgggtgagtcaggacccctggctcaggagccgcctctccgaaaagagggtttcaaggccaaataggtttgtcagcggtgctgtctccctttcctggagatgctcattagcttatcaaagactctgagaagtcccgctgttacaggaataatttagtttactgtattaactgctcctgggcctggagcagtattcctacgttgaggttccatgcatccctgtgctgtacgggctctcattcatgcctaagggcccaacccattggctgtgttctgtttgaagatttggggagcgccttctctttcttccccagggaatttctctagcagagggaggggacccaccccatggaggaaggagattgctgcccctagccagagacccgaactgggaaatatgaacattcctttacattgttggagaaatgaagccaaagttgttcagatggttttcccagtctaaaggaaagtcacctgcaagagatcccggcactgacctgaagcagctggcagggtggctctcccttaccaaagagaagaaccactctctgacgctggggtgacctgctggctgggcctgta

SEQ ID NO: 24965 - DNA, 2383 bp, Macaca Mulatta
  misc_feature (1)...(2383): n = A,T,C or G
gagattgcgccactgcactccagcctgggcgacacagtgagactnnnnnnnnnnnnnnnnnnnnnnnnnnnnnnnnnnnnnnnnnnnnnnnnnnnnnnnnnnnnnnnnnnnnnnnnnnnnnnnnnnnnnnnnnnnnnnnnnnnnnnnnnnnnnnnnnnnnnnnnnnnnnnnnnnnnnnnnnnnnnnnnnnnnnnnnnnnnnnnnnnnnnnnnnnnnnnnnnnnnnnnnnnnnnnnnnnnnnnnnnnnnnnnnnnnnnnnnnnnnnnnnnnnnnnnnnnnnnnnnnnnnnnnnnnnnnnnnnnnnnnnnnnnnnnnnnnnnnnnnnnnnnnnnnnnnnnnnnnnnnnnnnnnnnnnnnnnnnnnnnnnnnnnnnnnnnnnnnnnnnnnnnnnnnnnnnnnnnnnnnnnnnnnnnnnnnnnnnnnnnnnnnnnnnnnnnnnnnnnnnnnnnnnnnnnnnnnnnnnnnnnnnnnnnnnnnnnnnnnnnnnnnnnnnnnnnnnnnnnnnnnnnnnnnnnnnnnnnnnnnnnnnnnnnnnnnnnnnnnnnnnnnnnnnnnnnnnnnnnnnnnnnnnnnnnnnnnnnnnnnnnnnnnnnnnnnnnnnnnnnnnnnnnnnnnnnnnnnnnnnnnnnnnnnnnnnnnnnnnnnnnnnnnnnnnnnnnnnnnnnnnnnnnnnnnnnnnnnnnnnnnnnnnnnnnnnnnnnnnnnnnnnnnnnnnnnnnnnnnnnnnnnnnnnnnnnnnnnnnnnnnnnnnnnnnnnnnnnnnnnnnnnnnnnnnnnnnnnnnnnnnnnnnnnnnnnnnnnnnnnnnnnnnnnnnnnnnnnnnnnnnnnnnnnnnnnnnnnnnnnnnnnnnnnnnnnnnnnnnnnnnnnnnnnnnnnnnnnnnnnnnnnnnnnnnnnnnnnnnnnnnnnnnnnnnnnnnnnnnnnnnnnnnnnnnnnnnnnnnnnnnnnnnnnnnnnnnnnnnnnnnnnnnnnnnnnnnnnnnnnnnnnnnnnnnnnnnnnnnnnnnnnnnnnnnnnnnnnnnnnnnnnnnnnnnnnnnnnnnnnnnnnnnnnnnnnnnnnnnnnnnnnnnnnnnnnnnnnnnnnnnnnnnnnnnnnnnnnnnnnnnnnnnnnnnnnnnnnnnnnnnnnnnnnnnnnnnnnnnnnnnnnnnnnnnnnnnnnnnnnnnnnnnnnnnnnnnnnnnnnnnnnnnnnnnnnnnnnnnnnnnnnnnnnnnnnnnnnnnnnnnnnnnnnnnnnnnnnnnnnnnnnnnnnnnnnnnnnnnnnnnnnnnnnnnnnnnnnnnnnnnnnnnnnnnnnnnnnnnnnnnnnnnnnnnnnnnnnnnnnnnnnnnnnnnnnnnnnnnnnnnnnnnnnnnnnnnnnnnnnnnnnnnnnnnnnnnnnnnnnnnnnnnnnnnnnnnnnnnnnnnnnnnnnnnnnnnnnnnnnnnnnnnnnnnnnnnnnnnnnnnnnnnnnnnnnnnnnnnnnnnnnnnnnnnnnnnnnnnnnnnnnnnnnnnnnnnnnnnnnnnnnnnnnnnnnnnnnnnnnnnnnnnnnnnnnnnnnnnnnnnnnnnnnnnnnnnnnnnnnnnnnnnnnnnnnnnnnnnnnnnnnnnnnnnnnnnnnnnnnnnnnnnnnnnnnnnnnnnnnnnnnnnnnnnnnnnnnnnnnnnnnnnnnnnnnnnnnnnnnnnnnnnnnnnnnnnnnnnnnnnnnnnnnnnnnnnnnnnnnnnnnnnnnnnnnnnnnnnnnnnnnnnnnnnnnnnnnnnnnnnnnnnnnnnnnnnnnnnnnnnnnnnnnnnnnnnnnnnnnnnnnnnnnnnnnnnnnnnnnnnnnnnnnnnnnnnnnnnnnnnnnnnnnnnnnnnnnnnnnnnnnnnnnnnnnnnnnnnnnnnnnnnnnnnnnnnnnnnnnnnnnnnnnnnnnnnnnnnnnnnnnnnnnnnnnnnnnnnnnnnnnnnnnnnnnnnnnnnnnnnnnnnnnnnnnnnnnnnnnnnnnnnnnnnnnnnnnnnnnnnnnnnnnnnnnnnnnnnnnnnnnnnnnnnnnnnnnnnnnnnnnnnnnnnnnnnnnnnnnnnnnnnnnnnnnnnnnnnnnnnnnnnnnnnnnnnnnnnnnnnnnnnnnnnnnnnnnnnnnnnnnnnnnnnnnnnnnnnnnnnnnnnnnnnnnnnnnnnnnnnnnnnnnnnnnnnnnnnnnnnnnnnnnnnnnnnnnnnnnnnnnnnnnnnnnnnnnnnnnnnnnnnnnnnnnnnnnnnnnnnnnnnnnnnnnnnnnnnnnnnnnnnagatcgaagatttatcccagcaagcacaactagcagctgctgagaaattcaaagttcaaggtgaagctgtctcaaacattcaagaaaacacacagactccaaccgtacaagaggagagtgaagaggaagagg

SEQ ID NO: 24966 - DNA, 1006 bp, Macaca Mulatta
  misc_feature (1)...(1006): n = A,T,C or G
tgacatgcctgatcctctcttttctgcagttcaagggaaagacaagatcttgcacaaggcactctgcatctgcccttggccagggaagggtggcatggagcctctccggctgctcatcttactctttgccacagnnnnnnnnnnnnnnnnnnnnnnnnnnnnnnnnnnnnnnnnnnnnnnnnnnnnnnnnnnnnnnnnnnnnnnnnnnnnnnnnnnnnnnnnnnnnnnnnnnnnnnnnnnnnnnnnnnnnnnnnnnnnnnnnnnnnnnnnnnnnnnnnnnnnnnnnnnnnnnnnnnnnnnnnnnnnnnnnnnnnnnnnnnnnnnnnnnnnnnnnnnnnnnnnnnnnnnnnnnnnnnnnnnnnnnnnnnnnnnnnnnnnnnnnnnnnnnnnnnnnnnnnnnnnnnnnnnnnnnnnnnnnnnnnnnnnnnnnnnnnnnnnnnnnnnnnnnnnnnnnnnnnnnnnnnnnnnnnnnnnnnnnnnnnnnnnnnnnnnnnnnnnnnnnnnnnnnnnnnnnnnnnnnnnnnnnnnnnnnnnnnnnnnnnnnnnnnnnnnnnnnnnnnnnnnnnnnnnnnnnaggagcctcttggaaggagaaatccccttcccacccacttccgtccttctcctcctggcctgcatctttctcatcaagattctagcagccagcgccctctgggctgcagcctggcatggacagaagccagggacacatccacctagtgaaccggactgtggccatgacccagggcaccagctccaaactctgccaggncagggctgagagacacgtgaggaagacgatgggaggaaaagcccaggagaagtcccaccagggaccagcccagcctgcatacgtgctccttggccaccaggactccttgttctgctctggcaagagactgctctgcctggacactgcttctcctggactctggaaacagggagtgtttgagggagcggggaggtggtaagacacctggacactactgaacactggacattttaa

SEQ ID NO: 24967 - DNA, 267 bp, Macaca Mulatta
  misc_feature (1)...(267): n = A,T,C or G
agattgatcagattttgattcaccagaaggctgagcgagtggaaancgttcctaggctgggagacctgtaaccgctatgaactgcgctctggggccgggcagcccctgggtcaggcggccgaggagagcaactgctgcgcccgtctgtgctgtggcgcccgccggccgctgcgtgtccgcctggccgaccccggggaccgcgaggtgctccgtttgctccgcccgctgcactgtggctgcagctgctgcccctgtggcctccaggag

SEQ ID NO: 24968 - DNA, 1203 bp, Macaca Mulatta
aggtctaagggttttcactattaaaatgttttcgcgggggtaaaaagcggtgagacgttcgccgctcatgtagggttgttgttgaggtctcctatttggacgcttattgtggttgggtatctaaaatgttattcttttttcaggtaaaaaatttggcccttaggtaaagggggaggattaccatttttcctttaaagaacgattgcttaatatttccttaagggagtgaatttgctggtgtctcggatatttttatttgtcggaggggagtaagcttgcttcctttactttcacttccatgccaccagttgcagcatgaaccaggggttttatttgatggggcttgggggaactgtaaaaaagtccagcatcgcagactgtgaaggttttggtatagcccccaggagacaaggggcaaaaggaaccagcctctgtgggctctgatgcttggagtacattgtcctttctcagtttgtaagggcaactgtgcaggaagagggatcagcacttcacaaactggtgggtgacctcgtagattcccacagactcctgggccttttcatcatagtcagtccagtccttctcctgtaaatcaatgtcactgaagactgtccctgactccacaccttcagcagcaaacccagcctggggctggaaatcaactggttcaaggcccctgcactcaaactccactattgtcttgaagttctcattgtcttcagcattgtaaggcttgatggtgctgcttaatatctcgatggaattttctcttgcacacagcttgcacttctggaccatggaagcactgccacggccccccttcagtgccacactgtccatcagccggatgtactgccacttgtccgaaatctcaccacagttgccacatttcatcttcaggtaccaccggaagtcctcgcccacgggccggaggttggtgatgttctccagcgtggctttgagttgcagcgcgattttctgagggggagggccagagtaactgcgtcagccgtgcctgcgcagctccacgccggcccgaccctcccgcattcccagccatgggtgccacagggagacattccttctgcttcctgctccttcagcgcgaacccactcgcttcatctcctcctggcgcgagctcttgcctcccagaccctcgccacctcccctctgtgtccccgcggcgggcggctcccctcacc

SEQ ID NO: 24969 - DNA, 546 bp, Macaca Mulatta
aggaaaactgcattgaggtgtgacaagtgttaggacttgtcacagatttctaactctgccacataaaatataaatataaacctgtaaggtgatacacagtgtgtgttgttagcaaaatttatactttgatatgattacatgcagaagtagcttcaagaatttcttatactcataaatgttttaataatatgtgatgtaaaattatattatggagcctaatgatgataacaaagaaaacagaatatactgatcttagaaaatgtagatacggttaactgggaaataaaatatagagtgacacttcaagaccagttgactcaatgttttcttctgcttcctttccataatatccccttactcatctgttcttttctttcccttctacttcaaggttttatttccattatctttctgacatatttatttacacaaggagagaagtataatctaattcatgttgtaacacttacagatcatatagtacaattatttgtctttatgctgtcctggacaaatctgagacagaaaatttttgacccctatggg

SEQ ID NO: 24970 - DNA, 1308 bp, Macaca Mulatta
  misc_feature (1)...(1308): n = A,T,C or G
ggtcctgggggagacagagcggttcctgagccaggtgctgggccgggtgctgcagctgctaccgccggggcaggtgcaggtccacaagatgaaggctgtgtacctggccctgaaccagtgcagtgtgagcaccacgcacaagtgcctcattgccgaggcctggtgctccgtgagagacctgcctgccctgcaggaggccctgcgggacagctcgnnnnnnnnnnnnnnnnnnnnnnnnnnnnnnnnnnnnnnnnnnnnnnnnnnnnnnnnnnnnnnnnnnnnnnnnnnnnnnnnnnnnnnnnnnnnnnnnnnnnnnnnnnnnnnnnnnnnnnnnnnnnnnnnnnnnnnnnnnnnnnnnnnnnnnnnnnnnnnnnnnnnnnnnnnnnnnnnnnnnnnnnnnnnnnnnnnnnnnnnnnnnnnnnnnnnctcatgttcctcttcgccctggccatggtgcttgcggagaaccagccggcagtgaaggctgctcagaanngatctggcagactttcttcaggggccgctacctgctcctgctcatgggcctgttctccatctacaccggcttcatctacaacgagtgcttcagtcgcgccaccagcatcttcccctcgggctggagtgtggccgccttgttcaaccagtctggctggagnagtgatgcattcctggcccagcacgcgatgcttaccctggatcccaacgtcaccggtgtcttcctgggaccctacccctttggcatcgannnnnnnnnnnnnnnnnnnnnnnnnnnnnnnnnnnnnnnnnnnnnnnnnnnnnnnnnnnnnnnnnnnnnnnnnnnnnnnnnnnnnnnnnnnnnnnnnnnnnnnnnnnnnnnnnnnnnnnnnnnngcactttggccagaggcaccggctgctgctggagacgctgccggagctcaccttcctgctggggctcttcggttacctcgtcttcctagtcatctacaagtggctgtgtgtgtcggctgccagcgctgcctcggcccccagcatcctcatccacttcatcaacatgttcctcttctcccacagccccaccaaccggccgctctacccccggcagnnnnnnnnnnnnnnnnnnnnnnnnnnnnnnnnnnnnnnnnnnnnnnnnnnnnnnnnnnnnnnnnnnnnnnnnnnnnnnnnnnnnnnnnnnnnnnnnnnnnnnnnnnnnnnnnnnnnnnnnnnaggaggaagacaaggctgggttgctggacctgcctgatgcatctgtgaatggctggagctccgatgaggaaaaggcagggggcctggatgatgaagaggaggc

SEQ ID NO: 24971 - DNA, 2258 bp, Macaca Mulatta
  misc_feature (1)...(2258): n = A,T,C or G
atggcggcagggtccactacgctgcacgcagtggagaagctgcaggtgcgtctggccactaagacggacccgaaaaagctagagaaatatttgcagaaactctccgccttgcccatgacggcagacatcctggcggagactggaatcagaaagacggtgaagcgccaaaggaagcaccagcacgtgggcgactttgccagagacttagcggcccggtggaagaagctggtgcnnnnnnnnnnnnnnnnnnnnnnnnnnnnnnnnnnnnnnnnnnnnnnnnnnnnnnnnnnnnnnnnnnnnnnnnnnnnnnnnnnnnnnnnnnnnnnnnnnnnnnnnnnnnnnnnnnnnnnnnnnnnnnnnnnnnnnnnnnnnnnnnnnnnnnnnnnnnnnnnnnnnnnnnnnnnnnnnnnnnnnnnnnnnnnnnnnnnnnnnnnnnnnnnnnnnnnnnnnnnnnnnnnnnnnnnnnnnnnnnnnnnnnnnnnnnnnnnnnnnnnnnnnnnnnnnnnnnnnnnnnnnnnnnnnnnnnnnnnnnnnnnnnnnnnnnnnnnnnnnnnnnnnnnnnnnnnnnnnnnnnnnnnnnnnnnnnnnnnnnnnnnnnnnnnnnnnnnnnnnnnnnnnnnnnnnnnnnnnnnnnnnnnnnnnnnnnnnnnnnnnnnnnnnnnnnnnnnnnnnnnnnnnnnnnnnnnnnnnnnnnnnnnnnnnnnnnnnnnnnnnnnnnnnnnnnnnnnnnnnnnnnnnnnnnnnnnnnnnnnnnnnnnnnnnnnnnnnnnnnnnnnnnnnnnnnnnnnnnnnnnnnnnnnnnnnnnnnnnnnnnnnnnnnnnnnnnnnnnnnnnnnnnnnnnnnnnnnnnnnnnnnnnnnnnnnnnnnnnnnnnnnnnnnnnnnnnnnnnnnnnnnnnnnnnnnnnnnnnnnnnnnnnnnnnnnnnnnnnnnnnnnnnnnnnnnnnnnnnnnnnnnnnnnnnnnnnnnnnnnnnnnnnnnnnnnnnnnnnnnnnnnnnnnnnnnnnnnnnnnnnnnnnnnnnnnnnnnnnnnnnnnnnnnnnnnnnnnnnnnnnnnnnnnnnnnnnnnnnnnnnnnnnnnnnnnnnnnnnnnnnnnnnnnnnnnnnnnnnnnnnnnnnnnnnnnnnnnnnnnnnnnnnnnnnnnnnnnnaaaataccacacttatgaccagttgcagaagcaaaggaaaaagactggggagtcttccaccactgcacttggagataaacaaaggaaagcaaacgattcaaagggcactcgtgtgtcctgggattcagctaagaaattgcttcctttcgaggaaagccagtcagagaggctgcaggcagccggtgctgattctgcagggctgaaaacggtgcccagccatgccttctcagagctctgggacccctcagaggcctggatgcaggccaactaccattcgctattggattctgactccatgacctcccaggcaaagccagaagcactcactgcaccaaccttccaggaggaaactgctttcactggaggcagagtgaatgctaagatgcaggtgtactcgggctccaggcctgcctgtcaaccccaggtgctgacgctgcgccagcagtgcatccgggtccttagaaacaatcccgacaccctcagcgatgtggaaggaatcccctactggtatcttgaacccgttctggaagggtggacacctgatcagctgtatcgcagannnnnnnnnnnnnnnnnnnnnnnnnnnnnnnnnnnnnnnnnnnnnnnnnnnnnnnnnnnnnnnnnnnnnnnnnnnnnnnnnnnnnnnnnnnnnnnnnnnnnnnnnnnnnnnnnnnnnnnnnnnnnggactcccgagagcagcggctgcgagcagtcaccacgaaaatccgatctgcacgtgaaaacaaacccatccgccgacagacaaagatgatctgtttcatctctggggccaagacgccttatgatgcttcaaggaggcaagagaagtctgcaggagccgctgaccccgaagagggagagatcaagccagccgccaaagccgcgggcagcagccacgttccctccagnnnnnnnnnnnnnnnnnnnnnnnnnnnnnnnnnnnnnnnntccttcaccggctccctgagaagagggccaacccctgcctgagcagcagcaatgagcgcccggcgcccgccgccaaaacccggaaaccggctgccaagaaagtggccccgctgatggccaaggcaattcgagactacaagaggagattctcccgaagata

SEQ ID NO: 24972 - DNA, 85 bp, Macaca Mulatta
aggtttattgatcatctaatggtgatgtttggtgaaacaccctcttgggacctagagcaaaaatattgccctgataatttggagg

SEQ ID NO: 24973 - DNA, 192 bp, Macaca Mulatta
gagataagctgccatctcaagctcgtgaggagcatccatgtggcaggggcgacagaggggacccttattttttcaagaagaaagttttagggtatcatccttacagacatgaaaaaactataggaaaattgtgaagataaatgagttttaattctagcattctggaaacagagacaatagagttctccaagg

SEQ ID NO: 24974 - DNA, 1845 bp, Macaca Mulatta
  misc_feature (1)...(1845): n = A,T,C or G
gtgtagcctattctcatccaactacagttgctagctacactgtccatcaggctccagtagctgctcacacagttactgccgcctatgcaccagcagccgccacagttgcagttgccaggcctgctccagtagctgttgcagctgctgcaacagctgctgcttatggaggctaccccactgcacacacagcaactgactacggttatactcagagacaacaagaagcaccaccaccaccacccccagctactacacaaaactaccnnnnnnnnnnnnnnnnnnnnnnnnnnnnnnnnnnnnnnnnnnnnnnnnnnnnnnnnnnnnnnnnnnnnnnnnnnnnnnnnnnnnnnnnnnnnnnnnnnnnnnnnnnnnnnnnnnnnnnnnnnnnnnnnnnnnnnnnnnnnnnnnnnnnnnnnnnnnnnnnnnnnnngccaaggtgcaactctgtatactcaagcccagcaaactcgacaagtgacagccatataaccagccacaccaagtccagctactactactttctccatctatcctgtatcctccaccgtacagccagtagcagctgcggctactgtggtgccatcctatactcagagtgctacttacagtaccaccgcagttacttattctggtaagactgataaactgtgtnnnnnnnnnnnnnnnnnnnnnnnnnnnnnnnnnnnnnnnnnnnnnnnnnnnnnnnnnnnnnnnnnnnnnnnnnnnnnnnnnnnnnnnnnnnnnnnnnnnnnnnnnnnnnnnnnnnnnnnnnnnnnnnnnnnnnnnnnnnnnnnnnnnnnnnnnnnnnnnnnnnnnnnnnnnnnnnnnnnnnnnnnnnnnnnnnnnnnnnnnnnnnnnnnnnnnnnnnnnnnnnnnnnnnnnnnnnnnnnnnnnnnnnntaaagaacatttagaaggacagaaacataaaaaaaaagaagctgcattgaaagcctcacaaaataccagcagcagcaacaattctactcgtgggactcaaaatcagctacgttgtgagctctgcgatgtgtcttgtacaggagcagatgcatatgctgcccacattcgtggtgctaagcatcagaaagtagnnnnnnnnnnnnnnnnnnnnnnnnnnnnnnnnnnntcaacagaaccaaacgttgttagccaagctgcttcttcaacagctgtatctgcttcaaagccgactgcctctccttcaagcattgcagcaaacaattgtactgtgaatacatcatcaattgcaacatcttcaatgaagggtcttacgactacaggaaactcgtctcttaatagcacatctaacactaaagtatcagcagtgcctacgaatatggctgccaagaaaacatctacccccaaaataaattttgttggcannnnnnnnnnnnnnnnnnnnnnnnnnnnnnnnnnnnnnnnnnnnnnnnnnnnnnnnnnnnnnnnnnnnnnnnnnnnnnnnnnnnnnnnnnnnnnnnnnnnnnnnnnnnnnnnnnnnnnnnnnnnnnnnnnnnnnnnnnnnnnnnnnnnnnnnnnnnnnnnnnnnnnnnnnnnnnnnnnnnnnnnnnnnnnnnnnnnnnnnnnnnnnnnnnnnnnnnnnnnnnnnnnnnnnnnnnnnnnnnnnnnnnnnnnnnnnnnnnnnnnnnnnnnnnnnnnnnnnnnnnnnnnnnnnnnnnnnnnnnnnnnnnnnnnnnnnnnnnnaaaaagtaaatccagatttgcaagtagaagtaaagcctagtattcgagcaagaaagattcaagaagagaaaatgaggaagcaaatgcagaaggaggagtactggcgaaggcgagaagaagaggagcgttggagaatgganatgag

SEQ ID NO: 24975 - DNA, 2315 bp, Macaca Mulatta
  misc_feature (1)...(2315): n = A,T,C or G
atggctaatgaaacacagaaagttggtaccatccattttccttttcccttcacgccctattccatccaggaagacttcatggcagagctttaccgggttttggaggctggcaagattgggatatttgagagtccaactggcactgnnnnnnnnnnnnnnnnnnnnnnnnnnnnnnnnnnnnnnnnnnnnnnnnnnnnnnnnnnnnnnnnnnnnnnnnnnnnnnnnnnnnnnnnnnnnnnnnnnnnnnnnnnnnnnnnnnnnnnnnnnnnnnnnnnnnnnnnnnnnnnnnnnnnnnnnnnnnnnnnnnnnnnnnnnnnnnnnnnnnnnnnnnnnnnnnnnnnnnnnnnnnnnnnnnnnnnnnnnnnnnnnnnnnnnnnnnnnnnnnnnnnnnnnnnnnnnnnnnnnnnnnnnnnnnnnnnnnnnnnnnnnnnnnnnnnnnnnnnnnnnnnnnnnnnnnnnnnnnnnnnnnnnnnnnnnnnnnnnnnnnnnnnnnnnnnnnnnnnnnnnnnnnnnnnnnnnnnnnnnnnnnnnnnnnnnnnnnnnnnnnnnnnnnnnnnnnnnnnnnnnnnnnnnnnnnnnnnnnnnnnnnnnnnnnnnnnnnnnnnnnnnnnnnnnnnnnnnnnnnnnnnnnnnnnnnnnnnnnnnnnnnnnnnnnnnnnnnnnnnnnnnnnnnnnnnnnnnnnnnnnnnnnnnnnnnnnnnnnnnnnnnnnnnnnnnnnnnnnnnnnnnnnnnnnnnnnnnnnnnnnnnnnnnnnnnnnnnnnnnnnnnnnnnnnnnnnnnnnnnnnnnnnnnnnnnnnnnnnnnnnnnnnnnnnnnnnnnnnnnnnnnnnnnnnnnnnnnnnnnnnnnnnnnnnnnnnnnnnnnnnnnnnnnnnnnnnnnnnnnnnnnnnnnnnnnnnnnnnnnnnnnnnnnnnnnnnnnnnnnnnnnnnnnnnnnnnnnnnnnnnnnnnnnnnnnnnnnnnnnnnnnnnnnnnnnnnnnnnnnnnnnnnnnnnnnnnnnnnnnnnnnnnnnnnnnnnnnnnnnnnnnnnnnnnnnnnnnnnnnnnnnnnnnnnnnnnnnnnnnnnnnnnnnnnnnnnnnnnnnnnnnnnnnnnnnnnnnnnnnnnnnnnnnnnnnnnnnnnnnnnnnnnnnnnnnnnnnnnnnnnnnnnnnnnnnnnnnnnnnnnnnnnnnnnnnnnnnnnnnnnnnnnnnnnnnnnnnnnnnnnnnnnnnnnnnnnnnnnnnnnnnnnnnnnnnnnnnnnnnnnnnnnnnnnnnnnnnnnnnnnnnnnnnnnnnnnnnnnnnnnnnnnnnnnnnnnnnnnnnnnnnnnnnnnnnnnnnnnnnnnnnnnnnnnnnnnnnnnnnnnnnnnnnnnnnnnnnnnnnnnnnnnnnnnnnnnnnnnnnnnnnnnnnnnnnnnnnnnnnnnnnnnnnnnnnnnnnnnnnnnnnnnnnnnnnnnnnnnnnnnnnnnnnnnnnnnnnnnnnnnnnnnnnnnnnnnnnnnnnnnnnnnnnnnnnnnnnnnnnnnnnnnnnnnnnnnnnnnnnnnnnnnnnnnnnnnnnnnnnnnnnnnnnnnnnnnnnnnnnnnnnnnnnnnnnnnnnnnnnnnnnnnnnnnnnnnnnnnnnnnnnnnnnnnnnnnnnnnnnnnnnnnnnnnnnnnnnnnnnnnnnnnnnnnnnnnnnnnnnnnnnnnnnnnnnnnnnnnnnnnnnnnnnnnnnnnnnnnnnnnnnnnnnnnnnnnnnnnnnnnnnnnnnnnnnnnnnnnnnnnnnnnnnnnnnnnnnnnnnnnnnnnnnnnnnnnnnnnnnnnnnnnnnnnnnnnnnnnnnnnnnnnnnnnnnnnnnnnnnnnnnnnnnnnnnnnnnnnnnnnnnnnnnnnnnnnnnnnnnnnnnnnnnnggtgtctgacttccggcagcagctgctggcctgtgccggggtggaagctgaacgcgtggtggagttttcctgtggtnggtcacgtgatccctccagacaatatcctgccccttgtcatctgcagcgggatctccaaccagccgctggaattcacgttccagaaaagagagctgcctcagatgnnnnnnnnnnnnnnnnnnnnnnnnnnnnnnnnnnnnnnnnnnnnnnnnnnnnnnnnnnnnnnnnnncaggcctgtggccaggagagaggccgggtgacgggggcccttctcctctctgttgttggaggaaagatgagtgaagggatcaacttctctgacaacctaggccggtnggtgtgtggtgatggtgggcatgcccttccccaacatcaggtctccagagctgcaggagaagatggcctacttggatcaaaccctc

SEQ ID NO: 24976 - DNA, 701 bp, Macaca Mulatta
  misc_feature (1)...(701): n = A,T,C or G
ccagtactgccacccccacaaatcacgggtaataaaagagagtagtttaaactttatttttatttgtttagagattttaagtggaaccagtattttcccattgactacttttcattcttcactgtagttttaaagaagaactgtaaatgacggtgctatacaagtcaaaaaatacatgcctgcctcgtagtgaagttgtagctctccgtaatatgtatattttactcagttttcaacattttgtgaatgttgactacctgaagttccttnttagatgtgctattaacattctgttggattcagagggttccttgaaagttttatgtataaatatgtaaaataaaaattaaaactttgtttcatatgatatgtctttttgctcactagcaagccttataatggcttaacccctctccaactaaattccccaccaggaaacttttgtcagtgaaaaaactaattgctctagaggacacacaaggtggcaaattgcccagaaaattatgagtgtgagtgcgtgtctgtgagtatgtgtgtgtgagagagtgatccgaagaataccaaaggtcagtagcatcagagcctgcacttctgttactgcttaagtgatccatctggaattgtagcacgttagtatttaatagctgctggtcttgttagggcactatgactgtatcaaactccatttactaaattcacca

SEQ ID NO: 24977 - DNA, 4795 bp, Macaca Mulatta
  misc_feature (1)...(4795): n = A,T,C or G
tggaggacaacgagaagtgctacccgccgcccagcgtgcagtcctgcccccatggcctaggcagcacggacaatgtcaacaagctgctgctgctggactatgccgctaaccgcctgctggcctgtggcagcgcctcccagggtatctgccagttcctgcggctggacgatctcttcaagctgggcgagccacaccaccgtaaggagcactacctgtccagcgtgcgggaggcgggcagcatggcgggcgtgcttattgccgggccgccgggccagggccaggccaagctcttcgtgggcacgcccatcgatggcaagtccgagtacttccccacgctgtccagccgtcggctcatggccaacgaggaggacgccgacatgtttggcttcgtataccaggatgagtttgtatcatcacagctcaagatcccgtctgacacgctgtccaagtttccggcctttgacatctactatgtgtacagctttcgcagcgagcagtttgtctactacctcacgctgcagctggacacacagctgacctcacctgatgctgccggcgagcacttcttcacctccaagattgtgcggctctgtgtggacgaccccaagttctactcgtatgtcgagttccccattggctgcgagcaggcgggtgtggagtaccgcctggtgcaggatgcctacctgagccggcccggccgtgcccttgcccgccagctgggcctggccgaggacgaggatgtgctgttcactgtgttcgcccagggccagaagaaccgtgtgaagccgcccaaggagtcagcattgtgcctgttcacactcagggccatcaaggagaagattaaggagcgcatnnnnnnnnnnnnnnnnnnnnnnnnnnnnnnnnnnnnnnnnnnnnnnnnnnnnnnnnnnnnnnnnnnnnnnnnnnnnnnnnnnnnnnnnnnnnnnnnnnnnnnnnnnnnnnnnnnnnnnnnnnnnnnnnnnnnnnnnnnnnnnnnnnnnnnnnnnnnnnnnnnnnnnnnnnnnnnnnnnnnnnnnnnnnnnnnnnnnnnnnnnnnnnnnnnnnnnnnnnnnnnnnnnnnnnnnnnnnnnnnnnnnnnnnnnnnnnnnnnnnnnnnnnnnnnnnnnnnnnnnnnnnnnnnnnnnnnnnnnnnnnnnnnnnnnnnnnnnnnnnnnnnnnnnnnnnnnnnnnnnnnnnnnnnnnnnnnnnnnnnnnnnnnnnnnnnnnnnnnnnnnnnnnnnnnnnnnnnnnnnnnnnnnnnnnnnnnnnnnnnnnnnnnnnnnnnnnnnnnnnnnnnnnnnnnnnnnnnnnnnnnnnnnnnnnnnnnnnnnnnnnnnnnnnnnnnnnnnnnnnnnnnnnnnnnnnnnnnnnnnnnnnnnnnnnnnnnnnnnnnnnnnnnnnnnnnnnnnnnnnnnnnnnnnnnnnnnnnnnnnnnnnnnnnnnnnnnnnnnnnnnnnnnnnnnnnnnnnnnnnnnnnnnnnnnnnnnnnnnnnnnnnnnnnnnnnnnnnnnnnnnnnnnnnnnnnnnnnnnnnnnnnnnnnnnnnnnnnnnnnnnnnnnnnnnnnnnnnnnnnnnnnnnnnnnnnnnnnnnnnnnnnnnnnnnnnnnnnnnnnnnnnnnnnnnnnnnnnnnnnnnnnnnnnnnnnnnnnnnnnnnnnnnnnnnnnnnnnnnnnnnnnnnnnnnnnnnnnnnnnnnnnnnnnnnnnnnnnnnnnnnnnnnnnnnnnnnnnnnnnnnnnnnnnnnnnnnnnnnnnnnnnnnnnnnnnnnnnnnnnnnnnnnnnnnnnnnnnnnnnnnnnnnnnnnnnnnnnnnnnnnnnnnnnnnnnnnnnnnnnnnnnnnnnnnnnnnnnnnnnnnnnnnnnnnnnnnnnnnnnnnnnnnnnnnnnnnnnnnnnnnnnnnnnnnnnnnnnnnnnnnnnnnnnnnnnnnnnnnnnnnnnnnnnnnnnnnnnnnnnnnnnnnnnnnnnnnnnnnnnnnnnnnnnnnnnnnnnnnnnnnnnnnnnnnnnnnnnnnnnnnnnnnnnnnnnnnnnnnnnnnnnnnnnnnnnnnnnnnnnnnnnnnnnnnnnnnnnnnnnnnnnnnnnnnnnnnnnnnnnnnnnnnnnnnnnnnnnnnnnnnnnnnnnnnnnnnnnnnnnnnnnnnnnnnnnnnnnnnnnnnnnnnnnnnnnnnnnnnnnnnnnnnnnnnnnnnnnnnnnnnnnnnnnnnnnnnnnnnnnnnnnnnnnnnnnnnnnnnnnnnnnnnnnnnnnnnnnnnnnnnnnnnnnnnnnnnnnnnnnnnnnnnnnnnnnnnnnnnnnnnnnnnnnnnnnnnnnnnnnnnnnnnnnnnnnnnnnnnnnnnnnnnnnnnnnnnnnnnnnnnnnnnnnnnnnnnnnnnnnnnnnnnnnnnnnnnnnnnnnnnnnnnnnnnnnnnnnnnnnnnnnnnnnnnnnnnnnnnnnnnnnnnnnnnnnnnnnnnnnnnnnnnnnnnnnnnnnnnnnnnnnnnnnnnnnnnnnnnnnnnnnnnnnnnnnnnnnnnnnnnnnnnnnnnnnnnnnnnnnnnnnnnnnnnnnnnnnnnnnnnnnnnnnnnnnnnnnnnnnnnnnnnnnnnnnnnnnnnnnnnnnnnnnnnnnnnnnnnnnnnnnnnnnnnnnnnnnnnnnnnnnnnnnnnnnnnnnnnnnnnnnnnnnnnnnnnnnnnnnnnnnnnnnnnnnnnnnnnnnnnnnnnnnnnnnnnnnnnnnnnnnnnnnnnnnnnnnnnnnnnnnnnnnnnnnnnnnnnnnnnnnnnnnnnnnnnnnnnnnnnnnnnnnnnnnnnnnnnnnnnnnnnnnnnnnnnnnnnnnnnnnnnnnnnnnnnnnnnnnnnnnnnnnnnnnnnnnnnnnnnnnnnnnnnnnnnnnnnnnnnnnnnnnnnnnnnnnnnnnnnnnnnnnnnnnnnnnnnnnnnnnnnnnnnnnnnnnnnnnnnnnnnnnnnnnnnnnnnnnnnnnnnnnnnnnnnnnnnnnnnnnnnnnnnnnnnnnnnnnnnnnnnnnnnnnnnnnnnnnnnnnnnnnnnnnnnnnnnnnnnnnnnnnnnnnnnnnnnnnnnnnnnnnnnnnnnnnnnnnnnnnnnnnnnnnnnnnnnnnnnnnnnnnnnnnnnnnnnnnnnnnnnnnnnnnnnnnnnnnnnnnnnnnnnnnnnnnnnnnnnnnnnnnnnnnnnnnnnnnnnnnnnnnnnnnnnnnnnnnnnnnnnnnnnnnnnnnnnnnnnnnnnnnnnnnnnnnnnnnnnnnnnnnnnnnnnnnnnnnnnnnnnnnnnnnnnnnnnnnnnnnnnnnnnnnnnnnnnnnnnnnnnnnnnnnnnnnnnnnnnnnnnnnnnnnnnnnnnnnnnnnnnnnnnnnnnnnnnnnnnnnnnnnnnnnnnnnnnnnnnnnnnnnnnnnnnnnnnnnnnnnnnnnnnnnnnnnnnnnnnnnnnnnnnnnnnnnnnnnnnnnnnnnnnnnnnnnnnnnnnnnnnnnnnnnnnnnnnnnnnnnnnnnnnnnnnnnnnnnnnnnnnnnnnnnnnnnnnnnnnnnnnnnnnnnnnnnnnnnnnnnnnnnnnnnnnnnnnnnnnnnnnnnnnnnnnnnnnnnnnnnnnnnnnnnnnnnnnnnnnnnnnnnnnnnnnnnnnnnnnnnnnnnnnnnnnnnnnnnnnnnnnnnnnnnnnnnnnnnnnnnnnnnnnnnnnnnnnnnnnnnnnnnnnnnnnnnnnnnnnnnnnnnnnnnnnnnnnnnnnnnnnnnnnnnnnnnnnnnnnnnnnnnnnnnnnnnnnnnnnnnnnnnnnnnnnnnnnnnnnnnnnnnnnnnnnnnnnnnnnnnnnnnnnnnnnnnnnnnnnnnnnnnnnnnnnnnnnnnnnnnnnnnnnnnnnnnnnnnnnnnnnnnnnnnnnnnnnnnnnnnnnnnnnnnnnnnnnnnnnnnnnnnnnnnnnnnnnnnnnnnnnnnnnnnnnnnnnnnnnnnnnnnnnnnnnnnnnnnnnnnnnnnnnnnnnnnnnnnnnnnnnnnnnnnnnnnnnnnnnnnnnnnnnnnnnnnnnnnnnnnnnnnnnnnnnnnnnnnnnnnnnnnnnnnnnnnnnnnnnnnnnnnnnnnnnnnnnnnnnnnnnnnnnnnnnnnnnnnnnnnnnnnnnnnnnnnnnnnnnnnnnnnnnnnnnnnnnnnnnnnnnnnnnnnnnnnnnnnnnnnnnnnnnnnnnnnnnnnnnnnnnnnnnnnnnnnnnnnnnnnnnnnnnnnnnnnnnnnnnnnnnnnnnnnnnnnnnnnnnnnnnnnnnnnnnnnnnnnnnnnnnnnnnnnnnnnnnnnnnnnnnnnnnnnnnnnnnnnnnnnnnnnnnnnnnnnnnnnnnnnnnnnnnnnnnnnnnnnnnnnnnnnnnnnnnnnnnnnnnnnnnnnnnnnnnnnnnnnnnnnnnnnnnnnnnnnnnnnnnnnnnnnnnnnnnnnnnnnnnnnnnnnnnnnnnnnnnnnnnnnnnnnnnnnnnnnnnnnnnnnnnnnnnnnnnnnnnnnnnnnnnnnnnnnnnnnnnnnnnnnnnnnnnnnnnnnnnnnnnnnnnnnnnnnnnnnnnnnnnnnnnnnnnnnnnnnnnnnnnnnnnnnnnnnnnnnnnnnnnnnnnnnnnnnnnnnnnnnnnnnnnnnnngagagcatgctgcgcacggccagcagccccgacagcctgcgctcgcgcacacccatgatcacgcccgacctggagagcggcaccaagctgtggcacctggtgaagaaccacgaccacctggaccagcgcgagggtgaccgtggcagcaagatggtctcggagatctacctgacgcggctactggccaccaag

SEQ ID NO: 24978 - DNA, 199 bp, Macaca Mulatta
catcttattctttggcccatgcatattcatatatacacgccccccaaccactttccccatggataagatggtggtggtattttatactattggaacaccctttctcaatccactcatctacacactgagaaatgcagaagtgaaaaatgccatgagacagttatggcatggcaaaattatttcagaaaacaaaggataa

SEQ ID NO: 24979 - DNA, 2306 bp, Macaca Mulatta
  misc_feature (1)...(2306): n = A,T,C or G
cagacacagaagaaacatgtccttcattcaccaggctgagctttcacagtgcagtggttggtacgggactaaacgtgaggctgttgctctacacaaggagaaacctaacctgcgcacaaaccatcaactcctcagcttttgggaacttgaatgtgaccaagaaaaccaccttcattgtccatggattcaggctaacaggctcccctcctgtttggatggaggacttagtaaagggtttgctctctgttgaagacatgaacgtagttgttgttgattggaatcgaggagctacaactttaatatacacccatgcctctagtaagaccagaaaagtagccttgatcttgaaggaatttattgaccagatgttggnnnnnnnnnnnnnnnnnnnnnnnnnnnnnnnnnnnnnnnnnnnnnnnnnnnnnnnnnnnnnnnnnnnnnnnnnnnnnnnnnnnnnnnnnnnnnnnnnnnnnnnnncaggcctcgaccctgcgggccctttattcaacgggaaacctcaccaagacagattagatcccagtgatgcacagtttgttgatgtcatccattccgacattgatnnnnnnnnnnnnnnnnnnnnnnnnnnnnnnnnnnnnnnnnnnnnnnnnnnnnnnnnnnnnnnnnnnnnnnnnnnnnnnnnnnnnnnnnaggatttcagtattttaaatgtgaccaccagaggtctgtatacctgtacctgtcttccctgagagacagctgtgccatcactgcatacccctgtgactcctaccgggattataggaatggcaagtgtgtcagctgtggtgcatcacagaatgagtcttgtccccttctggnnnnnnnnnnnnnnnnnnnnnnnnnnnnnnnnnnnnnnnnnnnnnnnnnnnnnnnnnnnnnnnnnnnnnnnnnnnnnnnnnnnnnnnnnnnnnnnnnnnnnnnnnnnnnnnnnnnnnnnnnnnnnnnnnnnnnnnnnnnnnnnnnnnnnnnnnnnnnnnnnnnnnnnnnnnnnnnnnnnnnnnnnnnnnnnnnnnnnnnnnnnnnnngaacccaccacatttcagaaatatcaccaagtgagtctacttgcaagatttaatcaagatctggataaagtggctgcagtttccttgatgttctctacaggatctataataggcccaaggtacaagctcaggattctccgaatgaaattaaggtcccttgcccatccggannnnnnnnnnnnnnnnnnnnnnnnnnnnnnnnnnnnnnnnnnnnnnnnnnnnnnnnnnnnnnnnnnnnnnnnnnnnnnnnnnnnnnnnnnnnnnnnnnnnnnnnnnnnnnnnnnnnnnnnnnnnnnnnnnnnnnnnnnnnnnnnnnnnnnnnnnnnnnnnnnnnnnnnnnnnnnnnnnnnnnnnnnnnnnnnnnnnnnnnnnnnnnnnnnnnnnnnnnnnnnnnnnnnnnnnnnnnnnnnnnnnnnnnnnnnnnnnnnnnnnnnnnnnnnnnnnnnnnnnnnnnnnnnnnnnnnnnnnnnnnnnnnnnnnnnnnnnnnnnnnnnnnnnnnnnnnnnnnnnnnnnnnnnnnnnnnnnnnnnnnnnnnnnnnnnnnnnnnnnnnnnnnnnnnnnnnnnnnnnnnnnnnnnnnnnnnnnnnnnnnnnnnnnnnnnnnnnnnnnnnnnnnnnnnnnnnnnnnnnnnnnnnnnnnnnnnnnnnnnnnnnnnnnnnnnnnnnnnnnnnnnnnnnnnnnnnnnnnnnnnnnnnnnnnnnnnnnnnnnnnnnnnnnnnnnnnnnnnnnnnnnnnnnnnnnnnnnnnnnnnnnnnnnnnnnnnnnnnnnnnnnnnnnnnnnnnnnnnnnnnnnnnnnnnnnnnnnnnnnnnnnnnnnnnnnnnnnntatctaatttgcaatgagagagcctctctctctcaacatcagcttctctctcaggctgtttgttctgggaaggcacgaaagccacgtgctggccctctgccttctctaaagtgttgctggagcatggaggagctggaggaggtggggatggactgacagctaagagggcggctgctgggactagatagtaagtggatgaagaaagaaggatgaggaagccgtggggtagcctctctacacggggaccggcgatggagcatgaggcaagagaaggagaagcagagcttgtttttcacccaaggtggagaaggatcactttacaggcgaccctcattttaagcaacccttaagaaatgttcacacttctttattatcaatgtaatctatgattattgaaggaaatttagaaaatgcatagatacaaaataaaaaa

SEQ ID NO: 24980 - DNA, 3144 bp, Macaca Mulatta
  misc_feature (1)...(3144): n = A,T,C or G
gtacaagtacagaaagctcttctctggatgttgaaagtaccttttcttctcctgaagattctctacacaagtctaaaccactgacatcttctcggtcttccatggaaatgcctgcacagccagctccacgaacagtcacagatgaggagataaactttgttaagacctgtcttcagaggtggaggagtgagattgaacaagatatacaagnagattaaaagaattgtattgcaagtactactcagactattgaacagatgtactgcgatcctctccttcgtcaggnnnnaggtgccttatcgcttgcatgcagttcttgttcatgaaggacaagcaaatgctggacactattgggcctatatctataatcagccccgacagagctggctcaagtacaatgacatctctgttactgaatcttcctgggaagaagttgaaagagattcctatgggggcctgagaaatgttagtgcttactgtctgatgtacattaatgacaaactaccctacttcaatgcagnnnnnnnnnnnnnnnnnnnnnnnnnnnnnnnnnnnnnnnnnnnnnnnnnnnnnnnnnnnnnnnnnnnnnnnnnnnnnnnnnnnnnnnnnnnnnnnnnnnnnnnnnnnnnnnnnnnnnnnnnnnnnnnnnnnnnnnnnnnnnnnnnnnnnnnnnnnnnnnnnnnnnnnnnnnnnnnnnnnnnnnnnnnnnnnnnnnnnnnnnnnnnnnnnnnnnnnnnnnnnnnnnnnnnnnnnnnnnnnnnnnnnnnnnnnnnnnnnnnnnnnnnnnnnnnnnnnnnnnnnnnnnnnnnnnnnnnnnnnnnnnnnnnnnnnnnnnnnnnnnnnnnnnnnnnnnnnnnnnnnnnnnnnnnnnnnnnnnnnnnnnnnnnnnnnnnnnnnnnnnnnnnnnnnnnnnnnnnnnnnnnnnnnnnnnnnnnnnnnnnnnnnnnnnnnnnnnnnnnnnnnnnnnnnnnnnnnnnnnnnnnnnnnnnnnnnnnnnnnnnnnnnnnnnnnnnnnnnnnnnnnnnnnnnnnnnnnnnnnnnnnnnnnnnnnnnnnnnnnnnnnnnnnnnnnnnnnnnnnnnnnnnnnnnnnnnnnnnnnnnnnnnnnnnnnnnnnnnnnnnnnnnnnnnnnnnnnnnnnnnnnnnnnnnnnnnnnnnnnnnnnnnnnnnnnnnnnnnnnnnnnnnnnnnnnnnnnnnnnnnnnnnnnnnnnnnnnnnnnnnnnnnnnnnnnnnnnnnnnnnnnnnnnnnnnnnnnnnnnnnnnnnnnnnnnnnnnnnnnnnnnnnnnnnnnnnnnnnnnnnnnnnnnnnnnnnnnnnnnnnnnnnnnnnnnnnnnnnnnnnnnnnnnnnnnnnnnnnnnnnnnnnnnnnnnnnnnnnnnnnnnnnnnnnnnnnnnnnnnnnnnnnnnnnnnnnnnnnnnnnnnnnnnnnnnnnnnnnnnnnnnnnnnnnnnnnnnnnnnnnnnnnnnnnnnnnnnnnnnnnnnnnnnnnnnnnnnnnnnnnnnnnnnnnnnnnnnnnnnnnnnnnnnnnnnnnnnnnnnnnnnnnnnnnnnnnnnnnnnnnnnnnnnnnnnnnnnnnnnnnnnnnnnnnnnnnnnnnnnnnnnnnnnnnnnnnnnnnnnnnnnnnnnnnnnnnnnnnnnnnnnnnnnnnnnnnnnnnnnnnnnnnnnnnnnnnnnnnnnnnnnnnnnnnnnnnnnnnnnnnnnnnnnnnnnnnnnnnnnnnnnnnnnnnnnnnnnnnnnnnnnnnnnnnnnnnnnnnnnnnnnnnnnnnnnnnnnnnnnnnnnnnnnnnnnnnnnnnnnnnnnnnnnnnnnnnnnnnnnnnnnnnnnnnnnnnnnnnnnnnnnnnnnnnnnnnnnnnnnnnnnnnnnnnnnnnnnnnnnnnnnnnnnnnnnnnnnnnnnnnnnnnnnnnnnnnnnnnnnnnnnnnnnnnnnnnnnnnnnnnnnnnnnnnnnnnnnnnnnnnnnnnnnnnnnnnnnnnnnnnnnnnnnnnnnnnnnnnnnnnnnnnnnnnnnnnnnnnnnnnnnnnnnnnnnnnnnnnnnnnnnnnnnnnnnnnnnnnnnnnnnnnnnnnnnnnnnnnnnnnnnnnnnnnnnnnnnnnnnnnnnnnnnnnnnnnnnnnnnnnnnnnnnnnnnnnnnnnnnnnnnnnnnnnnnnnnnnnnnnnnnnnnnnnnnnnnnnnnnnnnnnnnnnnnnnnnnnnnnnnnnnnnnnnnnnnnnnnnnnnnnnnnnnnnnnnnnnnnnnnnnnnnnnnnnnnnnnnnnnnnnnnnnnnnnnnnnnnnnnnnnnnnnnnnnnnnnnnnnnnnnnnnnnnnnnnnnnnnnnnnnnnnnnnnnnnnnnnnnnnnnnnnnnnnnnnnnnnnnnnnnnnnnnnnnnnnnnnnnnnnnnnnnnnnnnnnnnnnnnnnnnnnnnnnnnnnnnnnnnnnnnnnnnnnnnnnnnnnnnnnnnnnnnnnnnnnnnnnnnnnnnnnnnnnnnnnnnnnnnnnnnnnnnnnnnnnnnnnnnnnnnnnnnnnnnnnnnnnnnnnnnnnnnnnnnnnnnnnnnnnnnnnnnnnnnnnnnnnnnnnnnnnnnnnnnnnnnnnnnnnnnnnnnnnnnnnnnnnnnnnnnnnnnnnnnnnnnnnnnnnnnnnnnnnnnnnnnnnnnnnnnnnnnnnnnnnnnnnnnnnnnnnnnnnnnnnnnnnnnnnnnnnnnnnnnnnnnnnnnnnnnnnnnnnnnnnnnnnnnnnnnnnnnnnnnnnnnnnnnnnnnnnnnnnnnnnnnnnnnnnnnnnnnnnnnnnnnnnnnnnnnnnnnnnnnnnnnnnnnnnnnnnnnnnnnnnnnnnnnnnnnnnnnnnnnnnnnnnnnnnnnnnnnnnnnnnnnnnnnnnnnnnnnnnnnnnnnnnnnnnnnnnnnnnnnnnnnnnnnnnnnnnnnnnnnnnnnnnnnnnnnnnnnnnnnnnnnnnnnnnnnnnnnnaaaaagcagcatacatatgcaaaactatatatatgtatatgtagagaaatacttcccactgatgatttttaaaaggcttctgattggatattgtgttttaaccaaattttaaagattaatggaatcatgaaagggaagaactcttgatacaactatgcagattttataaatgtgcaataaaagtatttgttttac

SEQ ID NO: 24981 - DNA, 1949 bp, Macaca Mulatta
  misc_feature (1)...(1949): n = A,T,C or G
gccattacgccggggatagctgagccacgtacttcaaacagaaggcagccaattactaacttctggttgctaggtgtggcttcctttcaaatcctataaaatcaggagcccaagtctccaccgctagtgtgaaatcttcagagaagaatttccccttagttctttgcaagaaggtagagataaagacactttttcaaaaatggcaatggtatcagaattcctcaagcaggcctggtttattgaaaatgaagagcaggaatatgttcaaactgtgaaatcatccaaaggtggtcctggatcagcagtgagcccctatcctaccttcaatccatcctcggatgtcgctgccttgcacaaggccataatggttaaaggtgtggatgaagcaaccatcattgacattctaactaagcgaaacaatgcacagcgtcaacagatcaaagcagcatatctccaggaaacaggaaagcccctggatgaaacactgaagaaagcccttatgggtcaccttgaggaggttgttttagctctgctaaaaactccagcgcaatttgatgctgatgaacttcgggctgccatgaagggccttggaactgatgaagacactctgattgagattttggcatcaagaactaacaaagaaatcagagacattaacagggtctacagagaggaactgaagagagatctggccaaagacataacctcagacacatctggagattttcggaacgctttgctttctcttgctaagggtgaccgatctgaggactttggtgtgaatgaagacttggctgattcagatgccagggccttgtatgaagcgggagaaaggagaaaggggacagatgtaaacgtgttcaataccatccttaccacccgaagctatccacatcttcgcagagtgtttcagaaatacaccaagtacagtaagcatgacatgaacaaagttctggacctggagttgaaaggtgacattgagaaatgcctcacagctatcgtgaagtgtgccacaagcaaaccagctttctttgcagagaaacttcatcaggccatgaaaggtgctggaactcgccataaggcattgatcaggactatggtttcacgttctgaaattgacatgaatgatatcaaagcattctatcagaagatgtatggtatctcnctttccaaagcatctggatgaaaccagcgagatctgaaaaatcctgctgggctngcgggagcaacaaacttccttgatggttcangttgatcgagacattatatatttttgcctaagtaaagaaggttcacggaaggcgtctttgggaaggcacactttggcgtaaagcttagtcccccgttctttcttactctctctcctcttctcttctgtgcttcgttgattgctgtatggctgtataananaaaaacgaaaaagtacactagaataagcaaaaatacagaaagaagaaaaaaacatataaagaataaagaacannnnnnnnnnnnnnnnnnnnnnnnaaaaacataaaaacaaaataaaataaaacagaaacaaaagaaagaagaacaataacaaaaaacagaaaagaaacaaagaannnnnnnnnnnnnnnnnnnngaagaagacaggatagcgagaacgaaacgggagagagagaacgagcgagagacggaatgagcnnnnnnnnnnnnnnnnnnnggagaggggggaggagagacgagaggcacggacgagaaggggtagagggaggaagaaagagcaggaggaggacgaagaacggagcagtgtaagatgtaaagnnnnnnnnnnnnnnnnnnnnnnnnnnnttaagaagagagaggaagaaggagaagagatatggaagaacagaacacaggaatnnnnnnnnnnnnnnnnnnagagaagcaaacgacaaaagagaaggacnnnnnnnnnnnnnnnnnnnnnnnnnnatagaagg

SEQ ID NO: 24982 - DNA, 1634 bp, Macaca Mulatta
  misc_feature (1)...(1634): n = A,T,C or G
gtttgctctgggatttaaggcagcacacctggagggcatggagctgaagcatatgggacagcagctgatgggtcagtacccgattcacttccacctggccggtgatgtagannnnnnnnnnnnnnnnnnnnnnnnnnnnnnnnnnnnnnnnnnnnnnnnnnnnnnnnnnnnnnnnnnnnnnnnnnnnnnnnnnnnnnnnnnnnnnnnnnnnnncaaggacgttgtgggctataactctttgggccactgcttcttcacggaagatgggccagaggaacgcaacacttttgaccactgtcttggcctccttgtcaagtccggaaccctcctcccctcagaccgtgacagcaagatgtgcaagatgatcacagaggactcctatccggggtacatccccaagcccaggcaagactgcannnnnnnnnnnnnnnnnnnnnnnnnnnnnnnnnnnnnnnnnnnnnnnnnnnnnnnnnnnnnnnnnnnnnnnnnnnnnnnnnnnnnnnnnnnnnnnnnnnnnnnnnnnnnnnnnnnnnnnnnnnnnnnnnnnnnnnnnnnnnnnnnnnnnnnnnnnnnnnnnnnnnnnnnnnnnnnnnnnnnnnnnnnnnnnnnnnnnnnnnnnnnnnnnnnnnnnnnnnnnnnnnnnnnnnnnnnnnnnnnnnnnnnnnnnnnnnnnnnnnnnnnnnnnnnnnnnnnnnnnnnnnnnnnnnnnnnnnnnnnnnnnnnnnnnnnnnnnnnnnnnnnnnnnnnnnnnnnnnnnnnnnnnnnnnnnnnnnnnnnnnnnnnnnnnnnnnnnnnnnnnnnnnnnnnnnnnnnnnnnnnnnnnnnnnnnnnnnnnnnnnnnnnnnnnnnnnnnnnnnnnnnnnnnnnnnnnnnnnnnnnnnnnnnnnnnnnnnnnnnnnnnnnnnnnnnnnnnnnnnnnnnnnnnnnnnnnnnnnnnnnnnnnnnnnnnnnnnnnnnnnnnnnnnnnnnnnnnnnnnnnnnnnnnnnnnnnnnnnnnnnnnnnnnnnnnnnnnnnnnnnnnnnnnnnnnnnnnnnnnnnnnnnnnnnnnnnnnnnnnnnnnnnnnnnnnnnnnnnnnnnnnnnnnnnnnnnnnnnnnnnnnnnnnnnnnnnnnnnnnnnnnnnnnnnnnnnnnnnnnnnnnnnnnnnnnnnnnnnnnnnnnnnnnnnnnnnnnnnnnnnnnnnnnnnnnnnnnnnnnnnnnnnnnnnnnnnnnnnnnnnnnnnnnnnnnnnnnnnnnnnnnnnnnnnnnnnnnnnnnnnnnnnnnnnnnnnnnnnnnnnnnnnnnnnnnnnnnnnnnnnnnnnnnnnnnnnnnnnnnnnnnnnnnnnnnnnnnnnnnnnnnnnnnnnnnnnnnnnnnnnnnnnnnnnnnnnnnnnnnnnnnnnnnnnnnnnnnnnnnnnnnnnnnnnnnnnnnnnnnnnnagatgtacattcaagcctacaagaccagtaacctgcgaatgaagatcatcaagaatgacttccccagccaccctctctacctggagggggcgctcaccaggagcacccattaccagcagtaccagccggttgtcaccctgcagaagggctacaccatccactgggaccagacggcccccgccgaactcgccatctggctcatcaacttcaacaa

SEQ ID NO: 24983 - DNA, 353 bp, Macaca Mulatta
  misc_feature (1)...(353): n = A,T,C or G
gnnnnnnnnnnnnnnnnnnnnnatggtagctttactttttatgaaaaaaatattatttgccttttaaattctgtttttnttccccccnccccgagggtccgcgccgttccaaaggntcttggantanngcaagcattattttgggggtagaaacggtgaaatctctagcctctttgtgnnnnnnnnnnnnnnnnnnnnnnatataatgcatgtattcactaaaataaagtttaaaaaacccatgtcttgctagacaaggttgctgttgtgcagtgtgcctgtcactactggtctgtactccttggatttgcattttggtattttgtacaaagtaaaaataaactgttatgagt

SEQ ID NO: 24984 - DNA, 784 bp, Macaca Mulatta
  misc_feature (1)...(784): n = A,T,C or G
atgagatggggaaataaacaaagttttggtaagagatttactatgagtattgacatatggggatacgtagagacagaatctgaatatcataactggggncatgaagnnatanncagcngaanngaccaaggacaaaataggggangaaggatatgctcattttataaaagtgcgcaatgaatctggtctttagtttaaatatatgcatgaaaagacatcttgaaggcccataaatccctttggaagaaagtatcttggggccataatcctgaggtttaggaaatttttacccgtttttctcctggaagtaggaaaaatagggcagtttttctttcttcaaaacaactggtattttaaaactaaatttttttcatgttcttgaatcatcctttattatttgttgttgtctttgtccattttctgttgctatgaaggagtactggaggctggacagcttgtaaagaaaacaggtttacttggctcgtgattccgcannnnnnnnnnnnnnnnnnagagtgcttcatgttggcggaaccattgtattgttgcttagtgaagatcaccacaggcgacttacagattgtaaagagagcagcatccctttgaattccaaggacagtcacaccgatgaacctcatagagctttggagaggattaagggaaatgacaccacagcccagttactggcacatagtaactgctacataagcgagttcacttggttagtagctaaggagataaccacagctctggcccaaacgagtggccctcaatcgcagctccc

SEQ ID NO: 24985 - DNA, 771 bp, Macaca Mulatta
tcctgaagaagacggccagcctgggcttctgtgtcacctatgtcttcttcatcaccagcctcatctaccccgccgtctgcaccaacatcgagtcccttaacaaggactcaggctcactgtggaccaccaagttcttcatccccctcactaccttcctcctgtacaactttgctgacctgtgcggccggcagctcaccgcctggatccaggtgccagggcccaacagcaaggcgctgccagggttcgtgctcctccggacctgcctcatccccctctttgtgctctgtaactaccagccccgtgtccacctgaagaccgtggtctttcagtccgatgtgtaccctgcactcctcagctccctgctggggctcagcaacggctacctcagcaccctagccctcctctatgggcctaagattgtgcccagagagctggccgaggccacgggggtggtgatgtccttttatctgtgcttgggcttaacgctgggctcagcctgctccaccctcctggtgcacctcatctaggagggaggacacgaggacattggtgcttcagagccttggaagatgaggagagagtgcaagaaggctgggggccatggaggagaggcctagagtttcgcttgggacagagagcagagcacactctggcctcatccctcccaagatgccagtgagccacgtccatgcccattccatgcgaggcagatattccagacacgttaacagaacaatgggagacagctgaagaagaaatagtacaaagcag

SEQ ID NO: 24986 - DNA, 431 bp, Macaca Mulatta
tacacactgtacatccactgttccttttgagcatctgggcgcacctagcgggtctcctgccctctgtccatctctgggctctcgggaaatcactgttccggtaagggaagcttccttttgagagatctcaccaggcgtcagcgtcacagtggggtcctgatgtccttttacaaaaggcaagaccagcatctggacagtggggctcttgagagtccctggcgcccccacaccaggttgtcctataccctctcccctctgtggagatgttaatgctgacgggtgtgtggggaaggaagtaccaggcaggggccacgcatggtccccatcaccccctcccgggtggcccgggctccatcatctatccccatctggccacactggtgttcacacagagaagactggggacaggaatccccttggaagattctcac

SEQ ID NO: 24987 - DNA, 1135 bp, Macaca Mulatta
  misc_feature (1)...(1135): n = A,T,C or G
ttctgggcctctgcctcttatcannnnnnnnnnnnnnnnnnnnnnnnnnnnnnnnnnnnnnnnnnnnnnnnnnnnnnnnnnnnnnnnnnnnnnnnnnnnnnnnnnnnnnnnnnnnnnnnnnnnnnnnnnnnnnnnnnnnnnnnnnnnnnnnnnnnnnnnnnnnnnnnnnnnnnnnnnnnnnnnnnnnnnnnnnnnnnnnnnnnnnnnnnnnnnnnnnnnnnnnnnnnnnnnnnnnnnnnnnnnnnnnnnnnnnnnnnnnnnnnnnnnnnnnnnnnnnnnnnnnnnnnnnnnnnnnnnnnnnnnnnnnnnnnnnnnnnnnnnnnnnnnnnnnnnnnnnnnnnnnnnnnnnnnnnnnnnnnnnnnnnnnnnnnnnnnnnnnnnnnnnnnnnnnnnnnnnnnnnnnnnnnnnnnnnnnnnnnnnnnnnnnnnnnnnnnnnnnnnnnnnnnnnnnnnnnnnnnnnnnnnnnnnnnnnnnnnnnnnnnnnnnnnnnnnnnnnnnnnnnnnnnnnnnnnnnnnnnnnnnnnnnnnnnnnnnnnnnnnnnnnnnnnnnnnnnnnnnnnnnnnnnnnnnnnnnnnnnnnnnnnnnnnnnnnnnnnnnnnnnnnnnnnnnnnnnnnnnnnnnnnnnnnnnnnnngggctagtcttggaccccacaagagcatcgttcctctttctcatggcgaactcacgccctccagcctgatccccagctccctccttcctgccttctctgctggtacccagtcctaagacattgctgccgcttcttcctttgaagcattatcagtagtcacatcctcacagctggcctgccctcttgccaggatatttatttctgctattcattccctcccccttggatgtaacttctccattcagttcccttttcttcttgcatgtaagttgtcccccatcccaaaatattccatctacttttctatctccgtccccttttgcaaccctctctggggatggactgggtaaatgttgacagaggctctgccccgttcacagatcctggctctgagccagccctgtgctcctccctccccccacactccccatcaaccccnnnnnnnnnnnnnnnnnnnnnnnnnnctccgctgtaggccactggatggtcatttgcatctc

SEQ ID NO: 24988 - DNA, 133 bp, Macaca Mulatta
gatgccggtggccgtgggtccctacggacagtcccagccaagctgcttcgaccgcgtcaagatgggcttcgtgatgggttgcgccgtgggcatggcggccggggcgctcttcggcaccttttcctgtctcagg

SEQ ID NO: 24989 - DNA, 3624 bp, Macaca Mulatta
  misc_feature (1)...(3624): n = A,T,C or G
naggctatcaagtattagctccaactgcctattatgatcagactggtgccttagtggttggccctggagcaaggactggccttggaactccagttcggttaatggctccaacacctgttttaattagttcagcagcagcacaagctnnnnnnnnnnnnnnnnnnnnnnnnnnnnnnnnnnnnnnnnnnnnnnnnnnnnnnnnnnnnnnnnnnnnnnnnnnnnnnnnnnnnnnnnnnnnnnnnnnnnnnnnnnnnnnnctaatctgcaatctaattcattttatggaagcagttctttgactaatagctcccagagtagttctttattttttaagggacctggtcaacctggaagtacatctcttggcttnnnnnnnnnnnnnnnnnnnnnnnnnnnnnnnnnnnnnnnnnnnnnnnnnnnnnnnnnnnnnnnnnnnnnnnnnnnnnnnnnnnnnnnnnnnnnnnnnnnnnnnnnnnnnnnnnnnnnnnnnnnnnnnnnnnnnnnnnnnnnnnnnnnnnnnnnnnnnnnnnnnnnnnnnnnnnnnnnnnnnnnnnnnnnnnnnnnnnnnnnnnnnnnnnnnnnnnnnnnnnnnnnnnnnnnnnnnnnnnnnnnnnnnnnnnnnnnnnnnnnnnnnnnnnnnnnnnnnnnnnnnnnnnnnnnnnnnnnnnnnnnnnnnnnnnnnnnnnnnnnnnnnnnnnnnnnnnnnnnnnnnnnnnnnnnnnnnnnnnnnnnnnnnnnnnnnnnnnnnnnnnnnnnnnnnnnnnnnnnnnnnnnnnnnnnnnnnnnnnnnnnnnnnnnnnnnnnnnnnnnnnnnnnnnnnnnnnnnnnnnnnnnnnnnnnnnnnnnnnnnnnnnnnnnnnnnnnnnnnnnnnnnnnnnnnnnnnnnnnnnnnnnnnnnnnnnnnnnnnnnnnnnnnnnnnnnnnnnnnnnnnnnnnnnnnnnnnnnnnnnnnnnnnnnnnnnnnnnnnnnnnnnnnnnnnnnnnnnnnnnnnnnnnnnnnnnnnnnnnnnnnnnnnnnnnnnnnnnnnnnnnnnnnnnnnnnnnnnnnnnnnnnnnnnnnnnnnnnnnnnnnnnnnnnnnnnnnnnnnnnnnnnnnnnnnnnnnnnnnnnnnnnnnnnnnnnnnnnnnnnnnnnnnnnnnnnnnnnnnnnnnnnnnnnnnnnnnnnnnnnnnnnnnnnnnnnnnnnnnnncagagtgaaatggtaaaggagctggatggtcatgtgctcaaatgtgtgaaagatcagaatggaaaccatgttgtacaaaaatgtatcgaatgtgttcagccacagtcactgcagttcatcattgatgctttcaaaggacaagtatnnnnnnnnnnnnnnnnnnnnnnnnnnnnnnnnnnnnnnnnnnnnnnnnnnnnnnnnnnnnnnnnnnnnnnnnnnnnnnnnnnnnnnnnnnnnnnnnnnnnnnnnnnnnnnnnnnnnnnnnnnnnnnnnnnnnnnnnnnnnnnnnnnnnnnnnnnnnnnnnnnnnnnnnnnnnnnnnnnnnnnnnnnnnnnnnnnnnnnnnnnnnnnnnnnnnnnnnnnnnnnnnnnnnnnnnnnnnnnnnnnnnnnnnnnnnnnnnnnnnnnnnnnnnnnnnnnnnnnnnnnnnnnnnnnnnnnnnnnnnnnnnnnnnnnnnnnnnnnnnnnnnnnnnnnnnnnnnnnnnnnnnnnnnnnnnnnnnnnnnnnnnnnnnnnnnnnnnnnnnnnnnnnnnnnnnnnnnnnnnnnnnnnnnnnnnnnnnnnnnnnnnnnnnnnnnnnngattcgacctcacattactactttgcgcaaatacacatatgggaagcatatattggccaagttggaaaagtattatttgaagaatagcccggacctaggacctattggaggaccaccaaatggaatgctgtaaattacaggagcatgagaaagaagataatttaaccatgtgaaaagaatttttttgtgtgtgaattatcaaaacacaactcaactatgaatcttcaattttttttttaaagcaaaactatttattgactttattcatccatttgtaaattttttaaggttcttgtgtatatttggggggtgnnnnnnnnnnnnnnnnnnnnnnnnnnnnnnnnnnnnnnnnnnnnnnnnnnnnnnnnnnnnnnnnnnnnnnnnnnnnnnnnnnnnnnnnnnnnnnnnnnnnnnnnnnnnnnnnnnnnnnnnnnnnnnnnnnnnnnnnnnnnnnnnnnnnnnnnnnnnnnnnnnnnnnnnnnnnnnnnnnnnnnnnnnnnnnnnnnnnnnnnnnnnnnnnnnnnnnnnnnnnnnnnnnnnnnnnnnnnnnnnnnnnnnnnnnnnnnnnnnnnnnnnnnnnnnnnnnnnnnnnnnnnnnnnnnnnnnnnnnnnnnnnnnnnnnnnnnnnnnnnnnnnnnnnnnnnnnnnnnnnnnnnnnnnnnnnnnnnnnnnnnnnnnnnnnnnnnnnnnnnnnnnnnnnnnnnnnnnnnnnnnnnnnnnnnnnnnnnnnnnnnnnnnnnnnnnnnnnnnnnnnnnnnnnnnnnnnnnnnnnnnnnnnnnnnnnnnnnnnnnnnnnnnnnnnnnnnnnnnnnnnnnnnnnnnnnnnnnnnnnnnnnnnnnnnnnnnnnnnnnnnnnnnnnnnnnnnnnnnnnnnnnnnnnnnnnnnnnnnnnnnnnnnnnnnnnnnnnnnnnnnnnnnnnnnnnnnnnnnnnnnnnnnnnnnnnnnnnnnnnnnnnnnnnnnnnnnnnnnnnnnnnnnnnnnnnnnnnnnnnnnnnnnnnnnnnnnnnnnnnnnnnnnnnnnnnnnnnnnnnnnnnnnnnnnnnnnnnnnnnnnnnnnnnnnnnnnnnnnnnnnnnnnnnnnnnnnnnnnnnnnnnnnnnnnnnnnnnnnnnnnnnnnnnnnnnnnnnnnnnnnnnnnnnnnnnnnnnnnnnnnnnnnnnnnnnnnnnnnnnnnnnnnnnnnnnnnnnnnnnnnnnnnnnnnnnnnnnnnnnnnnnnnnnnnnnnnnnnnnnnnnnnnnnnnnnnnnnnnnnnnnnnnnnnnnnnnnnnnnnnnnnnnnnnnnnnnnnnnnnnnnnnnnnnnnnnnnnnnnnnnnnnnnnnnnnnnnnnnnnnnnnnnnnnnnnnnnnnnnnnnnnnnnnnnnnnnnnnnnnnnnnnnnnnnnnnnnnnnnnnnnnnnnnnnnnnnnnnnnnnnnnnnnnnnnnnnnnnnnnnnnnnnnnnnnnnnnnnnnnnnnnnnnnnnnnnnnnnnnnnnnnnnnnnnnnnnnnnnnnnnnnnnnnnnnnnnnnnnnnnnnnnnnnnnnnnnctagaatttggatcactttcaattgaagtcagggtattgtgcataatagaaagtattggactgagatatttggttaccatggaggccaatgcttttttcatcttattaaatgtgatgtgacttttttctttgtacagaagagtactgtatttttgaatagcctactcccaagtaagagcaaatctgtatgataacatttttttctctggacataagacataacagtaacacgatgtacatttacaagcggccttatgtacatttcccaacaatctttttaaggcaaaattgtgaccatatgtgtataattaaaatcgtttttaatcct

SEQ ID NO: 24990 - DNA, 969 bp, Macaca Mulatta
  misc_feature (1)...(969): n = A,T,C or G
gggcactcgaataccttgacttgagcttcaatcagatagccaaactgccttctggtctccctgtctctcttctaactctctacttagacaacaataagatcagcaacatccctgatgagtatttcaagcgttttaatgcattgcagtatctgcgtttgtctcacaatgaactggctgatagtggaatacctggaaattctttcaatgtgtcatccctggttgagctggatctgtcctataacaagcttaaaaacataccaaccgtcaatgaaaaccttgaaaactattacctggaggtcaatcaacttgagaagtttgatgtaaagagcttttgcaagatcctggggccattatcctactccaagatcaagcatttgcgtttggatggtaatcgcatctcagaaactagccttccaccggatatgtatgaatgtctacgtgttgcaaatgaaatcactcttaattaatatctgtatcctggaacaatattttatggttatgttttcctgtgtgtcagttttcatagtatccatattttattactgtttattacttccatgaattttaaaatctgatagaaatgttttgtaaacatttatttntttttaaagaanagatgaaatgcaggcctatttcatcacaagaacacacacatatacacgaatagacataaaactcaatgctttatttgtaaattcagtgtttttttatttctactgtccaatgatgtgccaagcccttttactggtgggcatggaaaatcagccaagtttttataaatcctttaaaatcttaaatgttgccccccaaaggccctggaattaaaataaccttcgggggaatgtttttacgggtcctttgaaaaccaaaaatttatccctttgnnnnnnnnnnnnncnnnnnnnnnnnnngtcccggggggnnnnnnnnnnnnnnnnnnnaaggggtgtgggggttaaaaaaaattta

SEQ ID NO: 24991 - DNA, 483 bp, Macaca Mulatta
ccaaggttggcatgccccattgtcttccttgacaacaggcccagggccagtcatgctcatgcctgttctctgctccaggaacagagctgctgttccaccagcagccttgtgactccgtggcctctgggagcaggactccccaggcttatactctctcagcttgagagagggtctatgtctgaaggcagtcctcactgtcatccctcccctgctgttggcctaatgatgctgtcagggccagctcctcttgaaagacagccagctgcgaaggcagcccagggcttcttcccatgtcctgcttctctgtgtctggggagagtcgtgcctgtggctgcgagttttcccaggactagcacctgcctccggggctgtcagcactatggcagcaggtcctctgcggttctctgcctctggcacctccctaaagctcagctgaacctgaccaggcctcagcatttcccctgctggaccccctagagccac

SEQ ID NO: 24992 - DNA, 2787 bp, Macaca Mulatta
  misc_feature (1)...(2787): n = A,T,C or G
ccctctctaccgtcccggcggcatccacatgtctccggacacctgagcaccacggtcccgccgaggatcctcccggtggggagaagagcaccggtgcccctagccccgcacatcagcgcggaccgcggctgcctaacctccgggtcccgtcccctccttttcctccgggggaggaggatggggttggaaaagctttccctgaggatgctcgnnnnnnnnnnnnnnnnnnnnnnnnnnnnnnnnnnnnnnnnnnnnnnnnnnnnnnnnnnnnnnnnnnnnnnnnnnnnnnnnnnnnnnnnnnnnnnnnnnnnnnnnnnnnnnnnnnnnnnnnnnnnnnnnnnnnnngctgtattttggggcgatattgccttagatgatgaagacttaagtatctttcaaatagataggacaattgaccttacgcagaatccctttggaaaccttggacataccacaggtnnnnnnnnnnnnnnnnnnnnnnnnnnnnnnnnnnnnnnnnnnnnnnnnnnnnnnnnnnnnnnnnnnnnnnnnnnnnnnggcttggagcaaaacaacacagttaagggtaaagtacctctacaattctcagggcaaaatgagaaaaatcgagttcccagagccgctacatcaagaacggaaagaatatggcctggaggcgttattccttatgttataggaggcaacttcactggnnnnnnnnnnnnnnnnnnnnnnnnnnnnnnnnnnnnnnnnnnnnnnnnnnnnnnnnnnnnnnnnnnnnnnnnnnnnnnnnnnnnnnnnnnnnnnnnnnnnnnnnnnnnnnnnnnnnnnnnnnnnnnnnnnnnnnnnnnnnnnnnnnnnnnnnnnnnnnnnnnnnnnnnnnnnnnnnnnnnnnnnnnnnnnnnnnnnnnnnnnnnnnnnnnnnnnnnnnnnnnnnnnnnnnnnnnnnnnnnnnnnnnnnnnnnnnnnnnnnnnnnnnnnnnnnnnnnnnnnnnnnnnnnnnnnnnnnnnnnnnnnnnnnnnnnnnnnnnnnnnnnnnnnnnnnnnnnnnnnnnnnnnnnnnnnnnnnnnnnnnnnnnnnnnnnnnnnnnnnnnnnnnnnnnnnnnnnnnnnnnnnnnnnnnnnnnnnnnnnnnnnnnnnnnnnnnnnnnnnnnnnnnnnnnnnnnnnnnnnnnnnnnnnnnnnnnnnnnnnnnnnnnnnnnnnnnnnnnnnnnnnnnnnnnnnnnnnnnnnnnnnnnnnnnnnnnnnnnnnnnnnnnnnnnnnnnnnnnnnnnnnnnnnnnnnnnnnnnnnnnnnnnnnnnncccttcttaccgcactgcatctggagagtttctgtgaccccaggggagaagnagattgttttaaattttacaacgatggatctttacaagagtagtttgtgctggtatgactacattgaagtaagagatgggtactggagaaaatcacctctccttggtannnnnnnnnnnnnnnnnnnnnnnnnnnnnnnnnnnnnnnnnnnnnnnnnnnnnnnnnnnnnnnnnnnnnnnnnnnnnnnnnnnnnnnnnnnnnnnnnnnnnnnnnnnnnnnnagcgatctgtggaggtgagatacgtaaaaatgaaggacagattcagtctcctaattatcctgatgactatcgcccgatgaaagaatgtgtgtggaaaataacagtgtctgagggctaccacgtcgggctgacctttcagtcctttgagnnnnnnnnnnnnnnnnnnnnnnnnnnnnnnnnnnnnnnnnnnnnnnnnnnnnnnnnnnnnnnnnnnnnnnnnnnnnnnnnnnnnnnnnnnnnnnnnnnnnnnnnnnnnnnnnnnnnnnnnnnnnnnnnnnnnnnnnnnnnnnnnnnnnnnnnnnnnnnnnnnnnnnnnnnnnnnnnnnnnnnnnnnnnnnnnnnagaggaagacgaatgtgccaaacctgaccgtggaggctgtgagcagcgatgtctgaacaccctgggcagttaccagtgtgcctgtgagcctggctatgagctgggcccagacaggaggagctgtgaagnnnnnnnnnnnnnnnnnnnnnnnnnnnnnnnnnnnnnnnnnnnnnnnnnnnnnnnnnnnnnnnnnnnnnnnnnnnnnnnnnnnnnnnnnnnnnnnnnnnnnnnnnnnnnnnnnnnnnnnnnnnnnnnnnnnnnnnnnnnnnnnnnnnnnnnnnnnnnnnnnnnnnnnnnnnnnnnnnnnnnnnnnnnnnnnnnnnnnnnnnnnnnnnnnnnnnnnnnnnnnnnnnnnnnnnnnnnnnnnnnnnnnnnnnnnnnnnnnnnnnnnnnnnnnnnnnnnnnnnnnnnnnnnnnnnnnagactaagacgaatgctccaaggatcatgcctgatgtcagcaccaatgtgtcaacacgatgaggagctacatgtgtcagtgccgtaatgcatttgtgctgcatgaaataaacctgattnnnnnnnagctgagtgtgaacagaagatccacagtccaagtggcctcatcaccagtcccaactggccagacaagtacccaagcaggaaagaatgcacttgggagatcagcgccactcccggccaccgaatcaaattagnntttagtgaatttgagattgagcagcatcaagaatgtgcttacgaccacttagaagtatttgatggagaaacagaaaagtcaccaattcttggacgactatgtggcaacaagataccagatccccttgtggctactggaaataaaatgtttgttcggtttgtttctgatgcatccgttcaaagaaaaggctttcaagccacacattctacag

SEQ ID NO: 24993 - DNA, 730 bp, Macaca Mulatta
  misc_feature (1)...(730): n = A,T,C or G
accccgcagatctgaggagattccacaaaatagtttcttttaaccacagagtgcttgcaaaataaaaaagttgagaaaaagtgttcttatggattgaattaggttccttccaaaacgtatgttcaagtcctgactcccaatacctgtgcatgtgaccctttttttggaaacagtctttgcagatgtaatcaagtcaacatgaggtcacagtggattagagtagactccaacccaagggctagtgtccttagaagaagaagagataagagacagacacgaagggaagaggcccgacagaggcaggggttgaagatacgcccctaaggaatgcctggtgctaccagagctggaagaggcaaggaagaatcagaagaatcctcccctagaggcttcagaaagagcgtgatttggctgacaccttcacgtggacttctcgcctccaggactgtggaagaataaacttttgnnnnnnnnnnnnnnnnnnnnnnnnnnnnnnngttctgggatacatgtgcagaacatgcaggttggttacccagatatacatgggcatggtggtttgctgcacctatcaacccctcatttaggttttaagccctgcatgcattaggtatttgtcctaattctctccatcccctgcaagaggcccccatgtgtgatgttcccctccctgtgtccatgtgttctcactgttcaactcccacatatgagtgagaacatgtggtacttg

SEQ ID NO: 24994 - DNA, 455 bp, Macaca Mulatta
ggattactcaactggctgcagagtcgcatcaacatacccatcgggccctacagtgccctgaggtaggctgggcctgggttgaccagctgtctcagtggagaagtgtttgcctatatcatgttcctgtatcctgcctgtgttcctgcctcctgactaccctcatggatgctctttatggatgaccctttacagtagggtcatctggagactgacttctagcaatatttttagagggggatggtcccaggtggccctcccctcaattccacaccccagacccaacctaccagtttctgttcttcaatgatccagcctgactctacctacttcctcttcagattccttcaccctatttatctgcctcaaatacgggagaataaaactgaactgaatgtttgatgtctgtctgggaaagagctggggccatgtaattcaagtgtgggatttagatccta

SEQ ID NO: 24995 - DNA, 2531 bp, Macaca Mulatta
  misc_feature (1)...(2531): n = A,T,C or G
actgtaagtacccttgttatccaagcggcaaatgtgtcaactttgtacaaatgtgaagcggtcaacaaagtcgggagaggagagagggtgatctccttccnnnnnnnnnnnnnnnnnnnnnnnnnnnnnnnnnnnnnnnnnnnnnnnnnnnnnnnnnnnnnnnnnnnnnnnnnnnnnnnnnnnnnnnnnnnnnnnnnnnnnnnnnnnnnnnnnnnnnnnnnnnnnnnnnnnnnnnnnnnnnnnnnnnnnnnnnnnnnnnnnnnnnnnnnnnnnnnnnnnnnnnnnnnnnnnnnnnnnnnnnnnnnnnnnnnnnnnnnnnnnnnnnnnnnnnnnnnnnnnnnnnnnnnnnnnnnnnnnnnnnnnnnnnnnnnnnnnnnnnnnnnnnnnnnnnnnnnnnnnnnnnnnnnnnnnnnnnnnnnnnnnnnnnnnnnnnnnnnnnnnnnnnnnnnnnnnnnnnnnnnnnnnnnnnnnnnnnnnnnnnnnnnnnnnnnnnnnnnnnnnnnnnnnnnnnnnnnnnnnnnnnnnnnnnnnnnnnnnnnnnnnnnnnnnnnnnnnnnnnnnnnnnnnnnnnnnnnnnnnnnnnnnnnnnnnnnnnnnnnnnnnnnnnnnnnnnnnnnnnnnnnnnnnnnnnnnnnnnnnnnnnnnnnnnnnnnnnnnnnnnnnnnnnnnnnnnnnnnnnnnnnnnnnnnnnnnnnnnnnnnnnnnnnnnnnnnnnnnnnnnnnnnnnnnnnnnnnnnnnnnnnnnnnnnnnnnnnnnnnnnnnnnnnnnnnnnnnnnnnnnnnnnnnnnnnnnnnnnnnnnnnnnnnnnnnnnnnnnnnnnnnnnnnnnnnnnnngccaatggaggggaactgaagacaggctacttgtccatcgtcatggatcctgatgaactcccattggatgaacactgtgaacgactgccttatgatgccagcaaatgggaattccccagagaccggctgaagctaggtnnnnnnnnnnnnnnnnnnnnnnnnnnnnnnnnnnnnnnnnnnnnnnnnnnnnnnnnnnnnnnnnnnnnnnnnnnnnnnnnnnnnnnnnnnnnnnnnnnnnnnnnnnnnnnnnnnnnnnnnnnnnnnnnnnnnnnnnnnnnnnnnnnnnnnnnnnnnnnnnnnnnnnnnnnnnnnnnnnnnnnnnnnnnnnnnnnnnnnnnnnnnnnnnnnnnnnnnnnnnnnnnnnnnnnnnnnnnnnnnnnnnnnnnnnnnnnnnnnnnnnnnnnnnnnnnnnnnnnnnnnnnnnnnnnnnnnnnnnnnnnnnnnnnnnnnnnnnnnnnnnnnnnnnnnnnnnnnnnnnnnnnnnnnnnnnnnnnnnnnnnnnnnnnnnnnnnnnnnnnnnnnnnnnnnnnnnnnnnnnnnnnnnnnnnnnnnnnnnnnnnnnnnnnnnnnnnnnnnnnnnnnnnnnnnnnnnnnnnnnnnnnnnnnnnnnnnnnnnnnnnnnnnnnnnnnnnnnnnnnnnnnnnnnnnnnnnnnnnnnnnnnnnnnnnnnnnnnnnnnnnnnnnnnnnnnnnnnnnnnnnnnnnnnnnnnnnnnnnnnnnnnnnnnnnnnnnnnnnnnnnnnnnnnnnnnnnnnnnnnnnnnnnnnnnnnnnnnnnnnnnnnnnnnnnnnnnnnnnnnnnnnnnnnnnnnnnnnnnnnnnnnnnnnnnnnnnnnnnnnnnnnnnnnnnnnnnnnnnnnnnnnnnnnnnnnnnnnnnnnnnnnnnnnnnnnnnnnnnnnnnnnnnnnnnnnnnnnnnnnnnnnnnnnnnnnnnnnnnnnnnnnnnnnnnnnnnnnnnnnnnnnnnnnnnnnnnnnnnnnnnnnnnnnnnnnnnnnnnnnnnnnnnnnnnnnnnnnnnnnnnnnnnnnnnnnnnnnnnnnnnnnnnnnnnnnnnnnnnnnnnnnnnnnnnnnnnnnnnnnnnnnnnnnnnnnnnnnnnnnnnnnnnnnnnnnnnnnnnnnnnnnnnnnnnnnnnnncaggacggcaaagactatattgttcttccgatatcagagactttgagcatggaagaggattctggactctctctgcctacctcacctgtttcctgtatggaggaggaggaagtatgtgaccccaaattccattatgacaacacagcaggaatcannnnnnnnnnnnnnnnnnnnnnnnnnnnnnnnnnnnnnnnnnnnnnnnnnnnnnnnnnnnnnnnnnnnnnnnnnnnnnnnnnnnnnnnnnnnnnnnnnnnnnnnnnnnnnnnnnnnnnnnnnnnnnnnnnnnnnnnnnnnnnnnnnnnnnnnnnnnnnnnnnnnnnnnnnnnnnnnnnnnnnnnnnnnnnnnnnnnntccagcaaaagcagggagtctgtggcatctgagggctcaaaccagnacaagtggctaccagtccggatatcattccgacgacacagacaccactgtgtactccagtgaggaagcagacttttttaagctgatagagatcggagtgcaaaccggcagcacagcccagattctccagcctgactcggggaccacattgagctcccctcctgtt

SEQ ID NO: 24996 - DNA, 5662 bp, Macaca Mulatta
  misc_feature (1)...(5662): n = A,T,C or G
ggtctcgaagtgctgcagctaaaactcatacaactgccttgactgggcgaagtccttcccctgcttcaggacgacgaggggagggagatnnnnnnnnnnnnnnnnnnnnnnnnnnnnnnnnnnnnnnnnnnnnnnnnnnnnnnnnnnnnnnnnnnnnnnnnnnnnnnnnnnnnnnnnnnnnnnnnnnnnnnnnnnnnnnnnnnnnnnnnnnnnnnnnnnnnnnnnnnnnnnnnnnnnnnnnnnnnnnnnnnnnnnnnnnnnnnnnnnnnnnnnnnnnnnnnnnnnnnnnnnnnnnnnnnnnnnnnnnnnnnnnnnnnnnnnnnnnnnnnnnnnnnnnnnnnnnnnnnnnnnnnnnnnnnnnnnnnnnnnnnnnnnnnnnnnnnnnnnnnnnnnnnnnnnnnnnnnnnnnnnnnnnnnnnnnnnnnnnnnnnnnnnnnnnnnnnnnnnnnnnnnnnnnnnnnnnnnnnnnnnnnnnnnnnnnnnnnnnnnnnnnnnnnnnnnnnnnnnnnnnnnnnnnnnnnnnnnnnnnnnnnnnnnnnnnnnnnnnnnnnnnnnnnnnnnnnnnnnnnnnnnnnnnnnnnnnnnnnnnnnnnnnnnnnnnnnnnnnnnnnnnnnnnnnnnnnnnnnnnnnnnnnnnnnnnnnnnnnnnnnnnnnnnnnnnnnnnnnnnnnnnnnnnnnnnnnnnnnnnnnnnnnnnnnnnnnnnnnnnnnnnnnnnnnnnnnnnnnnnnnnnnnnnnnnnnnnnnnnnnnnnnnnnnnnnnnnnnnnnnnnnnnnnnnnnnnnnnnnnnnnnnnnnnnnnnnnnnnnnnnnnnnnnnnnnnnnnnnnnnnnnnnnnnnnnnnnnnnnnnnnnnnnnnnnnnnnnnnnnnnnnnnnnnnnnnnnnnnnnnnnnnnnnnnnnnnnnnnnnnnnnnnnnnnnnnnnnnnnnnnnnnnnnnnnnnnnnnnnnnnnnnnnnnnnnnnnnnnnnnnnnnnnnnnnnnnnnnnnnnnnnnnnnnnnnnnnnnnnnnnnnnnnnnnnnnnnnnnnnnnnnnnnnnnnnnnnnnnnnnnnnnnnnnnnnnnnnnnnnnnnnnnnnnnnnnnnnnnnnnnnnnnnnnnnnnnnnnnnnnnnnnnnnnnnnnnnnnnnnnnnnnnnnnnnnnnnnnnnnnnnnnnnnnnnnnnnnnnnnnnnnnnnnnnnnnnnnnnnnnnnnnnnnnnnnnnnnnnnnnnnnnnnnnnnnnnnnnnnnnnnnnnnnnnnnnnnnnnnnnnnnnnnnnnnnnnnnnnnnnnnnnnnnnnnnnnnnnnnnnnnnnnnnnnnnnnnnnnnnnnnnnnnnnnnnnnnnnnnnnnnnnnnnnnnnnnnnnnnnnnnnnnnnnnnnnnnnnnnnnnnnnnnnnnnnnnnnnnnnnnnnnnnnnnnnnnnnnnnnnnnnnnnnnnnnnnnnnnnnnnnnnnnnnnnnnnnnnnnnnnnnnnnnnnnnnnnnnnnnnnnnnnnnnnnnnnnnnnnnnnnnnnnnnnnnnnnnnnnnnnnnnnnnnnnnnnnnnnnnnnnnnnnnnnnnnnnnnnnnnnnnnnnnnnnnnnnnnnnnnnnnnnnnnnnnnnnnnnnnnnnnnnnnnnnnnnnnnnnnnnnnnnnnnnnnnnnnnnnnnnnnnnnnnnnnnnnnnnnnnnnnnnnnnnnnnnnnnnnnnnnnnnnnnnnnnnnnnnnnnnnnnnnnnnnnnnnnnnnnnnnnnnnnnnnnnnnnnnnnnnnnnnnnnnnnnnnnnnnnnnnnnnnnnnnnnnnnnnnnnnnnnnnnnnnnnnnnnnnnnnnnnnnnnnnnnnnnnnnnnnnnnnnnnnnnnnnnnnnnnnnnnnnnnnnnnnnnnnnnnnnnnnnnnnnnnnnnnnnnnnnnnnnnnnnnnnnnnnnnnnnnnnnnnnnnnnnnnnnnnnnnnnnnnnnnnnnnnnnnnnnnnnnnnnnnnnnnnnnnnnnnnnnnnnnnnnnnnnnnnnnnnnnnnnnnnnnnnnnnnnnnnnnnnnnnnnnnnnnnnnnnnnnnnnnnnnnnnnnnnnnnnnnnnnnnnnnnnnnnnnnnnnnnnnnnnnnnnnnnnnnnnnnnnnnnnnnnnnnnnnnnnnnnnnnnnnnnnnnnnnnnnnnnnnnnnnnnnnnnnnnnnnnnnnnnnnnnnnnnnnnnnnnnnnnnnnnnnnnnnnnnnnnnnnnnnnnnnnnnnnnnnnnnnnnnnnnnnnnnnnnnnnnnnnnnnnnnnnnnnnnnnnnnnnnnnnnnnnnnnnnnnnnnnnnnnnnnnnnnnnnnnnnnnnnnnnnnnnnnnnnnnnnnnnnnnnnnnnnnnnnnnnnnnnnnnnnnnnnnnnnnnnnnnnnnnnnnnnnnnnnnnnnnnnnnnnnnnnnnnnnnnnnnnnnnnnnnnnnnnnnnnnnnnnnnnnnnnnnnnnnnnnnnnnnnnnnnnnnnnnnnnnnnnnnnnnnnnnnnnnnnnnnnnnnnnnnnnnnnnnnnnnnnnnnnnnnnnnnnnnnnnnnnnnnnnnnnnnnnnnnnnnnnnnnnnnnnnnnnnnnnnnnnnnnnnnnnnnnnnnnnnnnnnnnnnnnnnnnnnnnnnnnnnnnnnnnnnnnnnnnnnnnnnnnnnnnnnnnnnnnnnnnnnnnnnnnnnnnnnnnnnnnnnnnnnnnnnnnnnnnnnnnnnnnnnnnnnnnnnnnnnnnnnnnnnnnnnnnnnnnnnnnnnnnnnnnnnnnnnnnnnnnnnnnnnnnnnnnnnnnnnnnnnnnnnnnnnnnnnnnnnnnnnnnnnnnnnnnnnnnnnnnnnnnnnnnnnnnnnnnnnnnnnnnnnnnnnnnnnnnnnnnnnnnnnnnnnnnnnnnnnnnnnnnnnnnnnnnnnnnnnnnnnnnnnnnnnnnnnnnnnnnnnnnnnnnnnnnnnnnnnnnnnnnnnnnnnnnnnnnnnnnnnnnnnnnnnnnnnnnnnnnnnnnnnnnnnnnnnnnnnnnnnnnnnnnnnnnnnnnnnnnnnnnnnnnnnnnnnnnnnnnnnnnnnnnnnnnnnnnnnnnnnnnnnnnnnnnnnnnnnnnnnnnnnnnnnnnnnnnnnnnnnnnnnnnnnnnnnnnnnnnnnnnnnnnnnnnnnnnnnnnnnnnnnnnnnnnnnnnnnnnnnnnnnnnnnnnnnnnnnnnnnnnnnnnnnnnnnnnnnnnnnnnnnnnnnnnnnnnnnnnnnnnnnnnnnnnnnnnnnnnnnnnnnnnnnnnnnnnnnnnnnnnnnnnnnnnnnnnnnnnnnnnnnnnnnnnnnnnnnnnnnnnnnnnnnnnnnnnnnnnnnnnnnnnnnnnnnnnnnnnnnnnnnnnnnnnnnnnnnnnnnnnnnnnnnnnnnnnnnnnnnnnnnnnnnnnnnnnnnnnnnnnnnnnnnnnnnnnnnnnnnnnnnnnnnnnnnnnnnnnnnnnnnnnnnnnnnnnnnnnnnnnnnnnnnnnnnnnnnnnnnnnnnnnnnnnnnnnnnnnnnnnnnnnnnnnnnnnnnnnnnnnnnnnnnnnnnnnnnnnnnnnnnnnnnnnnnnnnnnnnnnnnnnnnnnnnnnnnnnnnnnnnnnnnnnnnnnnnnnnnnnnnnnnnnnnnnnnnnnnnnnnnnnnnnnnnnnnnnnnnnnnnnnnnnnnnnnnnnnnnnnnnnnnnnnnnnnnnnnnnnnnnnnnnnnnnnnnnnnnnnnnnnnnnnnnnnnnnnnnnnnnnnnnnnnnnnnnnnnnnnnnnnnnnnnnnnnnnnnnnnnnnnnnnnnnnnnnnnnnnnnnnnnnnnnnnnnnnnnnnnnnnnnnnnnnnnnnnnnnnnnnnnnnnnnnnnnnnnnnnnnnnnnnnnnnnnnnnnnnnnnnnnnnnnnnnnnnnnnnnnnnnnnnnnnnnnnnnnnnnnnnnnnnnnnnnnnnnnnnnnnnnnnnnnnnnnnnnnnnnnnnnnnnnnnnnnnnnnnnnnnnnnnnnnnnnnnnnnnnnnnnnnnnnnnnnnnnnnnnnnnnnnnnnnnnnnnnnnnnnnnnnnnnnnnnnnnnnnnnnnnnnnnnnnnnnnnnnnnnnnnnnnnnnnnnnnnnnnnnnnnnnnnnnnnnnnnnnnnnnnnnnnnnnnnnnnnnnnnnnnnnnnnnnnnnnnnnnnnnnnnnnnnnnnnnnnnnnnnnnnnnnnnnnnnnnnnnnnnnnnnnnnnnnnnnnnnnnnnnnnnnnnnnnnnnnnnnnnnnnnnnnnnnnnnnnnnnnnnnnnnnnnnnnnnnnnnnnnnnnnnnnnnnnnnnnnnnnnnnnnnnnnnnnnnnnnnnnnnnnnnnnnnnnnnngactctcccgtagaagccgttctgcctcatcctcaccagattctcgctctagaactcccccaaggcgccggagaagtccttcagtgtcttccccggagccagtcgaaaagtcaaggtcttcacgccgacggcgctcagcttcatctccacgcactaagacaacctcaaggagaggccgctctccttcaccaaagcctcgtggactgcagaggtcccgttcccgctcaaggagagagaaaaccatatttcccgacgtcgagataggtctggatcttctcagtcaatctctcggcgaagacagcggagccggtcaaggtcacgggttactcggcgacggaggggaggctctggttatcactcaaggtcccctgcccggcaggaaagttcccggacctcctctcgacgccgaagaggccgctctcggacacccccaacgagtcggaagcgttctcgctcacggacatcaccagccccatggaaacgctctagatctcgagcctctccagccactcaccggcgatccannnnnnnnnnnnnnnnnnnnnnnnnnnnnnnnnnnnnnnnnnnnnnnnnnnnnnnnnnnnnnnnnnnnnnnnnnnnnnnnnnnnnnnnnnnnnnnnnnnnnnnnnnnnnnnnnnnnnnnnnnnnnnnnnnnnnnnnnnnnnnnnnnnnnnnnnnnnnnnnnnnnnnnnnnnnnnnnnnnnnnnnnnnnnnnnnnnnnnnnnnnnnnnnnnnnnnnnnnnnnnnnnnnnnnnnnnnnnnnnnnnnnnnnnnnnnnnnnnnnnnnnnnnnnnnnnnnnnnnnnnnnnnnnnnnnnnnnnnnnnnnnnnnnnnnnnnnnnnnnnnnnnnnnnnnnnnnnnnnnnnnnnnnnnnnnnnnnnnnnnnnnnnnnnnnnnnnnnnnnnnnnnnnnnnnnnnnnnnnnnnnnnnnnnnnnnnnnnnnnnctctagaatgggccaggctccttcacagtctcttctccctccagcacaggatcagccgaggtctcctgtgccttctgctttttcagaccagtcccgttctttgattgcccagaccacccccgtagcagggtctcagtccctttcctctggggcggtggcaacgaccacgtcctctgctggtgaccacaatggcatgctctctgtccctgcccccggggtgccccactctgatgtgggggagccacctgcctctactggggcccagcagccttctgcattagccgccctgcagccagcaaaggagcggcggagnnnnnnnnnnnnnnnnnnnnnnnnnnnnnnnnnnnnnnnnnnnnnnnnnnnnnnnnnnnnnnnnnnnnnnnnggctccagttctagcgactcggagggctctagccttcctgtgcaacctgaggtggcactaaagag

SEQ ID NO: 24997 - DNA, 3009 bp, Macaca Mulatta
  misc_feature (1)...(3009): n = A,T,C or G
agcccgggctccggcacgtagttgggaaacttgcgggtcctagaagtcgcctccccgcctcgccggccgcccttgcagccccaagccgagcagcaaagtgagacattgtgcgcctgccagatccgccggccgcggaccggggctgcctcggaaacacagaggggtcttctctcgccctgcatataattagcctgcacacaaagggagcagctgaatggaggttgtcactctctggaaaaggngatttctgaccgagcgcttccaatggacattctccagtctctctggaaagattctcgctaatggatttcctgctgctcggtctctgtctatactggctgctgaggaggccctcgggggtggtcttgtgtctgctgggggcctgctttcagatgctgcccgccgccnnnnnnnnnnnnnnnnnnnnnnnnnnnnnnnnnnnnnnnnnnnnnnnnnnnnnnnnnnnnnnnnnnnnnnnnnnnnnnnnnnnnnnnnnnnnnnnnnnnnnnnnnnnnnnnnnnnnnnnnnnnnnnnnnnnnnnnnnnnnnnnnnnnnnnnnnnnnnnnnnnnnnnnnnnnnnnnnnnnnnnnnnnnnnnnnnnnnnnnnnnnnnnnnnnnnnnnnnnnnnnnnnnnnnnnnnnnnnnnnnnnnnnnnnnnnnnnnnnnnnnnnnnnnnnnnnnnnnnnnnnnnnnnnnnnnnnnnnnnnnnnnnnnnnnnnnnnnnnnnnnnnnnnnnnnnnnnnnnnnnnnnnnnnnnnnnnnnnnnnnnnnnnnnnnnnnnnnnnnnnnnnnnnnnnnnnnnnnnnnnnnnnnnnnnnnnnnnnnnnnnnnnnnnnnnnnnnnnnnnnnnnnnnnnnnnnnnnnnnnnnnnnnnnnnnnnnnnnnnnnnnnnnnnnnnnnnnnnnnnnnnnnnnnnnnnnnnnnnnnnnnnnnnnnnnnnnnnnnnnnnnnnnnnnnnnnnnnnnnnnnnnnnnnnnnnnnnnnnnnnnnnnnnnnnnnnnnnnnnnnnnnnnnnnnnnnnnnnnnnnnnnnnnnnnnnnnnnnnnnnnnnnnnnnnnnnnnnnnnnnnnnnnnnnnnnnnnnnnnnnnnnnnnnnnnnnnnnnnnnnnnnnnnnnnnnnnnnnnnnnnnnnnnnnnnnnnnnnnnnnnnnnnnnnnnnnnnnnnnnnnnnnnnnnnnnnnnnnnnnnnnnnnnnnnnnnnnnnnnnnnnnnnnnnnnnnnnnnnnnnnnnnnnnnnnnnnnnnnnnnnnnnnnnnnnnnnnnnnnnnnnnnnnnnnnnnnnnnnnnnnnnnnnnnnnnnnnnnnnnnnnnnnnnnnnnnnnnnnnnnnnnnnnnnnnnnnnnnnnnnnnnnnnnnnnnnnnnnnnnnnnnnnnnnnnnnnnnnnnnnnnnnnnnnnnnnnnnnnnnnnnnnnnnnnnnnnnnnnnnnnnnnnnnnnnnnnnnnnnnnnnnnnnnnnnnnnnnnnnnnnnnnnnnnnnnnnnnnnnnnnnnnnnnnnnnnnnnnnnnnnnnnnnnnnnnnnnnnnnnnnnnnnnnnnnnnnnnnnnnnnnnnnnnnnnnnnnnnnnnnnnnnnnnnnnnnnnnnnnnnnnnnnnnnnnnnnnnnnnnnnnnnnnnnnnnnnnnnnnnnnnnnnnnnnnnnnnnnnnnnnnnnnnnnnnnnnnnnnnnnnnnnnnnnnnnnnnnnnnnnnnnnnnnnnnnnnnnnnnnnnnnnnnnnnnnnnnnnnnnnnnnnnnnnnnnnnnnnnnnnnnnnnnnnnnnnnnnnnnnnnnnnnnnnnnnnnnnnnnnnnnnnnnnnnnnnnnnnnnnnnnnnnnnnnnnnnnnnnnnnnnnnnnnnnnnnnnnnnnnnnnnnnnnnnnnnnnnnnnnnnnnnnnnnnnnnnnnnnnnnnnnnnnnnnnnnnnnnnnnnnnnnnnnnnnnnnnnnnnnnnnnnnnnnnnnnnnnnnnnnnnnnnnnnnnnnnnnnnnnnnnnnnnnnnnnnnnnnnnnnnnnnnnnnnnnnnnnnnnnnnnnnnnnnnnnnnnnnnnnnnnnnnnnnnnnnnnnnnnnnnnnnnnnnnnnnnnnnnnnnnnnnnnnnnnnnnnnnnnnnnnnnnnnnnnnnnnnnnnnnnnnnnnnnnnnnnnnnnnnnnnnnnnnnnnnnnnnnnnnnnnnnnnnnnnnnnnnnnnnnnnnnnnnagttctgtcaacagattcagtccccagtcctccttctctgagcagacctctcatccgcagcatatacctgctagatcttctaagagctaacatggagacttctggaagaaggtgggagagaagtccatctcggcttgattaaccatgtatcacatcatattactcccatcttaaaagtgcacccgttgtttttctaagccctcacacaaagggtactactgtggtcccatnnnnnnnnnnnnnnnnnnnnnnnnnnnnnnnnnnnnnnnnnnnnnnnnnnnnnnnnnnnnnnnnnnnnnnnnnnnnnnnnnnnnnnnnnnnnnnnnnnnnnnnnnnnnnnnnnnnnnnnnnnnnnnnnnnnnnnnnnnnnnnnnnnnnnnnnnnnnnnnnnnnnnnnnnnnnnnnnnnnnnnnnnnnnnnnnnnnnnnnnnnnnnnnnnnnnnnnnnnnnnnnnnnnnnnnnnnnnnnnnnnnnnnnnnnnnnnnnnnnnnnnnnnnnnnnnnnnnnnnnnnnnnnnnnnnnnnnnnnnnnnnnnnnnnnnnnnnnnnnnnnnnnnnnnnnnnnnnnnnnnnnnnnnnnnnnnnnnnnnnnnnnnnnnnnnnnnnnnnnnnnnnnnnnnnnnnnnnnnnnnnnnnnnnnnnnnnnnnnnnnnnnnnnnnnnnnnnnnnnnnnnnnnnnnnnnnnnnnnnnnnnnnnnnnnnnnnnnnnnnnnnnnnnnnnnnnnnnnnnnnnnnnnnnnnnnnnnnnnnnnnatcttctctgtagttcaatgctttcactgacagtttggctcaaaaagtatgagtgtggtaaatattaaagaatgttaataca

SEQ ID NO: 24998 - DNA, 666 bp, Macaca Mulatta
gacacttagaagctaatggcttttctagatttgtctggaatgaaatctccttggtattatccatattttaaggcactaaatggatactaccacttggtaggaagccaaaaggaacatgaaaagtgactagagattaaagattaaaccagtttacttaacaaggcttcaggagagaagctaaagcagtgtttacgtaactggatttggggccacctggatcaaaatcacgtgggctccatgttaaaaatacagatttctggcccctgtttataaatctctaggaaaggactaatctgcatcttttagcaacccaccaggcgattctcaaaaagtctaaagtttgagaaccactggtagataactgagaaaatgcagaaggcagacagggaaagaacaaagccaaataaagaatggaagggaaataacttgttacgatagggtggctgaggaaaagaaggatgcaatacataactgaggtactgctttggttttctttaaatctctgtgtaacaaaagttaaggccactagagaagcttaataacctaattctagtaaaggagaacagtggaaagatacctacctcaaacttcacatcattatttgaaaatactcaagatgtactccctcagagcaacagtatgagcaacataccctatcagatgaca

SEQ ID NO: 24999 - DNA, 466 bp, Macaca Mulatta
tgtcacaataaaacgaatgaatgaaaatggttaggatgttacaaatatattttcctaaacaatttatccccatttctccgtttatcctgatgcataaacagaagctgtgtcatgtggagggcggggaggtccctctccattccctacaggtttcattctgaggcttgcagagttccagtgtttaccaaggtttgcccaaatccaagatctagtgggaggggaaagagcaaatgtctgctcggaggagggttgtgtgttgacctttggaggtaaaatatgttctgttgttcagctggatttgcagtggcagaaatgaaactaggtgtgtgaaacacccgcagacatttggaattggcttttcagctcgccccagtggtagtaaatccatgtgaaattgcagagggtacaaggacagcaagtaggatggaacttgcaactcgaccctgttgttaaaaagcaccaatgg

SEQ ID NO: 25000 - DNA, 1121 bp, Macaca Mulatta
  misc_feature (1)...(1121): n = A,T,C or G
tcagggaaggaaagccccccagtaagcgatactccagatgagggcgatgagcccatgccgatccccgaggacctctccaccacctcgggaggacagcaaagctccaagagtgacagagttgtggnnnnnnnnnnnnnnnnnnnnnnnnnnnnnnnnnnnnnnnnnnnnnnnnnnnnnnnnnnnnnnnnnnnnnnnnnnnnnnnnnnnnnnnnnnnnnnnnnnnnnnnnnnnnnnnnnnnnnnnnnnnnnnnnnnnnnnnnnnnnnnnnnnnnnnnnnnnnnnnnnnnnnnnnnnnnnnnnnnnnnnnnnnnnnnnnnnnnnnnnnnnnnnnnnnnnnnnnnnnnnnnnnnnnnnnnnnnnnnnnnnnnnnnnnnnnnnnnnnnnnnnnnnnnnnnnnnnnnnnnnnnnnnnnnnnnnnnnnnnnnnnnnnnnnnnnnnnnnnnnnnnnnnnnnnnnnnnnnnnnnnnnnnnnnnnnnnnnnnnnnnnnnnnnnnnnnnnnnnnnnnnnnnnnnnnnnnnnnnnnnnnnnnnnnnnnnnnnnnnnnnnnnnnnnnnnnnnnnnnnnnnnnnnnnnnnnnnnnnnnnnnnnnnnnnnnnnnnnnnnnnnnnnnnnnnnnnnnnnnnnnnnnnnnnnnnnnnnnnnnnnnnnnnnnnnnnnnnnnnnnnnnnnnnnnnnnnnnnnnnnnnnnnnnnnnnnnnnnnnnnnnnnnnnnnnnnnnnnnnnnnnnnnnnnnnnnnnnnnnnnnnnnnnnnnnnnnnnnnnnnnnnnnnnnnnnnnnnnnnnnnnnnnnnnnnnnnnnnnnnnnnnnnnnngggacaagggcctgtccgacacgccctacgacagcagcgccagctacgagaaggagaacgaaatgatgaagtcccacgtgatggaccaagccatcaacaacgccatcaactacctgggggccgagtccctgcgcccgctggtgcagacgcccccgggcggctccgaggtggtcccggtcatcagccccatgtaccagctgcacaagccgctcggcgaaggcaccccgcgctccaaacactcgcccagacagcgccgtggagaactgctgctgctctccaaggncaattggtgccctcggaacgcgagc

SEQ ID NO: 25001 - DNA, 1049 bp, Macaca Mulatta
  misc_feature (1)...(1049): n = A,T,C or G
cagggtcacccacatcttgaacatggcccgggagattgacaacttctaccctgagcgcttcacctaccacaatgtgcgcctctgggatgaggagtnnnnnnnnnnnnnnnnnnnnnnnnnnnnnnnnnnnnnnnnnnnnnnnnnnnnnnnnnnnnnnnnnnnnnnnnnnnnnnnnnnnnnnnnnnnnnnnnnnnnnnnnnnnnnnnnnnnnnnnnnnnnnnnnnnnnnnnnnnnnnnnnnnnnnnnnnnnnnnnnnnnnnnnnnnnnnnnnnnnnnnnnnnnnnnnnnnnnnnnnnnnnnnnnnnnnnnnnnnnnnnnnnnnnnnnnnnnnnnnnnnnnnnnnnnnnnnnnnnnnnnnnnnnnnnnnnnnnnnnnnnnnnnnnnnnnnnnnnnnnnnnnnnnnnnnnnnnnnnnnnnnnnnnnnnnnnnnnnnnnnnnnnnnnnnnnnnnnnnnnnnnnnnnnnnnnnnnnnnnnnnnnnnnnnnnnnnnnnnnnnnnnnnnnnnnnnnnnnnnnnnnnnnnnnnnnnnnnnnnnnnnnnnnnnnnnnnnnnnnnnnnnnnnnnnnnnnnnnnnnnnnnnnnnnnnnnnnnnnnnnnnnnnnnnnnnnnnnnnnnnnnnnnnnaggttttctcttcccatgagtcttcacatgaagagcctccacagcccttcccacagctcgcaaggaccaagggaagccagcaggtgggcaaggggcctcagcctgccctaaagtcctgccagtcagtggttgccctccagggcagtaccctggtggccaaccagacccgggccttccaggagcaggagcaggggcaagggcagggagagccctgcgtttcctctacgcccaggttccggaaggtggtgaggcaggccagcgtggacgacagcggagaggagggtgaggcctgagccctcacacatgcccacgttcccctagacactaaatagaggatccacaactctttggagaaacaccctcacgtctgtcgctgcacattcttctcagctccgccccaaaagcctgtcactacagcctcacctc

SEQ ID NO: 25002 - DNA, 510 bp, Macaca Mulatta
  misc_feature (1)...(510): n = A,T,C or G
ggacactcagagattctgattcagttgttatggagtgatgtctaagcatctatattgtttttaaaagctccaccaactacacaactatacaccaaatataacattgtctataatcaaatatttttcaaacattaggttacttcagcaccagtaggaaaatagaagaaacagagatacccaaaccctgcccaattctgctaaatcagattttctgggctaaggatactgataccatttttattaataatctctacagatttttcatggtgtccatcaaagtttgataaacactgatttaataataaactgtcgggggagcggggagggattgcattgggagttatacctgatgtaaatgacgagttgatggatgctgacgagttgatgggtgcagcgcaccaacatggcacaggtatacatgtgtggcagacctgcacgttgtgcacatgtaccctagaacttaaagtataataannnnnnnnnnnnnnnnnnnnnnnnnnnnnnnntgtc

SEQ ID NO: 25003 - DNA, 197 bp, Macaca Mulatta
gcctcggcctcccaaagtgctaggattacaggtgtgagccactgagccagtcagcattagtaatttttaaaaatactttatcagtatttaaaaaacgttaatgcaggagaaaagatatcacaactctttatggaaaatgacatttccatttgccttattgctacttcaagctctttaaatcgccatcttccctgttt

SEQ ID NO: 25004 - DNA, 122 bp, Macaca Mulatta
ttaagttttataagaagaccaaacagctgccagtcttagtaaaatgctgtgaagagatccagccacatcagtggaagctacctatagacagagaagaacaccggctcccattctggttaaag

SEQ ID NO: 25005 - DNA, 364 bp, Macaca Mulatta
gaggggagccccaagagctgcctcagaagcgggagccttgctccatctcctagctctagacaacataccagctacctggacgttgctatgagaagctgcccttcccatccctaccccagtgggacctggagtccagctcagcagtttccatgcccccaggcatctcccgtggggccagcaggacccaggttggggggtggggccatgccaggaagctcagccatgcagggccttgaatggcagatcttgcagccaggtgcccaggacagaagccccagccccagcctcatctacaccccaggagccctggcctggtgagagggagtgggctcgggcctgggcaagggtgggcagcctccagggc

SEQ ID NO: 25006 - DNA, 390 bp, Macaca Mulatta
tcccaggcctggtcccaaagcaccttctgcatcctttgggcaggctgagcatctttcctccagcaaaaaccccagacagcaaggatgtggacagcaacgacctggagagacaaggcctgctttcgggcgccgctgcctccacagaggagccctgaggtccctgcctgcacttgccctgcctgccagcctcccgttggaccccacagtagctgtgcctcgattcctctttggctgtcctcggggactccggctgaggcgcgtctgccacttttgcattcccggctggagagctggcaggaccctgtggctgggctacgaatggagctgtcagcactctgcgtgggaagcctgggcctgttctaagccccactcaaggctgccccagcctgg

SEQ ID NO: 25007 - DNA, 739 bp, Macaca Mulatta
gcggtgcatgcagcacccacctagcgggcctggcaattgcttgtcattaaaagaaaaaaaaaattacggagggctccgggggtgtgtgttggagaggggagaccgatgcttctaacccagcccccgctttgacggcgtgttgtgcagctgagcgcgaggccaacgttgagcaaggccttgcagagaggttgctcctgtgtaattccgaaagaaggctagtccgaaggtgcaaaatagcagggagaggacgcgcccccttaggaacaagacctctggatgtttctagtttcgaattgaaaggagaggggcgccccccttgtttgaaaataaataaataagtgcgagctacgagggtggcgccgcggtggtttcttcggccgaaggcgacacctcgcggagactgagcagaaagcggagctgcccggcctcggcgcggacctggagggctgccactccgcaagtctcccgccatccccgtgggactgtccacgagtcctcaccactgcggaggggaggcggcctggctctgcttccgagggggaatgggcgtacgttccctgcagccgtccccagggctcccaagttaaccttttacaagccaccattcttcccaattatgggcaggcgaatctgatttccagagatggaactgctgtccacaccttcctgagatccagccctcggctcaaaaagctttgattccgaatatgttgaagggaaaaagaaagctgctgtcact

SEQ ID NO: 25008 - DNA, 115 bp, Macaca Mulatta
tgcagggctctggtggatgaactagaatgggaaattgcccaggtggaccccaagaagactattcagatgggatctttccggatcaatccagatggcagccagtcagtggtggagg

SEQ ID NO: 25009 - DNA, 831 bp, Macaca Mulatta
  misc_feature (1)...(831): n = A,T,C or G
gggtacccagtacctgcgaacggaggaggaactgtgagcggcatgtgcagatacaatgctcctgagaagacagcattttccacaggaggctgtttccttccctggtgcatttatttaagagacggtcctttctggatacagagaaatgaaccaacagtgacctctccaggttggcacttcccacttctgtacagtggcaaaacgatgatgtgtaagcttgctgtttattgtactttgtatatttcctcttcaaagtcttacacactctatcctctgcactgttaatagtaacctatgacataattgtaaatattcagctttttgataacttttgtattttgaaatactttaaaataaaattgttgactagatatttnnnnnnnnnnnnnnnnnnnnnnnnnnnnnnnnnnnnnnnnnnnnnnnnnnnnnnnnnnnnnnnnnnnnnnnnnnnnnnnnnnnnnnnnnnttttgggggcccccgggcccnnnnnnnnnnnnnnnnnnnnnnnnnnnngggccccgggccccaaagggaaagaaaaaagggccaaagcgtttcccaagagaaaaccggggccaaaaaaaaggggttgggatctccnnnnnnnnnnnnnnnnnnnnnngggggcaaaccagggnnnnnnnnnnnnnnnnnnnnngggggattcccaaggggcttttttcgggggattcttaccaaaagggggtttccaaggggaagcctnnnnnnnnnnnnnnnnnnnnnnccgcccctgtggcatttttnnnnnnnnnnnnnnnnnnnnnagaatttccattaaaaacctctttcccccccaaatgggagaaccc

SEQ ID NO: 25010 - DNA, 824 bp, Macaca Mulatta
  misc_feature (1)...(824): n = A,T,C or G
ggctccacagagtaaatgttgtgttgtctgtcttcattttgtatgagctggaccttccattctagaattatgagaccaccttggagaaaggtgtgtggtacatgacgctgggttacatcataacgtgcttccagatcatagtgttcagtgtcctctgaagtaagtgcctgttgcctctgctgccctttgaaccagtgtacagtcgccagatagggaccggtgaacacctgattccaaacatgtaggatgggggtcttgtcctctttttatgtggtttaattgccaagtgtctaaagcttaatatgctgtgctatgtaaatattttatggatataacactgtcatattttgatgtcaacagagttttagggataaaatggtacccggccaacatcaagtgactttatagctgcaagaaatgtggtatgtggagaagttctgtatgtgannnnnnnnnnnnnnnnnnnnnnnnngtgtgtttggaaaattgcccagacatagaaaagcgggaatggggaaccaacccttgtggggccgccctctgcccgcaaaaaaggctttctaaaacccattccttttgggacgccggggacgcagtagggatgggggagccgtgcggagaatagcggttttcccgagaaagaaaaacgggggcacggaggcgaccgtattagatcgcctcccgccaagtaagaaagccacgcgagagcggggacagtacacggagccgagttgtgtgagaaaaacacttccgaggtgtcaggacgcgcagaaaccacaaagtattgcccggagagcctggatgtacacaaggtgacgaancag

SEQ ID NO: 25011 - DNA, 373 bp, Macaca Mulatta
ggcttggaaaaataacattaaaaagtgtctaaatcttgatctgcctatcaaaaagtccagcctcatgttgaaagcagtaaaacttttataagcgattaaagttgttaatttttggtagtccttaaacaaaattacttaacataaaagtttcttaaatgctttttaaaagctgtcctttactgaattgcatattattagattatttgtattcttcttgcattttgggtagtcctgagcagacataagagaggaaataaaaaaagaatcaataacatttttagcataaccagatgtgaattccccacatcaatctggcatggggaaatgattatgaagtaatgtgagactttgaatttgtgcatatatggtatca

SEQ ID NO: 25012 - DNA, 834 bp, Macaca Mulatta
ggggttaattgcggtcccgcgggtctgtctcttgcttcaacagtgtttggacggaacagatccggggactctttcttccagcctccgagcgccctccgatttcctctccacttgcaacctccgggaccatcttctcggccatctcctgcttctgggacctgccagcaccgtttttgtggttagctccgtcttgccgaccaaccatgagctcccagattcgtcagaattattccaccgacgtggaggcagccgtcaacagcctggtcaatatgtacctgcaggcctcctacacctacctctctctgggcttctatttcgaccgcgatgatgtggctctggaaggcgtgagccacttcttccccgaattgtccgacgagaagcgcgagggctacgagcgtctcctgaaaatgcaaaaccagcctggcggccgcgctctttttctagacgtccagaagccagctgaagatgaatggggtaaaaccccggatgccatgaaagccgccatggccctggataaaaaactgaatcctgcccttttggatcttcatgccctgggttctgcccccacggatccccatctctgtcaacttccttgaatactccctttccttaatgaagtaatttaagcctcctccaacaaaatgggttgaccaccctgaaccaaccctcatccaggcttggccctgtcccggaaggcttggactcgggcccaaatttcccccttccaaaaagtctccattccccattccccaactaagaaacctttccggaaacccacactcaccttccttaaaagggcgccctttctaacaaaatattacggtgcttcttccc

SEQ ID NO: 25013 - DNA, 4099 bp, Macaca Mulatta
  misc_feature (1)...(4099): n = A,T,C or G
gggctgggcgcgcccggccgcgacgcccgggatccagattgcgggttcagnnnnnnnnnnnnnnnnnnnnnnnnnnnnnnnnnnnnnnnnnnnnnnnnnnnnnnnnnnnnnnnnnnnnnnnnnnnnnnnnnnnnnnnnnnnnnnnnnnnnnnnnnnnnnnnnnnnnnnnnnnnnnnnnnnnnnnnnnnnnnnnnnnnnnnnnnnnnnnnnnnnnnnnnnnnnnnnnnnnnnnnnnnnnnnnnnnnnnnnnnnnnnnnnnnnnnnnnnnnnnnnnnnnnnnnnnnnnnnnnnnnnnnnnnnnnnnnnnnnnnnnnnnnnnnnnnnnnnnnnnnnnnnnnnnnnnnnnnnnnnnnnnnnnnnnnnnnnnnnnnnnnnnnnnnnnnnnnnnnnnnnnnnnnnnnnnnnnnnnnnnnnnnnnnnnnnnnnnnnnnnnnnnnnnnnnnnnnnnnnnnnnnnnnnnnnnnnnnnnnnnnnnnnnnnnnnnnnnnnnnnnnnnnnnnnnnnnnnnnnnnnnnnnnnnnnnnnnnnnnnnnnnnnnnnnnnnnnnnnnnnnnnnnnnnnnnnnnnnnnnnnnnnnnnnnnnnnnnnnnnnnnnnnnnnnnnnnnnnnnnnnnnnnnnnnnnnnnnnnnnnnnnnnnnnnnnnnnnnnnnnnnnnnnnnnnnnnnnnnnnnnnnnnnnnnnnnnnnnnnnnnnnnnnnnnnnnnnnnnnnnnnnnnnnnnnnnnnnnnnnnnnnnnnnnnnnnnnnnnnnnnnnnnnnnnnnnnnnnnnnnnnnnnnnnnnnnnnnnnnnnnnnnnnnnnnnnnnnnnnnnnnnnnnnnnnnnnnnnnnnnnnnnnnnnnnnnnnnnnnnnnnnnnnnnnnnnnnnnnnnnnnnnnnnnnnnnnnnnnnnnnnnnnnnnnnnnnnnnnnnnnnnnnnnnnnnnnnnnnnnnnnnnnnnnnnnnnnnnnnnnnnnnnnnnnnnnnnnnnnnnnnnnnnnnnnnnnnnnnnnnnnnnnnnnnnnnnnnnnnnnnnnnnnnnnnnnnnnnnnnnnnnnnnnnnnnnnnnnnnnnnnnnnnnnnnnnnnnnnnnnnnnnnnnnnnnnnnnnnnnnnnnnnnnnnnnnnnnnnnnnnnnnnnnnnnnnnnnnnnnnnnnnnnnnnnnnnnnnnnnnnnnnnnnnnnnnnnnnnnnnnnnnnnnnnnnnnnnnnnnnnnnnnnnnnnnnnnnnnnnnnnnnnnnnnnnnnnnnnnnnnnnnnnnnnnnnnnnnnnnnnnnnnnnnnnnnnnnnnnnnnnnnnnnnnnnnnnnnnnnnnnnnnnnnnnnnnnnttcttgccagctctcattactgcagttctgactaatcatcttgcctgggttccaacagtcatgccaaatggacagccacctataaaaatatttttagaaaagcattcctctcagnnnnnnnnnnnnnnnnnnnnnnnnnnnnnnnnnnnnnnnnnnnnnnnnnnnnnnnnnnnnnnnnnnnnnnnnnnnnnnnnnnnnnnnnnnnnnnnnnnnnnnnnnnnnnnnnnnnnnnnnnnnnnnnnnnnnnnnnnnnnnnnnnnnnnnnnnnnnnnnnnnnnnnnnnnnnnnnnnnnnnnnnnnnnnnnnnnnnnnnnnnnnnnnnnnnnnnnnnnnnnnnnnnnnnnnnnnnnnnnnnnnnnnnnnnnnnnnnnnnnnnnnnnnnnnnnnnnnnnnnnnnnnnnnnnnnnnnnnnnnnnnnnnnnnnnnnnnnnnnnnnnnnnnnnnnnnnnnnnnnnnnnnnnnnnnnnnnnnnnnnnnnnnnnnnnnnnnnnnnnnnnnnnnnnnnnnnnnnnnnnnnnnnnnnnnnnnnnnnnnnnnnnnnnnnnnnnnnnnnnnnnnnnnnnnnnnnnnnnnnnnnnnnnnnnnnnnnnnnnnnnnnnnnnnnnnnnnnnnnnnnnnnnnnnnnnnnnnnnnnnnnnnnnnnnnnnnnnnnnnnnnnnnnnnnnnnnnnnnnnnnnnnnnnnnnnnnnnnnnnnnnnnnnnnnnnnnnnnnnnnnnnnnnnnnnnnnnnnnnnnnnnnnnnnnnnnnnnnnnnnnnnnnnnnnnnnnnnnnnnnnnnnnnnnnnnnnnnnnnnnnnnnnnnnnnnnnnnnnnnnnnnnnnnnnnnnnnnnnnnnnnnnnnnnnnnnnnnnnnnnnnnnnnnnnnnnnnnnnnnnnnnnnnnnnnnnnnnnnnnnnnnnnnnnnnnnnnnnnnnnnnnnnnnnnnnnnnnnnnnnnnnnnnnnnnnnnnnnnnnnnnnnnnnnnnnnnnnnnnnnnnnnnnnnnnnnnnnnnnnnnnnnnnnnnnnnnnnnnnnnnnnnnnnnnnnnnnnnnnnnnnnnnnnnnnnnnnnnnnnnnnnnnnnnnnnnnnnnnnnnnnnnnnnnnnnnnnnnnnnnnnnnnnnnnnnnnnnnnnnnnnnnnnnnnnnnnnnnnnnnnnnnnnnnnnnnnnnnnnnnnnnnnnnnnnnnnnnnnnnnnnnnnnnnnnnnnnnnnnnnnnnnnnnnnnnnnnnnnnnnnnnnnnnnnnnnnnnnnnnnnnnnnnnnnnnnnnnnnnnnnnnnnnnnnnnnnnnnnnnnnnnnnnnnnnnnnnnnnnnnnnnnnnnnnnnnnnnnnnnnnnnnnnnnnnnnnnnnnnnnnnnnnnnnnnnnnnnnnnnnnnnnnnnnnnnnnnnnnnnnnnnnnnnnnnnnnnnnnnnnnnnnnnnnnnnnnnnnnnnnnnnnnnnnnnnnnnnnnnnnnnnnnnnnnnnnnnnnnnnnnnnnnnnnnnnnnnnnnnnnnnnnnnnnnnnnnnnnnnnnnnnnnnnnnnnnnnnnnnnnnnnnnnnnnnnnnnnnnnnnnnnnnnnnnnnnnnnnnnnnnnnnnnnnnnnnnnnnnnnnnnnnnnnnnnnnnnnnnnnnnnnnnnnnnnnnnnnnnnnnnnnnnnnnnnnnnnnnnnnnnnnnnnnnnnnnnnnnnnnnnnnnnnnnnnnnnnnnnnnnnnnnnnnnnnnnnnnnnnnnnnnnnnnnnnnnnnnnnnnnnnnnnnnnnnnnnnnnnnnnnnnnnnnnnnnnnnnnnnnnnnnnnnnnnnnnnnnnnnnnnnnnnnnnnnnnnnnnnnnnnnnnnnnnnnnnnnnnnnnnnnnnnnnnnnnnnnnnnnnnnnnnnnnnnnnnnnnnnnnnnnnnnnnnnnnnnnnnnnnnnnnnnnnnnnnnnnnnnnnnnnnnnnnnnnnnnnnnnnnnnnnnnnnnnnnnnnnnnnnnnnnnnnnnnnnnnnnnnnnnntgtgtaatgcatcttgaagaccggttgcaggagctatacttcaaaagtaaaatgctgtctgaatacctgagggggcagatgcgtgttcatgtcaaggagctgggagtggttctgggnnnnnnnnnnnnnnnnnnnnnnnnnnnnnnnnnnnnnnnnnnnnnnnnnnnnnnnnnnnnnnnnnnnnnnnnnnnnnnnnnnnnnnnnnnnnnnnnnnnnnnnnnnnnnnnnnnnnnnnnnnnnnnnnnnnnnnnnnnnnnnnnnnnnnnnnnnnnnnnnnnnnnnnnnnnnnnnnnnnnnnnnnnnnnnnnnnnnnnnnnnnnnnnnnnnnnnnnnnnnnnnnnnnnnnnnnnnnnnnnngctttttctttttgactgcacttttgggtggtggtagatttttaaacaaatgaaattaaagcaacaataattttgaagcatttgaaaaagccaaagtgtatggtagaaatttctacaaaatgaatattatcaagagtttcatgtgatcactgcagtgttgtcacaactcataaatagcaacaatgtctcacgatttaatggctcagaaatagctatttcattagtttttaatttttaatttctaaggtacagagatctataaaaccttgattatttgttagttttgcaattcaaaacagctaatttctggttatttctcaaaataagtattttaaacaacctattaattataacaaactcagaataattgagtgtaaatgtgttatgttatccacccaagtgtacatatgtacctattttttttaaaaagcagaggtagaaatacaagattggtaaacatgccctttaaaaatatatat

SEQ ID NO: 25014 - DNA, 1065 bp, Macaca Mulatta
  misc_feature (1)...(1065): n = A,T,C or G
tagaggatgcagatagtttgcgggcacaggagcnnnnnnnnnnnnnnnnnnnnnnnnnnagggacaccgagctgggctgccagaggacatggggcctgagcctgttggaatctacaacaacattgatcgctttgggattgtgcnnnnnnnnnnnnnnnnnnnnnnnnnnnnnnnnnnnnnnnnnaaatgcggcgggagataacacaaaagagcaagtggaaggaaatgctgcgacaatgggagacatataagaacagtannnnnnnnnnnntcgagtatataagggcattcccatgaacatccggggccaagtgtggtcagtcctgctgaacatacaggaagtcaagtcgaaaaaccccagaacatacnnnnnnnnnnnnnnnnnnnnnnnnnnnnnnnnnnnnnnnnnnnnnnnnnnnnnnnnnnnnnnnnnnnnnnnnnnnnnnnnnnnnnnnnnnnnnnnnnnnnnnnnnnnnnnnnnnnnnnnnnnnnnnnnnnnnnnnnnnnnnnnnnnnnnnnnnnnnnnnnnggaggtgggctactgcagggacctgagccacatcgcggccttgtttctcctttatctgcatgaggannnnnnnnnnnnnnnnnnnnnnnnnnnnnnnnnnnnnnnnnnnnnnnnnnnncaggattccacagccgaaatggcgggacagtccagcggctccaagaccatcaggagcatgtggtccccacgtcacaacccaagaccatgtggcntcaggacaaggaaggtctttgcgcgcagggatacctcgttaggctggcttctcnnnnnnnnnnnnnnnngatctctcttgggctcatcctgcgcctgtgggacgtgtatttgctggaaggagaacaggtgttgatgccgatgacaagcattgcctttaaagttcagnnnnngcgcctcatgaagacatccaggtctggcctgtgggcacggtttcggaacctgttcttccatacctgggagttggatgatgactctgtgctcaagcatcttagggcctctatgaagaaactaacaaggaagcaaggggacctgccacccccagg

SEQ ID NO: 25015 - DNA, 3571 bp, Macaca Mulatta
  misc_feature (1)...(3571): n = A,T,C or G
atacagaggcaccgcaaggcccttctgagcaaggtggnaggtggaggccacccgcgggggtgggcgccccgccaggaccgtcgccctagaccggctcttcctgcctctctcccgggtgtctgtcccaccccgggtctccatcaccattggggtggccggcatgggcaagaccaccctggtgaggcacttcgtccgcctctgggcccatgggcaggtcggcaaggacttctcgctggtgctgcctctgaccttccgagatctcaacacccacgagaagctgtgtgctgaccgactcatctgctccgtcttctcgcacatcggcgagcccagcctggcggtggcagtcccnnnnnnnnnnnnnnnnnnnnnnnnnnnnnnnnnnnnnnnnnnnnnnnnnnnnnnnnnnnnnnnnnnnnnnnnnnnnnnnnnnnnnnnnnnnnnnnnnnnnnnnnnnnnnnnnnnnnnnnnnnnnnnnnnnnnnnnnnnnnnnnnnnnnnnnnnnnnnnnnnnnnnnnnnnnnnnnnnnnnnnnnnnnnnnnnnnnnnnnnnnnnnnnnnnnnnnnnnnnnnnnnnnnnnnnnnnnnnnnnnnnnnnnnnnnnnnnnnnnnnnnnnnnnnnnnnnnnnnnnnnnnnnnnnnnnnnnnnnnnnnnnnnnnnnnnnnnnnnnnnnnnnnnnnnnnnnnnnnnnnnnnnnnnnnnnnnnnnnnnnnnnnnnnnnnnnnnnnnnnnnnnnnnnnnnnnnnnnnnnnnnnnnnnnnnnnnnnnnnnnnnnnnnnnnnnnnnnnnnnnnnnnnnnnnnnnnnnnnnnnnnnnnnnnnnnnnnnnnnnnnnnnnnnnnnnnnnnnnnnnnnnnnnnnnnnnnnnnnnnnnnnnnnnnnnnnnnnnnnnnnnnnnnnnnnnnnnnnnnnnnnnnnnnnnnnnnnnnnnnnnnnnnnnnnnnnnnnnnnnnnnnnnnnnnnnnnnnnnnnnnnnnnnnnnnnnnnnnnnnnnnnnnnnnnnnnnnnnnnnnnnnnnnnnnnnnnnnnnnnnnnnnnnnnnnnnnnnnnnnnnnnnnnnnnnnnnnnnnnnnnnnnnnnncacctgtccctgcaggagtttgtggcagccgcgtattactatggcgcatccaggagggccatcttcgacctctttactgagagcggcgtatcctggcccaagctgggtttcctcacgcatttcaggagcgcagcccagcgggccatgcaggcagaggacgggagtgctggacgtgttcctacgcttcctctccggcctcttgtctccgagggtcaatgccctcctggctggctccctcctggcccaaggcgagcaccaggnnnnnnnnnnnnnnnnnnnnnnnnnnnnnnnnnnnnnnnnnnnnnnnnnnnnnnnnnnnnnnnnnnnnnnnnnnnnnnnnnnnnnnnnnnnnnnnnnnnnnnnnnnnnnnnnnnnnnnnnnnnnnnnnnnnnnnnnnnnnnnnnnnnnnnnnnnnnnnnnnnnnnnnnnnnnnnnnnnnnnnnnnnnnnnnnnnnnnnnnnnnnnnnnnnnnnnnnnnnnnnnnnnnnnnnnnnnnnnnnnnnnnnnnnnnnnnnnnnnnnnnnnnnnnnnnnnnnnnnnnnnnnnnnnnnnnnnnnnnnnnnnnnnnnnnnnnnnnnnnnnnnnnnnnnnnnnnnnggaaggggcagaggagagagcagaaacggtcccctccccaccaccgagcttctccatcagtcttctagggctgctgtaacagaggaccatgaacttagtggcttaaaacaactgaagtgtgttttctcgcagttctagaggccagaagtctcaaatcaaggtgccaggagggccacgtgctctctgaaacatataggagaggttccctcctgcctctctagcttctggtgtttgacggcaacccttggctaaaggctgcattactccagtctctgccccattgcctggccatcttctccctgtgtctgtctccacatggtgctgtcctctnnnnnnnnnnnnnnnnnnnnnnnnnnnnnnnnnnnnnnnnnnnnnnnnnnnnnnnnnnnnnnnnnnnnnnnnnnnnnnnnnnnnnnnnnnnnnnnnnnnnnnnnnnnnnnnnnnnnnnnnnnnnnnnnnnnnnnnnnnnnnnnnnnnnnnnnnnnnnnnnnnnnnnnnnnnnnnnnnnnnnnnnnnnnnnnnnnnnnnnnnnnnnnnnnnnnnnnnnnnnnnnnnnnnnnnnnnnnnnnnnnnnnnnnnnnnnnnnnnnnnnnnnnnnnnnnnnnnnnnnnnnnnnnnnnnnnnnnnnnnnnnnnnnnnnnnnnnnnnnnnnnnnnnnnnnnnnnnnnnnnnnnnnnnnnnnnnnnnnnnnnnnnnnnnnnnnnnnnnnnnnnnnnnnnnnnnnnnnnnnnnnnnnnnnnnnnnnnnnnnnnnnnnnnnnnnnnnnnnnnnnnnnnnnnnnnnnnnnnnnnnnnnnnnnnnnnnnnnnnnnnnnnnnnnnnnnnnnnnnnnnnnnnnnnnnnnnnnnnnnnnnnnnnnnnnnnnnnnnnnnnnnnnnnnnnnnnnnnnnnnnnnnnnnnnnnnnnnnnnnnnnnnnnnnnnnnnnnnnnnnnnnnnnnnnnnnnnnnnnnnnnnnnnnnnnnnnnnnnnnnnnnnnnnnnnnnnnnnnnnnnnnnnnnnnnnnnnnnnnnnnnnnnnnnnnnnnnnnnnnnnnnnnnnnnnnnnnnnnnnnnnnnnnnnnnnnnnnnnnnnnnnnnnnnnnnnnnnnnnnnnnnnnnnnnnnnnnnnnnnnnnnnnnnnnnnnnnnnnnnnnnnnnnnnnnnnnnnnnnnnnnnnnnnnnnnnnnnnnnnnnnnnnnnnnnnnnnnnnnnnnnnnnnnnnnnnnnnnnnnnnnnnnnnnnnnnnnnnnnnnnnnnnnnnnnnnnnnnnnnnnnnnnnnnnnnnnnnnnnnnnnnnnnnnnnnnnnnnnnnnnnnnnnnnnnnnnnnnnnnnnnnnnnnnnnnnnnnnnnnnnnnnnnnnnnnnnnnnnnnnnnnnnnnnnnnnnnnnnnnnnnnnnnnnnnnnnnnnnnnnnnnnnnnnnnnnnnnnnnnnnnnnnnnnnnnnnnnnnnnnnnnnnnnnnnnnnnnnnnnnnnnnnnnnnnnnnnnnnnnnnnnnnnnnnnnnnnnnnnnnnnnnnnnnnnnnnnnnnnnnnnnnnnnnnnnnnnnnnnnnnnnnnnnnnnnnnnnnnnnnnnnnnnnnnnnnnnnnnnnnnnnnnnnnnnnnnnnnnnnnnnnnnnnnnnnnnnnnnnnnnnnnnnnnnnnnnttttaagagcctgtggttgtatctatcattagttgagtgggtaccgcttctctgttctgnnnnnnnnnnnnnnnnnnnnnnnnnnnnnnnnnnnnnnnnnnnnnnnnnnnnnnnnnnnggtgaaattcatgtaccataaaattgactgttttaggcaggtcccagaggctgacgcctgtaatcccaggcctttgggaggccaaggcgggtggatcacttgaggttgggagttcgagaccagcctggccaacatggtaaaacctcatctctact

SEQ ID NO: 25016 - DNA, 1577 bp, Macaca Mulatta
  misc_feature (1)...(1577): n = A,T,C or G
tccaaggtggaggtgacagagaagacgacgactgtgctgagtgagagcagtggccccaacagtgcctcccatagcagcagccnnnnnnnnnnnnnnnnnnnnnnnnnnnnnnnnnnnnnnnnnnnnnnnnnnnnnnnnnnnnnnnnnnnnnnnnnnnnnnnnnnnnnnnnnnnnnnnnnnnnnnnnnnnnnnnnnnnnnnnnnnnnnnnnnnnnnnnnnnnnnnnnnnnnnnnnnnnnnnnnnnnnnnnnnnnnnnnnnnnnnnnnnnnnnnnnnnnnnnnnnnnnnnnnnnnnnnnnnnnnnnnnnnnnnnnnnnnnnnnnnnnnnnnnnnnnnnnnnnnnnnnnnnnnnnnnnnnnnnnnnnnnnnnnnnnnnnnnnnnnnnnnnnnnnnnnnnnnnnnnnnnnnnnnnnnnnnnnnnnnnnnnnnnnnnnnnnnnnnnnnnnnnnnnnnnnnnnnnnnnnnnnnnnnnnnnnnnnnnnnnnnnnnnnnnnnnnnnnnnnnnnnnnnnnnnnnnnnnnnnnnnnnnnnnnnnnnnnnnnnnnnnnnnnnnnnnnnnnnnnnnnnnnnnnnnnnnnnnnnnnnnnnnnnnnnnnnnnnnnnnnnnnnnnnnnnnnnnnnnnnnnnnnnnnnnnnnnnnnnnnnnnnnnnnnnnnnnnnnnnnnnnnnnnnnnnnnnnnnnnnnnnnnnnnnnnnnnnnnnnnnnnnnnnnnnnnnnnnnnnnnnnnnnnnnnnnnnnnnnnnnnnnnnnnnnnnnnnnnnnnnnnnnnnnnnnnnnnnnnnnnnnnnnnnnnnnnnnnnnnnnnnnnnnnnnnnnnnnnnnnnnnnnnnnnnnnnnnnnnnnnnnnnnnnnnnnnnnnnnnnnnnnnnnnnnnnnnnnnnnnnnnnnnnnnnnnnnnnnnnnnnnnnnnnnnnnnnnnnnnnnnnnnnnnnnnnnnnnnnnnnnnnnnnnnnnnnnnnnnnnnnnnnnnnnnnnnnnnnnnnnnnnnnnnnnnnnnnnnnnnnnnnnnnnnnnnnnnnnnnnnnnnnnnnnnnnnnnnnnnnnnnnnnnnnnnnnnnnnnnnnnnnnnnnnnnnnnnnnnnnnnnnnnnnnnnnnnnnnnnnnnnnnnnnnnnnnnnnnnnnnnnnnnnnnnnnnnnnnnnnnnnnnnnnnnnnnnnnnnnnnnnnnnnnnnnnnnnnnnnnnnnnnnnnnnnnnnnnnnnnnnnnnnnnnagaccagcacccgtgtctgcctctgagagtgttggcagctcacagacagcagggccggcccgggatggggggcaggtactccccacctttctgcctcccttcctgctcctcatccctccctccccctttattaccgttttttgtacttgatgccttctctgtgagcagtggctctgtgggaaggagggagccgggagcctgctgggaagccttccccagagagatggctttaggggctttatttaaagactgtgatggtggagccacgcaaggctgcacctctgtgtgttgggagacgatgatgatgtccattgctgtgtgatggcttggaatttaatttattaaagtgaaattggagtttataa

SEQ ID NO: 25017 - DNA, 411 bp, Macaca Mulatta
cccactatggtacaagacccggccgaggctgggacaggcgggccccctgagtgtggcctgctggctgttggcctctgctcactgtagcgtggactacattgtggaattctcgggggatacctcccacagccagatcatcaatgggacctgctacctggagttccggaaggaccagctagccttcctcctgcccgtacggctagagatggccatggtcctctttgtggtccccctgatcatcaccagctactgctacagccgccttttttgtatcctcggcagagggggcagtctccgccggcagatgagggtggcgggactggtggcagccacactgctcaacttccttgtcagctttgggccctacaacatgtcccacgttgtgagctatatctgcggcgtaagcccggc

SEQ ID NO: 25018 - DNA, 697 bp, Macaca Mulatta
atggagcctctgaacagcacgcaccccggcaccgcagcctccagcagccccctggagtcccgtgcgcccggcggcggcaacggcaacggcaacgagtacttctacattctggttgtcatgtccttctatggcattttcttgatcggaatcatgctgggctacatgaaatccaagaggcgagagaagaagtccagcctcctgctgctgtacaaagacgaggagcggctctggggggaggccatgaagccgctgcccgtggtgtcaggcctgaggtcggtgcaggtgcccctgatgctgaacatgctgcaggagagcgtggcgcccgcgctgtcctgcaccctctgctccatggaaggggacagcgtgagctccgagtcctccttcccggacgtgcacctcactattcaggaggagggggcagacgatgagctggaggagacctcggagacgcccctcaacgaaagcagtgaagggtcctcggagaacatccatcagaattcctagcacccccgggacccctgccggaggctccatcagccagcacccttagagagaggaaagacagttttcaagtgtctggtttcactttcgcagtgcggctgccactttgaaaagaccctcggcaagcccctaatttggggtggggtgggggactaggctcagccggagccagcagccccgaggagtccgggaggtg

SEQ ID NO: 25019 - DNA, 1078 bp, Macaca Mulatta
  misc_feature (1)...(1078): n = A,T,C or G
gaaagcagagtgagggcactcacctccatcctgtggaagccaccatcatctctggcccaagcgtctgtagtagctccccaaaataataccccatcatctgttcctactccctccaatctctctccactgagtggctggaatgcnnnnnnnnnnnnnnnnnnnnnnnnnnnnnnnnnnnnnnnnnnnnnnnnnnnnnnnnnnnnnnnnnnnnnnnnnnnnnnnnnnnnnnnnnnnnnnnnnnnnnnnnnnnnnnnnnnnnnnnnnnnnnnnnnnnnnnnnnnnnnnnnnnnnnnnnnnnnnnnnnnnnnnnnnnnnnnnnnnnnnnnnnnnnnnnnnnnnnnnnnnnnnnnnnnnnnnnnnnnnnnnnnnnnnnnnnnnnnnnnnnnnnnnnnnnnnnnnnnnnnnnnnnnnnnnnnnnnnnnnnnnnnnnnnnnnnnnnnnnnnnnnnnnnnnnnnnnnnnnnnnnnnnnnnnnnnnnnnnnnnnnnnnnnnnnnnnnaaaaacacacatcttatggcattcaccttcttggagctctaggacagtggttctcaaaattttttctctcaggatctcttaaaaatcatcaaggactccaaaaagcttttgggtatgtgggttatagctatcaatatttatggtactagaacttaaaacagaaaaatttaaaacacgagaatacataggcacacattccattcattgtgggaaccatggtgtcaatacatatcatgtagtttctgaaaaactccactgtacactctcatagaatgaagaaggcaaaaaannnnnnnnnnnnnnnnnnnnnnnnnagtctctctctgtcgcccaggctgaagtgcagtggcgagatctcggctcactgcaagctccgcctcccgggttcacaccattctggtgcctcagcctcccgagtagctgggactacaggcgccctccaccatgcctggctaaaattttgtattttttagtagagatggggtttcactgatgttagccaggatggtctcgatctcctgacctcgtgatcctcccgtctcggcctcccaaagtgctgggattagcggcgttagccacc

SEQ ID NO: 25020 - DNA, 320 bp, Macaca Mulatta
gtgctgctggggctcggcggggccgtgtctggtctgtaaggagcgccggctcctagggggttgctggggagcccacgctgccggcgactcgggccactgaatgtgagaccgagtccctgtatgtcaccagtgcacacgctgatttgaaccctgcttcgacgtgcgtgtcatggcttaaaaatagctgctaatctgtcaacctgtcttgggcagaaacagcggcggcggcggcgacagcagtgggagcgtcatggccgtggcgctgtctgcgccggcgatccgcctttcggactgaggcccagcgcagcgcttgcaaagag

SEQ ID NO: 25021 - DNA, 1484 bp, Macaca Mulatta
  misc_feature (1)...(1484): n = A,T,C or G
ctccgggagccccggggagtaacaggtgtctggaggctgaagggtggaggggttcctggatttggagttngcttgtgaaaatcccctccaccctcctctctcgcacccacccacgccctcacccccttctttttctgtccttggaaaatggtgtccaagctcacgtcgctccagcaagaactcctgagcgccctgctgagctccggggtcaccaaggaggtgctggttcaggccttggaggagttgctgccatcgccgaacttcggggtgaagctggagacgctgcccttgtcccctggcagcggggccgagcccgacaccaagccggtcttccatactctcaccaacggccacgccaagggccgcttgtccggcgaagagggctccgaggacggcgacgactatgacacacctcccatcctcaaggagctgcaggcgctcaacaccgaggaggcggcggagcagcgggcggaggtggaccggatgctcannnnnnnnnnnnnnnnnnnnnnnnnnnnnnnnnnnnnnncatgcagcaacacaacatcccccagagggaggtggtcgatgtcacnnnnnnnnnnnnnnncacctctcccagcatctcaacaagggcacacctgtgaagacccagaagcgtgnnnnnnnnnnnnnnnnnnnnnnnnnnnnnnnnnnnnnnnnnnnnnnnnnnnnnnnnnnnnnnnnnnnnnnnnnnnnnnnnnnnnnnnnnnnnnnnnnnnnnnnnnnnnnnnnnnnnnnnnnnnnnnnnnnnnnnnnnnnnnnnnnnnnnnnnnnnnnnnnnnnnnnnnnnnnnnnnnnnnnnnnnnnnnnnnnnnnnnnnnnnnnnnnnnnnnnnnnnnnnnnnnnnnnnnnnnnnnnnnnnnnnnnnnnnnnnnnnnnnnnnnnnnnnnnnnnnnnnnnnnnnnnnnnnnnnnnnnnnnnnnnnnnnnnnnnnnnnnnnnnnnnnnnnnnnnnnnnnnnnnnnnnnnnnnnnnnnnnnnnnnnnnnnnnnnnnnnnnnnnnnnnnnnnnnnnnnnnnnnnnnnnnnnnnnnnnnnnnnnnnnnnnnnnnnnnnnnnnnnnnnnnnnnnnnnnnnnnnnnnnnnnnnnnnnnnnnnnnnnnnnnnnnnnnnnnnnnnnnnnnnnnnnnnnnnnnnnnnnnnnnnnnnnnnnnnnnnnnnnnnnnnnnnnnnnnnnnnnnnnnnnnnnnnnnnnnnnnnnnnnnnnnnnnnnnnnnnnnnnnnnnnnnnnnnnnnnnnnnnnnnnnnnnnnnnnnnnnnnnnnnnnnnnnnnnnnnnnnnnnnnnnnnnnnnnnnnnnnnnnnnnnnnnnnnnnnnnnnnnnnnnnnnnatctcagntctcgggaggaggtttgcccccagtcagcaccttgacgaatatccacagcctctcccaccataacccccagcaatctcaaaacctcatcatgacacccctctctggagtcatggcaattgcacaaag

SEQ ID NO: 25022 - DNA, 822 bp, Macaca Mulatta
  misc_feature (1)...(822): n = A,T,C or G
caggggttgtgaagaagtgtgtgagccgcacccaagcactggtgggcttcaggtatggagacaccaaggtcgtgtccacctccttcatcatgcctgtggggggcgccatgccctgcccactgctccaggnnnnnnnnnnnnnnnnnnnnnnnnnnnnnnnnnnnnnnnnnnnnnnnnnnnnnnnnnnnnnnnnnnnnnnnnnnnnnnnnnnnnnnnnnnnnnnnnnnnnnnnnnnnnnnnnnnnnnnnnnnnnnnnnnnnnnnnnnnnnnnnnnnnnnnnnnnnnnnnnnnnnnnnnnnnnnnnnnnnnnnnnnnnnnnnnnnnnnnnnnnnnnnnnnnnnnnnnnnnnnnnnnnnnnnnnnnnnnnnnnnnnnnnnnnnnnnnnnnnnnnnnnnnnnnnnnnnnnnnnnnnnnnnnnnnnnnnnnnnnnnnnnnnnagagccaagagcggagaagcccagggggtaaaaagaggcccgccaagcagcctcctctccagcaggcggcgccctcggactcggacggctcctcccacggcaccagctcccacgggtcccgccctgggacacaccccgagcccnngacagcccagctccgcctccccgcggccgggcggcgaggcctccacagcgcgcgccatcatggccgcgcctgcacctggagcagccctgcgcggaaccctccgagccacccacaggagccaagggctgaggagcggcccggagacaccttgaggccgtctggtggcagcggcgtttaagagaccagcgctcttccaggctgctcagccctcagccctgacgctggagccggcccctccgc

SEQ ID NO: 25023 - DNA, 664 bp, Macaca Mulatta
ccatggggcagctggagaggggccgagtctggactagtggactcctctttgccattgccactggggtacgctccaatgggctggtcagtgttggcttcctcatgcattctcagtgccaaggctttttctcttctcttacgatgctgaatcccctgagacagctctttaagctgatggcctctctgtttctgtcggtgttcacacttggccttccctttgccctctttcagtattatgcctacacccaattctgtctgccaggctcagcccgccccattcctgagcccttggtgcagttagctgtagacaagggctaccggattgcagagggaaatgaaccgccttggtgcttctgggatgttccactaatatacagctatatccaggatgtctactggaatgttggctttttgaaatactacgagctcaggcaggtgcccaattttctactggctgcaccagtggctatactggttgtctgggcaacttggacatacgtgaccacccacccttggctctgccttacacttgggctgcaaaggagcaagaacaataagaccctagagaagcccgatcttggattcctcagtcctaaggtgttcgtgtacctggtccacgctgcagtgctgctgctgtttggaggtctgtgcatgcatgttcaggt

SEQ ID NO: 25024 - DNA, 693 bp, Macaca Mulatta
  misc_feature (1)...(693): n = A,T,C or G
gcccctgcagggcgccagagccaggccaggccgaggtcctcctgcgcaggaacgccagctccgcggggaggctgcaggggctggcggggggcgcgccggggcggaaggagtgcaggctgttcgaagtgtacctgccctcgggaaagaagcggcctaaaagccttgagttcaccatttccacaggggagaaggcgcccccaaatccagaaactctcctgactgtagaggaaacgacagctgcgaatccggactcggcaacaggcgctcaggcaaggcccactccggatggaggggcgtctgcggacctggagaaaggccctgnnnnnnnnnnnnnnnnnnnnnnggaaggccaccagacaaggctgcgagtccccgttgccacgcccaggaaggagaccctgttggcgatatttgtgtgcgtgattcctgcagctgccctgaggcagcttctgagcacccccaggcctcaggcagccgctcacctgactgcccccggtgccaggcctcccatgaaaggaagagcatgggaagtctaagcccccagccccttccacagtgtaagcgccacatgaagcaggtccagctgctattttgcgaggatcaccgtgagcccatctgcctcatctgcagtctgagtcaggagcatcgaggccaccgggtacgccccattgaggaggctgccctggaacacaa

SEQ ID NO: 25025 - DNA, 660 bp, Macaca Mulatta
ccatccaggatggcttgcacttgaaaaagtgttatgaccaaaaattaattatgttcctaccttccataagatattacctaggacactcaagactcttttcatcaagatagttaaaaggtttttgataaaatagttaacttatttacaactgctttaatatgcactttaatatactgggccttacatgttatggaaaaggagctgaatcgtgctatttttaacattttccttttacatcttaacagttacgagcctgaactgtttcctggtcttatttatagaatggtaaaaccacgaattgtgttgcttatctttgtatctggaaaagttgtgttgacaggtaagtaccaagattattttctgactcataaaatgtaattgctatgcatgtgctttgcttattcttttaaatacctttgttcaccatggcaaagtaattcttgttaatacagaatacctggaatgaaaaataagaaaggaataacataggtcccaatacagaaaacaataattttttcatgtttttatgtcattttataagtatttcatctttacatcctgagtttaaaaaaaaaattatccgtgataacatatatggcttaagcttactgttacaaactcttcataaaggcttttaatggccacacaaggtcctaacac

SEQ ID NO: 25026 - DNA, 814 bp, Macaca Mulatta
  misc_feature (1)...(814): n = A,T,C or G
gagattcctgaaattccagaaagcatttcattctgtaaagcactgcaggtagctgacttcagcggaaacccactgactaggtntaggttgccagaaagctttcctgagttacagaatttaacatgtctttctgtaaatgacatctcactgcagtctctacctgaaaatattggcaannnnnnnnnnnnnnnnnnnnnnnnnnnnnnnnnnnnnnnnnnnnnnnnnnnnnnnnnnnnnnnnnnnnnnnnnnnnnnnnnnnnnnnnnnnnnnnnnnnnnnnnnnnnnnnnnnnnnnnngccagaatcaatcggagccctcttacatctaaaagatctctggttggatggaaatcagctgtcagaattacctcaggnnnnnnnnnnnnnnnnnnnnnnnnnnnnnnnnnnnnnnnnnnnnnnnnnnnnnnnnnnnnnnnnnnnnnnnnnnnnnnnnnnnnnnnnnnnnnnnnnnnnnnnnnnnnnnnnnnnnnnnnnnnnnnnnnnnnnnnnnnnnnnnnnnnnnnnnnnnnnnnnnnnnnnnnnnnnnnnnnnnnnnnnnnnnnnnnnnnnnnnnnnnnnnnnnnnnnnnnnnnnnnnnnnnnnnnnnnnnnnnnnnnnnnnnnnnnnnnnnnnnnnnnnnnnnnnnnnnnnnnnnnnnnnnnnnnnnnnnnnnnnnnnnnnnnnnnnnnnnnnnnnnnnnnnnnnnnnnnnnnnnnnnnagatcggcgggtgctgcagcctcactgtgttctgtgtgcgtgacaatagactaactcggatacctgcagagatgtcacaggcaacagaactacatg

SEQ ID NO: 25027 - DNA, 419 bp, Macaca Mulatta
  misc_feature (1)...(419): n = A,T,C or G
nnnnnnnnnnnnnnnnnnnnnnnnnnnnnnnnnnnnaatagcaaatagtttattagtacatggtttcaacgggagtaataaattcacatgaaaaggagacaataatcaagtcaaaagaataaatgattactaatcatcagaaaatctgtggccattagggctggcacgtaaaaatccaaaatcactcagaggccaaatcttaaagaagattcgtcctcttattagtccatatggaataggtccatagtatctggaatctgtagaattctgtagattatcaccttctaaccaaacatgacccattggcacctcgggccccaaagaaccctgaagaccttcaaacgggacacaggtgggcctttctcacctgggccccgccaaagtcgaccgtccttacgtagagcgcacttttcagcccc

SEQ ID NO: 25028 - DNA, 631 bp, Macaca Mulatta
agttgaactaaaaggaaccacccattagcccagttcgtaggagaggtacttcaaacttgaaagagtatgtatttcagtaacttatatgtggctaaccatcaaatacatagtcatctaagcttctaaatgttctgtatttatacagttatatttataaaccaaaaattttaatgaggttaattttaaatataagtatattttagaaatcacagtttgtatctgtttcttagtaggtgtggcttttaaaatatgtgcttgttcattgttaaattccagaataatagagtaatacttaatactgtacattcccacttatgtatattttattaaaatttataagcaagaaattatacataagtggtcatgatattagggaaacaaagaatttctcttaggaaagagaagtgatggtaatgtaaataaaaatactgtttatattcacatgatttcaagaaaactgtaaaagcaaagactgtagtaatgacacaaatatgacaaacagatgttttcttaaaattggcagtcaatataattatgtttctgcctatgatattgaggaagttctatcagtctgattcttaagttttctcatctgttaagtagaagatactattacttaccttaaagggtg

SEQ ID NO: 25029 - DNA, 86 bp, Macaca Mulatta
tgcaacctgagtaattatagttgttctccaggtgcctgtcacatccctcacatcatagactattctatttttagcagaccccttca

SEQ ID NO: 25030 - DNA, 849 bp, Macaca Mulatta
tttctccttattgacctttctaactatcctcaatggagagacatgtttttcacattggtgctgataatttacctcaacacattgttggggaacagatttatgatctttcttattcactttgaccccaacctccacactccaatgtacttcttccttagtaacctgtctttcttagacctttgctatggaacagcttccatgccccaggctttggtgcattgtttctctacccatccctacctctcttatccccggtgtctgactcaaatgagtgtctccttggctttggcgacagcagagtgcctcctactggctgccatggcctatgaccgtgtggttgctatcaacaatcccctgcgttattcagtggtttatgaatggcccagtgtgtgtctgcttggctgctacctcatgggggacatcacttgtgctcactgccatgctcatcctatccctgaggcttcacttctgtggggctaatgtcatcaaccattttgtctgtgagattctctccctcattaagctggtctgttctgataccagcttcaatgaacttatgatcctcatcaccagtgtcttcaccctgctgctaccattgggtttgttctcctctcctatgtacgaattgctatggctgtcataaagattcacttagcccagggcaggctcaaggcctttaccacgtgtggctctcacctgaccgtggtgacaatcttctatggggcagccatctccatgtatatgaaacctcagtccaactcctcccctgaccaggacaagtttatctcagtgttttatggagcttgacacccatgctgaacccccttgatatatagcctgaaaaacaaa

SEQ ID NO: 25031 - DNA, 877 bp, Macaca Mulatta
  misc_feature (1)...(877): n = A,T,C or G
gtgacaatctcattggaacatgtcacatataagttaatgtgattattaagattttaaaatgaaaagtctgccttgccttatgaaaatttatccatttatcttcaggttggggaaatcattttttctttaattccaaagatacttaaaaaaatgtcctccagtttgtatttattacttatgtcatgtgcaaatggttgtcctgcatataaaagtatctggtcatttcagtttggtttgtaattatttgatgcaattttatcataagggtaacttagatgcatttcaaaaggacagtgaacaagctgagaaatgattttgtcaaagggctgagttgggaacactgtggctgaaatataatttttcttcccgctaaggttacatgtgagtcaaaattttgtaaaatatagcctcacataagaaccatggccttggattattcactgcctgtcacaagccttagtgtggcctgagaaacccctatgtaccttcgtgaaatcgttgaattagctagtgaataaagaaataaacttcaactagaaatccagttagaagcgcaattttcttataggaaataggtatagtgtgcaagtgtacttttaaggccatggtttgtaccgagtcagcatggccaccgaagtcttcatttaacttattgtcccccagaaaagannnnnnnnnnnnnnaaaagactgtgaagattttttacattgccagataaaaagtgttacttaaccaacaaacaaatgtaagactacaaaatcgttcaagagcaattctaacgtaatttacatatgttcatgcaaaatatacttaggctgtcaaattagcacaacaaagaatgtgtttcactatcttttctaggctaatttgtcctgag

SEQ ID NO: 25032 - DNA, 1664 bp, Macaca Mulatta
  misc_feature (1)...(1664): n = A,T,C or G
agatgcctctgggcagagcagcaggaatgacgggcaggtgttacagcccgagggccccatgctggtggcagaaggcgagacactcctactgaggtgtatggtggtcagctcctgcgccgatggtatgataaaatgggtcaaggtgagcactaaggaccaacaagaaatttataactttaaacgtggctccttccccggggtgatccccatgatccaacggacatcagaaccactgaattgcgattattccatctatatccacaatgtcaccaaggagcatactggaacctaccactgtgtgaggtttgatggtttgagtgaatattcagaaatgaaatcggatgaaggcacctcagtgcttgtgaagggnnnnnnnnnnnnnnnnnnnnnnnnnnnnnnnnnnnnnnnnnnnnnnnnnnnnnnnnnnnnnnnnnnnnnnnnnnnnnnnnnnnnnnnnnnnnnnnnnnnnnnnnnnnnnnnnnnnnnnnnnnnnnnnnnnnnnnnnnnnnnnnnnnnnnnnnnnnnnnnnnnnnnnnnnnnnnnnnnnnnnnnnnnnnnnnnnnnnnnnnnnnnnnnnnnnnnnnnnnnnnnnnnnnnnnnnnnnnnnnnnnnnnnnnnnnnnnnnnnnnnnnnnnnnnnnnnnnnnnnnnnnnnnnnnnnnnnnnnnnnnnnnnnnnnnnnnnnnnnnnnnnnnnnnnnnnnnnnnnnnnnnnnnnnnnnnnnnnnnnnnnnnnnnnnnnnnnnnnnnnnnnnnnnnnnnnnnnnnnnnnnnncaggcctcctgggttgtgtttgcacctgtggtcctggggctgaaggcaattacattggctgcactcctcctggctctggctacctctcggaggagccctgggcaagaagatgtcaagaccacagacccagcagaagccatgaacaccttagcatggagcaagggtcaagagtgaggggtcagcccaagactggggatcctctgagttggagaggagccagggctcctcaaccatttccctacctccagtcccagcctccagatgccctcaggcctcatgacgaactcctagatccctacatctggttttggtccacccagtgaaattcccctctttgcactgggcttccctctaaagtgtctccctttctccttttggcctgttcaagacctccttgcttttcagtctctggctcagtctctcctcaacacccttgcccctgctgaagccctttctggtgagctctgcccctttccccacctcaccacatccttcttggcctccaacatccaactcagagtcttcttcccaggaggtgtccctaagcatctctgagctcaaccagccagaccatctgtgctcctccatctacacccttctccccaccccttcctgccttccttccatccccctcatggctggcttgggtgggtgtaatattagaacgcaggttcaacaaatataacaaagctcttaaatagttgcttaaaccagtggaaatcaaccagaaagttgaccatcagcaggccaagcaatacagagactccctggttttgagacccaggattcattgatctcgttgctaccaggtccaccttctaggcagccagactggagaagaaggcagggaaggggagcaggaccctccccttaagggcacagtcaggaact

SEQ ID NO: 25033 - DNA, 243 bp, Macaca Mulatta
  misc_feature (1)...(243): n = A,T,C or G
tctctccagcacactcatcaccaaaagctcatgaagaagatgactcctgccatggaatcccctactctactgtgtgtaccctcactgttctttgctcnnnnnnnnnnnnnnnngtccctcagaaacctacggtctccttgaatcccccatggaatagaatatttaaaggagagaatgtgactcttacatgtaatgggagcaatttctttgaagtcagttccatgaaatggttccacaatggca

SEQ ID NO: 25034 - DNA, 1962 bp, Macaca Mulatta
  misc_feature (1)...(1962): n = A,T,C or G
gaaatggaagcaactgtcaagattgcagcggaatatgattctcttcctccttgcctttctgattttctgtggattcctcttctacatcaacttggctgaccattggaaannnnnnnnnnnnnnnnnnnnnnnnnnnnnnnnnnnnnnnnnnnnnnnnnnnnnnnnnnnnnnnnnnnnnnnnnnnnnnnnnnnnnnnnnnnnnnnnnnnnnnnnnnnnnnnnnnnnnnnnnnnnnnnnnnnnnnnnnnnnnnnnnnnnnnnnnnnnnnnnnnnnnnnnnnnnnnnnnnnnnnnnnnnnnnnnnnnnnnnnnnnnnnnnnnnnnnnnnnnnnnnnnnnnnnnnnnnnnnnnnnnnnnnnnnnnnnnnnnnnnnnnnnnnnnnnnnnnnnnnnnnnnnnnnnnnnnnnnnnnnnnnnnnnnnnnnnnnnnnnnnnnnnnnnnnnnnnnnnnnnnnnnnnnnnnnnnnnnnnnnnnnnnnnnnnnnnnnnnnnnnnnnnnnnnnnnnnnnnnnnnnnnnnnnnnnnnnnnnnnnnnnnnnnnnnnnnnnnnnnnnnnnnnnnnnnnnnnnnnnnnnnnnnnnnnnnnnnnnnnnnnnnnnnnnnnnnnnnnnnnnnnnnnnnnnnnnnnnnnnnnnnnnnnnnnnnnnnnnnnnnnnnnnnnnnnnnnnnnnnnnnnnnnnnnnnnnnnnnnnnnnnnnnnnnnnnnnnnnnnnnnnnnnnnnnnnnnnnnnnnnnnnnnnnnnnnnnnnnnnnnnnnnnnnnnnnnnnnnnnnnnnnnnnnnnnnnnnnnnnnnnnnnnnnnnnnnnnnnnnnnnnnnnnnnnnnnnnnnnnnnnnnnnnnnnnnnnnnnnnnnnnnnnnnnnnnnnnnnnnnnnnnnnnnnnnnnnnnnnnnnnnnnnnnnnnnnnnnnnnnnnnnnnnnnnnnnnnnnnnnnnnnnnnnnnnnnnnnnnnnnnnnnnnnnnnnnnnnnnnnnnnnnnnnnnnnnnnnnnnnnnnnnnnnnnnnnnnnnnnnnnnnnnnnnnnnnnnnnnnnnnaggaggccgtggagaaggtgacgcagcacatccacggcctgtctgggaagaaggacgggctagtgcccatgttcatcaacacccacagcggcctcttcacccacctgggcgtgttcacactgggcgccagggccgacagctactatgagtacctgctgaagcagtggatccagggcgggaagcaggagacacagnnnnnnnnnnnnnnnnnnnnnnnnnnnnnnnnnnnnnnnnnnnnnnnnnnnnnnnnnnnnnnnnnnnnnnnnnnnnnnnnnnnnnnnnnnnnnnnnnnnnnnnnnnnnnnnnnnnnnnnnnnnnnnnnnnnnnnnnnnnnnnnnnnnnnnnnnnnnnnnnnnnnnnnnnnnnnnnnnnnnnnnnnnnnnnnnnnnnnnnnnnnnnnnnnnnnnnnnnnnnnnnnnnnnnnnnnnnnnnnnnnnnnnnnnnnnnnnnnnnnnnnnnnnnnnnnnnnnnnnnnnnnnnnnnnnnnnnnnnnnnnnnnnnnnnnnnnnnagccggcagacaggcacaacctgctgcggccagagaccgtggagagcctgttctacctgtaccgcgtcacaggggaccgcaagtaccaggactggggctgggagattctccagagcttcagccggttcacgcgggnnggtcccctcgggcggctattcttccatcaacaacgtccaggatcctcagaagcccgagcccagggacaagatggagagcttcttcctgggggagactctcaagtatctgttcttgctcttctctgacgacccaaacctgctcagcctggatgcctacgtgttcaacaccgaagcccaccctctgcccatctggacccctgcctnnnnnnnnnnctgctggcgtggggacttcgggtgggcggaggcgcctggctgggtctgtggcattttccaaaggcccacg

SEQ ID NO: 25035 - DNA, 854 bp, Macaca Mulatta
  misc_feature (1)...(854): n = A,T,C or G
ccaaagcacctgagtgttactttcccagacaaaataactcttattcagtcacgtcaaccaactattcatcaatgggtgtaacagctgacctccaactaaatactgcaaatgctagaataaagttaccttctgaccccatctcaactcttcgtgtggaggtgaaatatcacaaaaatgatatgttgcagtttaagnnnnnnnnnnnnnnnnnnnnnnnnnnnnnnnnnnnnnnnnnnnnnnnnnnnnnnnnnnnnnnnnnnnnnnnnnnnnnnnnnnnnnnnnnnnnnnnnnnnnnnnnnnnnnnnnnnnnnnnnnnnnnnnnnnnnnnnnnnnnnnnnnnnnnnnnnnnnnnnnnnnnnnnnnnnnnnnnnnnnnnnnnnnnnnnnnnnnnnnnnnnnnnnnnnnnnnnnnnnnnnnnnnnnnnnnnnnnnnnnnnnnnnnnnnnnnnnnnnnnnnnnnnnnnnnnnnnnnnnnnnnnnnnnnnnnnnnnnnnnnnnnnnnnnnnnnnnnnnnnnnnnnnnnnnnnnnnnnnnnnnnnnnnnnnnnnnnnnnnnnnnnnnnnnnnnnnnnnnnnnnnnnnnnnnnnnnnnnnnnnnnnnnnnnnnnnnnnnnnnnnnnnnnnnnnnnnnnnnnnnnnnnnnnnnnnnnnnnnnnnnnnnnnnnnnnnnnnnnnnnnnnnnnnnnnnnnnnnnnnnnnnnnnnnnnnnnnnnnnnnnnnnnnnnnnnnngtaattggccatccagtcatgccaccttattgggctttgggattccaattatgtcgttatggatatgcaaatacttcagagattcgggaattatatgacgctatggtcgctgcgaacatcccctat

SEQ ID NO: 25036 - DNA, 167 bp, Macaca Mulatta
gtttgttacagaaagagaaagtggcagttgaagcatttcagatttgctgccttctcctgcctcctgaaaataggagaaagttacagctattgatgaggatgatggcaaggatttgcttaaacaaagagatgccacccctgtgtgatggctttggtacccgaacactg

SEQ ID NO: 25037 - DNA, 117 bp, Macaca Mulatta
agcacagtgttagaggtgttgtatctatggctaataatggcccgaacaccaatggatctcagttcttcatcacctatggcaaacagccacatttggacatgaaatacaccgtatttg

SEQ ID NO: 25038 - DNA, 970 bp, Macaca Mulatta
  misc_feature (1)...(970): n = A,T,C or G
ggggtttaataaatattgtacttattggaagtaatatcaaactgtatggtgataagtattgttttaattcttatggttaaagggaaatagagccttgcattatattcaacacagccatttgtgtgtgcacaatgcaaactaaggtattctagacctatcttagagcagcatccagtatttgctttctagataatatgcccaataacatgacctagagaggcttctgtgctgtgtagggatttaaccaacttcagtggttcagggagctcaaactatatggaaaacaaggtttagaatatatgctatctagcccattatctctgatccttctctaaaaccatttgaaatggcttcattgatcaacatttcacaaatgcatctgtggtagaggtagaaagcagcacctttcctaattggcaaatgatcagactaatgtgtgctaatgtttttcttccatgctttcagtcagattcaactattttatcctccacagttgcttaacttggtgttggaggagggtttaagcattaaaataggaagcaggaaatttgatttatctaattttagaaattatatccctaaaaatgaaaacatgaatactgggtggtaatgataattgagggaaatgtatttattttggtgacattttgcatgtgtgaagattttctgaaataggaccttcaagatcctaggggtnnnnnnnnnnnnnnnnnnnaattgtgaggaataaaaaatcttgccacactggcattttaaggtgactgaagtcaaaggttgtttcctttaggttgaaatagcaaccaaaacatttcttcccacagggggcttgggaatatggcctgctggcaaacatatttttgttgtgggccctccttaaatttaaatgaataaaattttaaagcttaaacaccaagccaaaaaaattaatagggttttttttaaaatttttaatgtttttccactaaacaaa

SEQ ID NO: 25039 - DNA, 1875 bp, Macaca Mulatta
  misc_feature (1)...(1875): n = A,T,C or G
agcagtggtctcggaaagagggtcgtggtcctgcacagatgcgcttgttgggggaagccttggagattcacggcaaggcgtaaagcctggggcttccaacnnnnnnnnnnnnnnnnnnnnnnnnnnnnnnnnnnnnnnnnnnnnnnnnnnnnnnnnnnnnnnnnnnnnnnnnnnnnnnnnnnnnnnnnnnnngagggaggaaacatgtcccggctgtctctcacccggtcgcctgtgtctcccctggcggcccagggcatccccctgccagcccagctcaccaagtccaatgcacctgtgcacatcgatgtgggcggccacatgtacaccagcagcctggccacgctcaccaagtaccctgactccaggtnnnnnnnnnnnnnnnnnnnnnnnnnnnnnnnnnnnnnnnnnnnnnnnnnnnnnnnnnnnnnnnnnnnnnnnnnnnnnnnnnnnnnnnnnnnnnnnnnnnnnnnnnnnnnnnnnnnnnnnnnnnnnnnnnnnnnnnnnnnnnnnnnnnnnnnnnnnnnnnnnnnnnnnnnnnnnnnnnnnnnnnnnnnnnnnnnnnnnnnnnnnnnnnnnnnnnnnnnnnnnnnnnnnnnnnnnnnnnnnnnnnnnnnnnnnnnnnnnnnnnnnnnnnnnnnnnnnnnnnnnnnnnnnnnnnnnnnnnnnnnnnnnnnnnnnnnnnnnnnnnnnnnnnnnnnnnnnnnnnnnnnnnnnnnnnnnnnnnnnnnnnnnnnnnnnnnnnnnnnnnnnnnnnnnnnnnnnnnnnnnnnnnnnnnnnnnnnnnnnnnnnnnnnnnnnnnnnnnnnnnnnnnnnnnnnnnnnnnnnnnnnnnnnnnnnnnnnnnnnnnnnnnnnnnnnnnnnnnnnnnnnnnnnnnnnnnnnnnnnnnnnnnnnnnnnnnnnnnnnnnnnnnnnnnnnnnnnnnnnnnnnnnnnnnnnnnnnnnnnnnnnnnnnnnnnnnnnnnnnnnnnnnnnnnnnnnnnnnnnnnnnnnnnnnnnnnnnnnnnnnnnnnnnnnnnnnnnnnnnnnnnnnnnnnnnnnnnnnnnnnnnnnnnnnnnnnnnnnnnnnnnnnnnnnnnnnnnnnnnnnnnnnnnnnnnnnnnnnnnnnnnnnnnnnnnnnnnnnnnnnnnnnnnnnnnnnnnnnnnnnnnnnnnnnnnnnnnnnnnnnnnnnnnnnnnnnnnnnnnnnnnnnnnnnnngttgcaggagacaggagttacacacagtcatcagacctcaccctcacagagacacaaacccacatatttgtggatgcctgcagagactcaaatattgagaagacttctcctttttctctccctccagagctcccactagctgatgtgcccccaggcctcaaactacctggaatgcacagctcagggaagccgctggatgcctagaggctgaaagacagggaactctccattattggggcaggactcagttaggcaggatgcttggggccatgtgtctggagaaatgtcacaggttacaccctacagaacaaagaagggacccaaaggctctttttgcctcctggaatcaaggccctgagggcagcagaatggtgacctgggtgaggtcatccaactgggtttggtaacctgaggggtcactgggcctggcaacttctgtccctctgatggtggaacccagcacgtgtttctgtagggacctttgtcggtgagcgagactgataccatcatagaaggtgctctggctggctgctccagcatgcacccacctgcctgccaggccaagccaggtgtcctcttgcagcttggccttgatgacctctgtttcttcctgggcaggtcctggagcggctgttccagaggggtttcagtgtggccgcgtcctgtgggggcgg

SEQ ID NO: 25040 - DNA, 543 bp, Macaca Mulatta
  misc_feature (1)...(543): n = A,T,C or G
aggagacataacactaattgctgtcagagggtgttggacaacaattctttctagctacttcctgctgaaaaggggcgtcttgttggggggacagcagttggggcttctcctgaggttgatctaagggttcttggaaaaatggcatgtttatgtgtggctctgtttgcagcaccatttggagtttgattgcttctaagtgaaaagagataaattttataaaaacgtttaaaatatataattagaatatgggtattaagattaccacnnnnnnnnnnnnnnnnnnncagtagagtttgatatctattagttacaccaacggattataataccggtttgtctccactagacggcgctgtacattaccagaatttttaatataaaagnnnnnnnnnnnnnnnnnnnnnnnnnnnnnnnnnnnnnnnnnnnnnnnnnnataattttaggtttaggccattttcataacttgtgatatgattgagaaaaatattatttagtggctaaaataactttagtgttagtcttgggaatttctttcctttaatt

SEQ ID NO: 25041 - DNA, 512 bp, Macaca Mulatta
  misc_feature (1)...(512): n = A,T,C or G
gggttttgtttctaagactttggattctgctagtgctcagtttgctgcttctgctttggtgacatcagaacaactgatgggattcaagatgaaggatgatgtggtgcttggaatcggggtgaatggtgtccttccagcctcaggnaggagtatacaagggcttacacctcagtagtactacaccaacagcacttgtacatacaagtccatcaacggcaggttcagctttgttacagccttcaaatattacacagacttcaagttcccacagtgcactgagtcatcaagtaactgctgccaattctgcaactactcaggttctgattgggaacaacattcgattaactgtaccttcatcagttgccactgtaaactctattgccccaataaatgcacgacatataccgaggactttaagtgctgttccatcatctgccttaaagctggctgccgcagcaaactgtcaagtttccaaggtcccatcttcatcctctgtagattcagttccaagg

SEQ ID NO: 25042 - DNA, 1269 bp, Macaca Mulatta
  misc_feature (1)...(1269): n = A,T,C or G
gggttgggtttggcgctcaacttccagccctcgctcatcatgctgaaccgctacttcagcaagcggcgccccatggccaacgggctggcggcagcaggcagccccgtcttcctgtgtgccctgagcccgctggggcagctgctgcaggaccgctacggctggcggggcggcttcctcatcctgggcggcctgctgctcaactgctgcgtgtgcgccgcactcatgaggcccctggtggccgcggcccagccgggctcggggccgccgcgatcctcccggcgcctgctagacctgagcgtcttccgggaccgcggcttcgtgctgtacgcggtggccgcctcggtcatggtgctggggctcttcatcccgcccgtgttcgtggtgagctacgccaaggacctgggcgtgccggtcaccaaggccgccttcatgctcaccgtcctgggcttcattgacatcttcgcgcggccggctgcgggnnnnnnnnnnnnnnnnnnnnnnnnnnnnnnnnnnnnnnnnnnnnnnnnnnnnnnnnnnnnnnnnnnnnnnnnnnnnnnnnnnnnnnnnnnnnnnnnnnnnnnnnnnnnnnnnnnnnnnnnnnnnnnnnnnnnnnnnnnnnnnnnnnnnnnnnnnnnnnnnnnnnnnnnnnnnnnnnnnnnnnnnnnnnnnnnnnnnnnnnnnnnnnnnnnnnnnnnnnnnnnnnnnnnnnnnnnnnnnnnnnnnnnnnnnnnnnnnnnnnnnnnnnnnnnnnnnnggcaagctcctggatgcgacccacgtctacaagtacgtgttcatcctggcgggggccgaggtgctcacctcctccctgattctgctgctgggcaacttcttctgcattaggaagaagcccaaggagccacagcccgaggtggcggccgcggaggaggagaagctccacaaacctcctgcagactcgggggtggacttgcgggaggtggagcatttcctgaaggctgagcctgagaaaaacggggaggtgattcacaccccggaaacgagtgtctgagtggctgggcggggccggcaggcacagggaggaggtacagaagccggcaacgcttgctatttattttacaaactggactggctcaggcagggccatggctgggctccggctgccggcccagcggatcgtcacctgatcagtgttttgcgggggaaggtggcggggtgggaaccatgtcattccagagtggatctgtggtgaaaccaagccacaaggttacaaggcatcctcaccagggg

SEQ ID NO: 25043 - DNA, 1645 bp, Macaca Mulatta
  misc_feature (1)...(1645): n = A,T,C or G
gccaccatcagcaagcagatcttcccctggatgaaagagtctcgacagaactccaagcagaagaacagctgtgccactgcagnnnnnnnnnnnnnnnnnnnnnnnnnnnnnnnnnnnnnnnnnnnnnnnnnnnnnnnnnnnnnnnnnnnnnnnnnnnnnnnnnnnnnnnnnnnnnnnnnnnnnnnnnnnnnnnnnnnnnnnnnnnnnnnnnnnnnnnnnnnnnnnnnnnnnnnnnnnnnnnnnnnnnnnnnnnnnnnnnnnnnnnnnnnnnnnnnnnnnnnnnnnnnnnnnnnnnnnnnnnnnnnnnnnnnnnnnnnnnnnnnnnnnnnnnnnnnnnnnnnnnnnnnnnnnnnnnnnnnnnnnnnnnnnnnnnnnnnnnnnnnnnnnnnnnnnnnnnnnnnnnnnnnnnnnnnnnnnnnnnnnnnnnnnnnnnnnnnnnnnnnnnnnnnnnnnnnnnnnnnnnnnnnnnnnnnnnnnnnnnnnnnnnnnnnnnnnnnnnnnnnnnnnnnnnnnnnnnnnnnnnnnnnnnnnnnnnnnnnnnnnnnnnnnnnnnnnnnnnnnnnnnnnnnnnnnnnnnnnnnnnnnnnnnnnnnnnnnnnnnnnnnnnnnnnnnnnnnnnnnnnnnnnnnnnnnnnnnnnnnnnnnnnnnnnnnnnnnnnnnnnnnnnnnnnnnnnnnnnnnnnnnnnnnnnnnnnnnnnnnnnnnnnnnnnnnnnnnnnnnnnnnnnnnnnnnnnnnnnnnnnnnnnnnnnnnnnnnnnnnnnnnnnnnnnnnnnnnnnnnnnnnnnnnnnnnnnnnnnnnnnnnnnnnnnnnnnnnnnnnnnnnnnnnnnnnnnnnnnnnnnnnnnnnnnnnnnnnnnnnnnnnnnnnnnnnnnnnnnnnnnnnnnnnnnnnnnnnnnnnnnnnnnnnnnnnnnnnnnnnnnnnnnnnnnnnnnnnnnnnnnnnnnnnnnnnnnnnnnnnnnnnnnnnnnnnnnnnnnnnnnnnnnnnnnnnnnnnnnnnnnnnnnnnnnnnnnnnnnnnnnnnnnnnnnnnnnnnnnnnnnnnnnnnnnnnnnnnnnnnnnnnnnnnnnnnnnnnnnnnnnnnnnnnnnnnnnnnnnnnnnnnnnnnnnnnnnnnnnnnnnnnnnnnnnnnnnnnnnnnnnnnnnnnnnnnnnnnnnnnnnnnnnnnnnnnnnnnnnnnnnnnnnnnnnnnnnnnnnnnnnnnnnnnnnnnnnnnnnnnnnnnnnnnnnnnnnnnnnnnnnnnnnnnnnnnnnnnnnnnnnnnnnnnnnnnnnnnnnnnnnnnnnnnnnnnnnnnnnnnnnnnnnnnnnnnnnnnnnnnnnnnnnnnnnnnnnnnnnnnnnnnnnnnnnnnnnnnnnnnnnnnnnnnnnnnnnnnnnnnnnnnnnnnnnnnnnnnnnnnnnnnnnnnnnnnnnnnnnnnnnnnnnnnnnaactagttgagatagtagttttgaacagtcgtaaccgtggctggtgtttgtagttgatgtaaagcattaagaccgcaaactgtccttcatgggtagagtcaggaagcccggtggcgtggcacaacacacgttggtcatttctcaaaaaacacagccctcaccacagcttattgatttcaaattgtctggtactattgaaacaaatatttagaat

SEQ ID NO: 25044 - DNA, 151 bp, Macaca Mulatta
gataatagaggagttggcagatgccctgacctactgccatgagaagaaagtgattcacagagacattaagccagagaacctgctgctggggttcaggggtgaggtgaagattgcagattttggctggtctgtgcacaccccctccctgagg

SEQ ID NO: 25045 - DNA, 2048 bp, Macaca Mulatta
  misc_feature (1)...(2048): n = A,T,C or G
aggggcctttacaacaaccaaacggacaggcattcnnnnnnnnnnnnnnnnnnnnnnnnnnnnnnnnnnnnnnnnnnnnnnnnnnnnnnnnnnnnnnnnnnnnnnnnnnnnnnnnnnnnnnnnnnnnnnnnnnnnnnnnnnnnnnnnnnnnnnnnnnnnnnnnnnnnnnnnnnnnnnnnnnnnnnnnnnnnnnnnnnnnnnnnnnnnnnnnnnnnnnnnnnnnnnnnnnnnnnnnnnnnnnnnnnnnnnnnnnnnnnnnnnnnnnnnnnnnnnnnnnnnnnnnnnnnnnnnnnnnnnnnnnnnnnnnnnnnnnnnnnnnnnnnnnnnnnnnnnnnnnnnnnnnnnnnnnnnnnnnnnnnnnnnnnnnnnnnnnnnnnnnnnnnnnnnnnnnnnnnnnnnnnnnnnnnnnnnnnnnnnnnnnnnnnnnnnnnnnnnnnnnnnnnnnnnnnnnnnnnnnnnnnnnnnnnnnnnnnnnnnnnnnnnnnnnnnnnnnnnnnnnnnnnnnnnnnnnnnnnnnnnnnnnnnnnnnnnnnnnnnnnnnnnnnnnnnnnnnnnnnnnnnnnnnnnnnnnnnnnnnnnnnnnnnnnnnnnnnnnnnnnnnnnnnnnnnnnnnnnnnnnnnnnnnnnnnnnnnnnnnnnnnnnnnnnnnnnnnnnnnnnnnnnnnnnnnnnnnnnnnnnnnnnnnnnnnnnnnnnnnnnnnnnnnnnnnnnnnnnnnnnnnnnnnnnnnnnnnnnnnnnnnnnnnnnnnnnnnnnnnnnnnnnnnnnnnnnnnnnnnnnnnnnnnnnnnnnnnnnnnnnnnnnnnnnnnnnnnnnnnnnnnnnnnnnnnnnnnnnnnnnnnnnnnnnnnnnnnnnnnnnnnnnnnnnnnnnnnnnnnnnnnnnnnnnnnnnnnnnnnnnnnnnnnnnnnnnnnnnnnnnnnnnnnnnnnnnnnnnnnnnnnnnnnnnnnnnnnnnnnnnnnnnnnnnnnnnnnnnnnnnnnnnnnnnnnnnnnnnnnnnnnnnnnnnnnnnnnnnnnnnnnnnnnnnnnnnnnnnnnnnnnnnnnnnnnnnnnnnnnnnnnnnnnnnnnnnnnnnnnnnnnnnnnnnnnnnnnnnnnnnnnnnnnnnnnnnnnnnnnnnnnnnnnnnnnnnnnnnnnnnnnnnnnnnnnnnnnnnnnnnnnnnnnnnnnnnnnnnnnnnnnnnnnnnnnnnnnnnnnnnnnnnnnnnnnnnnnnnnnnnnnnnnnnnnnnnnnnnnnnnnnnnnnnnnnnnnnnnnnnnnnnnnnnnnnnnnnnnnnnnnnnnnnnnnnnnnnnnnnnnnnnnnnnnnnnnnnnnnnnnnnnnnnnnnnnnnnnnnnnnnnnnnnnnnnnnnnnnnnnnnnnnnnnnnnnnnnnnnnnnnnnnnnnnnnnnnnnnnnnnnnnnnnnnnnnnnnnnnnnnnnnnnnnnnnnnnnnnnnnnnnnnnnnnnnnnnnnnnnnnnnnnnnnnnnnnnnnnnnnnnnnnnnnnnnnnnnnnnnnnnnnnnnnnnnnnnnnnnnnnnnnnnnnnnnnnnnnnnnnnnnnnnnnnnnnnnnnnnnnnnnnnnnnnnnnnnnnnnnnnnnnnnnnnnnnnnnnnnnnnnnnnnnnnnnnnnnnnnnnnnnnnnnnnnnnnnnnnnnnnnnnnnnnnnnnnnnnnnnnnnnnnnnnnnnnnnnnnnnnnnnnnnnnnnnnnnnnnnnnnnnnnnnnnnnnnnnnnnnnnnnnnnnnnnnnnnnnnnnnnnnnnnnnnnnnnnnnnnnnnnnnnnnnnnnnnnnnnnnnnnnnnnnnnnnnnnnntgtgatcaagctggaggaacagaagtcagacctggagaggcagctaaagactctgaccaagcagatgaaggnaggaggataccgaggaatggaggcggttccaggcagatctgcagaccgcggtggtggtggccaatgacatcaagtgtgaggcccagcaggagctgcgcactgtgaagaggaaactgctggaggaggaggagaagaacgcccggtgcagaaggagctgggggatgtgcagggccacggcaggg

SEQ ID NO: 25046 - DNA, 5768 bp, Macaca Mulatta
  misc_feature (1)...(5768): n = A,T,C or G
gaggcaaactatgcaagaggcaccagactccctctttctggtgaaggaccaacttctcagccgaatagctccaagcaaactgtcctgtcttggcaagctgcaatcgatgctgctagacaggccaaggctgcccaaactatgagcacctctgcaccccgacctgtaggatctctctcccaaagaaaacgtcagcaatacgccaagagcaaaaaacagggtaactcgtccaacagccgacctgcccgcgcccttttctgtttatcactcaataaccccnnnnnnnnnnnnnnnnnnnnnnnnnnnnnnnnnnnaccatttgacatatttatattattggctatttttgccacattgtgtggccttagctatttacatccccatttccctgaagatgattnnnnnnnnnnnnnnnnnnnnnnnnnnnnnnnnnnnnnnnnnnnnnnnnnnnnnnnnnnnnnnnnnnnnnnnnnnnnnnnnnnnnnnnnnnnnnnnnnnnnnnnnnnnnnnnnnnnnnnnnnnnnnnnnnnnnnnnnnnnnnnnnnnnnnnnnnnnnnnnnnngattgtttagtgtaattttggaacaattaaccaaagaaacagaaggcgggaaccactctagcggcaagtctggaggctttgatgtcaaagccctccgtgcctttcgagtgttgcgaccacttcgactagtgtcaggagtgcccagtnnnnnnnnnnnnnnnnnnnnnnnnnnnnnnnnnnnnnnnnnnnnnnnnnnnnnnnnnnnnnnnnnnnnnnnnnnnnnnnnnnnnnnnnnnnnnnnnnnnnnnnnnnnnnnnnnnnnnnnnnnnnnnnnnnnnnnnnnnnnnnnnnnnnnnnnnnnnnnnnnnnnnnnnnnnnnnnnnnnnnnnnnnnnnnnnnnnnnnnnnnnnnnnnnnnnnnnnnnnnnnnnnnnnnnnnnnnnnnnnnnnnnnnnnnnnnnnnnnnnnnnnnnnnnnnnnnnnnnnnnnnnnnnnnnnnnnnnnnnnnnnnnnnnnnnnnnnnnnnnnnnnnnnnnnnnnnnnnnnnnnnnnnnggtaaatgatgcgataggatgggaatggccatgggtgtattttgttagtctcatcatccttggctcatttttcgtccttaacctggttcttggtgtccttagtggngagaattctcaaaggaaagagagaaggcaaaagcacggggagatttccagaagctccgggagaagcagcagctggaggaggatctaaagggctacttggattggatcacccaagctgaggacatcgatcccgagaacgaggaagaaggaggagaggaaggcaaacgaaatanctagcatgcccaccagtgagactgagtctgtgaacacagagaacgtcagcggcgaaggcgagacccgaggctgctgtggaagtctctggtgnnnnnnnnnnnnnnnnnnnnnnnntcagccgacgctggcgtcgctggaaccgattcaatcgcagaagatgtagggccgccgtgaagtctgtcacgttttactggctggttatcgtcctggtgtttctgaacaccttaaccatttcctccgagcactacaatcaaccggattggttgacacagattcaagnnnnnnnnnnnnnnnnnnnnnnnnnnnnnnnnnnnnnnnnnnnnnnnnnnnnnnnnnnnnnnnnnnnnnnnnnnnnnnnnnnnnnnnnnnnnnnnnnnnnnnnnnnnnnnnnnnnnnnnnnnnnnnnnnnnnnnnnnnnnnnnnnnnnnnnnnnnnnnnnnnnnnnnnnnnnnnnnnnnnnnnnnnnnnnnnnnnnnnnnnnnnnnnnnnnnnnnnnnnnnnnnnnnnnnnnnnnnnnnnnnnnnnnnnnnnnnnnnnnnnnnnnnnnnnnnnnnnnnnnnnnnnnnnnnnnnnnnnnnnnnnnnnnnnnnnnnnnnnnnnnnnnnnnnnnnnnnnnnnnnnnnnnnnnnnnnnnnnnnnnnnnnnnnnnnnnnnnnnnnnnnnnnnnnnnnnnnnnnnnnnnnnnnnnnnnnnnnnnnnnnnnnnnnnnncagatcctgacaggcgaagactggaacgctgtgatgtacgatggcatcatggcttacgggggcccgtcctcttcaggaatgatcgtctgcatctacttcatcatcctcttcatttgtggtaactnnnnnnnnnnnnnnnnnnnnnnnnnnnnnnnnnnnnnnnnnnnnnnnnnnnnnnnnnnnnnnaataaaaagaacaacaaaccagaagtcaaccaggtggccaacagtgacaacaaggtnnnnnnnnnnnnnnnnnnnnnnnnnnnnnnnnnnnnnnnnnnnnnnnnnnnnnnnnnnnnnnnnnnnnnnnnnnnnnnnnnnnnnnnnnnnnnnnnnnnnnnnnnnnnnnnnnnnnnnnnnnnnnnnnnnnnnnnnnnnnnnnnnnnnnnnnnnnnnnnnnnnnnnnnnnnnnnnnnnnnnnnnnnnnnnnnnnnnnnnnnnnnnnnnnnnnngatccgcgtgggctgccacaagctcatcaaccaccacgtcttcaccaacctcatcctcgtcttcatcatgctgagcagcgccgctctggccgcagaggaccccatccgcagccactccttccggaacacnnnnnnnnnnnnnnnnnnnnnnnnnnnnnnnnnnnnnnnnnnnnnnnnnnnnnnnnnnnagatgacaacttttggagctttcctccacaaaggggccttctgcaggaactacttcaatttgctggatatgctggtggttggggtgtctctggtgtcatttgggattcanatccagtgccatctctgttgtgaagattctgagagtcttaagggtcctgaggcccctcagggccatcaacagagcaaaaggacttaagnagcacgtggtccagtgcgtcttcgtggccatccggaccatcggcaacatcatgatcgtcaccgccctcctccagttcatgttctgcctgtatcggggtccagttgnnnnnnnnnnnnnnnnnnnnnnnnnnnnnnnnnnnnnnnnnnnnnnnnnnnnnnnnnnnnnnnnnnnnnnnnnnnnnnnnnnnnnnnnnnnnnnnnnnnnnnnnnnnnnnnnnnnnnnnnnnnnnnnnnnnnnnnnnnnnnnnnnnnnnnnnnnnnnnnnnnnnnnnnnnnnnnnnnnnnnnnnnnnnnnnnnnnnnnnnnnnnnnnnnnnnnnnnnnnnnnnnnnnnnnnnnnnnnnnnnnnnnnnnnnnnnnnnnnnnnnnnnnnnnnnnnnnnnnnnnnnnnnnnnnnnnnnnnnnnnnnnnnnnnnnnnnnnnnnnnnnnnnnnnnnnnnnnnnnnnnnnnntcgttacatttcaggagcaaggagaaaaagagtataagaactgtgagctggacaaaaatcagncagcgtcagtgtgttgaatacgccttgaaagcacgtcccttgcggagatacatccccaaaaaacccctaccagtacaagttctggtacgtggtgannnnnnnnnnnnnnnnnnnnnnnnnnnnnnnnnnnnnnnnnnnnnnnnnnnnnnnnnnnnnnnnnnagcactacgagcagtccaagatgttcaatgacgccatggacatcctgaacatggtcttcaccggggtgttcaccgtcgagatggttttgaaagtcatcgcctttaagcctaaggnaggggtattttagtgacgcctggaacacgtttgactccctcatcgtaatcggcagcattatagacgtggccctcagcgaagcagacnccaactgaaagtgaaaatgtccctgtcccaactgctacacctgggnnnnnnnnnnnnnnnnnnnnnnnnnnnnnnnnnnnnnnnnnnnnnnnnnnnnnnnnnnnnnnnnnnnnnnnnnnnnnnnnnnnnnnnnnnnnnnnnnnnnnnnnnnnnnnnnnnnnnnnnnnnnnnnnnnnnnnnnnnnnnnnnnnnnnnnnnnnnnnnnnnnnnnnnnnnnnnnnnnnnnnnnnnnnnnnnnnnnnnnnnnnnnnnnnnnnnnnnnnnnnnnnnnnnnnnnnnnnnnnnnnnnnnnnnnnnnnnnnnnnnnnnnnnnnnnnnnnnnnnnnnnnnaggtgtgcgacaggtgaggcctggcaggagatcatgctggcctgcctcccagggaagctctgtgaccctgagtcagattacaaccccggggaggagtatacatgtgggagcaactttgccattgtctatttcatcagtttttacatgctctgtgcgtttctgnnnnnnnnnnnnnnnnnnnnnnnnnnnnnnnnnnnnnnnnnnnnnnnnnnnnnnnnnnnnnnnnnnnnnnnnnnnnnnnnnnnnnnnnnnnnnnnnnnnnnnnnnnnnnnnnnnnnnnnnnnnnnnnnnnnnnnnnnnnnnnnnnnnnnnnnnnnnnnnnnnnnnnnnnnnnnnnnnnnnnnnnnnnnnnnnnnnnnnnnnnnnnnnnnnnnnnnnnnnnnnnnnnnnnnnnnnnnnnnnnnnnnnnnnnnnnnnnnnnnnnnnnnnnnnnnnnnnnnnnnnnnnnnnnnnnnnnnnnnnnnnnnnnnnnnnnnnnnnnnnnnnnnagggaacctggagcaagctaatgaagaacttcgggctgtgataaagaaaatttggaagaaaaccagcatgaaattacttgaccaagttgtccctccagctggtgngatgatgaggtaaccgtggggaagttctatgccactttcctgatacaggactactttaggaaattcaagaaacggaaagaacaaggactggtgggaaagtaccctgcgaagaacaccacaattgccctacaggnnnnnnnnnnnnnnnnnnnnnnnnnnnnnnnnnnnnnnnnnnnnnnnnnnnnnnnnnnnnnnnnnnnnnnnnnnnnnnnnnnnnnnnnnnnnnnnnnnnnnnnnnnnnnnnnnnnnnnnnnnnnnnnnnnnnnnnnnnnnnnnnnnnnnnnnnnnnnnnnnnnnnnnnnnnnnnnnnnnnnnnnnnnnnnnnnnnnnnnnnnnnnnnnnnnnnnnnnnnnnnnnnnnnnnnnnnnnnnnnnnnnnnnnnnnnnnnnnnnnnnnnnnnnnnnnnnnnnnnnnnnnnnnnnnnnnnnnnnnnnnnnnnnnnnnnnnnnnnnnnnnnnnnnnnnnnnnnnnnnnnnnnnnnnnnnnnnnnnnnnnnnnnnnnnnnnnnnnnnnnnnnnnnnnnnnnnnnnnnnnnnnnnnnnnnnnnnnnnnnnnnnnnnnnnnnnnnnnnnnnnnnnnnnnnnnnnnnnnnnnnnnnnnnnnnnnnnnnnnnnnagaacccgctattatgaaacttacattaggtnggtccgactcatgagatgaacagctcccaactagtttgccgggaagacccagagatactcggctatttcagggacccccgctgcttcggggagcaggagtatttctgtagcgaggagtgctatgaggatgacagctcgcccacctggagcaggnnnnnnnnnnnnnnnnnnnnnnnnnnnnnnnnnnnnnnnnnnnnnnnnnnnnnnnnnnnnnnnnnnnnnnnnnnnnnnnnnnnnnnnnnnnnnnnnnnnnnnnnnnnnnnnnnnnnnnnnnnnnnnnnnnnnnnnnnnnnnnnnnnnnnnnnnnnnnnnnnnncccaccgcagatcctccttcaacttcgagtgcctgcgccggcagagcagccaggaggaggtcccttcatctcccaccttcccccaccgcacggccctgcctctgcatctcatgcagcaacag

SEQ ID NO: 25047 - DNA, 182 bp, Macaca Mulatta
agtgagtctaattttcacaattacaccttggtctcattgaatgaagaatttaatcgtggacgaggactaaatgtgggtgcccgagcttgggacaagggagaggtcttgatgtttttctgtgatgttgatatctatttctcagccgaattccttaacagctgccggttaaatgctgagccagg

SEQ ID NO: 25048 - DNA, 164 bp, Macaca Mulatta
gacatgatagccactggctgtgaagacacaaatgttcgtgtttattacgtagccaccagctcagatcaaccattgaaagtatttagtgggcatacagcaaaagtgtttcatgttaaatggtctcctctgagagagggaattctttgcagtggttctgatgatgg

SEQ ID NO: 25049 - DNA, 751 bp, Macaca Mulatta
  misc_feature (1)...(751): n = A,T,C or G
cagtgaccaccgtagtccggaggccttccgcacgcgcatctaggcggccacacaaatggagtctgtgctgggtgctggtgggaagcccaactgcctggtcattgttgagatcgacagggcccccgtggnnnnnnnnnnnnnnnnnnnnnnnnnnnnnnnnnnnnnnnnnnnnnnnnnnnnnnnnnnnnnnnnnnnnnnnnnnnnnnnnnnnnnnnnnnnnnnnnnnnnnnnnnnnnnnnnnnnnnnnnnnnnnnnnnnnnnnnnnnnnnnnnnnnnnnnnnnnnnnnnnnnnnnnnnnnnnnnnnnnnnnnnnnnnnnnnnnnnnnnnnnnnnnnnnnnnnnnnnnnnnnnnnnnnnnnnnnnnnnnnnnnnnnnnnnnnnnnnnnnnnnnnnnnnnnnnnnnnnnnnnnnnnnnnnnnnnnnnnnnnnnnnnnnnnnnnnnnnnnnnnnnnnnnnnnnnnnnnnnnnnnnnnnnnnnnnnnnnnnnnnnnnnnnnnnnnnnnnnnnnnnnnnnnnnnnnnnnnnnnnnnnnnnnnnnnnnnnnnnnnnnnnnnnnnnnnnnnnnnnnnnnnnnnnnnnnnnnnnnnnnnnnnnnnnnnnnaggcgccgtgtgggccaggaccccaccatgcctgttgacacgctcagagtgggtgacggggatgcgggctccatgacctccgcctagcagcgattttaccgtgtcctgcatgctgccgcctccgcgggcgagcacgagaaggtggttcag

SEQ ID NO: 25050 - DNA, 3849 bp, Macaca Mulatta
  misc_feature (1)...(3849): n = A,T,C or G
gccacatcgtgaccccaggccctggtcactccatgctttggagggtgcttttgtcagagaagcctcctttccctcacccagagctggatttccaagaggctcccacacctagctgccctggcagactcccagggaggaaaaacagcgtggccttggcagctgccccgaggaaggagcccacaggtgacagggagaagccattgccattccctggcctggcccccttcagcaaccctnnnnnnnnnnnnnnnnnnnnnnnnnnnnnnnnnnnnnnnnnnnnnnnnnnnnnnnnnnnnnnnnnnnnnnnnnnnnnnnnnnnnnnnnnnnnnnnnnnnnnnnnnnnnnnnnnnnnnnnnnnnnnnnnnnnnnnnnnnnnnnnnnnnnnnnnnnnnnnnnnnnnnnnnnnnnnnnnnnnnnnnnnnnnnnnnnnnnnnnnnnnnnnnnnnnnnnnnnnnnnnnnnnnnnnnnnnnnnnnnnnnnnnnnnnnnnnnnnnnnnnnnnnnnnnnnnnnnnnnnnnnnnnnnnnnnnnnnnnnnnnnnnnnnnnnnnnnnnnnnnnnnnnnnnnnnnnnnnnnnnnnnnnnnnnnnnnnnnnnnnnnnnnnnnnnnnnnnnnnnnnnnnnnnnnnnnnnnnnnnnnnnnnnnnnnnnnnnnnnnnnnnnnnnnnnnnnnnnnnnnnnnnnnnnnnnnnnnnnnnnnnnnnnnnnnnnnnnnnnnnnnnnnnnnnnnnnnnnnnnnnnnnnnnnnnnnnnnnnnnnnnnnnnnnnnnnnnnnnnnnnnnnnnnnnnnnnnnnnnnnnnnnnnnnnnnnnnnnnnnnnnnnnnnnnnnnnnnnnnnnnnnnnnnnnnnnnnnnnnnnnnnnnnnnnnnnnnnnnnnnnnnnnnnnnnnnnnnnnnnnnnnnnnnnnnnnnnnnnnnnnnnnnnnnnnnnnnnnnnnnnnnnnnnnnnnnnnnnnnnnnnnnnnnnnnnnnnnnnnnnnnnnnnnnnnnnnnnnnnnnnnnnnnnnnnnnnnnnnnnnnnnnnnnnnnnnnnnnnnnnnnnnnnnnnnnnnnnnnnnnnnnnnnnnnnnnnnnnnnnnnnnnnnnnnnnnnnnnnnnnnnnnnnnnnnnnnnnnnnnnnnnnnnnnnnnnnnnnnnnnnnnnnnnnnnnnnnnnnnnnnnnnnnnnnnnnnnnnnnnnnnnnnnnnnnnnnnnnnnnnnnnnnnnnnnnnnnnnnnnnnnnnnnnnnnnnnnnnnnnnnnnnnnnnnnnnnnnnnnnnnnnnnnnnnnnnnnnnnnnnnnnnnnnnnnnnnnnnnnnnnnnnnnnnnnnnnnnnnnnnnnnnnnnnnnnnnnnnnnnnnnnnnnnnnnnnnnnnnnnnnnnnnnnnnnnnnnnnnnnnnnnnnnnnnnnnnnnnnnnnnnnnnnnnnnnnnnnnnnnnnnnnnnnnnnnnnnnnnnnnnnnnnnnnnnnnnnnnnnnnnnnnnnnnnnnnnnnnnnnnnnnnnnnnnnnnnnnnnnnnnnnnnnnnnnnnnnnnnnnagtcagatgcgcccagatttgcccacctgacttctttgcctcagcagctgccctcccagcagctgatgtccaaggatcaggatgagcaagaggaactggattttctgtttgacgaggagatggagcagatggatgggcggaagaacaccttcaccgcctggtctgatgaggaatcggactatgagattgatgacagggatgtcaacaagatcctcattgtcacccagacaccacattacatgcgccggcacccagggggggaccgcacaggcaaccacacctcgcgtgctaagatgagcgccgagctggccaaggtcattaatgatggcctcttctactatgagcaggacctgtgggctgagaagtttgaacctgagtattcccaaatcaagnnnnnnnnnnnnnnnnnnnnnnnnnnnnnnnnnnnnnnnnnnnnnnnnnnnnnnnnnnnnnnnnnnnnnnnnnnnnnnnnnnnnnnnnnnnnnnnnnnnnnnnnnnnnnnnnnnnnnnnnnnnnnnnnnnnnnnnnnnnnnnnnnnnnnnnnnnnnnnnnnnnnnnnnnnnnnnnnnnnnnnnnnnnnnnnnnnnnnnnnnnnnnnnnnnnnnnnnnnnnnnnnnnnnnnnnnnnnnnnnnnnnnnnnnnnnnnnnnnnnnnnnnnnnnnnnnnnnnnnnnnnnnnnnnnnnnnnnnnnnnnnnnnnnnnnnnnnnnnnnnnnnnnnnagatgcctcgaaaaagaaagacaagacacagttcaaacccacccttggagagccatgtgggctgggagatggattcccgtgagcacaggccccgtactgcttccatcannnnnnnnnnnnnnnnnnnnnnnnnnnnnnnnnnnnnnnnnnnnnnnnnnnnnnnnnnnnnnnnnnnnnnnnnnnnnnnnnnnnnnnnnnnnnnnnnnnnnnnnnnnnnnnnnnnnnnnnnnnnnnnnnnnnnnnnnnnnnnnnnnnnnnnnnnnnnnnnnnnnnnnnnnnnnnnnnnnnnnnnnnnnnnnnnnnnnnnnnnnnnnnnnnnnnnnnnnnnnnnnnnnnnnnnnnnnnnnnnnnnnnnnnnnnnnnnnnnnnnnnnnnnnnnnnnnnnnnnnnnnnnnnnnnnnnnnnnnnnnnnnnnnnnnnnnnnnnnnnnnnnnnnnnnnnnnnnnnnnnnnnnnnnnnnnnnnnnnnnnnnnnnnnnnnnnnnnnnnnnnnnnnnnnnnnnnnnnnnnnnnnnnnnnnnnnnnnnnnnnnnnnnnnnnnnnnnnnnnnnnnnaaatattccaaagccaaaaattggacatttgaccccaaactgcaagaatacctcggcaaattccgacgtcttgaagacttccgagtagannnnnnnnnnnnnnnnnnnnnnnnnnnnnnnnnnnnnnnnnnnnnnnnnnnnnnnnnnnnnnnnnnnnnnnnnnnnnnnnnnnnnnnnnnnnnnnnnnnnnnnnnnnnnnnnnnnnnnnnnnnnnnnnnnnnnnnnnnnnnnnnnnnnnnnnnnnnnnnnnnnnnnnnnnnnnnnnnnnnnnnnnnnnnnnnnnnnnnnnnnnnnnnnnnnnnnnnnnnnnnnnnnnnnnnnnnnnnnnnnnnnnnnnnnnnnnnnnnnnnnnnnnnnnnnnnnnnnnnnnnnnnnnnnnnnnnnnnnnnnnnnnnnnnnnnnnnnnnnnnnnnnnnnnnnnnnnnnnnnnnnnnnnnnnnnnnnnnnnnnnnnnnnnnnnnnnnnnnnnnnnnnnnnnnnnnnnnnnnnnnnnnnnnnnnnnnnnnnnnnnnnnnnnnnnnnnnnnnnnnnnnnnnnnnnnnnnnnnnnnnnnnnnnnnnnnnnnnnnnnnnnnnnnnnnnnnnnnnnnnnnnnnnnnnnnnnnnnnnnnnnnnnnnnnnnnnnnnnnnnnnnnnnnnnnnnnnnnnnnnnnnnnnnnnnnnnnnnnaccctggtccccacccctaacctcctcctactccccctcaagccaactctgcagcccacaagaaggccctgcgggccccccattgcccagcactgtcccatagaaggctctggtggcacctctgggcctcaggagcatcagtcccttgatcatctggggtttgtcatcaccatgttttctccctgctgtccccaccatgcccttctgccatcttctgggagaaggaaaccaaaggatctaaaactggggtttgggggaaggtttcagcctctccccactccccttgccccacatcctttactccccagcccagagagacgctgcttttaccaggaaagactattgaaagatgatttattttatttttctctgacctttccatccttgagaaaa

SEQ ID NO: 25051 - DNA, 752 bp, Macaca Mulatta
  misc_feature (1)...(752): n = A,T,C or G
tgctgcagctgatggagacgccagagttggcggggcaggaggacgctgtacagatgcaccagctgaaaatgaagtgagcgctgctgcccaagccgcctggctatgcttcatttgcaccagggttggcacggtcagacccagcagaggaaccctctgcctctgtacaatggtgttctcatctggtggccctcagatatacacttccccagagggcatagtcgtgaaacttcacatcaatttcgctgtgcattgctgagacactgctgtgtacctcgactcatgccaatcctgcacacgtggctgtctgtggagcttggatattgtcacccatgccccactgagcacaaaccttcagatgcctgttctcagcccccaagcacacacactcatgtacatacacatttgacagtcatgcttcataacctcctgatgctacacatcccaccaagatggcnnnnnnnnnnnnnnnnnnnnnnnnnnnnnnntcactctgtcgctaggctgaagtgcagtggcgcgatctcagctccctgcaacctccgcctcctgggttcaaatgaatcccctgcttcagcctcccaagtagctgggactacaggcatgtgccccacgcccagctaatgttttgtattttagtagagacggggtttctccatgttggccaggatggtctccatctcctgacctcgtgatctgcccgcctcagcctcccaaagtgctgggattacaggcataagcaagcactcccggtc

SEQ ID NO: 25052 - DNA, 422 bp, Macaca Mulatta
tctctgggttccttatctattcggtgatttggagatttatctttgctccctttggaattgttcaaatgttcttttaatggtcagtttaatgaacttcaccatcgaggttaatgaatgacagtagtcacacttattgctgtttatgttatttgggagtaagactcttgcttttgattcacatggggaaatccctgttattttgtgaattggggcaagataacgtagcagaggaattaataatttttttagaaacttgaacttagcagcaaaatagagctcataaagaaataatgaaatgaaaatgtagttaattcttgccttatacctctttctctcccctgtaaaattaaaatatatacatgtatacctggatttgcttggcttctttgagaatgtaagagaaataaaaattgaaagaataa

SEQ ID NO: 25053 - DNA, 494 bp, Macaca Mulatta
  misc_feature (1)...(494): n = A,T,C or G
gttgctctttgggattgctcagccccaggtgcctccaaaatgcctgctttcagggcctaagagtgaagggctaatgacctgggagctagaccggctgctctgggctcggtcagtggagaatctggccacagccaccaccaccctcacctccctggcacagcttctgggcaagatcagcaacattgtcattaaggacgatgtggcatctgaggtnnnggtatacagggctgtagctgcagtccagaagtcagcagaagagttggcctctgggcacctggcatctgcctttgtcgccagccaggaagctgtgacgtcctctgagcgtgccttttttgacccgtcactcctccacctcctttatttccctgatgaccagaaatttgccatctacatcccactcttcctgcctatggctgtgcccatcctcctgtccctggtcaagatcttcctggagacccacaagtcctggaaaaagcctgagaagacagactgag

SEQ ID NO: 25054 - DNA, 242 bp, Macaca Mulatta
ttggagtgtcgtgcgcaggccgggctgtgggaccagcgcagggatccgggcagtgtgtggagtgccgtgctcaggccgggctgcggagccagtgcggggatccgggttgggatgggatgggaggcttgttctgccccctcagcagacatctgagagtctacagacattcagcggaacccctgggtgcagggccctgtcctgagaccccacaccaggcctggtggacggcagtggtatggagg

SEQ ID NO: 25055 - DNA, 710 bp, Macaca Mulatta
  misc_feature (1)...(710): n = A,T,C or G
tggcatctgcccctcctcagagcaaagcaaatgttgggtgaacggctgtttcctcttattcaagccatgcaccctactcttgctggtaaaatcactggcatgtagttggagattgataattcagaacttcttcatatgctcgagtctcctgagtcactccgttctaaggttgatgaagctgtagctgtactacaagcccaccaagctaaagaggctgcccagaaagcagttaacagtgccaccggtgttccaactgtttaaaattgatcagggaccacgaaaagaaacttgtgcttcaccgaagaaaaatatctaaacatcgaaaaacttaaatattatggaaaaaaaacattgcaaaatataacataaataaaaaacggaaaggaaactttgaaccttatgtaccgagcaaatgccaggtctagcaaacataatgctagtcctagattacttattgattnnnnnnnnnnnnnnnnnnnnnnnnnnnntagtaaaatataaaaacaaattaatgttttatagaccctgggaaaaagaattttcagcaaagtacaaaaatttaaagcattcctttgtttaattttgtaattctttactgtggaatagctcaaaatgtcagttctgttttaaataacagaattgataactgagcaaggaaacgtaatttggattataaaattcttgctttaataaaaattccttaaacagta

SEQ ID NO: 25056 - DNA, 3393 bp, Macaca Mulatta
  misc_feature (1)...(3393): n = A,T,C or G
gtgacctgcttagagagaagcggtgggtctgcgcctggatttcggagtcatggtgctgccgcagctctgagcattcccacgtcattagaggagccggtggggaatgagagcatgtctgctttcaggttgtggcccggcctgctgatgatcgtgctggcttctctctgccatagaggttcatcgtgtggcctttcaacgcacatagaaannnnnnnnnnnnnnnnnnnnnnnnnnnnnnnnnnnnnnnnnnnnnnnnnnnnnnnnnnnnnnnnnnnnnnnnnnnnnnnnnnnnnnnnnnnnnnnnnnnnnnnnnnnnnnnnnnnnnnnnnnnnnnnnnnnnnnnnnnnnnnnnnnnnnnnnnnnnnnnnnnnnnnnnnnnnnnnnnnnnnnnnnnnnnnnnnnnnnnnnnnnnnnnnnnnnnnnnnnnnnnnnnnnnnnnnnnnnnnnnnnnnnnnnnnnnnnnnnnnnnnnnnnnnnnnnnnnnnnnnnnnnnnnnnnnnnnnnnnnnnnnnnnnnnnnnnnnnnnnnnnnnnnnnnnnnnnnnnnnnnnnnnnnnnnnnnnnnnnnnnnnnnnnnnnnnnnnnnnnnnnnnnnnnnnnnnnnnnnnnnnnnnnnnnnnnnnnnnnnnnnnnnnnnnnnnnnnnnnnnnnnnnnnnnggtatgtgccagtcaaagatctgctgggaatttatgagaaactctatggtcgagaagtcatcactgaaaatgtaattgttgattgttcacatatccagttcttagaaatgtnnnnnnnnnnnnnnnnnnnnnnnnnnnnnnnnnnnnnnnnnnnnnnnnnnnnnnnnnnnnnnnnnnnnnnnnnnnnnnnnnnnnnnnnnnnnnnnnnnnnnnnnnnnnnnnnnnnnnnnnnnnnnnnnnnnnnnnnnnnnnnnnnnnnnnnnnnnnnnnnnnnnnnnnnnnnnnnnnnnnnnnnnnnnnnnnnnnnnnnnnnnnnnnnnnnnnnnnnnnnnnnnnnnnnnnnnnnnnnnnnnnnnnnnnnnnnnnnnnnnnnnnnnnnnnnnnnnnnnnnnnnnnnnnnnnnnnnnnnnnnnnnnnnnnnnnnnnnnnnnnnnnnnnnnnnnnnnnnnnnnnnnnnnnnnnnnnnnnnnnnnnnnnnnnnnnnnnnnnnnnnnnnnnnnnnnnnnnnnnnnnnnnnnnnnnnnnnnnnnnnnnnnnnnnnnnnnnnnnnnnnnnnnnnnnnnnnnnnnnnnnnnnnnnnnnnnnnnnnnnnnnnnnnnnnnnnnnnnnnnnnnnnnnnnnnnnnnnnnnnnnnnnnnnnnnnnnnnnnnnnnnnnnnnnnnnnnnnnnnnnnnnnnnnnnnnnnnnnnnnnnnnnnnnnnnnnnnnnnnnnnnnnnnnnnnnnnnnnnnnnnnnnnnnnnnnnnnnnnnnnnnnnnnnnnnnnnnnnnnnnnnnnnnnnnnnnnnnnnnnnnnnnnnnnnnnnnnnnnnnnnnnnnnnnnnnnnnnnnnnnnnnnnnnnnnnnnnnnnnnnnnnnnnnnnnnnnnnnnnnnnnnnnnnnnnnnnnnnnnnnnnnnnnnnnnnnnnnnnnnnnnnnnnnnnnnnnnnnnnnnnnnnnnnnnnnnnnnnnnnnnnnnnnnnnnnnnnnnnnnnnnnnnnnnnnnnnnnnnnnnnnnnnnnnnnnnnnnnnnnnnnnnnnnnnnnnnnnnnnnnnnnnnnnnnnnnnnnnnnnnnnnnnnnnnnnnnnnnnnnnnnnnnnnnnnnnnnnnnnnnnnnnnnnnnnnnnnnnnnnnnnnnnnnnnnnnnnnnnnnnnnnnnnnnnnnnnnnnnnnnnnnnnnnnnnnnnnnnnnnnnnnnnnnnnnnnnnnnnnnnnnnnnnnnnnnnnnnnnnnnnnnnnnnnnnnnnnnnnnnnnnnnnnnnnnnnnnnnnnnnnnnnnnnnnnnnnnnnnnnnnggctgggccgtttgttacacatccgagatgagaaaaagagccttgggagggtgtatggctacttcccaccaaacagccaaagctggtttaccattgttggagacaaggnaggcaatggggaaactgggtacttccctgtccagtggccacgtgctgatgaatggnnnnnnnnnnnnnnnnnnnnnnnnnnnnnnnnnnnnnnnnnnnnnnnnnnnaagatggcattcctgaccatgaccctgcaccaaggcttttgcactcggatgtacgcgctcacatccgacctgcagcctccgctgctcagcaccttcagcggagaccgcctcttctctcgatttggtggcgttctgcacttgagtgacctggatgatgatggcnnnnnnnnnnnnnnnnnnnnnnnnnnnnnnnnnnnnnnnnnnnnnnnnnnnnnnnnnnnnnnnnnnnnnnnnnnnnnnnnnnnnnnnnnnnnnnnnnnnnnnnnnnnnnnnnnnnnnnnnnnnnnnnnnnnnnnnnnnnnnnnnnnnnnnnnnnnnnnnnnnnnnnnnnnnnnnnnnnnnnnnnnnnnnnnnnnnnnnnnnnnnnnnnnnnnnnnnnnnnnnnnnnnnnnnnnnnnnnnnnnnnnnnnnnnnnnnnnnnnnnnnnnnnnnnnnnnnnnnnnnnnnnnnnnnnnnnnnnnnnnnnnnnnnnnnnnnnnnnnnnnnnnnnnnnnnnnnnnnnnnnnnnnnnnnnnnnnnnnnnnnnnnnnnnnnnnnnnnnnnnnnnnnnnnnnnnnnnnnnnnnnnnnnnnnnnnnnnnnnnnnnnnnnnnnnnnnnnnnnnnnnnnnnnnnnnnnnnnnnnnnnnnnnnnnnnnnnnnnnnnnnnnnnnnnnnnnnnnctgatatagtaaatatatgactgcaccaggagtatgtgaaatatcagacacactctgctcattcatgtctccttccacagtttatttcctcgcttcctttgcatctaaacctttcttctttcctaactttttgcctatagtcagacctgctgtaccacctatttcctcttcctcttgaatgtctttccagtggctaaaaaggtccctctgtggttatctgtgagaacaatctctgtaacaattcctcctaaaaacatccttttcttaaaaaagaattgtgcagccataaaaaaagagcaagatcatgccctttgcagggacatggatggagcttaagtccattaaccttcataaactaatgcaggaacagaaaaccaaatactgcatgttctcacttgtaagtgggagctaaatgataacacatggacacatagagggaaacagcacacactggggcctatgagaggacgtaaggtgggattatgtatatatcacgaaaaacaactaatggatacttagggcgatgaaataatctgtgtaacaaacccccatgacacacctttatgtatgtaacaaacctgcacttcc

SEQ ID NO: 25057 - DNA, 826 bp, Macaca Mulatta
  misc_feature (1)...(826): n = A,T,C or G
tgaacaaacatgggcaaacccctgggtttttcccgaaaattccaaaatttggcccggccatggtgggcacaaatcggtagtctcaagctatttgcagggctgaggtgcgaatatcacttgagccccttggaaggggttaaagggtctcccattaaacccccatgaatttatggccacttggcaattcaaggcctgggtgtaacaaaggggaagaccctgtctcaaaagcgaaaaaaaaaaaggtcaggaaattttgggttcacccctgtaaaccccagcattttgggaagcccgatgcgggcggatcacgagttcaggagatcaaaaccattcctggctaacatgggtgaaacattgtctctactaaaaacacaaaaaattagtcaggcatggtggcatgtgcccgtagtcccagctactccagaggctgagtcagnnnnnnnnnnnnnnnnnnnnnnnnnnnnnnnnnnnnnnnnnnnngtcccgccactgcactccacaggcaacagagtgagactccatcnnnnnnnnnnnnnnnnnnnnnnnnnaaattttgacaataattgagaaagtaaactaaatgatcaagacagatgtataaaaatatatgtataatgtaatgtttattaagcttgcttgaaaaacagaattcttttactttaaatttctccatttcaatgcatgaaaggaatggtccacagtaaaacaaaagcagtatttccaagaatgttagttgtctctagctctgtatacattttctaccgtcatatgtctaccaccataaccaatgcagagttgtttaacatgaagttttgacccaaactcc

SEQ ID NO: 25058 - DNA, 644 bp, Macaca Mulatta
gggctttcaagagttggaactaaaaaatgtggtcattagcagacttttgactactgcatctaatgtttttcataatcctgttgagaagaataagcaaatggtaagaattctccaagagagttatctagatgtaggtggctctgaggccaacatgaaagtttggctactaaaactgttaagccaaaacccatttattttgttaaattctcccgcagctataaaggaaacactagaatttctccaggagcaaggtttcacaagctttgaaattctccagcttctgtccaaactcaaaggatttctttttcaactttgcccaagaagtatacagaacagtatttccttctctaaaaatgtttttaaatgcacagatcatgacctgaagcaattagttttgaaatgtcctgcccttttatattattctgttccagttttagaagagagaatgcaaggattattgagagaaggaatttccatagctcaaataagagagacgccaatggttcttgaattaacgccacagatagtacagtacaggataaggaaactgaattccttaggctatagaataaaggatggacatctagcaaatctaaatggatcaaaaaaagagtttgaagctaaattttgcaaaattcaggcca

SEQ ID NO: 25059 - DNA, 284 bp, Macaca Mulatta
tgctatattcccatctaccccaagagtttccttgcctctcgggtgcccacacccctaggcagttaaatggaggttgatggacagggtaggacccggtcttctgaggaatcctgccaatggagagatggtggacatggagcacacatcttttattgctctgcaggcctctgagaccctgaatctgttcagcactaactccaggagtgaccttcagatcttttccatgaccttcagaccttttcccagctatctcacagacttcctctcctttccctgggaactag

SEQ ID NO: 25060 - DNA, 300 bp, Macaca Mulatta
gggcctccttcccaaggacaacataagaccacttcatatctggaactctagaaacacactgcagcaatcaacctcctgtgccaaggtggccccactcttgtagcatggacactgctagctgggttcaaatcccagctccagtagttgccagcgctgggtgaccttgagcaagtgactactcttcactagattgtgggagaactaaatgtgatggtcattatttatttacagctcaccacacgctcttcacatccgttacctccctggatcctcaaaataacctcataatattggaaggcc

SEQ ID NO: 25061 - DNA, 168 bp, Macaca Mulatta
agtttttgctgggcagaaaagaagaagaggcagtgctggttgggggtgaatggtctccttccctggatggcctcgacccccaggctgacccacaggtgctggtgcgcaccgccatccgctgtgcgcaggcccagaccggcattgacttgagtggctgcaccaagtggt

SEQ ID NO: 25062 - DNA, 602 bp, Macaca Mulatta
atggctttgggcagaaggattgtgcagattgtcagctccaaatctgaagtcaaggctttagacctttatcctattgcttattgaggaaaaggaatgggaggcaaacgcctgctatgtgacaaaaacatacacttcgctatgttttgcaaccctttttgtctggggctagcaataatgatatttaaagcaataattttttgtatgtcatactccacaatttacatgtatattacagccatcaaacatgtaaacatcaagatatttgaagaagtctaattgtctttccttgacaagttgattttgcaattgtggtaaataccaaataacaatcttgtattctaacataatctgcagttgtctgtttctgttttaacgattacagtgcatgttagggagaaagtccctgaatttctttagttttatattcaaacaattatgccactggatgcaacaaacataataaatacataaaagattttaaaaatacctaatgaagtggcattcattgaattcaaataaaatcaacatttcaatgagagaacccaatcatattttataacatgtacactaataaatattttaagataaatgtggtttcttct

SEQ ID NO: 25063 - DNA, 928 bp, Macaca Mulatta
gggattttcctatgccccttgtcagaatgccaatccctctccaggacaagcatgactttcaggactctgtgagaataacgttggactttaatcttaccgatccagaaaatgggcctgttcttgatgattctctaccgaactcagtacatgaatatattccttttgccaaagattgtggaaacaaggaaaaatgtatctcggacctcagcctgcatgtcgccaccacagaaaaggacctgctaattgtccggtcccagaatgataagttcaatgttagcctcacagtcaaaaatacaaaggacagtgcctacaataccaggaaaatagtgcattattctccaaatctagttttttcaggaattgaggctatccaaaaagacagttgtgaatccaatcattatatcacatgtaaagttggatatcccttcctgagaaaaggagagattgtaactttcaaaatattgtttcagtttaacacatcctttctcatggaaaatgtgaccttttatttaaatgcaacaagcgacggtgaagaacctcctgaaaccctttctgataatgtagtaaatatttctattccggtaaaatatgaagttggactacagttttacagctctgcaagtgaataccacatttcaattgctgccaatgagacagtccctgaagttattaattctacggaggacattggaaatgaaattaatatcttctacctgattagaaaaagtggatcttttccaatgccagaacttaagctgtcaatttcattccccaacatgacatcaaatggttatcctgtgctatatccaactggattgtcatcttctgataatgcaaactgcagaccccatatctttgaggatcctttcagtatagactctggaaagaaaatgactacatcaactgtaccatctcaaaaaaaggcaca

SEQ ID NO: 25064 - DNA, 803 bp, Macaca Mulatta
  misc_feature (1)...(803): n = A,T,C or G
gctgcgtccctacatggtatcagatgtccttggtgtagctgtgccagctgggccgctgaccaccaagccagactatgctgggcaccagctccagcagattatggagcacaaaaagagccagaaggaaggcatgaaggagaaactcacacacacggcctctgaaaatgggcactatgagttggagcacctttctactcccaagttgaagagttctccccatagcccagaccaccctggaagcctcatggagaattaaagagggaagcctccttaacgagccacaggatggtacccggccccaaaaggaatcctgggcaggaggacagtgacaacaggtgactttattctttagagtgaactttccaaagccagtctggctggaaacagcttatctataatctgaaatgctggctcaaacagttatggggaagttcccagattgggtagcattcagattgatttgagcagctcctactgtgataagtgtatcccagatccacaatgtaaatatatatatgtgatttgtaagaaagaactggtttgtggttcttaagctttagatagccatgaatctccccttcccaccccagtcctctggggtacttcaaccatggccgttcaagtcttggcccatttcactctttttagactcaaagattctgctgagtttccagttgctgctgctgaaaggttttaccaggaactgcaattctgggtatttgaatatgttccctcttctgagaagacaagtgtgattttctttggtttagacattgccagagataanatgcanatggagttca

SEQ ID NO: 25065 - DNA, 128 bp, Macaca Mulatta
gtcggccgccagaagagccggcacctgttgtgcaaattgtcagacgacaaccaccaccttatggcgccgaaacgccaacggggaccctgtctgcaacgcctgtggcctctactacaagctgcacaatg

SEQ ID NO: 25066 - DNA, 932 bp, Macaca Mulatta
  misc_feature (1)...(932): n = A,T,C or G
aaatcatgaccaccccaggaaaagagaactttcgcctaaaaagttataagaacaaatctctgaatccagatgagatgcgcaggaggagggaggaagaaggactacagttacgaaagcagaaaagagaagannnnnnnnnnnnnnnnnnnnnnnnnnnnnnnnnnnnnnnnnnnnnnnnnnnnnnnnnnnnnnnnnnnnnnnnnnnnnnnnnnnnnnnnnnnnnnnnnnnnnnnnnnnnnnnnnnnnnnnnnnnnnnnnnnnnnnnnnnnnnnnnnnnnnnnnnnnnnnnnnnnnnnnnnnnnnnnnnnnnnnnnnnnnnnnnnnnnnnnnnnnnnnnnnnagaacctaaccctcctattgatgaagttatcagcacaccaggagtagtggcaaggtttgtggagttcctcaaacgaaaagagaattgtacactgcannnnnnnnnnnnnnnnnnnnnnnnnnnnnnnnnnnnnnnnnnnnnnnnnnnnnnnnnnnnnnnnnnnnnnnnnnnnnnnnnnnnnnnnnnnnnnnnnnnnnnnnnnnnnnnnnnnnnnnnnnnnnnnngacaggcagtctgggctcttggcaacattgctggagatagtaccatgtgcagggactatgtcttagactgcaatatccttccccctcttttgcagtngttattttcaaagcaaaaccgcctgaccatgacccggaatgcagtatgggctttgtctaatctctgtagagggaaaagtccacctccagaatttgcaaaggtnnnaggtttctccatgtctgaatgtgctttcctggttgctgtttgtcagtgacactgatgtactggctgatgcctgctgggccctctcatatctatcagatggacccaatgataaaattcaagcagtcatcgatgcgggagtatgtaggagacttgtggaactgctgat

SEQ ID NO: 25067 - DNA, 834 bp, Macaca Mulatta
ggggcagttcggcggtcccgcgggtctgtctcttgcttcaacagtgtttggacggaacagatccggggactctttcttccagcctccgagcgccctccgatttcctctccacttgcaacctccgggaccatcttctcggccatctcctgcttctgggacctgccagcaccgtttttgtggttagctccgtcttgccgaccaaccatgagctcccagattcgtcagaattattccaccgacgtggaggcagccgtcaacagcctggtcaatatgtacctgcaggcctcctacacctacctctctctgggcttctatttcgaccgcgatgatgtggctctggaaggcgtgagccacttcttccgcgaattggccgaggagaagcgcgagggctacgagcgtctcctgaagatgcaaaaccagcgtggcggccgcgctctttttcaagacgtcaagaagccagctgaagatgagtggggtaaaaccccggatgccatgaaagccgccatggccgctggagaaaaaaactgaatcaggcccgttttggatgcttcatggccctggggttcttgcccaacacgggataccccaatactctggtgactttcccttggagaactccactttccctgagaatgaagggaaagttgagagctccattcaaaaaaagaattaggagtgaacccaacccttgaacaccaaacccttccaaaagagggcgctggggccccgaggccaccaggtaaagcctggtggggcctgtatggggcgccaaaaaagataattccctcccttttcccgcaaaaaagtggggccttcccccaccttccccctcca

SEQ ID NO: 25068 - DNA, 764 bp, Macaca Mulatta
ctccaggcatttatgtttgaatcatctctaagtctagcggtcacccattggggactcaaggcctccaagtgtttggatgagaactactacaagtgctgggagccactcaagagccacttcactcccaattccaggaacccagcagaacctaattgagactggaacattgctaccataattaagagtagatttgtgaaggtttcttcagaatcttatgctttctggtagtactgggagcgggggttggttaaaatgaaaactcacttttcatagtcaagtaactcagaacttttgcggaaacgcatttgcaaagttctatggctgtcaccttaattactcaataaacttgctggtgttctgtggaagtagtgattggtcataatcaggtgttgatgaaacaagcctagcaggtcaggtaagtcttgctaagattgaaccaaggcccagggtcctttcctgtgtggttgacgtgaaggccttcattctaggagcacaagtccaggcatgtgctaggtatcacaagaccaggccataaagccaagcattaagaccatgagatgagactggaggtatggcaaagctcttaggagccaatccagacacggggaaatttaggggatcatgagcgctccaaacatccagctttcaatggataaggaaccaggccaataggttgtctaatcttggtagtcacgtagcagccaatatgatgatactggagaagaacaccagccaccaagaagtgagaaccactcattttctta

SEQ ID NO: 25069 - DNA, 227 bp, Macaca Mulatta
taaaacccatctttatgttgaaaaatacagattgccgaatgttttggtgagacttgttcatctgttcatgtaaggcgtgtgctatatgcaggcactggggtacgtaccagggaacagttcctgttgtcaatgaacttctctactgtggaagaggcagggcagggcaaatgatacgattctccaagttgctggcggtgaagtccccatgcccaccaatcaggtgcagg

SEQ ID NO: 25070 - DNA, 702 bp, Macaca Mulatta
agcttcctccacagggcaggaccacagctcacaaggatcccaatgccatcttcctgagcttccaacacctgctccgaggaaaggtgcgtttcctgctgcttgtaggagggcccaccctctgcgtcaggcgggccccacccaccacagctgtccccagcagaacctctctagtcctcacactgaacgagctcccaaacaggacttctggattgttggagacaaacttcactgcctcggccagaactactggctctggacttcagaagcggcagcagggattcagagccaagattcctggtctgctgaaccaaacctccaggtccctggaccaaatccccggatacctgaacaggatacacaaactcttgaatggaactcgtggactctttcctggaccctcacgcaggaccctaggagccccggacatttccccaggaacatcagacacaggctccctgccacccaacctccagcctggatattctccttccccaacccatccccctactggacagtacacactcttccctcttccacccaccttgccctcccctgtggtccagctccaccccctgcttcctgacccttctgctccaacacccacccctaccagccctcttctaaacacatcccacacccactcccagaatctgtctcaggaagggtaaggttctcagacactgccgacatcagcattgtctc

SEQ ID NO: 25071 - DNA, 769 bp, Macaca Mulatta
ggataactgctgtttccatgtcccatgatcccctctcttcctctccaccctgaaaaaaatgagttcctattttttctgagagagggggagattgattggaattccatttaaaattttggtatatggcattttctaacttaggaagccacaatgttcttggcccatcatgacactgggtagcattaactataagttttgtgcttccaaatcactttttggtttttaagaatttcttgatactcttacagcctgccttcgattttgatcctttattctatttgtcaggtgcacaagattaccttccttttttagccttctgtcttgtcaccaaccattcctacttggtggccatgtacttgggaaaaggccgcatgatctttctggctccactcagtgtctaaggcaccctgcttcctttgcttgcaccccacagactatttccctcatcctatttactgcagcaaatctctccttagttgatgagattgtgtttatctccctttaaaaccctacctatcctgaatggtctgtcattgtctgcctttaaaatccttcctcttttcttcctctcttctctaaataatgatggggctaagttatacccaaagctcactttaacaaaatatttcctcagtactttgcagaaaacaccaaacaaaaatgccattttaaaaagagtgtatttttttctttttagatgtaagcctcctcaagagcaggggacaatgttttccgttaaggttcaattggtgcctagttacactgttaa

SEQ ID NO: 25072 - DNA, 2436 bp, Macaca Mulatta
  misc_feature (1)...(2436): n = A,T,C or G
cgtactcctggaagtcgtcaagcctctccaactgaagtagttgagcgcttgggccccaatactaatccctcagaaggactggggcctcttcctaatcctacagctaataaaccacttgttgaagaattttcaaatcctgaaactcagaatctggatgccatggaacaagttggtctggaatccttacagtttgactatcctggtaatcaggtaccaatggactcttcaggagctactgtaggcctttttgactacaattcccagcagcagnnnnnnnnnnnnnnnnnnnnnnnnnnnnnnnnnnnnnnnnnnnnnnnnnnnnnnnnnnnnnnnnnnnnnnnnnnnnnnnnnnnnnnnnnnnnnnnnnnnnnnnnnnnnnnnnnnnnnnnnnnnnnnnnnnnnnnnnnnnnnnnnnnnnnnnnnnnnnnnnnnnnnnnnnnnnnnnnnnnnnnnnnnnnnnnnnnnnnnnnnnnnnnnnnnnnnnnnnnnnnnnnnnnnnnnnnnnnnnnnnnnnnnnnnnnnnnnnnnnnnnnnnnnnnnnnnnnnnnnnnnnnnnnnnnnnnnnnnnnnnnnnnnnnnnnnnnnnnnnnnnnnnnnnnnnnnnnnnnnnnnnnnnnnnnnnnnnnnnnnnnnnnnnnnnnnnnnnnnnnnnnnnnnnnnnnnnnnnnnnnnnnnnnnnnnnnnnnnnnnnnnnnnnnnnnnnnnnnnnnnnnnnnnnnnnnnnnnnnnnnnnnnnnnnnnnnnnnnnnnnnnnnnnnnnnnnnnnnnnnnaggctatcaagtattagctccaactgcctattatgatcagactggtgccttagtggttggccctggagcaaggactggccttggaactccagttcggttaatggctccaacacctgttttaattagttcagcagcagcacaagctnnnnnnnnnnnnnnnnnnnnnnnnnnnnnnnnnnnnnnnnnnnnnnnnnnnnnnnnnnnnnnnnnnnnnnnnnnnnnnnnnnnnnnnnnnnnnnnnnnnnnnnnnnnnnnnctaatctgcaatctaattcattttatggaagcagttctttgactaatagctcccagagtagttctttattttttaagggacctggtcaacctggaagtacatctcttggcttnnnnnnnnnnnnnnnnnnnnnnnnnnnnnnnnnnnnnnnnnnnnnnnnnnnnnnnnnnnnnnnnnnnnnnnnnnnnnnnnnnnnnnnnnnnnnnnnnnnnnnnnnnnnnnnnnnnnnnnnnnnnnnnnnnnnnnnnnnnnnnnnnnnnnnnnnnnnnnnnnnnnnnnnnnnnnnnnnnnnnnnnnnnnnnnnnnnnnnnnnnnnnnnnnnnnnnnnnnnnnnnnnnnnnnnnnnnnnnnnnnnnnnnnnnnnnnnnnnnnnnnnnnnnnnnnnnnnnnnnnnnnnnnnnnnnnnnnnnnnnnnnnnnnnnnnnnnnnnnnnnnnnnnnnnnnnnnnnnnnnnnnnnnnnnnnnnnnnnnnnnnnnnnnnnnnnnnnnnnnnnnnnnnnnnnnnnnnnnnnnnnnnnnnnnnnnnnnnnnnnnnnnnnnnnnnnnnnnnnnnnnnnnnnnnnnnnnnnnnnnnnnnnnnnnnnnnnnnnnnnnnnnnnnnnnnnnnnnnnnnnnnnnnnnnnnnnnnnnnnnnnnnnnnnnnnnnnnnnnnnnnnnnnnnnnnnnnnnnnnnnnnnnnnnnnnnnnnnnnnnnnncagagtgaaatggtaaaggagctggatggtcatgtgctcaaatgtgtgaaagatcagaatggaaaccatgttgtacaaaaatgtatcgaatgtgttcagccacagtcactgcagttcatcattgatgctttcaaaggacaagtatnnnnnnnnnnnnnnnnnnnnnnnnnnnnnnnnnnnnnnnnnnnnnnnnnnnnnnnnnnnnnnnnnnnnnnnnnnnnnnnnnnnnnnnnnnnnnnnnnnnnnnnnnnnnnnnnnnnnnnnnnnnnnnnnnnnnnnnnnnnnnnnnnnnnnnnnnnnnnnnnnnnnnnnnnnnnnnnnnnnnnnnnnnnnnnnnnnnnnnnnnnnnnnnnnnnnnnnnnnnnnnnnnnnnnnnnnnnnnnnnnnnnnnnnnnnnnnnnnnnnnnnnnnnnnnnnnnnnnnnnnnnnnnnnnnnnnnnnnnnnnnnnnnnnnnnnnnnnnnnnnnnnnnnnnnnnnnnnnnnnnnnnnnnnnnnnnnnnnnnnnnnnnnnnnnnnnnnnnnnnnnnnnnnnnnnnnnnnnnnnnnnnnnnnnnnnnnnnnnnnnnnnnnnnnnnnnnngattcgacctcacattactactttgcgcaaatacacatatgggaagcatatattggccaagttggaaaagtattatttgaagaatagcccggacctaggacctattggaggaccaccaaatggaatgctgtaa

SEQ ID NO: 25073 - DNA, 461 bp, Macaca Mulatta
cagtgtataagtgaggggctctgccccacatcccaagacttttcttcctgttgggagctgccttgggcccatccctcccctggggggagcccaactgatggccctggcccccacccctaaggaccaagggagcctgagcagccttgtttacagcttctgtcctgctcctgcatcttgccaggctcctctgccaactgtaggcctccctcatccctgcactggttccaacctccctgcacttctgcctgcatcccctccagcctcttggccccctatccctgcacttctggaaacctccctgcactctggaaacctccctgaacacctccccaactctgcgctctcagcctccctgcatctctcctggcctccctgcacttcttcccgcctcccaaattctctggacctccaccctggcctcctcccaacttccattgtcttggcatctctcaaccctcagt

SEQ ID NO: 25074 - DNA, 1871 bp, Macaca Mulatta
  misc_feature (1)...(1871): n = A,T,C or G
agagatacgatcataacaagaatgatgagattcttccaatcagtcttgagccatcctcaagcactgagcctactcagtctaacctaannnnnnnnnnnnnnnnnnnnnnnnnnnnnnnnnnnnnnnnnnnnnnnnnnnnnnnnnnnnnnnnnnnnnnnnnnnnnnnnnnnnnnnnnnnnnnnnnnnnnnnnnnnnnnnnnnnnnnnnnnnnnnnnnnnnnnnnnnnnnnnnnnnnnnnnnnnnnnnnnnnnnnnnnnnnnnnnnnnnnnnnnnnnnnnnnnnnnnnnnnnnnnnnnnnnnnnnnnnnnnnnnnnnnnnnnnnnnnnnnnnnnnnnnnnnnnnnnnnnnnnnnnnnnnnnnnnnnnnnnnnnnnnnnnnnnnnnnnnnnnnnnnnnnnnnnnnnnnnnnnnnnnnnnnnnnnnnnnnnnnnnnnnnnnnnnnnnnnnnnnnnnnnnnnnnnnnnnnnnnnnnnnnnnnnnnnnnnnnnnnnnnnnnnnnnnnnnnnnnnnnnnnnnnnnnnnnnnnnnnnnnnnnnnnnnnnnnnnnnnnnnnnnnnnnnnnnnnnnnnnnnnnnnnnnnnnnnnnnnnnnnnnnnnnnnnnnnnnnnaatcacatgttagcatttggtaacataatgtttttggatgttcttatggatgtttcttccctgcactatgtatggaattgagcatcatccagaataaataggattgtatcccaaattgtgattggaaccctgggatgctctaattggctggtttgtttggatttgtaactccagaaacattctatagtgtgccagagcaaaaggcaaatacacaaaatgttattacttaaatcaggaaactaaatatattagcatctattaaaaaattgagcatttttctacgcttatgtgtctttacaacacaaagaaaaagtaaaagacagggagggaagtgagagacagattttaaatcatgttcagaactgttgttccagaatttactatggcaatccctccaactggactgaaaaagagaaagttcttggcaaaaaggagctgattctttgagcaaatattgtggtaatctgtttaagaattatgcttattgtttcaaaatcccagctaggaaaacatggtgtatatcttaaagttgttcgtgttaaaactagaatcaaatttaatattttataccacaacacaagttctatttggaaattgaacttttattctatagcaatcatttttttcaaatctagataaccatgccttctataataacaaatgttgctattttcatgggacttttaaaattacatttattgcatgggattgtttttatagcatgagaatgttctgtttggaattatatcatggtcagtctaaatagaaaaagcaaaatttctttgaaaacctaaacattgctggattggtcactatcaaacatacaattttctaataattgtgtagcgatctaagtggaagagattggattaacttatgcaggatgaggagaggacatgcagtgggtacagaaagtcaatggaacagacgccactctggcaccaagactgtgatgactttgtgtggtaggtagttttaaaggactgcatgccttggaaatgattcttcacttggagaacatacttgcctctagatatttcactctaagcatcctaaatataacaatagagaaagataagtcaaccaacagatttggggatgtgtttcttcagcacattttggtcattttggtgccaagtttgacatactgtttaattgggcagcacctttgctcctttaccaggtatgtatcactttgttactccagatgccatccttggtgataaaggactatttatcactatcattgttagcaagaggaagc

SEQ ID NO: 25075 - DNA, 115 bp, Macaca Mulatta
agacaacttcatcagtcttgaaaggtgccatccaggtggggcattaccccacactgttggggaggcctgattaccaaaccagaaccggtgatgttcctcatggcaagatttctac

SEQ ID NO: 25076 - DNA, 863 bp, Macaca Mulatta
  misc_feature (1)...(863): n = A,T,C or G
gccacctccccacgagtgtcctccgagctggagcaagcccggccccagactagtggagaagaggagcttcagctgcagctggcacttgccatgagcagagaagtggctgagcaggnnnnnnnnnnnnnnnnnnnnnnnnnnnnnnnnnnnnnnnnnnnnnnnnnnnnnnnnnnnnnnnnnnnnnnnnnnnnnnnnnnnnnnnnnnnnnnnnnnnnnnnnnnnnnnnnnnnnnnnnnnnnnnnnnnnnnnnnnnnnnnnnnnnnnnnnnnnnnnnnnnnnnnnnnnnnnnnnnnnnnnnnnnnnnnnnnnnnnnnnnnnnnnnnnnnnnnnnnnnnnnnnnnnnnnnnnnnnnnnnnnnnnnnnnnnnnnnnnnnnnnnnnnnnnnnnnnnnnnnnnnnnnnnnnnnnnnnnnnnnnnnnnnnnnnnnnnnnnnnnnnnnnnnnnnnnnnnnnnnnnnnnnnnnnnnnnnnnnnnnnnnnnnnnnnnnnnnnnnnnnnnnnnnnnnnnnnnnnnnnnnnnnnnnnnnnnnnnnnnnnnnnnnnnnnnnnnnnnnnnnnnnnnnnnnnnnnnnnnnnnnnnnnnnnnnnnnnnnnnnnnnnnnnnnnnnnnnnnnnnnnnnnnnnnnnnnnnnnnnnnnnnnnnncagccgaatctgtgacctctctgccatcccaaaacaatggaactaccagccctgacccctttgagtctcaacccctgaccgttgcctcaagcaagcccagcagtgcccggaaaacacctgagtccttcctgggccccaacgcagccctggtgaacctggactcactggtgaccaggcccgccccaccagcccagtccctcaaccctttcctggcaccagg

SEQ ID NO: 25077 - DNA, 762 bp, Macaca Mulatta
  misc_feature (1)...(762): n = A,T,C or G
gggaatctgatgcagatgaggctggacaactactaaccaataaaatcaggaatttgtacaaaagttaaatgggatattatacttatttcaagtaatgttnnnnnnnnnnnnnnnnnnnnnnnngacaatataaaaaacattttaaatttcctagaaatgtcttcagggtaaggccagtttaagatctctcttaaaagacttttggccaataaatcctagattttccagctaactttggtggtaataaatatttatcaggagcttctctcagcagagagtatccattctttgaattcgaagcacaattttaaccatgtaaaatggacatataatttgccaaaggtaattggtttacnnnnnnnnnnnnnnnnnnnnnnnnnnncattggttgttgttgcaaaaagtctaaattactatcggttgaaacacagcagctgtggagttcagtccaggcatgaagactanatctgctttaccaagtaaggcgtaaggttgcatgtttcagtcctctaccatcctgcactgtgagcagcactatacctgtgcgttgtctgaaagcctcctgtatattctccagctaaatggtcgtctggtagcctttgcatttaacaaactagcatgaggctttttatatctaaatgctacgtgatagacaatttcagctagccacatattgtatgtatgagattcataaagactttcaatcatttcattttcaaacaactggaaatttttgtttagaatgtgaaattcttttttttt

SEQ ID NO: 25078 - DNA, 750 bp, Macaca Mulatta
  misc_feature (1)...(750): n = A,T,C or G
ggtgtctgatgctcccaagcagtggaaatgcaggctctggaaattggttaatgtatttgatgtcttagtgttttagtgactagggagaccattaaccagtttatcattaaccacttatcagtgtattgatgttaaagcatttccctgttagctaaaagaggcctgttcatacaagccagctggtatatatgtgtggttcatccgtcatctgctgctcatggcagactagaattctgggaaccctgtgtaattcagtctgttctcccttctgggccctggtaaagacaagcctcagcttatagtgaacacagcagacctagaaatgtagcaacagcctaatgagtaactgtcatttactgagtatctgctgtgactgtggccctgtctggaggttcctgngttttgagatttagaacaatgccttctgggaacagaaccagcaaaacaaccatgtttcaatttttctttaaatcagtattctattaggcaaataactgccatattcatgaatcttgggagtggtccctgggaacagattaatggggccgtggggaagactatcaccctggcttcccatgctggggttgtcttaagtcggatgagaattagcccttcgcttgccaatgaaaaaagggggggcggcctcgcgggtctaaagggggctgccggcaaattgccccgttgcgggaaaagaggaggaccaggacgcccataatatatacgcgcgagcgacggaagaaaaaagacgag

SEQ ID NO: 25079 - DNA, 1710 bp, Macaca Mulatta
  misc_feature (1)...(1710): n = A,T,C or G
ggaggagactcttcagatgatgtgtctaatggtgactctataatagactggctaaactctgtcagacaaactggaaatacaacagagaagcggacgaagaggaaaccaatcttggagagcgctgagccggactaatccaaacagtggtgatttcagattcagtttagagataaatgtcaatcgaaataatgtttttttttattcagagaatgaaaatgagccttctgtgggacgatctagaggagaaaatgttgaaaacaacagccaaaggcaagtggaaaacccacgatctgaatcaacatctgcaaggccatctagatcagaacgaaattcaactgaagcattaacagaggtgccacctaccagaggtcagaggagggcaagaagcaggagcccagaccatcggagaaccagagcaagagctgagagaagtaggtcacctctgcatccaatgagtgaaattccacgaagatctcatcatagtatctcatctcagacttttgaacatcctttggtaaatgagacggagggaagttctagaacccggcaccatgtgacattgagacagcaaatatctgggcctgagttgctaagtagaggtctttttgcagcttctggaacaaganatgcctctncaggagcaggttcttcggacacagctgccaatggtgaatctacaggatcaggacagagacctccaaccatagtccttgatnnnnnnnnnnnnnnnnnnnnnnnnnnnnnnnnnnnnnnnnnnnnnnnnnnnnnnnnnnnnnnnnnnnnnnnnnnnnnnnnnnnnnnnnnnnnnnnnnnnnnnnnnnnnnnnnnnnnnnnnnnnnnnnnnnnnnnnnnnnnnnnnnnnnnnnnnnnnnnnnnnnnnnnnnnnnnnnnnnnnnnnnnnnnnnnnnnnnnnnnnnnnnnnnnnnnnnnnnnnnnnnnnnnnnnnnnnnnnnttcagaccatgttaaggcagataatgacaggttttggtgagttaagctattttatgtacagtgatagcgactcagagcctactggctcagtccccaatcgaaatatggaaagggcagagtcacggagtggaagagggggttctggtggtggtagnnnnnnnnnnnnnnnnnnnnnnnnnnnnnnnnnnnnnnnnnnnnnnnnnnnnnnnnnnnnnnnnnnnnnnnnnnnnnnnnnnnnngtggtgaaagttcagaagctagctcagatttatttgaaggcagtaatgaaggaagctcatcatcaggctcatcaggtgccaggcgagagggtcgacatagggccccagtcacatttgatgaaagtggctctttgcccttccttagcctggctcagtttttcctcttaaatgaggatgatgatgaccagcctagaggactcatcaaaagaacagattgacaacgtggcaatgagaagttttggtgaaaatgatgcattaaaaacctgtagtgtttgcattacagaatatacagaaggcaacaaacttcgtaaactaccttgttcccatgagtaccatgtccactgcatcgatcgctggttatctgagaattctacctgtcctatttgtcgcagagcagtcttagcttctgggaacagagaaagtgttgtgtaattaagatctgaactctcagtaaggtagctgatatagtgatgggcaaataggaatcactgcattgatgtccactttttgagtggtac

SEQ ID NO: 25080 - DNA, 6315 bp, Macaca Mulatta
  misc_feature (1)...(6315): n = A,T,C or G
ccgagcggctggcggtgccggggccggatgggggcggtggcacgggcccatggtgggctgcgggcggccgcgggccccgcgaagtatcgccgggggcaggctccgaggtgcaggacgccctggagcgcgcgctgccggagctgcagcaggccttgtccgcgctgaagcaggcgggcggcgcgcgggccgtgggcgccggcctggccgaggtcttccaactggtggaggaggcctggctgctgccggccgtgggccgcgaggtagcccagggtctgtgcgacgccatccgcctggacggcggcctcgacctgctgttgcggctgctgcaggcgccggagctggagacgcgtgtgcaggccgcgcgcctgctggagcagatcctggtggctgagaaccgnnnnnnnnnnnnnnnnnnnnnnnnnnnnnnnnnnnnnnnnnnnnnnnnnnnnnnnnnnnnnnnnnnnnnnnnnnnnnnnnnnnnnnnnnnnnnnnnnnnnnnnnnnnnnnnnnnnnnnnnnnnnnnnnnnnnnnnnnnnnnnnnnnnnnnnnnnnnnnnnnnnnnnnnnnnnnnnnnnnnnnnnnnnnnnnnnnnnnnnnnnnnnnnnnnnnnnnnnnnnnnnnnnnnnnnnnnnnnnnnnnnnnnnnnnnnnnnnnnnnnnnnnnnnnnnnnnnnnnnnnnnnnnnnnnnnnnnnnnnnnnnnnnnnnnnnnnnnnnnnnnnnnnnnnnnnnnnnnnnnnnnnnnnnnnnnnnnnnnnnnnnnnnnnnnnnnnnnnnnnnnnnnnnnnnnnnnnnnnnnnnnnnnnnnnnnnnnnnnnnnnnnnnnnnnnnnnnnnnnnnnnnnnnnnnnnnnnnnnnnnnnnnnnnnnnnnnnnnnnnnnnnnnnnnnnnnnnnnnnnnnnnnnnnnnnnnnnnnnnnnnnnnnnnnnnnnnnnnnnnnnnnnnnnnnnnnnnnnnnnnnnnnnnnnnnnnnnnnnnnnnnnnnnnnnnnnnnnnnnnnnnnnnnnnnnnnnnnnnnnnnnnnnnnnnnnnnnnnnnnnnnnnnnnnnnnnnnnnnnnnnnnnnnnnnnnnnnnnnnnnnnnnnnnnnnnnnnnnnnnnnnnnnnnnnnnnnnnnnnnnnnnnnnnnnnnnnnnnnnnnnnnnnnnnnnnnnnnnnnnnnnnnnnnnnnnnnnnnnnnnnnnnnnnnnnnnnnnnnnnnnnnnnnnnnnnnnnnnnnnnnnnnnnnnnnnnnnnnnnnnnnnnnnnnnnnnnnnnnnnnnnnnnnnnnnnnnnnnnnnnnnnnnnnnnnnnnnnnnnnnnnnnnnnnnnnnnnnnnnnnnnnnnnnnnnnnnnnnnnnnnnnnnnnnnnnnnnnnnnnnnnnnnnnnnnnnnnnnnnnnnnnnnnnnnnnnnnnnnnnnnnnnnnnnnnnnnnnnnnnnnnnnnnnnnnnnnnnnnnnnnnnnnnnnnnnnnnnnnnnnnnnnnnnnnnnnnnnnnnnnnnnnnnnnnnnnnnnnnnnnnnnnnnnnnnnnnnnnnnnnnnnnnnnnnnnnnnnnnnnnnnnnnnnnnnnnnnnnnnnnnnnnnnnnnnnnnnnnnnnnnnnnnnnnnnnnnnnnnnnnnnnnnnnnnnnnnnnnnnnnnnnnnnnnnnnnnnnnnnnnnnnnnnnnnnnnnnnnnnnnnnnctcctgaaggtgcacctgcagctgcacggcttcagtgtcttcattgatgtggagaagctggaagcaggcaagttcgaagacaaactcatccagagtgtcatgggtgcccgcaactttgtgctggtgctgtcacctggagcactggacaagtgcatgcaggaccatgactgcaaggattgggtgcataagnnnnnnnnnnnnnnnnnnnnnnnnnnnnnnnnnnnnnnnnnnnnnnnnnnnnnnnnnnnnnnnnnnnnnnnnnnnnnnnnnnnnnnnnnnnnnnnnnnnnnnnnnnnnnnnnnnnnnnnnnnnnnnnnnnnnnnnnnnnnnnnnnnnnnnnnnnnnnnnnnnnnnnnnnnnnnnnnnnnnnnnnnnnnnnnnnnnnnnnnnnnnnnnnnnnnnnnnnnnnnnnnnnnnnnnnnnnnnnnnnnnnnnnnnnnnnnnnnnnnnnnnnnnnnnnnnnnnnnnnnnnnnnnnnnnnnnnnnnnnnnnnnnnnnnnnnnnnnnnnnnnnnnnnnnnnnnnnnnnnnnnnnnnnnnnnnnnnnnnnnnnnnnnnnnnnnnnnnnnnnnnnnnnnnnnnnnnnnnnnnnnnnnnnnnnnnnnnnnnnnnnnnnnnnnnnnnnnnnnnnnnnnnnnnnnnnnnnnnnnnnnnnnnnnnnnnnnnnnnnnnnnnnnnnnnnnnnnnnnnnnnnnnnnnnnnnnnnnnnnnnnnnnnnnnnnnnnnnnnnnnnnnnnnnnnnnnnnnnnnnnnnnnnnnnnnnnnnnnnnnnnnnnnnnnnnnnnnnnnnnnnnnnnnnnnnnnnnnnnnnnnnnnnnnnnnnnnnnnnnnnnnnnnnnnnnnnnnnnnnnnnnnnnnnnnnnnnnnnnnnnnnnnnnnnnnnnnnnnnnnnnnnnnnnnnnnnnnnnnnnnnnnnnnnnnnnnnnnnnnnnnnnnnnnnnnnnnnnnnnnnnnnnnnnnnnnnnnnnnnnnnnnnnnnnnnnnnnnnnnnnnnnnnnnnnnnnnnnnnnnnnnnnnnnnnnnnnnnnnnnnnnnnnnnnnnnnnnnnnnnnnnnnnnnnnnnnnnnnnnnnnnnnnnnnnnnnnnnnnnnnnnnnnnnnnnnnnnnnnnnnnnnnnnnnnnnnnnnnnnnnnnnnnnnnnnnnnnnnnnnnnnnnnnnnnnnnnnnnnnnnnnnnnnnnnnnnnnnnnnnnnnnnnnnnnnnnnnnnnnnnnnnnnnnnnnnnnnnnnnnnnnnnnnnnnnnnnnnnnnnnnnnnnnnnnnnnnnnnnnnnnnnnnnnnnnnnnnnnnnnnnnnnnnnnnnnnnnnnnnnnnnnnnnnnnnnnnnnnnnnnnnnnnnnnnnnnnnnnnnnnnnnnnnnnnnnnnnnnnnnnnnnnnnnnnnnnnnnnnnnnnnnnnnnnnnnnnnnnnnnnnnnnnnnnnnnnnnnnnnnnnnnnnnnnnnnnnnnnnnnnnnnnnnnnnnnnnnnnnnnnnnnnnnnnnnnnnnnnnnnnnnnnnnnnnnnnnnnnnnnnnnnnnnnnnnnnnnnnnnnnnnnnnnnnnnnnnnnnnnnnnnnnnnnnnnnnnnnnnnnnnnnnnnnnnnnnnnnnnnnnnnnnnnnnnnnnnnnnnnnnnnnnnnnnnnnnnnnnnnnnnnnnnnnnnnnnnnnnnnnnnnnnnnnnnnnnnnnnnnnnnnnnnnnnnnnnnnnnnnnnnnnnnnnnnnnnnnnnnnnnnnnnnnnnnnnnnnnnnnnnnnnnnnnnnnnnnnnnnnnnnnnnnnnnnnnnnnnnnnnnnnnnnnnnnnnnnnnnnnnnnnnnnnnnnnnnnnnnnnnnnnnnnnnnnnnnnnnnnnnnnnnnnnnnnnnnnnnnnnnnnnnnnnnnnnnnnnnnnnnnnnnnnnnnnnnnnnnnnnnnnnnnnnnnnnnnnnnnnnnnnnnnnnnnnnnnnnnnnnnnnnnnnnnnnnnnnnnnnnnnnnnnnnnnnnnnnnnnnnnnnnnnnnnnnnnnnnnnnnnnnnnnnnnnnnnnnnnnnnnnnnnnnnnnnnnnnnnnnnnnnnnnnnnnnnnnnnnnnnnnnnnnnnnnnnnnnnnnnnnnnnnnnnnnnnnnnnnnnnnnnnnnnnnnnnnnnnnnnnnnnnnnnnnnnnnnnnnnnnnnnnnnnnnnnnnnnnnnnnnnnnnnnnnnnnnnnnnnnnnnnnnnnnnnnnnnnnnnnnnnnnnnnnnnnnnnnnnnnnnnnnnnnnnnnnnnnnnnnnnnnnnnnnnnnnnnnnnnnnnnnnnnnnnnnnnnnnnnnnnnnnnnnnnnnnnnnnnnnnnnnnnnnnnnnnnnnnnnnnnnnnnnnnnnnnnnnnnnnnnnnnnnnnnnnnnnnnnnnnnnnnnnnnnnnnnnnnnnnnnnnnnnnnnnnnnnnnnnnnnnnnnnnnnnnnnnnnnnnnnnnnnnnnnnnnnnnnnnnnnnnnnnnnnnnnnnnnnnnnnnnnnnnnnnnnnnnnnnnnnnnnnnnnnnnnnnnnnnnnnnnnnnnnnnnnnnnnnnnnnnnnnnnnnnnnnnnnnnnnnnnnnnnnnnnnnnnnnnnnnnnnnnnnnnnnnnnnnnnnnnnnnnnnnnnnnnnnnnnnnnnnnnnnnnnnnnnnnnnnnnnnnnnnnnnnnnnnnnnnnnnnnnnnnnnnnnnnnnnnnnnnnnnnnnnnnnnnnnnnnnnnnnnnnnnnnnnnnnnnnnnnnnnnnnnnnnnnnnnnnnnnnnnnnnnnnnnnnnnnnnnnnnnnnnnnnnnnnnnnnnnnnnnnnnnnnnnnnnnnnnnnnnnnnnnnnnnnnnnnnnnnnnnnnnnnnnnnnnnnnnnnnnnnnnnnnnnnnnnnnnnnnnnnnnnnnnnnnnnnnnnnnnnnnnnnnnnnnnnnnnnnnnnnnnnnnnnnnnnnnnnnnnnnnnnnnnnnnnnnnnnnnnnnnnnnnnnnnnnnnnnnnnnnnnnnnnnnnnnnnnnnnnnnnnnnnnnnnnnnnnnnnnnnnnnnnnnnnnnnnnnnnnnnnnnnnnnnnnnnnnnnnnnnnnnnnnnnnnnnnnnnnnnnnnnnnnnnnnnnnnnnnnnnnnnnnnnnnnnnnnnnnnnnnnnnnnnnnnnnnnnnnnnnnnnnnnnnnnnnnnnnnnnnnnnnnnnnnnnnnnnnnnnnnnnnnnnnnnnnnnnnnnnnnnnnnnnnnnnnnnnnnnnnnnnnnnnnnnnnnnnnnnnnnnnnnnnnnnnnnnnnnnnnnnnnnnnnnnnnnnnnnnnnnnnnnnnnnnnnnnnnnnnnnnnnnnnnnnnnnnnnnnnnnnnnnnnnnnnnnnnnnnnnnnnnnnnnnnnnnnnnnnnnnnnnnnnnnnnnnnnnnnnnnnnnnnnnnnnnnnnnnnnnnnnnnnnnnnnnnnnnnnnnnnnnnnnnnnnnnnnnnnnnnnnnnnnnnnnnnnnnnnnnnnnnnnnnnnnnnnnnnnnnnnnnnnnnnnnnnnnnnnnnnnnnnnnnnnnnnnnnnnnnnnnnnnnnnnnnnnnnnnnnnnnnnnnnnnnnnnnnnnnnnnnnnnnnnnnnnnnnnnnnnnnnnnnnnnnnnnnnnnnnnnnnnnnnnnnnnnnnnnnnnnnnnnnnnnnnnnnnnnnnnnnnnnnnnnnnnnnnnnnnnnnnnnnnnnnnnnnnnnnnnnnnnnnnnnnnnnnnnnnnnnnnnnnnnnnnnnnnnnnnnnnnnnnnnnnnnnnnnnnnnnnnnnnnnnnnnnnnnnnnnnnnnnnnnnnnnnnnnnnnnnnnnnnnnnnnnnnnnnnnnnnnnnnnnnnnnnnnnnnnnnnnnnnnnnnnnnnnnnnnnnnnnnnnnnnnnnnnnnnnnnnnnnnnnnnnnnnnnnnnnnnnnnnnnnnnnnnnnnnnnnnnnnnnnnnnnnnnnnnnnnnnnnnnnnnnnnnnnnnnnnnnnnnnnnnnnnnnnnnnnnnnnnnnnnnnnnnnnnnnnnnnnnnnnnnnnnnnnnnnnnnnnnnnnnnnnnnnnnnnnnnnnnnnnnnnnnnnnnnnnnnnnnnnnnnnnnaggacaatgtccagggacatggctctggaaaataacttttcttttctttttaagagacaggggcttgctctgttgtccaggctagagggcagtgacacaatcatagctgactgtacccttgaactcctgggctcaagtgatcctcctgcctcagcctccttagtagctgggactaccggtgcataccaccatgcctggctgatttttaaaattttttatacagacaaggtcttgctatgttgtccaggctgatcttgaattcttggactcaagtggtcctcctgcctcagcctgccacaggatcgggattacaggcaggagcccccacgcccagccatgaaatataattattaatatcatacaggaaaannnnnnnnnnnnnnnnnnnnnnnnnnnnnnnnnnaactagctgacgaagctgtctggccttccctttaacacagttctgttgccatagttccatctataaaatgggaatggagggaaataggggaactgggagagagaacacagccttgccaagtagcaatgttagcctgatccttcctccacctagcttgccaccttgaccttggaaaatggctcctggaggattaggcagccatgtgcaaggagaggggcaacctgggacaagacacccaga

SEQ ID NO: 25081 - DNA, 2234 bp, Macaca Mulatta
  misc_feature (1)...(2234): n = A,T,C or G
tcagggttacaagtacagatcattacttcctaagtgatggtctgtatgtacctgaagaccagctagagaaccaaaaaccgttacaattggatgtaattatggtaaaaccttataaactgtgtaacaatcaagaagaaaacgatgcagtgtcttctgctaagaaacnnnnnnnnnnnnnnnnnnnnnnnnnnnnnnnnnnnnnnnnnnnnnnnnnnnnnnnnnnnnnnnnnnnnnnnnnnnnnnnnnnnnnnnnnnnnnnnnnnnnnnnnnnnnnnnnnnnnnnnnnnnnnnnnnnnnnnnnnnnnnnnnnnnnnnnnnnnnnnnnnnnnnnnnnnnnnnnnnnnnnnnnnnnnnnnnnnnnnnnnnnnnnnnnnnnnnnnnnnnnnnnnnnnnnnnnnnnnnnnnnnnnnnnnnnnnnnnnnnnnnnnnnncaggaagagtacaaaatcttacaagagctgtacaaatttaagaaacctggcaccaacctaacagaggnaggaagatttggtagatattgttgatactcgaattcatcagttagaggatttagaagccacttttgccgatttgtgtgatggtgatgatgaagaaactgtacagagatgggcttcaaaccctggnnnnnnnnnnnnnnnnnnnnnnnnnnnnnnnnnnnnnnnnnnnnnnnnnnnnnnnnnnnnnnnnnnnnnnnnnnnnnnnnnnnnnnnnnnnnnnnnnnnnnnnnnnnnnnnnnnnnnnnnnnnnnnnnnnnnnnnnnnnnnnnnnnnnnnnnnnnnnnnnnnnnnnnnnnnnnnnnnnnnnnnnnnnnnnnnnnnnnnnnnnnnnnnnnnnnnnnnnnnnnnnnnnnnnnnnnnnnnnnnnnnnnnnnnnnnnnnnnnnnnnnnnnnnnnnnnnnnnnnnnnnnnnnnnnnnnnnnnnnnnnnnnnnnnnnnnnnnnnnnnnnnnnnnnnnnnnnnnnnnnnnnnnnnnnnnnnnnnnnnnnnnnnnnnnnnnnnnnnnnnnnnnnnnnnnnnnnnnnnnnnnnnnnnnnnnnnnnnnnnnnnnnnnnnnnnnnnnnnnnnnnnnnnnnnnnnnnnnnnnnnnnnnnnnnnnnnnnnnnnnnnnnnnnnnnnnnnnnnnnnnnnnnnnnnnnnnnnnnnnnnnnnnnnnnnnnnnnnnnnnnnnnnnnnnnnnnnnnnnnnnnnnnnnnnnnnnnnnnnnnnnnnnnnnnnnnnnnnnnnnnnnnnnnnnnnnnnnnnnnnnnnnnnnnnnnnnnnnnnnnnnnnnnnnnnnnnnnnnnnnnnnnnnnnnnnnnnnnnnnnnnnnnnnnnnnnnnnnnnnnnnnnnnnnnnnnnnnnnnnnnnnnnnnnnnnnnnnnnnnnnnnnnnnnnnnnnnnnnnnnnnnnnnnnnnnnnnnnnnnnnnnnnnnnnnnaaattatgggttatgagaaatgttatgaggaaatggacaacaacaggcatgttttagtcttaaagacaccctggccttataggaaagtaacattctnnnnnnnnnnnnnnnnnnnnaattttataaaattagagatggggtctcaccatgttacccaggctgctctcgaactcctgggcgcaagcagtccacctccctttgcctcccaaagtgctgggattacaggtgtgagccactgccccagccagaaactaacattctcaaaagctgctatgggaaaaaacccacaaatttgccaatctgtgaaattatcacaggaagtctacctttccaaggaatttggcattgtggtcctgctcttgccaaatgctctccagcattgttggtatcaaggtggtctggttgagtaaacttgaccaaacaaaaattaactnnnnnnnnnnnnnnnnnnnnnnnnnnnnnnatcaaaaaagtccttcagggtcttttgtgcctccaggcggtcgttgtagatcaataatacagtccctgagtgccactttattggcaagtctggattgatacttttttcagataaaccagctttttatgtaaatagtaagggaaaaagttaaatctttaattctgacctgccataaatacccaaagatataaactgtcttccaccaccctcttcatgactgagacatccttcctgagtcactcttgtcatgaaactggattttctcaatttgccagtcttctgatctttagtatctctttagttcagtgatttttacctacctacttgatttatttccctttaaaaggtgaaatgac

SEQ ID NO: 25082 - DNA, 122 bp, Macaca Mulatta
  misc_feature (1)...(122): n = A,T,C or G
gatttatcaagctgtgcagggagatgtggggaagggtattctagagatgccacctgcaactgtgattataactgtcaacactacatggagtgctgccctgatttcaagagagtctgcactgn

SEQ ID NO: 25083 - DNA, 774 bp, Macaca Mulatta
ggcggactgcagggagctagtcttctaggcatatcctggaagaggcttgtgacccaagaatgtgtccgtgtattctcccagtgttaacctgatcctctttttcattcatttaaaaagcatttatcatgctgcctactgcgggtctcaccatgggttagaacaaagacgttcaagaaatggccccatcctcaaagaagtagcagtacctggggagttgacacttctgtaaaactagaagataaaccaggcaatgtaagtgtttggggtgttgcagatgggaaggatttgcagggctcagtctatccaagaggctttgtttaggacgtcggtcccaagccaagccttaagtgtggaatttagattgacagaaaggaagactaacattaacttgctctgagagagtactggagcctgcaaatgcattgtgttggctccggtggaggtgggcatggggtctgttctgaaatgtaaaggcttcagatgggatttctggttttagaaggttgcgtgttcttcgcagttgggctgaaggagagttccttgtgctgtttccgactcctaatgagagttcctttccgacccttacgtgtctcctggccaagcccccaggaaagaaattatgcagctcttggctcccttgtctcctcagggctggatcctttatttccgaaccaccaccaaaagtaaagggacatttcaggcttccgaggcccttcccttgcccgttgtttgtaaaaaaattttccttggacctggccgcccaaaaacccatga

SEQ ID NO: 25084 - DNA, 10740 bp, Macaca Mulatta
  misc_feature (1)...(10740): n = A,T,C or G
acgggctcccctgaggaccgttcccgtggtgagcactcctctacactgcctgcctccacacccagctacacctcaggcacctctcccacctctctgtcctccctagaggaggacagtgacagcagccccagccgcaggcagcgtctagaagaagcgaagcagcagcgcaaggcccggcaccgctcccatgggcccctgctacccaccattgaggactcttcagaggaggaggagctgcgggaggaagaggagctactgcgtgagcaagagaagatgcgggaggtggagcagcagagcatccgcagcacggcccgcaagacccggcgggacaaggaagaactgcgggcccagcggaggcgagagcgctccaagacaccacccagtaacttgtcacccattgaggacgcctcccccacggaggagctgaggcaggcggccgagatggaggagctgcaccgctcctcctgctctgagtactcaccctcgccctcccttgactctgaggctgaggcaaaggatggtggccctagccggctttacaagtcaggcagtgagtacaccctgcccaccttcatgtccctctnnnnnnnnnnnnnnnnnnnnnnnnnnnnnnnnnnnnnnnnnnnnnnnnnnnnnnnnnnnnnnnnnnnnnnnnnnnnnnnnnnnnnnnnnnnnnnnnnnnnnnnnnnnnnnnnnnnnnnnnnnnnnnnnnnnnnnnnnnnnnnnnnnnnnnnnnnnnnnnnnnnnnnnnnnnnnnnnnnnnnnnnnnnnnnnnnnnnnnnnnnnnnnnnnnnnnnnnnnnnnnnnnnnnnnnnnnnnnnnnnnnnnnnnnnnnnnnnnnnnnnnnnnnnnnnnnnnnnnnnnnnnnnnnnnnnnnnnnnnnnnnnnnnnnnnnnnnnnnnnnnnnnnnnnnnnnnnnnnnnnnnnnnnnnnnnnnnnnnnnnnnnnnnnnnnnnnnnnnnnnnnnnnnnnnnnnnnnnnnnnnnnnnnnnnnnnnnnnnnnnnnnnnnnnnnnnnnnnnnnnnnnnnnnnnnnnnnnnnnnnnnnnnnnnnnnnnnnnnnnnnnnnnnnnnnnnnnnnnnnnnnnnnnnnnnnnnnnnnnnnnnnnnnnnnnnnnnnnnnnnnnnnnnnnnnnnnnnnnnnnnnnnnnnnnnnnnnnnnnnnnnnnnnnnnnnnnnnnnnnnnnnnnnnnnnnnnnnnnnnnnnnnnnnnnnnnnnnnnnnnnnnnnnnnnnnnnnnnnnnnnnnnnnnnnnnnnnnnnnnnnnnnnnnnnnnnnnnnnnnnnnnnnnnnnnnnnnnnnnnnnnnnnnnnnnnnnnnnnnnnnnnnnnnnnnnnnnnnnnnnnnnnnnnnnnnnnnnnnnnnnnnnnnnnnnnnnnnnnnnnnnnnnnnnnnnnnnnnnnnnnnnnnnnnnnnnnnnnnnnnnnnnnnnnnnnnnnnnnnnnnnnnnnnnnnnnnnnnnnnnnnnnnnnnnnnnnnnnnnnnnnnnnnnnnnnnnnnnnnnnnnnnnnnnnnnnnnnnnnnnnnnnnnnnnnnnnnnnnnnnnnnnnnnnnnnnnnnnnnnnnnnnnnnnnnnnnnnnnnnnnnnnnnnnnnnnnnnnnnnnnnnnnnnnnnnnnnnnnnnnnnnnnnnnnnnnnnnnnnnnnnnnnnnnnnnnnnnnnnnnnnnnnnnnnnnnnnnnnnnnnnnnnnnnnnnnnnnnnnnnnnnnnnnnnnnnnnnnnnnnnnnnnnnnnnnnnnnnnnnnnnnnnnnnnnnnnnnnnnnnnnnnnnnnnnnnnnnnnnnnnnnnnnnnnnnnnnnnnnnnnnnnnnnnnnnnnnnnnnnnnnnnnnnnnnnnnnnnnnnnnnnnnnnnnnnnnnnnnnnnnnnnnnnnnnnnnnnnnnnnnnnnnnnnnnnnnnnnnnnnnnnnnnnnnnnnnnnnnnnnnnnnnnnnnnnnnnnnnnnnnnnnnnnnnnnnnnnnnnnnnnnnnnnnnnnnnnnnnnnnnnnnnnnnnnnnnnnnnnnnnnnnnnnnnnnnnnnnnnnnnnnnnnnnnnnnnnnnnnnnnnnnnnnnnnnnnnnnnnnnnnnnnnnnnnnnnnnnnnnnnnnnnnnnnnnnnnnnnnnnnnnnnnnnnnnnnnnnnnnnnnnnnnnnnnnnnnnnnnnnnnnnnnnnnnnnnnnnnnnnnnnnnnnnnnnnnnnnnnnnnnnnnnnnnnnnnnnnnnnnnnnnnnnnnnnnnnnnnnnnnnnnnnnnnnnnnnnnnnnnnnnnnnnnnnnnnnnnnnnncatacattccttgccactgccaccacagtgagcttcacaatggcttgtttgtgctcagggctcaacaaaagcagcctgtggtatatggagacccctaccagagccgccttgattttggccagggtgggggtagccctgtgtgcctggcgcaggtcaaacaagtagagcaggctgtccagacagccccatactgaagtgggccccggggaagacccagggaggccaagtttgccagatataatctgcccaaccaagtagcacatctggccagaagggacgttttgatcactcagatgggcaccgcccagagcattggccacaaaaaaggcccagtgccagagctgggtgccgagccccaccgggctacccctgcagagttgcggtcacatgctctgccaggtgccaggaagccacacacagtggtggtacagatgggagagggcacagcaggcactgtgaccacactgctcccagaggagcctgcgggtgccctggaccttaccgggatgaggcctgagagggagaagacatgctgtgacatggtctacaagctcccctttggcagcagctgnnnnnnnnnnnnnnnnnnnnnnnnnnnnnnnnnnnnnnnnnnnnnnnnnnnnnnnnnnnnnnnnnnnnnnnnnnnnnnnnnnnnnnnnnnnnnnnnnnnnnnnnnnnnnnnnnnnnnnnnnnnnnnnnnnnnnnnnnnnnnnnnnnnnnnnnnnnnnnnnnnnnnnnnnnnnnnnnnnnnnnnnnnnnnnnnnnnnnnnnnnnnnnnnnnnnnnnnnnnnnnnnnnnnnnnnnnnnnnnnnnnnnnnnnnnnnnnnnnnnnnnnnnnnnnnnnnnnnnnnnnnnnnnnnnnnnnnnnnnnnnnnnnnnnnnnnnnnnnnnnnnnnnnnnnnnnnnnnnnnnnnnnnnnnnnnnnnnnnnnnnnnnnnnnnnnnnnnnnnnnnnnnnnnnnnnnnnnnnnnnnnnnnnnnnnnnnnnnnnnnnnnnnnnnnnnnnnnnnnnnnnnnnnnnnnnnnnnnnnnnnnnnnnnnnnnnnnnnnnnnnnnnnnnnnnnnnnnnnnnnnnnnnnnnnnnnnnnnnnnnnnnnnnnnnnnnnnnnnnnnnnnnnnnnnnnnnnnnnnnnnnnnnnnnnnnnnnnnnnnnnnnnnnnnnnnnnnnnnnnnnnnnnnnnnnnnnnnnnnnnnnnnnnnnnnnnnnnnnnnnnnnnnnnnnnnnnnnnnnnnnnnnnnnnnnnnnnnnnnnnnnnnnnnnnnnnnnnnnnnnnnnnnnnnnnnnnnnnnnnnnnnnnnnnnnnnnnnnnnnnnnnnnnnnnnnnnnnnnnnnnnnnnnnnnnnnnnnnnnnnnnnnnnnnnnnnnnnnnnnnnnnnnnnnnnnnnnnnnnnnnnnnnnnnnnnnnnnnnnnnnnnnnnnnnnnnnnnnnnnnnnnnnnnnnnnnnnnnnnnnnnnnnnnnnnnnnnnnnnnnnnnnnnnnnnnnnnnnnnnnnnnnnnnnnnnnnnnnnnnnnnnnnnnnnnnnnnnnnnnnnnnnnnnnnnnnnnnnnnnnnnnnnnnnnnnnnnnnnnnnnnnnnnnnnnnnnnnnnnnnnnnnnnnnnnnnnnnnnnnnnnnnnnnnnnnnnnnnnnnnnnnnnnnnnnnnnnnnnnnnnnnnnnnnnnnnnnnnnnnnnnnnnnnnnnnnnnnnnnnnnnnnnnnnnnnnnnnnnnnnnnnnnnnnnnnnnnnnnnnnnnnnnnnnnnnnnnnnnnnnnnnnnnnnnnnnnnnnnnnnnnnnnnnnnnnnnnnnnnnnnnnnnnnnnnnnnnnnnnnnnnnnnnnnnnnnnnnnnnnnnnnnnnnnnnnnnnnnnnnnnnnnnnnnnnnnnnnnnnnnnnnnnnnnnnnnnnnnnnnnnnnnnnnnnnnnnnnnnnnnnnnnnnnnnnnnnnnnnnnnnnnnnnnnnnnnnnnnnnnnnnnnnnnnnnnnnnnnnnnnnnnnnnnnnnnnnnnnnnnnnnnnnnnnnnnnnnnnnnnnnnnnnnnnnnnnnnnnnnnnnnnnnnnnnnnnnnnnnnnnnnnnnnnnnnnnnnnnnnnnnnnnnnnnnnnnnnnnnnnnnnnnnnnnnnnnnnnnnnnnnnnnnnnnnnnnnnnnnnnnnnnnnnnnnnnnnnnnnnnnnnnnnnnnnnnnnnnnnnnnnnnnnnnnnnnnnnnnnnnnnnnnnnnnnnnnnnnnnnnnnnnnnnnnnnnnnnnnnnnnnnnnnnnnnnnnnnnnnnnnnnnnnnnnnnnnnnnnnnnnnnnnnnnnnnnnnnnnnnnnnnnnnnnnnnnnnnnnnnnnnnnnnnnnnnnnnnnnnnnnnnnnnnnnnnnnnnnnnnnnnnnnnnnnnnnnnnnnnnnnnnnnnnnnnnnnnnnnnnnnnnnnnnnnnnnnnnnnnnnnnnnnnnnnnnnnnnnnnnnnnnnnnnnnnnnnnnnnnnnnnnnnnnnnnnnnnnnnnnnnnnnnnnnnnnnnnnnnnnnnnnnnnnnnnnnnnnnnnnnnnnnnnnnnnnnnnnnnnnnnnnnnnnnnnnnnnnnnnnnnnnnnnnnnnnnnnnnnnnnnnnnnnnnnnnnnnnnnnnnnnnnnnnnnnnnnnnnnnnnnnnnnnnnnnnnnnnnnnnnnnnnnnnnnnnnnnnnnnnnnnnnnnnnnnnnnnnnnnnnnnnnnnnnnnnnnnnnnnnnnnnnnnnnnnnnnnnnnnnnnnnnnnnnnnnnnnnnnnnnnnnnnnnnnnnnnnnnnnnnnnnnnnnnnnnnnnnnnnnnnnnnnnnnnnnnnnnnnnnnnnnnnnnnnnnnnnnnnnnnnnnnnnnnnnnnnnnnnnnnnnnnnnnnnnnnnnnnnnnnnnnnnnnnnnnnnnnnnnnnnnnnnnnnnnnnnnnnnnnnnnnnnnnnnnnnnnnnnnnnnnnnnnnnnnnnnnnnnnnnnnnnnnnnnnnnnnnnnnnnnnnnnnnnnnnnnnnnnnnnnnnnnnnnnnnnnnnnnnnnnnnnnnnnnnnnnnnnnnnnnnnnnnnnnnnnnnnnnnnnnnnnnnnnnnnnnnnnnnnnnnnnnnnnnnnnnnnnnnnnnnnnnnnnnnnnnnnnnnnnnnnnnnnnnnnnnnnnnnnnnnnnnnnnnnnnnnnnnnnnnnnnnnnnnnnnnnnnnnnnnnnnnnnnnnnnnnnnnnnnnnnnnnnnnnnnnnnnnnnnnnnnnnnnnnnnnnnnnnnnnnnnnnnnnnnnnnnnnnnnnnnnnnnnnnnnnnnnnnnnnnnnnnnnnnnnnnnnnnnnnnnnnnnnnnnnnnnnnnnnnnnnnnnnnnnnnnnnnnnnnnnnnnnnnnnnnnnnnnnnnnnnnnnnnnnnnnnnnnnnnnnnnnnnnnnnnnnnnnnnnnnnnnnnnnnnnnnnnnnnnnnnnnnnnnnnnnnnnnnnnnnnnnnnnnnnnnnnnnnnnnnnnnnnnnnnnnnnnnnnnnnnnnnnnnnnnnnnnnnnnnnnnnnnnnnnnnnnnnnnnnnnnnnnnnnnnnnnnnnnnnnnnnnnnnnnnnnnnnnnnnnnnnnnnnnnnnnnnnnnntcccctggctggccaggcctccccacagctgtatgcagccagcctgctgcagcgagggctgacggggcccacctctgtccctgctaccaaggccagcctgctccgggagctggaccgggacctgcggctggtggagcatgagtccaccannnnnnnnnnnnnnnnnnnnnnnnnnnnnnnnnnnnnnnnnnnnnnnnnnnnnnnnnnnnnnnnnnnnnnnnnnnnnnnnnnnnnnnnnnnnnnnnnnnnnnnnnnnnnnnnnnnnnnnnnnnnnnnnnnnnnnnnnnnnnnnnnnnnnnnnnnnnnnnnnnnnnnnnnnnnnnnnnnnnnnnnnnnnnnnnnnnnnnnnnnnnnnnnnnnnnnnnnnnnnnnnnnnnnnnnnnnnnnnnnnnnnnnnnnnnnnnnnnnnnnnnnnnnnnnnnnnnnnnnnnnnnnnnnnnnnnnnnnnnnnnnnnnnnnnnnnnnnnnnnnnnnnnnnnnnnnnnnnnnnnnnnnnnnnnnnnnnnnnnnnnnnnnnnnnnnnnnnnnnnnnnnnnnnnnnnnnnnnnnnnnnnnnnnnnnnnnnnnnnnnnnnnnnnnnnnnnnnnnnnnnnnnnnnnnnnnnnnnnnnnnnnnnnnnnnnnnnnnnnnnnnnnnnnnnnnnnnnnnnnnnnnnnnnnnnnnnnnnnnnnnnnnnnnnnnnnnnnnnnnnnnnnnnnnnnnnnnnnnnnnnnnnnnnnnnnnnnnnnnnnnnnnnnnnnnnnnnnnnnnnnnnnnnnnnnnnnnnnnnnnnnnnnnnnnnnnnnnnnnnnnnnnnnnnnnnnnnnnnnnnnnnnnnnnnnnnnnnnnnnnnnnnnnnnnnnnnnnnnnnnnnnnnnnnnnnnnnnnnnnnnnnnnnnnnnnnnnnnnnnnnnnnnnnnnnnnnnnnnnnnnnnnnnnnnnnnnnnnnnnnnnnnnnnnnnnnnnnnnnnnnnnnnnnnnnnnnnnnnnnnnnnnnnnnnnnnnnnnnnnnnnnnnnnnnnnnnnnnnnnnnnnnnnnnnnnnnnnnnnnnnnnnnnnnnnnnnnnnnnnnnnnnnnnnnnnnnnnnnnnnnnnnnnnnnnnnnnnnnnnnnnnnnnnnnnnnnnnnnnnnnnnnnnnnnnnnnnnnnnnnnnnnnnnnnnnnnnnnnnnnnnnnnnnnnnnnnnnnnnnnnnnnnnnnnnnnnnnnnnnnnnnnnnnnnnnnnnnnnnnnnnnnnnnnnnnnnnnnnnnnnnnnnnnnnnnnnnnnnnnnnnnnnnnnnnnnnnnnnnnnnnnnnnnnnnnnnnnnnnnnnnnnnnnnnnnnnnnnnnnnnnnnnnnnnnnnnnnnnnnnnnnnnnnnnnnnnnnnnnnnnnnnnnnnnnnnnnnnnnnnnnnnnnnnnnnnnnnnnnnnnnnnnnnnnnnnnnnnnnnnnnnnnnnnnnnnnnnnnnnnnnnnnnnnnnnnnnnnnnnnnnnnnnnnnnnnnnnnnnnnnnnnnnnnnnnnnnnnnnnnnnnnnnnnnnnnnnnnnnnnnnnnnnnnnnnnnnnnnnnnnnnnnnnnnnnnnnnnnnnnnnnnnnnnnnnnnnnnnnnnnnnnnnnnnnnnnnnnnnnnnnnnnnnnnnnnnnnnnnnnnnnnnnnnnnnnnnnnnnnnnnnnnnnnnnnnnnnnnnnnnnnnnnnnnnnnnnnnnnnnnnnnnnnnnnnnnnnnnnnnnnnnnnnnnnnnnnnnnnnnnnnnnnnnnnnnnnnnnnnnnnnnnnnnnnnnnnnnnnnnnnnnnnnnnnnnnnnnnnnnnnnnnnnnnnnnnnnnnnnnnnnnnnnnnnnnnnnnnnnnnnnnnnnnnnnnnnnnnnnnnnnnnnnnnnnnnnnnnnnnnnnnnnnnnnnnnnnnnnnnnnnnnnnnnnnnnnnnnnnnnnnnnnnnnnnnnnnnnnnnnnnnnnnnnnnnnnnnnnnnnnnnnnnnnnnnnnnnnnnnnnnnnnnnnnnnnnnnnnnnnnnnnnnnnnnnnnnnnnnnnnnnnnnnnnnnnnnnnnnnnnnnnnnnnnnnnnnnnnnnnnnnnnnnnnnnnnnnnnnnnnnnnnnnnnnnnnnnnnnnnnnnnnnnnnnnnnnnnnnnnnnnnnnnnnnnnnnnnnnnnnnnnnnnnnnnnnnnnnnnnnnnnnnnnnnnnnnnnnnnnnnnnnnnnnnnnnnnnnnnnnnnnnnnnnnnnnnnnnnnnnnnnnnnnnnnnnnnnnnnnnnnnnnnnnnnnnnnnnnnnnnnnnnnnnnnnnnnnnnnnnnnnnnnnnnnnnnnnnnnnnnnnnnnnnnnnnnnnnnnnnnnnnnnnnnnnnnnnnnnnnnnnnnnnnnnnnnnnnnnnnnnnnnnnnnnnnnnnnnnnnnnnnnnnnnnnnnnnnnnnnnnnnnnnnnnnnnnnnnnnnnnnnnnnnnnnnnnnnnnnnnnnnnnnnnnnnnnnnnnnnnnnnnnnnnnnnnnnnnnnnnnnnnnnnnnnnnnnnnnnnnnnnnnnnnnnnnnnnnnnnnnnnnnnnnnnnnnnnnnnnnnnnnnnnnnnnnnnnnnnnnnnnnnnnnnnnnnnnnnnnnnnnnnnnnnnnnnnnnnnnnnnnnnnnnnnnnnnnnnnnnnnnnnnnnnnnnnnnnnnnnnnnnnnnnnnnnnnnnnnnnnnnnnnnnnnnnnnnnnnnnnnnnnnnnnnnnnnnnnnnnnnnnnnnnnnnnnnnnnnnnnnnnnnnnnnnnnnnnnnnnnnnnnnnnnnnnnnnnnnnnnnnnnnnnnnnnnnnnnnnnnnnnnnnnnnnnnnnnnnnnnnnnnnnnnnnnnnnnnnnnnnnnnnnnnnnnnnnnnnnnnnnnnnnnnnnnnnnnnnnnnnnnnnnnnnnnnnnnnnnnnnnnnnnnnnnnnnnnnnnnnnnnnnnnnnnnnnnnnnnnnnnnnnnnnnnnnnnnnnnnnnnnnnnnnnnnnnnnnnnnnnnnnnnnnnnnnnnnnnnnnnnnnnnnnnnnnnnnnnnnnnnnnnnnnnnnnnnnnnnnnnnnnnnnnnnnnnnnnnnnnnnnnnnnnnnnnnnnnnnnnnnnnnnnnnnnnnnnnnnnnnnnnnnnnnnnnnnnnnnnnnnnnnnnnnnnnnnnnnnnnnnnnnnnnnnnnnnnnnnnnnnnnnnnnnnnnnnnnnnnnnnnnnnnnnnnnnnnnnnnnnnnnnnnnnatctacaatctggcacacccttggcccaaagactcaccaggtgggacgtggcaggcaggcctcagttgaggacgnnnnnnnnnnnnnnnnnnnnnnnnnnnnnnnnnnnnnnnnnnnnnnnnnnnnnnnnnnnnnnnnnnnnnnnnnnnnnnnnnnnnnnnnnnnnnnnnnnnnnnnnnnnnnnnnnnnnnnnnnnnnnnnnnnnnnnnnnnnnnnnnnnnnnnnnnnnnnnnnnnnnnnnnnnnnnnnnnnnnnnnnnnnnnnnnnnnnnnnnnnnnnnnnnnnnnnnnnnnnnnnnnnnnnnnnnnnnnnnnnnnnnnnnnnnnnnnnnnnnnnnnnnnnnnnnnnnnnnnnnnnnnnnnnnnnnnnnnnnnnnnnnnnnnnnnnnnnnnnnnnnnnnnnnnnnnnnnnnnnnnnnnnnnnnnnnnnnnnnnnnnnnnnnnnnnnnnnnnnnnnnnnnnnnnnnnnnnnnnnnnnnnnnnnnnnnnnnnnnnnnnnnnnnnnnnnnnnnnnnnnnnnnnnnnnnnnnnnnnnnnnnnnnnnnnnnnnnnnnnnnnnnnnnnnnnnnnnnnnnnnnnnnnnnnnnnnnnnnnnnnnnnnnnnnnnnnnnnnnnnnnnnnnnnnnnnnnnnnnnnnnnnnnnnnnnnnnnnnnnnnnnnnnnnnnnnnnnnnnnnnnnnnnnnnnnnnnnnnnnnnnnnnnnnnnnnnnnnnnnnnnnnnnnnnnnnnnnnnnnnnnnnnnnnnnnnnnnnnnnnnnnnnnnnnnnnnnnnnnnnnnnnnnnnnnnnnnnnnnnnnnnnnnnnnnnnnnnnnnnnnnnnnnnnnnnnnnnnnnnnnnnnnnnnnnnnnnnnnnnnnnnnnnnnnnnnnnnnnnnnnnnnnnnnnnnnnnnnnnnnnnnnnnnnnnnnnnnnnnnnnnnnnnnnnnnnnnnnnnnnnnnnnnnnnnnnnnnnnnnnnnnnnnnnnnnnnnnnnnnnnnnnnnnnnnnnnnnnnnnnnnnnnnnnnnnnnnnnnnnnnnnnnnnnnnnnnnnnnnnnnnnnnnnnnnnnnnnnnnnnnnnnnnnnnnnnnnnnnnnnnnnnnnnnnnnnnnnnnnnnnnnnnnnnnnnnnnnnnnnnnnnnnnnnnnnnnnnnnnnnnnnnnnnnnnnnnnnnnnnnnnnnnnnnnnnnnnnnnnnnnnnnnnnnnnnnnnnnnnnnnnnnnnnnnnnnnnnnnnnnnnnnnnnnnnnnnnnnnnnnnnnnnnnnnnnnnnnnnnnnnnnnnnnnnnnnnnnnnnnnnnnnnnnnnnnnnnnnnnnnnnnnnnnnnnnnnnnnnnnnnnnnnnnnnnnnnnnnnnnnnnnnnnnnnnnnnnnnnnnnnnnnnnnnnnnnnnnnnnnnnnnnnnnnnnnnccacccctgctcccattgtgtgtgtgaaattctcagtctgtggcatgtttgacctgtggcaggactcgctgctgccaggtgagtaaccgcctgtcccgcagtggagcatgcacagctcgcagcctctttgcacgatttcatccattttaaatgctcgaccctcttgcttggagttctttttgcctcagaacctctccttcaggagcacttctagttgacttctgcacaagctagtgaggacctgccagaattgttgcctgagcgtgccaggctgcagggcaggcagtataaggcccccacataccaggcagttttctctgtccaggatagcaggtaaaaaggagtccccagagcagactcaatggtaggagcc

SEQ ID NO: 25085 - DNA, 82 bp, Macaca Mulatta
gctccagagtttcctattttggagaagcagaactggttgattcatcttcattatatccggaaagattatgaagcctgcaagg

SEQ ID NO: 25086 - DNA, 1056 bp, Macaca Mulatta
  misc_feature (1)...(1056): n = A,T,C or G
gggattccagcggcggacagcacccgggccgagatgtctcgctcagtggccttagccgtgctggcgctactctctctttctggcctggaggctatccagcgtactccaaagattcaggtttactcacgccatccaccagagaatggaaagccaaatttcctgaattgctatgtgtctggatttcatccatctgatattgaagttgacttactgaagaatggagagaaaatgggaaaagtggagcattcagacttgtctttcagcaaagactggtctttctatctcttgtactacactgaattcacccccaatgaaaaagatgagtatgcctgccgtgtgaaccatgtgactttgtcagggcccaggacagttaagtgggatcgagacatgtaagcagcatcatggaggtttgaagatgccgcatttggattggatgagttccgaattctgcttccttggtttttaatattgatatggttatagaggtttatggcagaaatggcagaggtataataatgttaacaccaggcgtgatcttcctttataggtcgaactttgagtggtaatctgcacgctttgggagggatctggaggcgggctaggttttaggaagggctgggaggagatgaaggggggggggaccgaaaaggttgtgcgtgatccggggtgggaagtcctggggggcaaagaagggggagcctcgttcggtcggcgtgggcgtgcggtaggggtcgcggggggaaaaggtggtggtgcgggaaaatggaggaggagagcgggcagagaatgaaannnnnnnnnnnnnnnnnnnnnnnnnnnnnnnnnnnnnnnnnnnnnnnnnnnnnnnnnnnnnnnnnnnnnnnnnnnnnnnnnnnnnnnnnnnnnnnnnnnnnnnnnnnnnnnnnnnnnnnnnnnnnnnnnnnnnnnnnnnnnnnnnnnnnnnnnnnnnnnnnnnnnnnnnnnnnnnnnnnnnnnnnnnnnnnnnnnnnnnnnnnnnnnnnnnnnnnnnnnnnnnnnnnnnnnnnnnnnnnnnnnnnnnnnnnnnnnnnnnnanaa

SEQ ID NO: 25087 - DNA, 593 bp, Macaca Mulatta
  misc_feature (1)...(593): n = A,T,C or G
aagaggaagagagaatacagagaagagaatgaagggaagaggagataatagtaagaatggagtaatgtgagaagaaaatagagaggaggttagtgggaagagagacgccaggcaaagcgaacgttaccgaaaacatagaagaaggttgggtacacgcatagggggcaagggtaatggaggaacgaatttattgagaggcagttgacagcaagaggagaagacgagcatagcacttgcggcatatcatcttgtagcagttatatttatgggcaagctggcggagggaaggctcaataatgnnnnnnnnnnnnnnnnnnnnnnnnnnnnnnnnnnnnnnnnnnnnnnnnnnnnnnnnnnnnnnnnnnnnnnnnnnnnnnnnnnnnnnnnnnnnnnnnnnnnnnnnnnnnnnnnnnnnnnnnnnnnnnnnnnnnnnnnnnnnnnnnnnnnnnnnnnnnnnnnnnnnnnnnnnnnnnnnnnnnnnnnnnnnnnnnnnnnnnnnnnnnnnnnnnnnnnnnnnnnnctgcatgtttgcgtctgccgctcgaccgccgccaccaaccagctcagtcgcctcgctgaagaaaaagagcccc

SEQ ID NO: 25088 - DNA, 614 bp, Macaca Mulatta
  misc_feature (1)...(614): n = A,T,C or G
ggggagtcctctgtatcctcgggttcgggatccttgcattttaccaactgtgcatcaaaaatacttgnnnnnnnnnnnnnaannnnnnnnnnnnnnntataaatacttcataacaggatccaggctgagggtgaggggctggtgagcacgggcctggcaccctctgaaggtctcctttccctatagtatgagaagatcctgaagctcacagctgatgtcaagtttggtccatcagagtcaggcgatatgaaggacacagtggcagtgctgagtttcatcctctccagtgcggccaagcacagtgtcgatggcgaatccttggccagtgaactgcagcagctggngctgccccaagagcacgccggcagcctgtgccactgttatgaggagaaacaaagccccctgcagaagcactgtggatctacagctacccagcagtatgaggcagccagggtcaggctcctctagaagcaacacacacacaatgcatgatgtccaggaaatactaactggtccatacaagcactgccaactggactggcctgtttccgatcttggctggggagtgactaggaaccacttccttccccggggacctcccaacccggcccagg

SEQ ID NO: 25089 - DNA, 247 bp, Macaca Mulatta
acctgtacccagctttggggaggccatggcttacttcgccatggtcaagaggtacctgacctccttccccattgacgaccgcgtgcagagccacatcctccacttggaacacgatctggttcacgtgaccaggaagaaccatgccaggcaggcgggagttcggggtcttggacatcaaagctgagtcactggacctagctgtgcccccaacctagatggcagcaccaccccagggcagaggactctc

SEQ ID NO: 25090 - DNA, 474 bp, Macaca Mulatta
  misc_feature (1)...(474): n = A,T,C or G
catctggatcttcgacgtggagaggaatgtatccatccccatcggatggagctatttctttggttggctggtgctcatcctatannnnnnnnnncgatcctttgctacttcaactataaaagtttctggagtctgattctgagccaccccagtggcaccgtgtcctgcagcagcagtttcggctcagcggaagaacctccaagggcacagatgatcacagacacccccatcacccaggagggggtcctggatcctgagcggaaggatacacacctgtaaccttttctgagctcctggcaccaagttcagtccattcctctgaccctgtctcctcatcctccccacagcccttgaataggttggtcctcatcattgcaaggaatgagaaagggaggatntttgcactcctctgctttctgcctgacttgattgagcttgagtgatgtggaataaactgtccgtctcttctttctc

SEQ ID NO: 25091 - DNA, 3334 bp, Macaca Mulatta
  misc_feature (1)...(3334): n = A,T,C or G
tagaatacttgggtgacatctgcctgagagatcgccaagaattacannnnnnnnnnnnnnnnnnnnnnnnnnnnnnnnnnnnnnnnnnnnnnnnnnnnaaaaagcaactgctttcctgatctgcaacttggctggatgctaagatgtcagtggacatgaatagccaggggtctgacagcaatgaagaggactatgacccaaattgtgaggaagaggaagaagaagaggatgaagaccctggggacatagaggactattacgtgggagtagccagcgatgtggagcagcagggggctgatgcctttgatcccgaggagtaccagttcacttgcttgacctacaaggaatctgagggtgccctcaatgagcacatgaccagcttagcttctgtcctaaaggnnnnnnnnnnnnnnnnnnnnnnnnnnnnnnnnnnnnnnnnnnnnnnnnnnnnnnnnnnnnnnnnnnnnnnnnnnnnnnnnnnnnnnnnnnnnnnnnnnnnnnnnnnnnnnnnnnnnnnnnnnnnnnnnnnnnnnnnnnnnnnnnnnnnnnnnnnnnnnnnnnnnnnnnnnnnnnnnnnnnnnnnnnnnnnnnnnnnnnnnnnnnnnnnnnnnnnnnnnnnnnnnnnnnnnnnnnnnnnnnnnnnnnnnnnnnnnnnnnnnnnnnnnnnnnnnnnnnnnnnnnnnnnnnnnnnnnnnnnnnnnnnnnnnnnnnnnnnnnnnnnnnnnnnnnnnnnnnnnnnnnnnnnnnnnnnnnnnnnnnnnnnnnnnnnnnnnnnnnnnnnnnnnnnnnnnnnnnnnnnnnnnnnnnnnnnnnnnnnnnnnnnnnnnnnnnnnnnnnnnnnnnnnnnnnnnnnnnnnnnnnnnnnnnnnnnnnnnnnnnnnnnnnnnnnnnnnnnnnnnnnnnnnnnnnnnnnnnnnnnnnnnnnnnnnnnnnnnnnnnnnnnnnnnnnnnnnnnnnnnnnnnnnnnnnnnnnnnnnnnnnnnnnnnnnnnnnnnnnnnnnnnnnnnnnnnnnnnnnnnnnnnnnnnnnnnnnnnnnnnnnnnnnnnnnnnnnnnnnnnnnnnnnnnnnnnnnnnnnnnnnnnnnnnnnnnnnnnnnnnnnnnnnnnnnnnnnnnnnnnnnnnnnnnnnnnnnnnnnnnnnnnnnnnnnnnnnnnnnnnnnnnnnnnnnnnnnnnnnnnnnnnnnnnnnnnnnnnnnnnnnnnnnnnnnnnnnnnnnnnnnnnnnnnnnnnnnnnnnnnnnnnnnnnnnnnnnnnnnnnnnnnnnnnnnnnnnnnnnnnnnnnnnnnnnnnnnnnnnnnnnnnnnnnnnnnnnnnnnnnnnnnnnnnnnnnnnnnnnnnnnnnnnnnnnnnnnnnnnnnnnnnnnnnnnnnnnnnnnnnnnnnnnnnnnnnnnnnnnnnnnnnnnnnnnnnnnnnnnnnnnnnnnnnnnnnnnnnnnnnnnnnnnnnnnnnnnnnnnnnnnnnnnnnnnnnnnnnnnnnnnnnnnnnnnnnnnnnnnnnnnnnnnnnnnnnnnnnnnnnnnnnnnnnnnnnnnnnnnnnnnnnnnnnnnnnnnnnnnnnnnnnnnnnnnnnnnnnnnnnnnnnnnnnnnnnnnnnnnnnnnnnnnnnnnnnnnnnnnnnnnnnnnnnnnnnnnnnnnnnnnnnnnnnnnnnnnnnnnnnnnnnnnnnnnnnnnnnnnnnnnnnnnnnnnnnnnnnnnnnnnnnnnnnnnnnnnnnnnnnnnnnnnnnnnnnnnnnnnnnnnnnnnnnnnnnnnnnnnnnnnnnnnnnnnnnnnnnnnnnnnnnnnnnnnnnnnnnnnnnnnnnnnnnnnnnnnnnnnnnnnnnnnnnnnnnnnnnnnnnnnnnnnnnnnnnnnnnnnnnnnnnnnnnnnnnnnnnnnnnnnnnnnnnnnnnnnnnnnnnnnnnnnnnnnnnnnnnnnnnnnnnnnnnnnnnnnnnnnnnnnnnnnnnnnnnnnnnnnnnnnnnnnnnnnnnnnnnnnnnnnnnnnnnnnnnnnnnnnnnnnnnnnnnnnnnnnnnnnnnnnnnnnnnnnnnnnnnnnnnnnnnnnnnnnnnnnnnnnnnnnnnnnnnnnnnnnnnnnnnnnnnnnnnnnnnnnnnnnnnnnnnnnnnnnnnnnnnnnnnnnnnnnnnnnnnnnnnnnnnnnnnnnnnnnnnnnnnnnnnnnnnnnnnnnnnnnnnnnnnnnnnnnnnnnnnnnnnnnnnnnnnnnnnnnnnnnnnnnnnnnnnnnnnnnnnnnnnnnnnnnnnnnnnnnnnnnnnnnnnnnnnnnnnnnnnnnnnnnnnnnnnnnnnnnnnnnnnnnnnnnnnnnnnnnnnnnnnnnnnnnnnnnnnnnnnnnnnnnnnnnnnnnnnnnnnnnnnnnnnnnnnnnnnnnnnnnnnnnnnnnnnnnnnnnnnnnnnnnnnnnnnnnnnnnnnnnnnnnnnnnnnnnnnnnnnnnnnnnnnnnnnnnnnnnnnnnnnnnnnnnnnnnnnnnnnnnnnnnnnnnnnnnnnnnnnnnnnnnnnnnnnnnnnnnnnnnnnnnnnnnnnnnnnnnnnnnnnnnnnnnnnnnnnnnnnnnnnnnnnnnnnnnnnnnnnnnnnnnnnnnnnnnnnnnnnnnnnnnnnnnnnnnnnnnnnnnnnnnnnnnnnnnnnnnnnnnnnnnnnnnnnnnnnnnnnnnnnnnnnnnnnnnnnnnnnnnnnnnnnnnnnnnnnnnnnnnnnnnnnnnnnnnnnnnnnnnnnnnnnnnnnnnnnnnnnnnnnnnnnnnnnnnnnnnnnnnnnnnnnnnnnnnnnnnnnnnnnnnnnnnnnnnnnnnnnnnnnnnnnnnnnnnnnnnnnnnnnnnnnnnnnnnnnnnnnnnnnnnnnnnnnnnnnnnnnnnnnnnnnnnnnnnnnnnnnnnnnnnnnnnnnnnnnnnnnnnnnnnnnnnnnnnnnnnnnnnnnnnnnnnnnnnnnnnnnnnnnnnnnnnnnnnnnnnnnnnnnnnnnnnnnnnnnnnnnnnnnnnnnnnnnggtttttgtggctttgatcaatgcttccactctagggcaggtagagcagtctatactctcccacacctgcttgacctccagggagagctgatatacagagatctgtgaatattatgatagaaattatttggtattcgtatatttcacctgcaagtcagcaatttcccaggtaccatgtaagctataaaacagtcattcttaaagacacaggatagctgtgactcatggaatcatgagatccatggctggttgcaggttccctttctccttcctcaggttttgtctcttccagtgttgtccccagcaagggagagactgtggggtggattaaagaacaaattaggagtatag

SEQ ID NO: 25092 - DNA, 474 bp, Macaca Mulatta
ggttactctgtggaagctcattccaagatcgtcctggggcaggagcaggattcctatggcggcaagtttgataagagccagtcctttgtgggagagattggggatttgtacatgtggaactctgtactgcccccagaagagatcctgtctgcctatcagggtaccccagtccctgccaatatcctggactggcgggctctgaactatgaaatcaaaggatatgtcatcatcaaacccctggtgtgggtctgaggtcttgactcaacaagatcacttgaaaatgaaatgaccgtctaagagatctgctcaaagcaactggatactagatcttatacctgcagctctttcttctttgaattccctatctgtatgtctgccgaattaaaaactgtatattgtattatgctacctgcatttgtttagtgcttatcatagtcccatatctttatcttatatctactacttatctatctg

SEQ ID NO: 25093 - DNA, 340 bp, Macaca Mulatta
gttcttggattattccttctgacttggacatctcccagagctgcttgtatccaaatctgaatggaggaggcatgagctgtggactggaaagaagctctggaaaactcatcttcttccagtgggagtttcgggttcagtgctgtattattctgggttattggtggtccaggaatttcccagtgaagagaccctctgacctgccctcctgtgcccaagaattcctcctttcccttgtgtgggtcaatcattatcagcctgggcttccagctcctctcttccctcctcgactccaggtcttagagaccccatcaactctttatttgatcctttggcctttctc

SEQ ID NO: 25094 - DNA, 659 bp, Macaca Mulatta
ttcagacaaaaatctacatgccatcagaaaatatgtctctgcagatggtaacagtaagtaataacatagccttaattcaaccaggcttctcactgatgaattttgatggacaagttttcttctttggccaaaaaggctggcccaaaagatcctgccccactggagttttccacttggatgtaaagcataaccatgtcaaactgaagcctacaattttctctaaggattcctgctacctccctcctcttcgctacccagctacttgcacattcaaaggcaacttggagtctgaaaagcatcaatacatcatccatggagggaaaacaccaaacaatgagctttcagataagatttatgtcatgtctattgtttgcaagaacaacaaaagggttacttttcgctgcacagagaaagacttggtcggcgatgttcctgaagccagatatggtcattccattaatgtggtgtatagccgagggaaaagtatgggtgttctctttggaggacgctcatacatgccttctacccacagaaccacagaaaaatggaatagtgtagctgactgcctgccccatgttttcctggtggattaggaatttgggtgtgctacatcatacattcttccagaacttaagggtgggctatcttttcatgtctct

SEQ ID NO: 25095 - DNA, 645 bp, Macaca Mulatta
  misc_feature (1)...(645): n = A,T,C or G
ttaactgacccttcagccatcttttctatttctacatctaactgtttctgcatgtctcatntagtcccttttgatatattgtggaagttgtactttagtgatacaataaatgaattcgggtatatacgtctctatgttctataaatacacaaaacccaggattctaataagggncagcgctcctgtgacaattcttcagtctagaaagtagctgtcaccaagtacagaagtagaatttcacccatttctgtggtagaccaaggagattcagtagagcattgtgggagctatacggagaatagaaagtcncaatactcagagtattcaatggtttcncaggttaaataaggacagcagggagtcagaagcatggttgccactggggccagtgccaacctaagaagctcctccatccctcgtacttgtgcttctagcacaccagtctgagggggccaggaatgagtcttaggcaaggtttcatacatataaggctgagtatataactccagagggtttgatttttactggatgttgcaaacattcagaaaatcatgaaaataataacaacaaatctaacagatttctatgcaccccaaacccacaaagaagagatgttaacattttaccacatttgctttatatcct

SEQ ID NO: 25096 - DNA, 187 bp, Macaca Mulatta
  misc_feature (1)...(187): n = A,T,C or G
gatcttggagctcctctacagctggacagtgggcctgcccgaggaggtgaaaatcgcagaggcctaccagatgctaaagaagcagggnattgtgaagtccgaccccaagcttccagatgacactacctttccccttcctcctccacggcccaagaatgtgatctttgaagatgaggagaaatccaag

SEQ ID NO: 25097 - DNA, 453 bp, Macaca Mulatta
tttcaaagtcatggtctggtgccagatttgagaaactctaaccacctaatatttcataaccttcttcattaggtacttgtacagattaagttctaacatttcagcagtttaatatgtgtgcaatatgtgcattctttcattttagttttgcacttggttttctataaagtacgtttttactcagttcatgtgtgaacaatttaaaaaagtacagaataaggtacaaatgtagtgtatttaataaactgtcaagcaaagcagtatttgtctattggaggattttatttcatcatttgtgcgatcagctacattttgtatcatattaccttatatgagtcttcctgtctcaggagcaagtaatacgattaatgacatggtaggtcgcaagaacctactgtgcttcctttcagaccttcatcctggtattggtggctgttggttgcattgtaggtg

SEQ ID NO: 25098 - DNA, 1001 bp, Macaca Mulatta
  misc_feature (1)...(1001): n = A,T,C or G
atatcattgacaactgtaagctggttacagatgaatgtagaaaaaannnnnnnnnnnnnnnnnnnnnnnnnnnnnnnnnnnnnnnnnnnnnnnnnnnnnnnnnnnnnnnnnnnnnnnnnnnnnnnnnnnnnggtatactaaatcacatggtttgcttgttgaacaagctttaccaaaagctaaacttaaagaaattgtggcagaatctgacgttatgctcannnnnnnnnnnnnnnnnnnnnnnnnnnnnnnnnnnnnnnnnnnnnnnnnnnnnnnnnnnnnnnnnnnnnnnnnnnnnnnnnnnnnnnnnnnnnnnnnnnnnnnnnnnnnnnnnnnnnnnnnnnnnnnnnnnnnnnnnnnnnnnnnnnnnnnnnnnnnnnnnnnnnnnnnnnnnnnnnnnnnnnnnnnnnnnnnnnnnnnnnnnnnnnnnnnnnnnnnnnnnnnnnnnnnnnnnnnnnnnnnnnnnnnnnnnnnnnnnnnnnnnnnnnnnnnnnnnnnnnnnnnnnnnnnnnnnnnnnnnnnnnnnnnnnnnnnnnnnnnnnnnnnnnnnnnnnnnnnnnnnnnnnnnnnnnnnnnnnnnnnnnngtggatgagcttttagaaaagtacatgaactcttatgatattgttttagtacaagatgaatcattagaagtagccaactctattttacagaagattctataaacaagcattctccaagaagacctgtctcctgtgggtgcaattgaactgttcatctgttcatcttgctgagagacttatttataatacatccttactcttgaagtgttccctttgtataacatatattttcagacatggtgaatgcatcaaccggaagctcctttttctccacctctctcaacacactcctcaccttatcttttaacacatnnnnnnnnnnnnaaagccaaaattagaaaagtaactccctacttttccaaagtgaattttgtagtttaatgttatcatgcagtttttgaggagtcttttacact

SEQ ID NO: 25099 - DNA, 596 bp, Macaca Mulatta
  misc_feature (1)...(596): n = A,T,C or G
ggccgtgggtgccgagggccggttccgagcctgggtctggtgttcgaggacgagcgcaagggctgctactccagtggtgagacggtggccgggcacgtgctgctggaggcgtccgagccggtggccctgcgcgcgctgcgcctggaggcccagggccgcgccaccgccgcctggggcccgagcgccggcccccgcgcctcggccagcgcctcagccctggctgtcttctcggaggtggagtacctgaacgtgcgcctcagcctgcgggagcccccggccggtnnnnnnnnnnnnnnnnnnnnnnnnnnnnnnnnnnnnnnnnnnnnnnnnnnnnnnnnnnnnnnnnncctttggtcacctcgtttactgggaaatatggaagcattcagtactgtgtccgggcagtgttggaacgacccaagtacctgatcagagtgtaaagagggactgcaggttgttagtcatgtcgatgtcaacacacannnnnnnnnnnacccctgtattgaaaactcaagagaaaatggttggctgttggtttttcacttctggtccagtctcgctgagtgccaaaattgaaagaaagggatactgtaatg

SEQ ID NO: 25100 - DNA, 167 bp, Macaca Mulatta
gggcccactgatgatggtgaagaagagatggaagaagacacagtcacaaacgggtcctgagcagtgacgcagatgtataataatagacccttttggaacaagtctcttgcttttcgaacatggtctaatagccttgtttgtgttagcaaagtgaaatctatcagcat

SEQ ID NO: 25101 - DNA, 2803 bp, Macaca Mulatta
  misc_feature (1)...(2803): n = A,T,C or G
tccacctgatcccggtgtcaacagctaagaatggagtgagtagcaagagtcgaaagagaatcatgcccgaccctgtgacggagccccctgtgacagaccctgtttacgaagctcttttgtactgcaacatccccagcgtggctgagcgcagcatggaaggtnnnggtcatgccccgcatcattttaagctggtctcagtgcatgtgttcattcgccacggagacaggtacccactgtatgtcattcccaagacaaagcgaccagaaattgactgcactctggtggctaacaggnnggaaaccgtatcacccaacattggaagctttcgttagtcacatgtcaaaaggatccggagcctctttcgaaagccccttgaactccttgcctctttacccaaatcacccgctgtgtgagatgggagagctcacccagacaggnnnnnnnnnnnnnnnnnnnnnnnnnnnnnnnnnnnnnnnnnnnnnnnnnnnnnnnnnnnnnnnnnnnnnnnnnnnnnnnnnnnnnnnnnnnnnnnnnnnnnnnnnnnnnnnnnnnnnnnnnnnnnnnnnnnnnnnnnnnnnnnnnnnnnnnnnnnnnnnnnnnnnnnnnnnnnnnnnnnnnnnnnnnnnnnnnnnnnnnnnnnnnnnnnnnnnnnnnnnnnnnnnnnnnnnnnnnnnnnnnnnnnnnnnnnnnnnnnnnnnnnnnnnnnnnnnnnnnnnnnnnnnnnnnnnnnnnnnnnnnnnnnnnnnnnnnnnnnnnnnnnnnnnnnnnnnnnnnnnnnnnnnnnnnnnnnnnnnnnnnnnnnnnnnnnnnnnnnnnnnnnnnnnnnnnnnnnnnnnnnnnnnnnnnnnnnnnnnnnnnnnnnnnnnnnnnnnnnnnnnnnnnnnnnnnnnnnnnnnnnnnnnnnnnnnnnnnnnnnnnnnnnnnnnnnnnnnnnnnnnnnnnnnnnattgtaccttgggtattctctcctgggtgcccaccccatcctgaaccaaaccatcggccggatgcagcgtgccaccgagggcaggaaagaagagctctttgccctctactctgctcatgatgtcactctgtcaccagttctcagtgccttgggcctttcagaagccagattcccaaggtttgcagccaggttgatctttgagctttggcaagacagagaaaagcccaatgaacattccgtccggattctttacatggcgtcgatgtcacattccacacctctttctgccaagaccaccacaagcgttctcccaagcccatgtgcccgctggaaaacttggtccgctttgtcaaaagggacatgtttgtagccctgggtggcagtagtacaaattattatgatgcatgtcacagggaaggattctaaaaggtgtgcagtacagcagcatagaatctgtgccaatacagggcactgggaaaagtccacttctagttctgtctgttgctaagggtagaaaattattgctttttaaaggctaaatattgtttgtgggaaccacangatggttggggttgaacagtaagcatgttgctgtaatgtggtatgtgaatttcttggtataaaatggccagttcatagaggaatagaaggtattttgtcacagccagactttgcttagaatgccagaataatatannnnnnnnnnnnnnnnnnnnnnnnnnnnnnnnnnnnnnnnnnnnnnnnnnnnnnnnnnnnnnnnnnnnnnnnnnnnnnnnnnnnnnnnnnnnnnnnnnnnnnnnnnnnnnnnnnnnnnnnnnnnnnnnnnnnnnnnnnnnnnnnnnnnnnnnnnnnnnnnnnnnnnnnnnnnnnnnnnnnnnnnnnnnnnnnnnnnnnnnnnnnnnnnnnnnnnnnnnnnnnnnnnnnnnnnnnnnnnnnnnnnnnnnnnnnnnnnnnnnnnnnnnnnnnnnnnnnnnnnnnnnnnnnnnnnnnnnnnnnnnnnnnnnnnnnnnnnnnnnnnnnnnnnnnnnnnnnnnnnnnnnnnnnnnnnnnnnnnnnnnnnnnnnnnnnnnnnnnnnnnnnnnnnnnnnnnnnnnnnnnnnnnnnnnnnnnnnnnnnnnnnnnnnnnnnnnnnnnnnnnnnnnnnnnnnnnnnnnnnnnnnnnnnnnnnnnnnnnnnnnnnnnnnnnnnnnnnnnnnnnnnnnnnnnnnnnnnnnnnnnnnnnnnnnnnnnnnnnnnnnnnnnnnnnnnnnnnnnnnnnnnnnnnnnnnnnnnnnnnnnnnnnnnnnnnnnnnnnnnnnnnnnnnnnnnnnnnnnnnnnnnnnnnnnnnnnnnnnnnnnnnnnnnnnnnnnnnnnnnnnnnnnnnnnnnnnnnnnnnnnnnnnnnnnnnnnnnnnnnnnnnnnnnnnnnnnnnnnnnnnnnnnnnnnnnnnnnnnnnnnnnnnnnnnnnnnnnnnnnnnnnnnnnnnnnnnnnnnnnnnnnnnnnnnnnnnnnnnnnnnnnnnnnnnnnnnnnnnnnnnnnnnnnnnnnnnnnnnnnnnnnnnnnnnnnnnnnnnnnnnnnnnnnnnnnnnnnnnnnnnnnnnnnnnnnnnnnnnnnnnnnnnnnnnnnnnnnnnnnnnnnnnnnnnnnnnnnnnnnnnngctattcgatagtttacagatctttataaggtgttttatatattagaagcaattatgattacatctgtgatttctgaactaatggtgctaattcagagatatgggaagtgcaagtgagattctctggcgtcattggcattccaactttttctctttgtttttgtccagtgttgcatttgaatatgtctgtttctataaataaatttttgaagaatacc

SEQ ID NO: 25102 - DNA, 271 bp, Macaca Mulatta
ttccttataatttagtttggtgaaagatgttagtttctgctgtaactacccaggaaggtcttcagtatatagaagatcatgctatatttattaacctttaatgatatttagaggctacttccatcattgtttcattgacctttgcatttttttcattctaaaaatggttcctggtaatatgtctgcttatcttcctatgatgttcaaagttattagtagaaagacaatataaaagccttggtagaattaaaaaaagaaacttagttagaat

SEQ ID NO: 25103 - DNA, 866 bp, Macaca Mulatta
ccccaggttactaagtaggagagtgggcttattatatgaacagcatttaaccagatactttgtcttactgtatgttccttttttcccacctattttttcatactaaatgtatttgatagtggacatgttgaatatttacaaaaaaatcaattcatttctgtttcaaaacctttgatcagaacgatctgtggaagagtaactccatttctatatgagtgtctccttgctttagatttctggtgaaccctgtggttatgaatacttgtgtgtgattttaaaaaaaagatacattttacatttcatcgaattgctgttcacactggagtattatatataaatagatatatttgaggcccaaggcctgaaaagtattagtatacaacttggtatcttagtcttactatgtactttttgaaagtattcctcgcaggagaaagaatttaaaatacccattttattcatgcctttctttttaaaaaattctctatccagttatactgtagtctttttagtgctgattttttattcctgaatttttgctgctcatgaccagttttaataccactgtgttttccttctattaaaccagaagaagtaaacagcataattggcaactcttttctagtggcaggcaccttttacccttggtgctccaaatcccccatctaggaaagaaatttttcaagtcaaataccttgatcacatattcctgtaaatatttaccaaactgtatggacagtagattaaattgatttgcctaactcacgcactccttatgtccggattattgaaagctgaaaagttgctcacaatgtcgaaatattatttctgtagcctccaaggtgtgaccagtgcaagaacccaaa

SEQ ID NO: 25104 - DNA, 718 bp, Macaca Mulatta
  misc_feature (1)...(718): n = A,T,C or G
atcggcacgaggcccggcacgtgttcctaacagggcccccaggngttggaaaaacaacattgatccagaaagccagtgaggttttaaaatcctctggtgtgcctgtcgatggatttatacagaagaagtcagacagggagggagaagaataggattcgatgtcgtcacgctgtccggaacccgggggcctttatcgagagttgggttagagcctccacctggaaaacgtgaatgccgagttgggcagtatgtggttgatatgacttcttttgagcagttggcactccccgtcttgaggaatgctgactgcagcagtggtccagggcaaagagtgtgtgtcatcgacgagattgggaagatggagctcttcagtcagcctttcattcaagctgtgcgtcagacgctgtctaccccagggactataatccttggcacaatcccagttcctaaaggaaagccactggctcttgtagaagaaatccgaaacagaaaggacgtgaaggtgtttaatgtcaccaaggaaaacagaaaccaccttctgccagatatcgtgacgtgtgtgcagagcagcaggaagtgaagacacgtgcgttcctgcctcccttgaaggagtgcccagttcaagaggagcccaatggagccctcctgtcgaggctgtatgcctatggggttatagaaccttgtgggctttctagagaaaatcaacagtgttttcata

SEQ ID NO: 25105 - DNA, 379 bp, Macaca Mulatta
ggcaaggggctggggctcagacagtgttgctgcagtggggtctccatggggggactggcctggcacttgggcagtgctcaccacacctctcctcttttccacagcagaggagaagaaagatgagaagaaggaggagtctgaagagtcagacgatgacatgggatttggcctcattgattaaattcctgctaccctgcaaataaagccttttacacatacctcaagtattccatgagcactttgtcagacggtattctctgttcagcttcgcatcaaacagggcaggtttggggctgtattgtgtataacatggggttggggaagagattctggtgcaaaatgagcatgaggagggcagtctgggcatcacagctgcctg

SEQ ID NO: 25106 - DNA, 294 bp, Macaca Mulatta
aagctctgctttgtgtggtaaaaaacttaagtcctggtttgcatagcttgatagagtgattatacacctcccattctctaactcttttttctgtatcccaccccttttctactgaatttgtgggaatcctataataaaagtgaatgactaaaaattttaaaagcattccttatcttcatctttcctgagtccttttttttttgaggtgggcggggccagggaagatgctgatttgaagatgaaaagaataattctatttttccagttggcttttcccttctagaatgcagcact

SEQ ID NO: 25107 - DNA, 1142 bp, Macaca Mulatta
  misc_feature (1)...(1142): n = A,T,C or G
aatgtattcccaagttctggtgactttactcagacacctttgtttcgaacttatgggacatggtgggatcagtgtcctagtgcttccttgccattcaagaggacaccacctaattttcagagccaggactatgtggaacttacttttgaacaacaggtgtatcctacagctgttcatgttctagaaacctatcatcctggagcagtcatcagaattctcgcttgttctgcaaatccttattccccaaatccaccaactgaagtaagnnnnnnnnnnnnnnnnnnnnnnnnnnnnnnnnnnnnnnnnnnnnnnnnnnnnnnnnnnnnnnnnnnnnnnnnnnnnnnnnnnnnnnnnnnnnnnnnnnnnnnnnnnnnnnnnnnnnnnnnnnnnnnnnnnnnnnnnnnnnnnnnnnnnnnnnnnnnnnnnnnnnnnnnnnnnnnnnnnnnnnnnnnnnnnnnnnnnnnnnnnnnnnnnnnnnnnnnnnnnnnnnnnnnnnnnnnnnnnnnnnnnnnnnnnnnnnnnnnnnnnnnnnnnnnnnnnnnnnnnnnnnnnnnnnnnnnnnnnnnnnnnnnnnnnnnnnnnnnnnnnnnnnnnnnnnnnnnnnnnnnnnnnnnnnnnnnnnnnnnnnnnnnnnnnnnnnnnnnnnnnnnnnnnnnnnnnnnnnnnnnnnnnnnnnnnnnnnnnnnnnnnnnnnnnnnnnnnnnnnnnnnnnnnnnnnnnnnnnnnnnnnnnnnnnnnnnnnnnnnnnnnnnnnnnnnnnnnnnnnnnnnnnnnnnnnnnnnnnnnnnnnnnnnnnnnnnnnnnnnnnnnnnnnnnnnnnnnnnnnnnnnnnnnnnnnnnnnnnnnnnnnnnnnnnnnnnnnnnnnnnnnnnnnnnnnnnnnnnnnnnnnnnnnnnnnnnnnnnnnnnnnnnnnnnnnnnnnnnnnnnnnnnnnnnnnnnnnnnnnnnnnnnnnnnnnnnnnnnnnnnnnnnnnnnnnnnnnnnnnnnnnnnnnnnnnnnnnnnnnnnnnnnnnnnnnnnnnnnnnnnnnnnnnnnnnnnnnnnnnnnnnnnnnnnnnnnnnnnnnnnngcaaacagcactgctcagcattttgaacttctgttcagagcttcagcacctcagtttgggcagttgtgtcatg

SEQ ID NO: 25108 - DNA, 2957 bp, Macaca Mulatta
  misc_feature (1)...(2957): n = A,T,C or G
caaataaactcatcaaggaggagcttcaaagtcaagtggaattgctgaattcttttgagaagaaatacagcgatcctggccctgtatatgactgcttggtgtggcatgatggtgaagtctggagnnnnnnnnnnnnnnnnnnnnnnnnnnnnnnnnnnnnnnnnnnnnnnnnnnnnnnnnnnnnnnnnnnnnnnnnnnnnnnnnnnnnnnnnnnnnnnnnnnnnnnnnnnnnnnnnnnnnnnnnnnnnnnnnnnnnnnnnnnnnnnnnnnnnnnnnnnnnnnnnnnnnnnnnnnnnnnnnnnnnnnnnnnnnnnnnnnnnnnnnnnnnnnnnnnnnnnnnnnnnnnnnnnnnnnnnnnnnnnnnnnnnnnnnnnnnnnnnnnnnnnnnnnnnnnnnnnnnnnnnnnnnnnnnnnnnnnnnnnnnnnnnnnnnnnnnnnnnnnnnnnnnnnnnnnnnnnnnnnnnnnnnnnnnnnnnnnnnnnnnnnnnnnnnnnnnnnnnnnnnnnnnnnnnnnnnnnnnnnnnnnnnnnnnnnnnnnnnnnnnnnnnnnnnnnnnnnnnnnnnnnnnnnnnnnnnnnnnnnnnnnnnnnnnnnnnnnnnnnnnnnnnnnnnnnnnnnnnnnnnnnnnnnnnnnnnnnnnnnnnnnnnnnnnnnnnnnnnnnnnnnnnnnnnnnnnnnnnnnnnnnnnnnnnnnnnnnnnnnnnnnnnnnnnnnnnnnnnnnnnnnnnnnnnnnnnnnnnnnnnnnnnnnnnnnnnnnnnnnnnnnnnnnnnnnnnnnnnnnnnnnnnnnnnnnnnnnnnnnnnnnnnnnnnnnnnnnnnnnnnnnnnnnnnnnnnnnnnnnnnnnnnnnnnnnnnnnnnnnnnnnnnnnnnnnnnnnnnnnnnnnnnnnnnnnnnnnnnnnnnnnnnnnnnnnnnnnnnnnnnnnnnnnnnnnnnnnnnnnnnnnnnnnnnnnnnnnnnnnnnnnnnnnnnnnnnnnnnnnnnnnnnnnnnnnnnnnnnnnnnnnnnnnnnnnnnnnnnnnnnnnnnnnnnnnnnnnnnnnnnnnnnnnnnnnnnnnnnnnnnnnnnnnnnnnnnnnnnnnnnnnnnnnnnnnnnnnnnnnnnnnnnnnnnnnnnnnnnnnnnnnnnnnnnnnnnnnnnnnnnnnnnnnnnnnnnnnnnnnnnnnnnnnnnnnnnnnnnnnnnnnnnnnnnnnnnnnnnnnnnnnnnnnnnnnnnnnnnnnnnnnnnnnnnnnnnnnnnnnnnnnnnnnnnnnnnnnnnnnnnnnnnnnnnnnnnnnnnnnnnnnnnnnnnnnnnnnnnnnnnnnnnnnnnnnnnnnnnnnnnnnnnnnnnnnnnnnnnnnnnnnnnnnnnnnnnnnnnnnnnnnnnnnnnnnnnnnnnnnnnnnnnnnnnnnnnnnnnnnnnnnnnnnnnnnnnnnnnnnnnnnnnnnnnnnnnnnnnnnnnnnnnnnnnnnnnnnnnnnnnnnnnnnnnnnnnnnnnnnnnnnnnnnnnnnnnnnnnnnnnnnnnnnnnnnnnnnnnnnnnnnnnnnnnnnnnnnnnnnnnnnnnnnnnnnnnnnnnnnnnnnnnnnnnnnnnnnnnnnnnnnnnnnnnnnnnnnnnnnnnnnnnnnnnnnnnnnnnnnnnnnnnnnnnnnnnnnnnnnnnnnnnnnnnnnnnnnnnnnnnnnnnnnnnnnnnnnnnnnnnnnnnnnnnnnnnnnnnnnnnnnnnnnnnnnnnnnnnnnnnnnnnnnnnnnnnnnnnnnnnnnnnnnnnnnnnnnnnnnnnnnnnnnnnnnnnnnnnnnnnnnnnnnnnnnnnnnnnnnnnnnnnnnnnnnnnnnnnnnnnnnnnnnnnnnnnnnnnnnnnnnnnnnnnnnnnnnnnnnnnnnnnnnnnnnnnnnnnnnnnnnnnnnnnnnnnnnnnnnnnnnnnnnnnnnnnnnnnnnnnnnnnnnnnnnnnnnnnnnnnnnnnnnnnnnnnnnnnnnnnnnnnnnnnnnnnnnnnnnnnnnnnnnnnnnnnnnnnnnnnnnnnnnnnnnnnnnnnnnnnnnnnnnnnnnnnnnnnnnnnnnnnnnnnnnnnnnnnnnnnnnnnnnnnnnnnnnnnnnnnnnnnnnnnnnnnnnnnnnnnnnnnnnnnnnnnnnnnnnnnnnnnnnagtattctttgaaactggagaaaggagattatacaattcgactgcaaattcgccatgagcaaatcagtgatttggaacgccttaaagaccttccatttattgtttctcatagattgtctaataccttgagcttagatattcatgaaaatcatagttttgcacttctagggaagaagaaatcgagcaacttgacatnnnnnnnnnnnnnnnnnnnnnnnnnnnnnnnnnnnnnnnnnnnnnnnnnnnnnnnnnnnnnnnnnnnnnnnnnnnnnnnnnnnnnnnnnnnnnnnnnnnnnnnnnnnnnnnnnnnnnnnnnnnnnnnnnnnnnnnnnnnnnnnnnnnnnnnnnnnnnnnnnnnnnnnnnnnnnnnnnnnnnnnnnnnnnnnnnnnnnnnnnnnnnnnnnnnnnnnnnnnnnnnnnnnnnnnnnnnnnnnnnnnnnnnnnnnnnnnnnnnnnnnnnnnnnnnnnnnnnnnnnnnnnnnnnnnnnnnnnnnnnnnnnnnnnnnnnnnnnnnnnnnnnnnnnnnnnnnnnnnnnnnnnnnnnnnnnnnnnnnnnnnnnnnnnnnnnnnnnnnnnnnnnnnnnnnnnnnnnnnnnnnnnnnnnnnnnnnnnnnnnnnnnnnnnnnnnnnnnnnnnnnnnnnnnnnnnnnnnnnnnnnnnnnnnnnnnnnnnnnnnnnnnnnnnnnnnnnnnnnnnnnnnnnnnngacatggacaaacaaaaatccaccctcgtagatgccctttgtaggaaaggttgtgccctggcagaccatcttcttcacacccaggctcaagatggagccatttccactgatgcagaaggaaa

SEQ ID NO: 25109 - DNA, 704 bp, Macaca Mulatta
  misc_feature (1)...(704): n = A,T,C or G
tcagtagccacngtgggcgctagtggctgctataccagtgtaatgtgtctatcccagaaagtttatttagacagtattacatgttccgataaaggatgggctttttgtttcagtctagaaaccacaaaaaaagacagcacggaggaataagatcttccagaaactcattcccttaaaacccacccaaatacattannnnnnnnnnnnnnnnnnnnnnnaaaatgtcactatcattttatgccaaagtgtaccactactctacaaagatatgcatattcttttagcaagtcgtgttagtactgcagttagccacaataatttagttgaaatttaaatcacaatatttagcccctctaaaaatgcaatacttatatccctatatttaactatatatctatattctctctatatagtatcctgtatgttatttatctagtatacatctctatatagctgatatgctatatattactatatatagtgataatataaattaatatacacattttatgcattattgtatatataaaatactacatatatgtaatatatagtaataagtgtgccacaaagtgtcacctaccttggcttccaatatcagagacttctactccagtgtccatttttatactatcaagaatgatagcttcatcaccaccggcttcatcatcttccttctcagagtcttcaagatcacccccagg

SEQ ID NO: 25110 - DNA, 110 bp, Macaca Mulatta
aggggctttgacattgggaaccatttttgtgagtgggtttatgattatactcacgaggaatggcctttctacaaagcaaggcccacagactaccccactcaaggacagca

SEQ ID NO: 25111 - DNA, 1108 bp, Macaca Mulatta
  misc_feature (1)...(1108): n = A,T,C or G
agcagcagccaagctggacagatgacctgccactctgccacctctctggggttggctcagcctccaaccgcagctactctgctgatggcaagggcactgagagccacccgccagaggacagctggctcaagttcaggnnnnnnnnnnnnnnnnnnnnnnnnnnnnnnnnnnnnnnnnnnnnnnnnnnnnnnnnnnnnnnnnnnnnnnnnnnnnnnnnnnnnnnnnnnnnnnnnnnnnnnnnnnnnnnnnnnnnnnnnnnnnnnnnnnnnnnnnnnnnnnnnnnnnnnnnnnnnnnnnnnnnnnnnnnnnnnnnnnnnnnnnnnnnnnnnnnnnnnnnnnnnnnnnnnnnnnnnnnnnnnnnnnnnnnnnnnnnnnnnnnnnnnnnnnnnnnnnnnnnnnnnnnnnnnnnnnnnnnnnnnnnnnnnnnnnnnnnnnnnnnnnnnnnnnnnnnnnnnnnnnnnnnnnnnnnnnnnnnnnnnnnnnnnnnnnnnnnnnnnnnnnnnnnnnnnnnnnnnnnnnnnnnnnnnnnnnnnnnnnnnnnnnnnnnnnnnnnnnnnnnnnnnnnnnnnnnnnnnnnnnnnnnnnnnnnnnnnnnnnnnnnnnnnnnnnnnnnnnnnnnnnnnnnnnnngcttggacgccgggaagatcaagcaggtggggattatctgtgggcaggagagcacccggcggatcggggattacaaggtcaaatatggctacacggacattgaccttctcagnnnnnnnnnnnnnnnnnnnnnnnnnnnnnnnnnnnnnnnnnnnnnnnnnnnnnnnnnnnnnnnnnnnnnnnnnnnnnnnnnnnnnnnnnnnnnnnnnnnnnnnnnnnnnnnnnnnnnnnnnnnnnnnnnnnnnnnnnnnnnnnaggagattgctgcaatgattgacactgagtttgccaagcagacctccctggacgccgtggcccaggccgtggtggaccgggtgaagcgcatccacagcgacaccttcgccagcggtggggagcgtgccaggttctgcccccggcatgaggacatgaccctgctggtgaggaactttggctacccactgggtgaaatgagccagcccacaccgagcccggcccca

SEQ ID NO: 25112 - DNA, 200 bp, Macaca Mulatta
cccgcatcgccacgtccctggatgtttttgacgtcgcgtccatgcagcagcagcggcaggagcagagctacttcgtgcgtctgggctccctgtcagataggctgcggcagcacgcctatgagcactcgctgggcaagcttcgagccaccaagcagagggcacaggaggctctgctgcagctgtcgcaggccctaagcctg

SEQ ID NO: 25113 - DNA, 430 bp, Macaca Mulatta
  misc_feature (1)...(430): n = A,T,C or G
aatccagccgtgtaggaaacctgagatgcagcgggccaggcggtattttaaaacactgcaacgagtacagtgctaagaactgtaatgctcaggaaatcttacagcacgtgccgtcctaagcctctgtgtgtgtcctcgtggctcgctactttttcttcttcttgctggtgatggtcttgctggatggngacacggtcacgtcctccttgngagggtccagtatgagataagaggatgacacgtccaccggctccttgatcaccatgatgtccacctcatagtcttgtctcttggcttcttcctctctcagatnaacatattcagcctgaagcaaacatgagaaagttggagcttttttcatccccctaaaaacgcaaaaacgtttgatgctatttgtagatacagcccttcagactgcatttcagcagcg

SEQ ID NO: 25114 - DNA, 323 bp, Macaca Mulatta
tccagtctcagaggattatctgttatgctttcttcccgcccgcccctaggttggcaaaatgcaatgtgacaactgcttgctgccagcatctctcctcggttctcagcagcagtaagagcctggtgaatctgaatcttctaggcaacgaattggatcatgatggtgtcaagatgctatgtaaggctttgagaaagtcgacatgcaggctgcagaaactcgggtaatccctgctgacttttccacgggcgagaacctacagggacaaggctagattgactaggcttctagagcacgcgtcaggtttccattgcactcagcttcct

SEQ ID NO: 25115 - DNA, 2084 bp, Macaca Mulatta
  misc_feature (1)...(2084): n = A,T,C or G
tcaaggaatattacatatcaatgacattgcttatgaaatcaagcccctagcattttctaccacatttgaacatctggtatataagatggacagcaaggagaaacaattttcaaccatgagatccggatttatgcaaaatgaaataacatgccgaatggaatttgaagaaattgataattccactctgaagcaaagttcttatgtgggctggtggattcattttagaattattgaaatggtagttgtcattgataattatctatacattcgttataaaaggaatgactcacagttgctggaggatctatatgttatttttaatatagtggattccatttttgatgtaattggtgttaaggtgttattatttggtttggagatctggactaataaaaacttcattgtaatagatgatgtaaggaagtctttgcacctatattgcaagtggaagttggacaacatgactccccggttacgacatgacacctcacatattttcacaagtcgaggattaagagggttaagtggcataggagctgttagcggaatgtgtacactagaccgcagttgtgcaattgttactttcatgaacaaaactttgggcactttttcaattgcagtggctcatcatctaggtcataatttgggcatgaaccatgattatggtacatgtcgttgttcacaatatctatgcataatgcatgaaattaacccaccaataactaaatttagcaattgtagttatggtgatttttgggcacacactgtagagaggacaaagtgtttgcttgaaaatctctacacaaaggacatctttaataggaagcgctgtgggaacggtattgttgaagaaggagaggagtgtgactgtgggcctttaaagcattgtgcaaaagatccctgctgtctgtcaaactgcactctgaccgatggttctacttgtgcttttgggctttgttgcaaagactgcaagttcctaccatcaggggaagtgtgtagaaaggaggccaatgaatgtgatcttccagagtggtgcaatggtacttcccataagtgcccagatgacgtttatgtggaagatggaattccctggtaggagaggtcctactgctatnnnnnnnnnnnnnnnnnnnnnnnnnnnnnnnnnnnnnnnnnnnnnnnnnnnnnnnnnnnnnnnnnnnnnnnnnnnnnnnnnnnnnnnnnnnnnnnnnnnnnnnnnnnnnnnnnnnnnnnnnnnnnnnnnnnnnnnnnnnnnnnnnnnnnnnnnnnnnnnnnnnnnnnnnnnnnnnnnnnnnnnnnnnnnnnnnnnnnnnnnnnnnnnnnnnnnnnnnnnnnnnnnnnnnnnnnnnnnnnnnnnnnnnnnnnnnnnnnnnnnnnnnnnnnnnnnnnnnnnnnnnnnnnnnnnnnnnnnnnnnnnnnnnnnnnnnnnnnnnnnnnnnnnnnnnnnnnnnnnnnnnnnnnnnnnnnnnnnnnnnnnnnnnnnnnnnnnnnnnnnnnnnnnnnnnnnnnnnnnnnnnnnnnnnnnnnnnnnnnnnnnnnnnnnnnnnnnnnnnnnnnnnnnnnnnnnnnnnnnnnnnnnnnnnnnnnnnnnnnnnnnnnnnnnnnnnnnnnnnnnnnnnnnnnnnnnnnnnnnnnnnnnnnnnnnnnnnnnnnnnnnnnnnnnnnnnnnnnnnnnnnnnnnnnnnnnnnnnnnnnnnnnnnnnnnnnnnnnnnnnnnnnnnnnnnnnnnnnnnnnnnnnnnnnnnnnnnnnnnnnnnnnnnnnnnnnnnnnnnnnnnnnnnnnnnnnnnnnnnnnnnnnnnnnnnnnnnnnnnnnnnnnnnnnnnnnnnnnnnnnnnnnnnnnnnnncccagagtcaacctcctgtgacaccctcccagagtcaacctcgggtgatgccttcccagagtcaacctcctgtgacaccctcccagagtcaacctcgggtgatgccttctcagagtcaacctcctgtgatgccctcccagaggcaacctcagttgacaccttcccagagtcagcgtcctgtgacaccctcccagagccaaccttgggtgacaccctcccagagtcaacctcatgtga

SEQ ID NO: 25116 - DNA, 197 bp, Macaca Mulatta
tcaagactactttaaatattcatccaaagtaacaaaagtaaatgaattagggagacggggctaacaatttgacccgattggtaataatgtacacagtggtaatcgctatagcaattatagctgatatatatgaactcattcatccaaagtgaacgtgattaacttcatttgacagagcggttaagtaacttgactac

SEQ ID NO: 25117 - DNA, 485 bp, Macaca Mulatta
catcagtgaccctcatcccccctgcatgctcacagaccttactgagtcccatttgtcccctcaggacccaaccaacggttactacaaggtccgaggagtcagtgtgagcctgagccttggcgaagcccctggaggaggcctcttcctgccaccaccctcccccattgggcccccaggggcccccaccttctatgacttcaacccacacctgggcatggtacccccctgcagactttacagaacccaggcaggctacctcaccacaccccaccctcgagctttcaccagctacatcaaacccgcatcttttgggcccccagatctggcccccgggactccccctttcccatatgctgttttccccacacctagccacccgcgtctccagactcatgtgtgacatctctccagtggaagagtcctgggatctccaactttccataatggattgtcctgatttctgaggagtcaggataagttggcga

SEQ ID NO: 25118 - DNA, 1878 bp, Macaca Mulatta
  misc_feature (1)...(1878): n = A,T,C or G
gtgataactcttctgatagcagcttatttaaaactcagtgtatcccttactcacctaaacgggggaaaagaaaccccattcgaaaatttgttcgtacacctgaaagtgttcacgcaagtgattcatcaagtgactcatcttttgaaccaataccattgactataaaagctatttttgaaagattcaagaacaggaaaaagannnnnnnnnnnnnnnnnnnnnnnnnnnnnnnnnnnnnnnnnnnnnnnnnnnnnnnnnnnnnnnnnnnnnnnnnnnnnnnnnnnnnnnnnnnnnnnnnnnnnnnnnnnnnnnnnnnnnnnnnnnnnnnnnnnnnnnnnnnnnnnnnnnnnnnnnnnnnnnnnnnnnnnnnnnnnnnnnnnnnnnnnnnnngcaagctgttgcaagaggattttttaactacattgaaaaactgaagtatgaacaccacctgaaagaatcattgaaacaaatggatgttggtgaagatttagaaaatgaagattttgatagtcgtagatacaaatttttggatgatgatggatccatttctcctattgaggagtcannnnnnnnnnnnnnnnnnnnnnnnnnnnnnnnnnnnnnnnnnnnnnnnnnnnnnnnnnnnggggatagtttcatagtaagttctgaattccctgtaagactgagtgtatacttagaagaagaggatagtactgaagaagctgctttgtctaaaaagagagctacaaaagctaaaaatactggacagagagccctgaaaatgtgacaggatcatgaatgtcaaagntttatcttgagaacatgatgtctggagttaaaggtatnnnnnnnnnnnnnnnnnnnnnnnnnnnnnnnnnnnnnnnnnnnnnnnnnnnnnnnnnnnnnnnnnnnnnnnnnnnnnnnnnnnnnnnnnnnnnnnnnnnnnnnnnnnnnnnnnnnnnnnnnnnnnnnnnnnnnnnnnnnnnnnnnnnnnnnnnnnnnnnnnnnnnnnnnnnnnnnnnnnnnnnnnnnnnnnnnnnnnnnnnnnnnnnnnnnnnnnnnnnnnnnnnnnnnnnnnnnnnnnnnnnnnnnnnnnnnnnnnnnnnnnnnnnnnnnnnnnnnnnnnnnnnnnnnntggtcattaccaaggcttttagaatgcattttctcatttgctgtggacatgaccataaaaaaatttcccagtaggttttctatctgctactttgctagcaatccgcttattgggaacagttgattaactataatagaaatgcaatacaaatataatgtgaaccacgtgtgatttttctttnnaatcaatgagattttaaaattctcctagatctcttgaattatgcaaatgtgctttgcctttgtattgtaacccttgtgggttgctaataaccaaggagtttgtagtagagttaactcaggctgcttctaggactcattcatgttcactcactgtacaatcatctctagaaatgtgagatttacttccatattgttatgtagggctgacaggacaactggatcagtttcattaaaaaggnnnnnnnnnnnnnnnnnnnnnnnnnnnnnnnnnnnnnnnnnnnnnnnnnnnnnnnnnnnnnnnnnnnnnnnnnnnnnnnnnnnnnnnnnnnnnnnnnnnnnnnnnnnnnnnnnnnnnnnnnnnnnnnnnnnnnnnnnnnnnnnnnnnnnnnnnnnnnnnnnnnnnnnnnnnnnnnnnnnnnnnnnnnnnnnnnnnnnnnnnnnnnnnnnnnnnnnnnnnnnnnnnngggcaaacttgaagataaatcttttgactccactctttagaggatcttaagtgaccttgatgcacagtggaagaaatcacaacatggaattccttgaataaaaatttactgactt

SEQ ID NO: 25119 - DNA, 779 bp, Macaca Mulatta
  misc_feature (1)...(779): n = A,T,C or G
ggaatacaaggacaatgccctgctggctcagctaatccaggacaagcttgatgcctataaagctgatgacccaacaannnnnnagggcccagacaaggcacgctcccagcttctgatcctggatcgaggctttgaccccagctcccctgtgctccacgaattgacttttcaggctatgagttatgatctgctgcctatcgaaaatgatgtatacaagtnnnnnnnnnnnnnnnnnnnnnnnnnnnnnnnnnnnnnnnnnnnnnnnnnnnnnnnnnnnnnnnnnnnnnnnnnnnnnnnnnnnnnnnnnnnnnnnnnnnnnnnnnnnnnnnnnnnnnnnnnnnnnnnnnnnnnnnnnnnnnnnnnnnnnnnnnnnnnnnnnnnnnnnnnnnnnnnnnnnnnnnnnnnnnnnnnnnnnnnnnnnnnnnnnnnnnnnnnnnnnnnnnnnnnnnnnnnnnnnnnnnnnnnnnnnnnnnnnnnnnnnnnnnnnnnnnnnnnnnnnnnnnnnnnnnnnnnnnnnnnnnnnnnnnnnnnnnnnnnnnnnnnnnnnnnnnnnnnnnnnnnnnnnnnnnnnnnnnnnnnnnnnnnnnnnnnnnnnnnnnnnnnnnnnnnnnnnnnnnnnnnnnnnnnnnnnnnnnnnnnnnnnnnnnnnnnnnnnnnnnnnnnnnnnnnggcatcacagaggaaaacctgaacaaactgatccagcacgcccagattcccccagaggacagtgagatcatcaccaacatggctcacctcggtgtgcccatcgtcaccga

SEQ ID NO: 25120 - DNA, 608 bp, Macaca Mulatta
  misc_feature (1)...(608): n = A,T,C or G
gagcgaccgagcggnnnnnnnnnnnnnnnnnnaaccccgaatatgactacctgtttaagctgcttttgattggcgactcaggcgtgggcaagtcatgcctgctcctgcggtttgctgatgacacgtacacagagagctacatcagcaccatcggggtggacttcaagatccgaaccatcgagctggatggcaaaactatcaaacttcagatctgggacacagcgggccaggaacggttccggaccatcacttccagctactaccggggggctcatggcatcatcgtggtgtatgacgtcactgaccaggagtcctatgccaacgtgaagcagtggctgcaggagattgaccgctacgccagtgagaacgttaataagctcctggtgggcaacaagagcgacctcaccaccaagaaggtggtggacaacaccacagccaaggagtttgcggactctctgggcatccccttcttggagacaagtgccaagaacgccaccaatgtcgagcaggcgttcatgaccatggctgccgagatcaaaaagcggatggggcccggagcagcctccgggggcgagcggcccaatctcaagatcgacagcaccccctgt

SEQ ID NO: 25121 - DNA, 2580 bp, Macaca Mulatta
  misc_feature (1)...(2580): n = A,T,C or G
agaaagggagttctgggaattatgtaacaagtgtaatctgatgagaccaaagcgttcccatcactgtagccgctgtggccactgtgtgaggagaatggatcatcactgtccatggnnnnnnnnnnnnnnnnnnnnnnnnnnnnnnnnnnnnnnnnnnnnnnnnnnnnnnnnnnnnnnnnnnnnnnnnnnnnnnnnnnnnnnnnnnnnnnnnnnnnnnnnnnnnnnnnnnnnnnnnnnnnnnnnnnnnnnnnnggacctctttgttgttcgacacgaattggccataatgagactagctgcctttatgggcattactatgttagtccggcaataacgtggactcttttacactcacctaattggcatcatcacagngatacaacatctattgaaaagatgtcaaactgttgtgaagatatnatcgaggccccgaaagccatggcagcagaccttctcagaagtttttggcactcgttggaagatcctgtggttcattcctttcaggcagaggcaaccactgcgagttccctaccactttgccannnnnnnnnnnnnnnnnnnnnnnnnnnnnnnnnnnnnnnnnnnnnnnnnnnnnnnnnnnnnnnnnnnnnnnnnnnnnnnnnnnnnnnnnnnnnnnnnnnnnnnnnnnnnnnnnnnnnnnnnnnnnnnnnnnnnnnnnnnnnnnnnnnnnnnnnnnnnnnnnnnnnnnnnnnnnnnnnnnnnnnnnnnnnnnnnnnnnnnnnnnnnnnnnnnnnnnnnnnnnnnnnnnnnnnnnnnnnnnnnnnnnnnnnnnnnnnnnnnnnnnnnnnnnnnnnnnnnnnnnnnnnnnnnnnnnnnnnnnnnnnnnnnnnnnnnnnnnnnnnnnnnnnnnnnnnnnnnnnnnnnnnnnnnnnnnnnnnnnnnnnnnnnnnnnnnnnnnnnnnnnnnnnnnnnnnnnnnnnnnnnnnnnnnnnnnnnnnnnnnnnnnnnnnnnnnnnnnnnnnnnnnnnnnnnnnnnnnnnnnnnnnnnnnnnnnnnnnnnnnnnnnnnnnnnnnnnnnnnnnnnnnnnnnnnnnnnnnnnnnnnnnnnnnnnnnnnnnnnnnnnnnnnnnnnnnnnnnnnnnnnnnnnnnnnnnnnnnnnnnnnnnnnnnnnnnnnnnnnnnnnnnnnnnnnnnnnnnnnnnnnnnnnnnnnnnnnnnnnnnnnnnnnnnnnnnnnnnnnnnnnnnnnnnnnnnnnnnnnnnnnnnnnnnnnnnnnnnnnnnnnnnnnnnnnnnnnnnnnnnnnnnnnnnnnnnnnnnnnnnnnnnnnnnnnnnnnnnnnnnnnnnnnactcctgaccggtgggcatgtattcctattttaccctaagattttaatgagcaaaaaggggagagaatttgcaataagttcacaattaccttttctagtgcagttatattagaatgcatatgtttttaaaatactggtataactagataatatgtaatgtacagtataaagaggaatattgtgcttttgaaaagattatactttttacttttatttatgtactagtagatgtaaaatttcacattgaaggtttatatatattggccaactcatatagaaattttatttataggaagctactactgaaaaaagtcactaactttgtttacctttaataatccctaaattcaaattaaattttaattggccggctctaatttgcattgagagaccttttactagtagctagtgttaggaagtgaccctaaaataagaaaatacaatgatctgtgtttattattaaccttatacaaatgtaaattactaatagtgatgttctctcgcaaggcatagaacatttgtatgaaaagacatttagtatgctttgaaaactcagcttttaatttttttccattagaatactgcaaaacgcatatatctttttaaaaaatttatgtactcacagtcgatacctttgaggagaaggtggaaaaagtctactgttcatgaaccatgctaatattttcctttttgttaattttgaacgtaaggaacaatccttggggatataattaaacagaaggttaccattgttagccagttggctatactgtggttagttctttcagaaattgtaaatatggtgtagcatattctgatattatagagtaagtacttctcagagatgtcaatatcatgtttttcatgttctaattggaatactttattacttacgaactcnnnnnnnnnnnnnnnnnnnnnnnnnnnnggtctctttcccattgtgatgatttgtgttcttatttttcagtagatttaccacttataggacatattcttttccttgttcctctttaccttttctggtcccgatcactaggtagtcagttcccttaaattattggaggtacacactaatacactagaaaagcatacgcttattttattcgaatggcagaaatgctatctatcagtatatttacataagaatgtatattaaagtatgtctacatatacttacactgtgactttcagtattcccccacgttagcatacctaaccctacctgtgggtattgttaattcttgttagagtacactagagaaaaacca

SEQ ID NO: 25122 - DNA, 958 bp, Macaca Mulatta
  misc_feature (1)...(958): n = A,T,C or G
ggaattcaacttgagcaactcggaagaaatacactctgatttccatacgcttatctcagaaatcctcaagcccaacgatgactacctacttaaaacagccaatgcgatatatggtgagaaaacgtatccatttcacaaaatatttagaagacatgaaaacatattttggtgcagagccccagtctgttaactttgtggaagcttctgcccaaatcagaaaggagatcaactcttgggttgaaagacagaccgagggtaannnnnnnnnnnnnnnnnnnnnnnnnnnnnnnnnnnnnnnnnnnnnnnnnnnnnnnnnnnnnnnnnnnnnnnnnnnnnnnnnnnnnnnnnnnnnnnnnnnnnnnnnnnnnnnnnnnnnnnnnnnnnnnnnnnnnnnnnnnnnnnnnnnnnnnnnnnnnnnnnnnnnnnnnnnnnnnnnnnnnnnnnnnnnnnnnnnnnnnnnnnnnnnnnnnnnnnnnnnnnnnnnnnnnnnnnnnnnnnnnnnnnnnnnnnnnnnnnnnnnnnnnnnnnnnnnnnnnnnnnnnnnnnnnnnnnnnnnnnnnnnnnnnnnnnnnnnnnnnnnnnnnnnnnnnnnnnnnnnnnnnnnnnnnnnnnnnngtatgaagtacagctacaccttcccaagttcaagctggaagacagttatgatctcaagtcaaccctgagcagtatggggatgagtgatgctttcagccagagcaaagctgatttctcaggaatgtcttcagcgagaaacctatttttatccaatgttttccacaaggcttttgtggaaataaatgtttttggtactgaagccgcagctggcactgggagtgagatagattcacgaattagagtcccatccattgaattcaatgcaaatcacccattcctcttcttcatcaggcacaataaaaccaacaacattcttttttatggaagattatgctccccctaa

SEQ ID NO: 25123 - DNA, 1356 bp, Macaca Mulatta
  misc_feature (1)...(1356): n = A,T,C or G
agtattccctgtctgtcctcgtttagctcctcttggccctcttaacccttcttacaagtcttcacccactcgaaacattgagaagaagaaagctacatctacatctatatctggcgcaggagatgttgggaaagaagcccttgcaggaggagaggcctctctggtnnnnnnnnnnnnnnnnnnnnnnnnnnnnnnnnnnnnnnnnnnnnnnnnnnnnnnnnnnnnnnnnnnnnnnnnnnnnnnnnnnnnnnnnnnnnnnnnnnnnnnnnnnnnnnnnnnnnnnnnnnnnnnnnnnnnnnnnnnnnnnnnnnnnnnnnnnnnnnnnnnnnnnnnnnnnnnnnnnnnnnnnnnnnnnnnnnnnnnnnnnnnnnnnnnnnnnnnnnnnnnnnnnnnnnnnnnnnnnnnnnnnnnnnnnnnnnnnnnnnnnnnnnnnnnnnnnnnnnnnnnnnnnnnnnnnnnnnnnnnnnnnnnnnnnnnnnnnnnnnnnnnnnnnnnnnnnnnnnnnnnnnnnnnnnnnnnnnnnnnnnnnnnnnnnnnnnnnnnnnnnnnnnnnnnnnnnnnnnnnnnnnnnnnnnnnnnnnnnnnnnnnnnnnnnnnnnnnnnnnnnnnnnnnnnnnnnnnnnnnnnnnnnnnnnnnnnnnnnnnnnnnnnnnnnnnnnnnnnnnnnnnnnnnnnnnnnnnnnnnnnnnnnnnnnnnnnnnnnnnnnnnnnnnnnnnnnnnnnnnnnnnnnnnnnnnnnnnnnnnnnnnnnnnnnnnnnnnnnnnnnnnnnnnnnnnnnnnnnnnnnnnnnnnnnnnnnnnnnnnnnnnnnnnnnnnnnnnnnnnnnnnnnnnnnnnnnnnnnnnnnnnnnnnnnnnnnnnnnnnnnnnnnnnnnnnnnnnnnnnnnnnnnnnnnnnnnnnnnnnnnnnnnnnnnnnnnnnnnnnnnnnnnnnnnnnnnnnnnnnnnnnnnnnnnnnnnnnnnnnnnnnnnnnnnnnnnnnnnnnnnnnnnnnnnnnnnnnnnnnnnnnnnnnnnnnnnnnnnnnnnnnnnnnnnnnnnnnnnnnnnnnnnnnnnnnnnnnnnnnnnnnnnnnnnnnnnnnnnnnnnnnnnnnnnnnnnnnnnnnnnnnnnnnnnnnnnnnnnnnnnnnnnnnnnnnnnnnnnnnnnnnnnnnnnnnnnnnnnnnnnngaaatcaatggattgaacacctgccaggaagttaatggtctgggtcacgctgccccagaaacttatccccaagacattttctctaatgggcttaagccagctgggggactcattcatctggatggccttgatgggaaatcaaatagtctggatgattcaactgaagaagttcagtctatggatgtgag

SEQ ID NO: 25124 - DNA, 367 bp, Macaca Mulatta
  misc_feature (1)...(367): n = A,T,C or G
ntgcctgtccagtgcccccttatctgggcaggattgctggctgcagcctcacctccagggtccttattaggcccttgtttctntccatggaggacaggcttggcatcctctgggcagctgagccctgagggccctcccttgcgccatccttcacaccagatcagggtcctcccagtatcatctcactggggcctcctgttcccgccctacagcccaagggtgggtggcagggtttcatgggtgcaggctgccctggaggtgactgtgggcctctttttcagtgttcctcctgctcccagcagttcatgcagaagaaggacttgcagagccacatgatcaagctgcatggagccccaaagccccatgc

SEQ ID NO: 25125 - DNA, 864 bp, Macaca Mulatta
  misc_feature (1)...(864): n = A,T,C or G
acgcgagcgcctggctcgcttcttgaaccccgatgaggtgcacgccannnnnnnnnnnnnnnnnnnnnnnnnnnnnnnnnnnnnnnnnnnnnnnnnnnnnnnnnnnnntcgttcggctcctcgcatgactgctcgtctggcacctacttccccgagcagtcggacctggagccgccgctgctggagctcggctggcccgccttctaccagggcgcctaccgcggcgccacgcgcgtcgaggcccacttccagccccgcggcacgggcgagggcggcccctacggctgcaaggacgctctgcgccagcagctccgctcggcgcgagaggtgnnnnnnnnnnnnnnnnnnnnnnnnnnnnnnnnnnnnnnnnnnnnnnnnnnnnnnnnnnnnnnnnnnnnnnnnnnnnnnnnnnnnnnnnnnnnnnnnnnnnnnnnnnnnnnnnnnnnnnnnnnnnnnnnnnnnnnnnnnnnnnnnnnnnnnnnnnnnnnnnnnnnnnnnnnnnnnnnnnnnnnnnnnnnnnnnnnnnnnnnnnnnnnnnnnnnnnnnnnnnnnnnnnnnnnnnnnnnnnnnnnnnnnnnnnnnnnnnnnnnnnnnnnnnnnnnnnnnnnnnnnnnnnnagttttacatggacagatggcaaattaaacagcagtaacttggtaattctgtctggccaagtggttgaacactttgatctggagttccgaatcctgtatgcccagtccaagcccatcagtcccaaactcctgtctcacttccagagcagcaacaagtttgatcacctcaccgaccgaaaaacgcagtctaaggagctcaccctaggcaacctgctgcggatgcggctggctaggctctccagtactc

SEQ ID NO: 25126 - DNA, 340 bp, Macaca Mulatta
aggtgatttgaaggtaggaggggttcaacaatggctgggtcccaggataaacgtgcttggccgactccaagtccataaccttcctctcctttccccactctccccaggtctcggtgactctgaccacacccagctcaggactggattctgcccttcacttagctcctgcctcagccccactccagaatagccaagagaagccaaaccaataaagtttatgctgagataagtcgagtgcattgtgagaatttattcaaatgactactgagcactaacagggcatgtttgtctttgtgtatctctgtgtgtgtgggcaccacccagtggaaaggaaatatgg

SEQ ID NO: 25127 - DNA, 1226 bp, Macaca Mulatta
ggcatcatttccgaccccacctgcgagatcacccagaacgcagtctgcagccctgtggatgtggatgagatgtgtctgctgactgtgagacgagccttcaatgggtctgggacgtactgtgtgaacctcaccctgggggatgatacaagcctggctctcacgagcaccctgatttctgttcctgacagagacccagcctcctctttaaggatggcaaatactgccctgatctccgttggttgcttggccatatttgtcactgtgatctccctcttggtgtacaaaaaacacaagaaatacaaaccaatagaaaacagtcctgcgaatgtggtcggaagcaaaggtctgagtgcctttctcaaccgtgcaaaagccgtgttcttcccgggaaaccaggaaaaggatccgctactcaaaaaccaagaatttaaaggagtttcttaaatttcgaccttgtttctgaagctcacttttcagtgccattgatgtgagatgtgccagagtggctattaaccattttttcctaaagattattgtaaaatagatattgtggtttggggaagttgaatttttttataggttaaatgtcattttagagttggggagagggattatactgcaggcagtttcagccatgttgtgaaactgataaaagcaacttagcaaggcttcctttcattattttttatgtttcacttataaagtcttaggtaactagtaggatagaaacactgtgtcccaaagagtaaggggaggagctactatcgaatagagcctaacccaggttaactgcaagaaagaggagggatacttttcagctttccatgtaactatatgcataaaaaccgatgtagtccaggtttcttaagatcatgtttcaagtttaactgaaatcccattttcaaaacacaccttaggagctccctgaatggaacaacaaaagggcccaaaactcctggtaaatgatgggcacaccttggtttgactcagaaaaaaatactacctctcatagatgggtgggagtattttgggtgacaacttgctttgctcagctgagttaagggatgatattcattttatcatttattccatgggacattttatttagtgctttttatataccaagccatgatgctgaagtgacactcttgtggaaaatttccaaatttttgttacagtccggtacccatatttggaaatcctattttatgacttttcccaaggaa

SEQ ID NO: 25128 - DNA, 637 bp, Macaca Mulatta
agggatcgggtttctaatttctccctcttctctctcagctctgtgacttcctggagactcacttcctagatgaggaagtgaagctcatcaaaaagatgggtgaccacctgaccaacctcaacaggctggccggcccggaggctgggctgggcgagtatctcttcgaaaggctcactctcaagcacgactaagagctttctgagcccagcgacttctgaagggccccttgcaaaataatagggcttctgcctaagcctctccctccagccactaggcagctttcttaacgaccctaacaagccttggaccaaatggaaataaagctttttgatgcagttggtggttttgtgtgtggtatggaagatgaggtgggatctgttctcataaagcttctggctgggttggggatgccagtgaaagaggagttggccccatctcccattttcttatctcttctaagacaagaagctatctgggtagtgttgaacttgagggttctctgcttgcctggctgttaactgtccctcccagatggtagagatagcctccagggagttgaattaagacctaggttggtacctggacacagatctgttcggtttcagccagaaacagcactatttaacgagtgattatg

SEQ ID NO: 25129 - DNA, 164 bp, Macaca Mulatta
agaagcccagggtgatggcaggcaccttgaaactggaggataaacagcggctggcccaggaggaggagagtgaggccaagcgcctggccattatgatgatgaagaagcgggagaagtacctgtaccagaagatcatgtttggcaagaggcgaaaaatccgagag

SEQ ID NO: 25130 - DNA, 135 bp, Macaca Mulatta
atgcaggaaaacctcagatttgcttcatcaggagatgatatcaaaatatgggatgcttcatctatgacgttggtggatacattcaacccacacacatcaccacatggaatgagctcagtatgttggagcagcaat

SEQ ID NO: 25131 - DNA, 78 bp, Macaca Mulatta
agagacgcctccagatgcccttatattggaatctccgttcactaatatccgtgaagaagctaagagccatccattttc

SEQ ID NO: 25132 - DNA, 1401 bp, Macaca Mulatta
  misc_feature (1)...(1401): n = A,T,C or G
gaggatctgaagaggcaaaatgcagtattacaagctgcacaagatgatttgggacaccttcgaacccagctgtgggaagctcaagcagagatggagaatattaaggcgattgccacagtctctgagaacaccaagcaagaagctatagatgaagtgaaaagacagtggagagaagaagttgcttcacttcaggctgttatgaaannnnnnnnnnnnnnnnnnnnnnnnnnnnnnnnnnnnnnnnnnnnnnnnnnnnnnnnnnnnnnnnnnnnnnnnnnnnnnnnnnnnnnnnnnnnnnnnnnnnnnnnnnnnnnnnnnnnnnnnnnnnnnnnnnnnnnnnnnnnnnnnnnnnnnnnnnnnnnnnnnnnnnnnnnnnnnnnnnnnnnnnnnnnnnnnnnnnnnnnnnnnnnnnnnnnnnnnnnnnnnnnnnnnnnnnnnnnnnnnnnnnnnnnnnnnnnnnnnnnnnnnnnnnnnnnnnnnnnnnnnnnnnnnnnnnnnnnnnnnnnnnnnnnnnnnnnnnnnnnnnnnnnnnnnnnnnnnnnnnnnnnnnnnnnnnnnnnnnnnnnnnnnnnnnnnnnnnnnnnnnnnnnnnnnnnnnnnnnnnnnnnnnnnnnnnnnnnnnnnnnnnnnnnnnnnnnnnnnnnnnnnnnnnnnnnnnnnnnnnnnnnnnnnnnnnnnnnnnnnnnnnnnnnnnnnnnnnnnnnnnnnnnnnnnnnnnnnnnnnnnnnnnnnnnnnnnnnnnnnnnnnnnnnnnnnnnnnnnnnnnnnnnnnnnnnnnnnnnnnnnnnnnnnnnnnnnnnnnnnnnnnnnnnnnnnnnnnnnnnnnnnnnnnnnnnnnnnnnnnnnnnnnnnnnnnnnnnnnnnnnnnnnnnnnnnnnnnnnnnnnnnnnnnnnnnnnnnnnnnnnnnnnnnnnnnnnnnnnnnnnnnnnaggagcatttagatagcacccatggttccgtccattccttagatgcagacttattgttgccagctggagatcctttcagtaaatcggacaatgacatgtttaaagatggactcaggagagcacagtctacagacagcttgggaacttcgggctcattgcaatccaaagctttaggctataactacaaagcaaaatctgctggaaacctggacgagtcagattttggaccactggtaggagcagattcagtgtctgagaactttgatactgcatcccttgggtcgctccagatgccaagtgggtttatgttaaccaaagatcaggagagagcaatcaaggcgatgacaccagaacaagaagagacagcgtccctcctctccagcgttacccagggcatggagagtgcgtacgtgtccccgagtggttatcgtttagttagtgagacagaatggaatctcttgcagaaagagg

SEQ ID NO: 25133 - DNA, 751 bp, Macaca Mulatta
gcagggacactaaagggctgtcttcagtgctttaatggttttgttttctaatgcaataaatattctggatttccgaattactgcttcaaccatcagtcataactctagagaaaaacttcatcttcatctcggaattccagcggccatccaggtataatggtgagagagcaagagagaggcatgaacacacagtcacctccactccccattctttcaacccaagggtcaacaggagactctctgctgaggtcaaccctcagttccaagaggctgacttctgggttgccacagaagagagggctttccatcccaccctggcttccttcctccatccagtggagacccccccaaggcatgaggggaaagccattaagtgaggtgcagcccctggcggtctttagctgcacccctcaccgcttccgttcttactgccttttctagaggactgccattggtagagctggggtgctctcagtttccgttggcacttggctttctgttcctagagcccatcccgcaccagcattttggaacctgcagagagcctttctcccagctttgccgcctgtgctgccattagagaaaaaaaaagaagcgtaatcgtgggcacctctataacatagacagatatatatatttggcttcttcgtgtgtgatgtcattcttccctaatcgcttacacctaatataagcttgtcctccctcccacactcatccctgcttctttggggcaggggtgaggcaggttgag

SEQ ID NO: 25134 - DNA, 169 bp, Macaca Mulatta
agggctttgtatcccccatccgaaggctggtgttccccaaggccgggcgccgtgcagcctgtaggagcagcgtgagccgccggcccctgcactcgatgcccctttatccccctgactacctcatcgacccccagattctgctgtgtgactacctggagaaagaggtcaa

SEQ ID NO: 25135 - DNA, 704 bp, Macaca Mulatta
tgagagcccccggctccggcacggcggggagaggccgttctcctgtagcgagtgtggcagaggcttcacccaccagtgcaagctccgtgagcacctgagggtgcacagcggggagaggcctttccagtgcctggagtgcgacaagcgcttccgcctgaagggcatcctgaaggcccaccagcacacgcacagcaaggagaggccgttctcgtgtggggagtgtggtaagggcttcaccagacagtccaagctcacggagcacttgcgcgtgcacagcggggagagacccttccagtgcccagagtgcaacaggagcttccgcctgaaggggcagctgctcagccaccagcgcctgcacaccggagagaggcccttccagtgtccggagtgtgacaagcgctatcgcgtgaaggccgacatgaaggcccaccagctgctgcacagcggggagatgcctttctcctgtgagtgcggcaagggctttgtgaaacactcgaagctcatcgagcacatcaggacgcacacgggagagaagccttttcagtgtcccaagtgtgacaagagtttccgcctgaaggcgcagttgctcagccatcagggcctgcacacaggagagaggcctttccactgccctgactgtggcaagaacttccgggaaaggggacacatgctgaggcaccagcgcatccacaggcccgagaggc

SEQ ID NO: 25136 - DNA, 800 bp, Macaca Mulatta
ctcctagtccaacttggggtgggcaaggcagtcagcatcaccagcaacaccacagaaccctgtccccagcatagacacacaccccctgacccttaccatctgcttcctgacagacttcagcatcagctcccctacacatgcccccacgccttcaccccttgctcaggattcaaacagaggctcccagtgcccctcagcatcttccctgaatcacagccccagctccttgacccccatctaggtgccaaatgtttatctgcagccgctctgcagcctggtgagagggagacagccatcgcgtagaaagtgaccttacgggtttttaatcactgctgagtggggtgggcgtagtgggattgtcctggctttgtcgacaaagtcccacttccctgagtatcgagtgcccttgttatcaagtgaggtaaattcaccccatcacagggtctcgccctaccatcctggaattatttcgcttttaagataaatgcactatttcactgttcgcctctcattctaaggaggtgaggtggatggaataaaaacagttcctgtctaatgctttggttcctcaggcggaatggcttacatttccccttcccaagttgaaatcttgaatttggggccgacccagaaggaccccatccaaacccaggcccttaaaatgcagacgatgaggctctttcctctgcgtcgaggtttgctttggaaactttttgaggttaatgatctcaccttccatttcctggcaagcagcatttgatttgctgccagccgagaagtggcagtgccctcttctccac

SEQ ID NO: 25137 - DNA, 1669 bp, Macaca Mulatta
  misc_feature (1)...(1669): n = A,T,C or G
ggccgcgtcgaagccgaaatgccgacgcccgggtccggccgaggctttctctggctgggtctggtcctgagctccgtctgcgtcgctctcggatgcgagacgcaggccaactcgaccacannnnnnnnnnnnnnnnnnnnnnnnnnnnnnnnnnnnnnnnnnnnnnnnnnnnnnnnnnnnnnnnnnnnnnnnnnnnnnnnnnnnnnnnnnnnnnnnnnnnnnnnnnnnnnnnnnnnnnnnnnnnnnnnnnnnnncagcaagcagtgtgcgccccgagccgcgtttctttcctcactggcaggagacctgacaccacccgcctgtacgacttcaactcctactggagggtgcacgctggaaacttctccaccatcccccagtacttcaaggagaatggctatgtgaccatgtcggtgggaaaagtctttcaccctgnnnnnnnnnnnnnnnnnnnnnnnnnnnnnnnnnnnnnnnnnnnnnnnnnnnnnnnnnnnnnnnnnnnnnnnnnnnnnnnnnnnnnnnnnnnnnnnnnnnnnnnnnnnnnnnnnnnnnnnnnnnnnnnnnnnnnnnnnnnnnnnnnnnnnnnnnnnnnnnnnnnnnnnnnnnnnnnnnnnnnnnnnnnnnnnnnnnnnnnnnnnnnnnnnnnnnnnnnnnnnnnnnnnnnnnnnnnnnnnnnnnnnnnnnnnnnnnnnnnnnnnnnnnnnnnnnnnnnnnnnnnnnnnnnnnnnnnnnnnnnnnnnnnncttggagaaatcaccttggcccccgattccgaggtccctgatggcctaccccctgtggcgtacaacccctggatggacatcaggcaacgggaagatgtccaagccttaaacatcagtgtgccatatggcccaattcctgtggagtttcagnnnnnnnnnnnnnnnnnnnnnnnnnnnnnnnnnnnnnnnnnnnnnnnnnnnnnnnnnnnnnnnnnnnnnnnnnnnnnnnnnnnnnnnnnnnnnnnnnnnnnnnnnnnnnnnnnnnnnnnnnnnnnnnnnnnnnnnnnnnnnnnnnnnnnnnnnnnnnnnnnnnnnnnnnnnnnnnnnnnnnnnnnnnnnnnnnnnnnnnnnnnnnnnnnnnnnnnnnnnnnnnnnnnnnnnnnnnnnnnnnnnnnnnnnnnnnnnnnnnnnnnnnnnnnnnnnnnnnnnnnnnnnnnnnnnnnnnnnnaggcaggcaatccatggaccttgtggaactggtgtctctttttcccacgctggctggacttgcaggactgcaggttccacctcgctgccccgttccttcatttcacgttgagctgtgcagagaaggcaagaaccttctgaagcattttcgattccgtgacttggaagaggatccatacctccctggtaatccccgtgaactgattgcctatagccagtatccccggcctgcagatttccctcagtggaattctgacaagccgagtttaaaagatataaagatcatgggctattccatacgcaccatagactataggtatactgggtgtgggttggcttcaatcctgatgaatttctggctaacttttctgacatccatgcaggggaaactgtatttttgtggattctgacccattgcaggatcataatatgtataatgattccccaggtggagatcttttccagttgttgatgccttg

SEQ ID NO: 25138 - DNA, 152 bp, Macaca Mulatta
cttaaaactagagatcgatacattagtagtctgaaaaagaaatgccagaaggaatctgaacaaaataaagaaaagcagagaagaatcgagaccttggaaaagtatctggctgatcttccaactctagatgatgtacagagtcagagtctaca

SEQ ID NO: 25139 - DNA, 949 bp, Macaca Mulatta
gaaagcctacaacaccgaaaattcccgctccggcagtttgaggtcggcgttagtgggagctggccggcccccccccaccccagacacgtcttctggcctcggggagaagccaagctccggacctccgcccactacgcggtgtcgggatttagttgggctaccactcattacgtctaccggcaatgtcctggccggactaccccagacacgcacactcagctgcggcatcccggagaagggactaggtccagatattctcctccaagactgtggccccgcgggcaggacgcgccccctgcgggcgtattaaataatgagttaagttacctgaaccacacgcatttccggggaccgctccgggcatcctagcttgagggtagggtgggcggaggtccctaagggagaggtaggtctctggctgaatccctcgttggggggcatgtgggtcaaacggcttcccctgctgcaaagtcacggggaggccctcgcggactgggcaggagctaagtccgaagccgcgcccctcctgggaggttggactgtggcgcaggaatgcctcaagtggaggagggttgaggcttcagtcccgcacctttctcgggtcacggcctcctcctggctcccaagaccacacgataggcagaggccggttttcctacaccctactcctgtgcctccaacgccgactagaccctagcactggacgactaagtctctgaggtcacttcaccgaggtctctgcctcactcttggcgctggaccactgaggggagagggctggggtgctccgctgagccactcctgtgcctccctggccttgtgcacctctcacccccgggggtgttagtgtccaggtcaccccagcatcctaacacctcctggtggccttgccgcccccacaacccggaggtataaagccaggacacgaggcagggacgcaccaaggatg

SEQ ID NO: 25140 - DNA, 690 bp, Macaca Mulatta
acctccccctctcccggggtacgagcagccagccagccgcctaactcctcagaggctggcctggaagccctgggagcggagcaactcggtggagaaacctgtgtcctcgattctgtccagaaccccgtctgtggcaaagagccccgaagctaagagcccccttcagtcgcagcctcactctaggatgaagcctgctgggagcgtgaatgacatggccctggatgccttcgacttggaccggatgaagcaggagatcctagaggaggtggtcagagagctccacaaggtgaaggaagagatcattgacgccatcaggcaggagctgagcgggatcagcaccacgtaaggggcctgcctcgcagcgctgagatgtcgagcccatccggcgacagaggacagccaggagcccagccagccccagactccagtgcaccggagcacgcacaggagcctgggcgcgctgccgtgaaacgtcctgacctgtgaccacacgttacagtgaggaaaccaagtgcaactcctgggttttttagattctacctgacacagaacaccaggtctgctcatcttttaagtgtcttatatttgcttatttaaggtacatttctttgggtttctagagagatgcccctaagtcacctgcttcattagacggtttccaggtttactcccaggtgacgctgttaacgc

SEQ ID NO: 25141 - DNA, 186 bp, Macaca Mulatta
aatgataaatgccaatgcttaacaaaacattttaaacatatgtggcctcactgagtagttacgtggtgggtgggtgtatatatatgtatattatttttctgtgatgtatctttgctagttttaatcttagctgacggaagaaatcaattgcatgtgtgctgaagcctttcaaaagtgtgagatctg

SEQ ID NO: 25142 - DNA, 587 bp, Macaca Mulatta
  misc_feature (1)...(587): n = A,T,C or G
gttctagacctggaaggcctcctaagaggactcaaagtgtcacctccccagagaactctcacatcatgccacattctgtccctggtctcatgtctcctgggataattccaccaacaggtnnnnnnnnnnnnnnnnnnnnnnnnnnnnnnnnnnnnnnnnnnnnnnnnnnnnnnnnnnnnnnnnnnnnnnnnnnnnnnnnnnnnnnnnnnnnnnnnnnnnnnnnnnnnnnnnnnnnnnnnnnnnnnnnnnnnnnnnnnnnnnnnnnnnnnnnnnnnnnnnnnnnnnnnnnnnnnnnnnnnnnnnnnnnnnnnnnnnnnnnnnnnnnnnnnnnnnnnnnnnnnnnnnnnnnnnnnnnnnnnnnnnnnnnnnnnnnnnnnnnnnnnnnnnnnnnnnnnnnnnnnnnnnnnnnnnnnnnnnnnnnnnnnnnnnnnnnnnnnnnnnnnnnnnnnnggagcgtgttcccgttagcccctcgcctgccccctctctggaggaggggagacttcctggcagtcacccatcatcacatcgcagcagcagtgtgtccagctcccctgcaaggactgagagctcttctgacagaatcc

SEQ ID NO: 25143 - DNA, 1156 bp, Macaca Mulatta
  misc_feature (1)...(1156): n = A,T,C or G
ggaggctgggatgcagatggaaaaggcccttgtgtctgggaccttttactcatcagggaggagagagagttttcaagaaccagactggcgatgtagcttgtggcagctacactctnnnnnnnnnnnnnnnnnnnnnnnnnnnnnnnnnnnnnnnnnnnnnnnnnnnnnnnnnnnnnnnnnnnnnnnnnnnnnnnnnnnnnnnnnnnnnnnnnnnnnnnnnnnnnnnnnnnnnnnnnnnnnnnnnnnnnnnnnnnnnnnnnnnnnnnnnnnnnnnnnnnnnnnnnnnnnnnnnnnnnnnnnnnnnnnnnnnnnnnnnnnnnnnnnnnnnnnnnnnnnnnnnnnnnnnnnnnnnnnnnnnnnnnnnnnnnnnnnnnnnnnnnnnnnnnnnnnnnnnnnnnnnnnnnnnnnnnnnnnnnnnnnnnnnnnnnnnnnnnnnnnnnnnnnnnnnnnnnnnnnnnnnnnnnnnnnnnnnnnnnnnnnnnnnnnnnnnnnnnnnnnnnnnnnnnnnnnnnnnnnnnnnnnnnnnnnnnnnnnnnnnnnnnnnnnnnnnnnnnnnnnnnnnnnnnnnnnnnnnnnnnnnnnnnnnnnnnnnnnnnnnnnnnnnnnnnnnnnnnnnnnnnnnnnnnnnnnnnnnnnnnnnnnnnnnnnnnnnnnnnnnnnnnnnnnnnnnnnnnnnnnnnnnnnnnnnnnnnnnnnnnnnnnnnnnnnnnnnnnnnnnnnnnnnnnnnnnnnnnnnnnnnnnnnnnnnnnnnnnnnnnnnnnnnnnnnnnnnnnnnnnnnnnnnnnnnnnnnnnnnnnnnnnnnnnnnnnnnnnnnnnnnnnnnnnnnnnnnnnnnnnnnnnnnnnnnnnnnnnnnnngctgtgcaatattatacaactcgcttaatcaaataccaggagaacaagaaaggagatttaggtattctccaggatgcggaaattgaattttttccagatccatcttggaaaaatgtggattggatttatgtggtaccatggggagtacgtaaactactgaagtatattaagnnggacacatataataaccctgtaatttatatcactgagaatgggtttccccagagtgacccagcgcctcttgatgacactcaacgctgggagcatttcagacagacatttcaggaactgttcaaag

SEQ ID NO: 25144 - DNA, 742 bp, Macaca Mulatta
cttggttaccttttgtacttattctttctgtgggtgctttccaagggcatggcaagagagtttgtcaatatcatttctttcactttattttggccgtaaaaattttgtttgaaagtcaaatatttgaagatcaaatatatattgattagatccagttcttctaagaaagctcctttcctttaacataaagacctggaccatgaatcggaaattatattcaatgacattatcatcatttttagaatgagccactaacctgttagagaagagacagatagttatttatcattgtgccttcctctgtctctttctctttcctttgctccctcccgtctttctagtggattaaattgtgtatctgggagttcttgctttctagccaggcctgatgagttaagttatgtgaccaggaaggcatgccactttgtggtcattccatgcaagtcatggcataatagaaaataataaaaactttactcagacttttattttttcatggcttctccccctgaaggtcttctaaggcaataaaatagttgcagagcttggtggttcacagctagcacgatgcctcattgtacaggcaatgggactaacagtttggtgtgggactcctctttgcaggaggggattaataggtactggacattgacctgactagccacagccaaggggctggaacccaagattgagtcccagggcctgggctggcatgagagttcttccctactgctgagaacta

SEQ ID NO: 25145 - DNA, 593 bp, Macaca Mulatta
  misc_feature (1)...(593): n = A,T,C or G
tacctgtttcccaggcaactactcatcaggcatttctggaccccaaaacaacaaactgatttcttagatatctatcatgctttccggaagcaatcccacccagaaattattagttatttagaaaatgtcatccctctcatttctgatgcaggactccggtggcatctgacagatctgtgcaccaagnnnnnnnnnnnnnnnnnnnnnnnnnnnnnnnnnnnnnnnnnnnnnnnnnnnnnnnnnnnnnnnnnnnnnnnnnnnnnnnnnnnnnnnnnnnnnnnnnnnnnnnnnnnnnnnnnnnnnnnnnnnnnnnnnnnnnnnnnnnnnnnnnnnnnnnnnnnnnnnnnnnnnnnnnnnnnnnnnnnnnnnnnnnnnnnnnnnnnnnnnnnnnnnnnnnnnnnnnnnnnnnnnnnnnnnnnnnnnnnnnnnnnnnnnnnnnnnnnnnnnnnnnnnnnnnnnnnnnnnnnnnnnnnnnnnnnnnnnnnnnnnnnnnnnnnnnnnnnnnnnnnnnnnnnnnnnnnnnnnnnnnnnnnnnnagaaactgagctgtctctcttgctgcacaacgtggtcctgctctccaccaactacct

SEQ ID NO: 25146 - DNA, 753 bp, Macaca Mulatta
  misc_feature (1)...(753): n = A,T,C or G
nccttcacactggcccttcccctcggctttgcctggacagctcctgcctcccgcagggcccacctgtgtcccccagcgctgctccgcccagcaggcctgagccactttctgctcccagacacccaccgctgcccactctcctgccactggggttctgaggcacagcttgtcacaccgaggcggtttctcttttgctttctcttttagctgacagtcgcagcaatggcgctgagttcctctgctggagttcgtcttgctagctgggttcctgggctgccagtctgagcctgaggcatggagcctcctggaggttgggggtctcctccccggagacccgcccccaaagccgacttcttgacgctggtnnnnnnnnnnnnnnnnnnnnnnnnnnnnnnnnnnnnnnnnnnnnnnnnnnnnnnnnnnnnnnnnnnnnnnnnnnnnnnnnnnnnnnnnnnnnnnnnnnnnnnnnnnnnnnnnnnnnnnnnnnnnnnnnnnnnnnnnnnnnnnnnnnnnnnnnnnnnnnnnnnnnnnnnnnnnnnnnnnnnnnnnnnnnnnnnnnnnnnnnnnnnnnnnnnnnnnnnnnnnnnnnnnncccagccatgggcctgcgcacaagccggaactgctccacgacagcgaacgccctgtgtggctgcagcccaggccacttctgcatcatccaggacggggaccactgcgccgcgtgccgcgcttacgccacctccagcccgggccagagggtacagaagggag

SEQ ID NO: 25147 - DNA, 660 bp, Macaca Mulatta
gggggtttccgcggtggccatgacggcggccgtgttcttcggctgcgccttcattgccttcgggcctgcgctcgccctctatgtcttcaccatcgccaccgatccattgcgtgtcatcttcctcatcgctggagctttcttctggttggtgtctctactgatttcatcccttgtttggttcatggcaagagtcattactgacaacaaagatggacccacacagaaatatctgctcatctttggagcgtttgtctctgtctatatccaagaaatgttccgatttgcatattatagactcttaaaaaaagccagtgagggtttgaagagtataaacccaggtgagacagcgccctctatgcgactgctggcctatgtttctggcctgggctttggaatcatgagtggagtattttcctttgtgaataccctatctgactccttggggcccagcacagtcggatttcatggaaattctcctcagttcttcctttatttagctttcatgaccctgggtccactcttgccgcccgggttccggggccttttattttttgaacggctgtgaaaaaaaaaagtggtgcctcctccctcaaaattccccgaaccctcgggtgggtccaccccaacttttaaatttcttttatggaaaaactgggttgg

SEQ ID NO: 25148 - DNA, 5766 bp, Macaca Mulatta
  misc_feature (1)...(5766): n = A,T,C or G
cccagcgatatttttggaagtgtcccttctccccagaagccccggcaggaaagtgttgctggcgggagcgtcgtctcagcgctcggtggccagaatggacggagatgtcatcattggagccctcttctcagtccatcaccaacctccggccgagaaagtgcccgagaggaagtgtggggagatcagggagcagtatggtatccagagggtggaggccatgttccacacgttggataagatcaacgcggacccagtcctcctgcccaacatcaccctgggcagtgagatccgggactcctgctggcactcttccgtggctctggaacagagcattgagttcattagggactctctgatttccattcgagatgagaaggatgggttcaaccggtgcctgcctgacggccagtcccttccccccggcaggactaagaagcccattgcgggagtgatcggtcctggctccagctctgtagccattcaagtgcagaacctgctccagctcttcgacatcccgcagatcgcttattcagccacaagcatcgacctgagtgacaaaactttgtacaaatacttcctgagggttgtcccttctgacactttgcaggcaagggccatgcttgacatagtcaaacgttacaattggacctatgtctctgcagtccacaccgaaggnnnnnnnnnnnnnnnnnnnnnnnnnnnnnnnnnnnnnnnnnnnnnnnnnnnnnnnnnnnnnnnnnnnnnnnnnnnnnnnnnnnnnnnnnnnnnnnnnnnnnnnnnnnnnnnnnnnnnnnnnnnnnnnnnnnnnnnnnnnnnnnnnnnnnnnnnnnnnnnnnnnnnnnnnnnnnnnnnnnnnnnnnnnnnnnnnnnnnnnnnnnnnnnnnnnnnnnnnnnnnnnnnnnnnnnnnnnnnnnnnnnnnnnagtgatggatgggcagacagagatgaagtcattgaaggttatgaggtggaagccaacgggggaatcacgataaagctgcagtctccggaggtcaggtcattcgatgattatttcctgaaactgaggctggacactaacacaaggaatccctggttccctgagttctggcaacatcggttccagtgccgccttccaggacaccttctggaaaatcccaactttaaacgaatctgcacaggnnnnnnnnnnnnnnnnnnnnnnnnnnnnnnnnnnnnnnnnnnnnnnnnnnnnnnnnnnnnnnnnnnnnnnnnnnnnnnnnnnnnnnnnnnnnnnnnnnnnnnnnnnnnnnnnnnnnnnnnnnnnnnnnnnnnnnnnnnnnnnnnnnnnnnnnnnnnnnnnnnnnnnnnnnnnnnnnnnnnnnnnnnnnnnnnnnnnnnnnnnnnnnnnnnnnnnnnnnnnnnnnnnnnnnnnnnnnnnnnnnnnaggtatgatatcatgaatctgcagtacactgaagctaatcgctatgactatgttcacgttggaacctggcatgaaggagtgctgaacattgatgattacaaaatccagatgaacaagagtggaatggtgcggtctgtgtgcagtgagccttgcttaaaaggccagattaaggtnnnnnnnnnnnnnnnnnnnnnnnnnnnnnnnnnnnnnnnnnnnnnnnnnnnnnnnnnnnnnnnnnnnnnnnnnnnnnnnnnnnnnnnnnnnnnnnnnnnnnnnnnnnnnnnnnnnnnnnnnnnnnnnnnnnnnnnnnnnnnnnnnnnnnnnnnnnnnnnnnnnnnnnnnnnnnnnnnnnnnnnnnnnnnnnnnnnnnnnnnnnnnnnnnnnnnnnnnnnnnnnnnnnnnnnnnnnnnnnnnnnnnnnnnnnnnnnnnnnnnnnnnnnnnnnnnnnnnnnnnnnnnnnnnnnnnnnnnnnnnnnnnnnnnnnnnnnnnnnnnnnnnnnnnnnnnnactctcattgccaacctactaccacttcctgctacctccagcgcctcttggttggcctctcctctgcgatgtgctactctgctttagtgactaaaaccaatcgcattgcacgcatcctggctggcagcaagaagaagatctgcacccggaagcccaggttcatgagtgcctgggctcaggtgatcattgcctcaattctgattagtgtgcaacttaccctggtggtaaccctgatcatcatggagccccctatgcccattctatcctacccaagtatcaaggaagtctaccttatctgcaataccagcaacctgggtgtggtggcacctttgggctacaatggactcctcatcatgagctgtacctactatgccttcaagacccgcaacgtgcccgccaacttcaatgaggccaaatatatcgccttcaccatgtacaccacctgtatcatctggctagcttttgtgcccatttactttgggagcaactacaagatcatcacaacttgctttgcagtgagtctcagtgtaacagtggctctggggtgcatgttcactcccaagatgtacatcattattgccaagcctgagaggaatgtccgcagtgccttcaccacctctgatgttgtccgcatgcatgttggcgatggcaagctgccctgccgctccaacactttcctcaacatcttccgaagaaagaaggcagggacagggaatgccaannnnnnnnnnnnnnnnnnnnnnnnnnnnnnnnnnnnnnnnnnnnnnnnnnnnnnnnnnnnnnnnnnnnnnnnnnnnnnnnnnnnnnnnnnnnnnnnnnnnnnnnnnnnnnnnnnnnnnnnnnnnnnnnnnnnnnnnnnnnnnnnnnnnnnnnnnnnnnnnnnnnnnnnnnnnnnnnnnnnnnnnnnnnnnnnnnnnnnnnnnnnnnnnnnnnnnnnnnnnnnnnnnnnnnnnnnnnnnnnnnnnnnnnnnnnnnnnnnnnnnnnnnnnnnnnnnnnnnnnnnnnnnnnnnnnnnnnnnnnnnnnnnnnnnnnnnnnnnnnnnnnnnnnnnnnnnnnnnnnnnnnnnnnnnnnnnnnnnnnnnnnnnnnnnnnnnnnnnnnnnnnnnnnnnnnnnnnnnnnnnnnnnnnnnnnnnnnnnnnnnnnnnnnnnnnnnnnnnnnnnnnnnnnnnnnnnnnnnacttcagcactgcgatcccggattttccgcggtgctggcaggccccgggggtcccgggaacgggctgcggtccctgtaccagcccccgccacccccgcagcacctgcagatgctgccactgcagctgagcaccttcgaggaggagctggtctccccgcccgcggacgacgacgacgacagcgagaggtttaagctccttcaggagtacgtgtatgagcacgagcgggaagggaacacggaagaagacgaactggaagaggaggaggaggacctgcaggcggccagcaaactgaccccggaggattcgcctgcgctgacgcctccgtcgccttttcgcgactcggtggcctcgggcagctcggtgcccagctcccccgtgtccgagtcggtgctctgcacccctcccaacgtgtcctacgcctccgtcattctgcgggactacaagcaaagctcttccaccctgtaggggggaagggtccacgtagaaaagcaagacaagccagagagctcctacacctccagagatgtgcgaacagctgcggggagaaacctgggagtgggggacctcgccgggaggagaggagnnnnnnnnnnnnnnnnnnnnnnnnnnnnnnnnnnncttaagtaggaagagagggaaggacaccaagcaaaaaatgctccaggtcaggattcggattcttgaattactcaaagccttttctgggaagaaagggaattctgacaaagcacaattccgtatggtatataacttttatcacaaatcaataaataatgacatcacaaacataatctcctcttttgcacaattgtgcatagatatatatatatgcccacacacactgggccatgcttgctaaggaacagcctacgtggacatgccagtcggatcatgagttcacctgatggcattcgaagtgagttggtggagccggacagagcaggtgcgcggaggggaagggccagccagacccattcccaacgatgatgggatgatgggacagcagctccttgctcagaaacccttctcctcgctgggctaactagactcctcatcttcaggagactcaaggacggaggccgcccaaggggtctcctcttcatccaccccaacccatccagtgccagctttgagannnnnnnnnnnnnnnnnnnnnnnnnnnnnnnnnnnnnnnnnnnnnnnnnnnnnnnnnnnnnnnnnnnnnnnnnnnnnnnnnnnnnnnnnnnnnnnnnnnnnnnnnnnnnnnnnnnnnnnnnnnnnnnnnnnnnnnnnnnnnnnnnnnnnnnnnnnnnnnnnnnnnnnnnnnnnnnnnnnnnnnnnnnnnnnnnnnnnnnnnnnnnnnnnnnnnnnnnnnnnnnnnnnnnnnnnnnnnnnnnnnnnnnnnnnnnnnnnnnnnnnnnnnnnnnnnnnnnnnnnnnnnnnnnnnnnnnnnnnnnnnnnnnnnnnnnnnnnnnnnnnnnnnnnnnnnnnnnnnnnnnnnnnnnnnnnnnnnnnnnnnnnnnnnnnnnnnnnnnnnnnnnnnnnnnnnnnnnnnnnnnnnnnnnnnnnnnnnnnnnnnnnnnnnnnnnnnnnnnnnnnnnnnnnnnnnnnnnnnnnnnnnnnnnnnnnnnnnnnnnnnnnnnnnnnnnnnnnnnnnnaataattctatcctattgtcactgaagtccttgtaactagcgagtgaatatgttcctgtgtccttgtatatgtgcgatcgtaaaatttgtgcaatgtaatgtcaaatnnnnnnnnnaatgtcaacctagtagtcaatctaactgcaattagaaattatcttttgaatatactatatatattttttatgttccaataatgttttatacatcattgtcatcaatatctacagaagctctttgaaggtttgaatactatagctcaatgttttcatatgcggcttggatggacatttttcttctaagatggaacttatttttcagatattttctgatgtggcaacatgttattaatgaagtggtttgaaaatttgttatattaaaagtgcacaaaaactgagagtgaaaataaacggtacattttataagcttgcacacattattaaaacataaggttgaacaaagcatttagattattccaggttatatnnnnnnnnnaaagattttccacagctacttgagcgtctaacatacagtaacatctaactcagctcataatttataaaatctttatcagtcacattttgccttcttttaatttttatgttcatggacttttattcctgtgtctttgctgtcataactttttgtttctgttatttgctgttgtgtaatatccattgacatgtaatccacttattccatctttaccatccctttttatccccaataaaaggatttttcttgctgttctgatttcttctattattggtggaatgaattcaaacccccttaaatatctttgtttatgccttatgttcagtcatattttaatatgcttccttcatattgaagctgctgatttctcagccaaaaatcatcttagaatctttaaatatccagtgcatcatttgttcagaatttaacatccactccaatgttggaggattgtatttcttatacttctactgccaagtttagtcagttccccacaaaaaatgaactgccttttcttttaaaaattattttaaaacaccttt

SEQ ID NO: 25149 - DNA, 78 bp, Macaca Mulatta
cctgtctactcatgcaaagccagactcctcaacacagacccaagaccttggcctccatatcaccctgtccaatgaaac

SEQ ID NO: 25150 - DNA, 5194 bp, Macaca Mulatta
  misc_feature (1)...(5194): n = A,T,C or G
aggcaggactatgaaatgccctcaagcactgcacagaggcccttctttctctaggccagtactccatggcagatttcacagggccttgtccttggaaatagaacgcatcaaaatcgagagtcttctctacagaattgcctcatttttgcaactgnnnnnnnnnnnnnnnnnnnnnnnnnnnnnnnnnnnnnnnnnnnnnnnnnnnnnnnnnnnnnnnnnnnnnnnnnnnnnnnnnnnnnnnnnnnnnnnnnnnnnnnnnnnnnnnnnnnnnnnnnnnnnnnnnnnnnnnnnnnnnnnnnnnnnnnnnnnnnnnnnnnnnnnnnnnnnnnnnnnnnnnnnnnnnnnnnnnnnnnnnnnnnnnnnnnnnnnnnagacagcaactagtaacgccctctctggatatcacgtggaagacttagatgagggnnnnnnnnnnnnnnnnnnnnnnnnnnnnnnnnnnnnnnnnnnnnnnnnnnnnnnnnnnnnnnnnnnnnnnnnnnnnnnnnnnnnnnnnnnnnnnnnnnnnnnnnnnncccagtgtacttcagcaccatccccaggaagaactagcagaatggcagaaaagatatgcttcacggctgataaaaatgaaacagcaaaatgagaataaacagctctcaggcagtaccatgaaaacgttgatagaaaagtgatgaaattcattgtctcgtgagaaagtgngcttagtgaatgtatagaaggagtaaaggtagagcacaatcctgacctgtcagttactgtcagcactaaaaaatcccaccagacatggacctttgctctcacctgtaagnagcctgcaagaatgctgtatcgtgtagcattgctttatgatgctcatcgtcctcattttagtatcattgcaatatctgccggagatagtactacccaggtatcacaagaagtcccagaaaactgtcaagaatggataggaggaaagatggcccaaaatggattagatcattatgtgtataaagtcgggatagcatttaacacagaaatatttggaacttttcgccaaaccatagttttcgactttggattggaaccagtactcatgcaaagagtaatgattgatgcagcttctacagaagnnnnnnnnnnnnnnnnnnnnnnnnnnnnnnnnnnnnnnnnnnnnnnnnnnnnnnnnnnnnnnnnnnnnnnnnnnnnnnnnnnnnnnnnnnnnnnnnnnnnnnnnnnnnnnnnnnnnnnnnnnnnnnnnnnnnnnnnnnnnnnnnnnnnnnnnnnnnnnnnnnnnnnnnnnnnnnnnnnnnnnnnnnnnnnnnnnnnnnnnnnnnnnnnnnnnnnnnnnnnnnnnnnnnnnnnnnnnnnnnnnnnnnnnnnnnnnnnnnnnnnnnnnnngttcaaccttaaagtgcaattgcagattctagcaagcttcatgctcactggcgtttctggaggtgcaaagtatgctcagaatggacaactttttggtcgctttaagcttactgaaacacttctgaagatacttnnnnnnnnnnnnnnnnnnnnnnnnnnnnnnnnnnnnnnnnnnnnnnnnnnnnnnnnnnnnnnnnnnnnnnnnnnnnnnnnnnnnnnnnnnnnnnnnnnnnnnnnnnnnnnnnnnnnnnnnnnnnnnnnnnnnnnnnnnnnnnnnnnnnnnnnnnnnnnnnnnnnnnnnnnnnnnnnnnnnnnnnnnnnnnnnnnnnncaggttgaacttcagtttcagttaaatcgattacccctctgtgaaatgcactatgcactagacaggatcaaggacaatggggttttgtttccagacatcagtatgactcccaccataccgtggagtcctaacagnagacaatgggatgaacagttggatcctcgactaaatgcaaaacagaaagaggctgttctggccattaccactccactgcaatccagctgccgcctgnnnnnnnnnnnnnnnnnnnnnnnnnnnnnnnnnnnnnnnnnnnnnnnnnnnnnnnnnnnnnnnnnnnnnnnnnnnnnnnnnnnnnnnnnnnnnnnnnnnnnnnnnnnnnnnnnnnnnnnnnnnnnnnnnnnnnnnnnnnnnnnnnnnnnnnnnnnnnnnnnnnnnnnnnnnnnnnnnnnnnnnnnnnnnnnnnnnnnnnnnnnnnnnnnnnnnnnnnnnnnnnnnnnnnnnnnnnnnnnnnnnnnnnnnnnnnnnnnnnnnnnnnnnnnnnnnnnnnnnnnnnnnnnnnnnnnnnnnnnnnnnnnnnnnnnnnnnnnnnnnnnnnnnnnnnnnnnnnnnnnnnnnnnnnnnnnnnnnnnnnnnnngggttttttacacacattctattagatgaagctgcccaggccatggagtgtgaaaccattatgcctctagcattagcaactcaaaacactcggattgttttggctggtgatcacatgcagnnnnnnnnnnnnnnnnnnnnnnnnnnnnnnnnnnnnnnnnnnnnnnnnnnnnnnnnnnnnnnnnnnnnnnnnnnnnnnnnnnnnnnnnnnnnnnnnnnnnnnnnnnnnnnnnnnnnnnnnnnnnnnnnnnnnnnnnnnnnnnnnnnnnnnacctctgagcttttctatgagggcaaactgatggccagtgggaagcagccagcacacaaagatttctacccactaactttcttacagcacgaggagaagatgtacaagaaaaaaatagcacagctttttatataatgcagaggtnnnnnnnnnnnnnnnnnnnnnnnnnnnnnnnnnnnnnnnnnnnnnnnnnnnnnnnnnnnnnnnnnnnnnnnnnnnnnnnnnnnnnnnnnnnnnnnnnnnnnnnnnnnnnnnnnnnnnnnnnnnnnnnnnnnnnnnnnnnnnnnnnnnnnnnnnnnnnnnnnnnnnnnnnnnnnnnnnnnnnnnnnnnnnnnnnnnnnnnnnnnnnnnnnnnnnnnnnnnnnnnnnnnnnnnnnnnnnnnnnnnnnnnnnnnnnnnnnnnnnnnnnnnnnnnnnnnnnnnnnnnnnnnnnnnnnnnnnnnnnnnnnnnnnnnnnnnnnnnnnnnnnnnnnnnnnnnnnnnnnnnnnnnnnnnnnnnnnnnnnnnnnnnnnnnnnnnnnnnnnnnnnnnnnnnnnnnnnnnnnnnnnnnnnnnnnnnnnnnnnnnnnnnnnnnnnnnnnnnnnnnnnnnnnnnnnnnnnnnnnnnnnnnnnnnnnnnnnnnnnnnnnnnnnnnnnnnnnnnnnnnnnnnnnnnnnnnnnnnnnnnnnnnnnnnnnnnnnnnnnnnnnnnnnnnnnnnnnnnnnnnnnnnnnnnnnnnnnnnnnnnnnnnnnnnnnnnnnnnnnnnnnnnnnnnnnnnnnnnnnnnnnnnnnnnnnnnnnnnnnnnnnnnnnnnnnnnnnnnnnnnnnnngttcagcccaatccttccgtactcattggcaatcctattagagcatatactcctccaccccctcttggacttcaccccaaatttggaaaaatctccaagccctgtcaaaagaatagatcctcacactgggacaagtattctttatgtacctgctgtctatggagggaatgtagttatgtcggtgcctttacctgtannnnnnnnnnnnnnnnnnnnnnnnnnnnnnnnnnnnnnnnnnnnnnnnnnnnnnnnnnnnnnnnnnnnnnnnnnnnnnnnnnnnnnnnnnnnnnnnnnnnnnnnnnnnnnnnnnnnnnnnnnnnnnnnnnnnnnnnnnnnnnnnnnnnnnnnnnnnnnnnnnnnnnnnnnnnnnnnnnnnnnnnnnnnnnnnnnnnnnnnnnnnnnnnnnnnnnnnnnnnnnnnnnnnnnnnnnnnnnnnnnnnnnnnnnnnnnnnnnnnnnnnnnnnnnnnnnnnnnnnnnnnnnnnnnnnnnnnnnnnnnnnnnnnnnnnnnnnnnnnnnnnnnnnnnnnnnnnnnnnnnnnnnnnnnnnnnnnnnnnnnnnnnnnnnnnnnnnnnnnnnnnnnnnnnnnnnnnnnnnnnnnnnnnnnnnnnnnnnnnnnnnnnnnnnnnnnnnnnnnnnnnnnnnnnnnnnnnnnnnnnnnnnnnnnnnnnnnnnnnnnnnnnnnnnnnnnnnnnnnnnnnnnnnnnnnnnnnnnnnnnnnnnnnnnnnnnnnnnnnnnnnnnnnnnnnnnnnnnnnnnnnnnnnnnnnnnnnnnnnnnnnnnnnnnnnnnnnnnnnnnnnnnnnnnnnnnnnnnnnnnnnnnnnnnnnnnnnnnnnnnnnnnnnnnnnnnnnnnnnnnnnnnnnnnnnnnnnnnnnnnnnnnnnnnnnnnnnnnnnnnnnnnnnnnnnnnnnnnnnnnnnnnnnnnnnnnnnnnnnnnnnnnnnnnnnnnnnnnnnnnnnnnnnnnnnnnnnnnnnnnnnnnnnnnnnnnnnnnnnnnnnnnnnnnnnnnnnnnnnnnnnnnnnnnnnnnnnnnnnnnnnnnnnnnnnnnnnnnnnnnnnnnnnnnnnnnnnnnnnnnnnnnnnnnnnnnnnnnnnnnnnnnnnnnnnnnnnnnnnnnnnnnnnnnnnnnnnnnnnnnnnnnnnnnnnnnnnnnnnnnnnnnnnnnnnnnnnnnnnnnnnnnnnnnnnnnnnnnnnnnnnnnnnnnnnnnnnnnnnnnnnnnnnnnnnnnnnnnnnnnnnnnnnnnnnnnnnnnnnnnnnnnnnnnnnnnnnnnnnnnnnnnnnnaggtttcaagacttaatcagagaactgtctcatcgtgatcaaagtgaaacacgggaactagctgaaatgccaccacctcaatcaagacttttgcaatatagacaagtacagactagaagcccaccagcagtcccatctcccccatccagtacagaccacagtagccacttttctaactttaatgataacagcagagacattgaagtagccagcaacccagcatttccgcagcgcctcccaccccagatattcagctcacctttctcattgccatctgaacaccttgccccctccctccttgaaatacctgggcaccctgatggagcatggacttttgctaacttgcaacagaatcacctaatggggccaggttttccctatggcctacctccattgcctcacaggccaccgcagaacccttttgtacaaatacagaatcatcaacatgctattggtcaagagccatttcacccattgtcatctcgaacagtatcttcttcttcgctccctagcttagaagag

SEQ ID NO: 25151 - DNA, 869 bp, Macaca Mulatta
  misc_feature (1)...(869): n = A,T,C or G
agaagaagcggaaaggcgcgtttttctcgtggtcacggaccaggagcaccgggaggtcccagaagaagagggagcacggggaccatgcagacgnnnnnnnnnnnnnnnnnnnnnnnnnnnnnnnnnnnnnnnnnnnnnnnnnnnnnnnnnnnnnnnnnnnnnnnnnnnnnnnnnnnnnnnnnnnnnnnnnnnnnnnnnnnnnnnnnnnnnnnnnnnnnnnnnnnnnnnnnnnnnnnnnnnnnnnnnnnnnnnnnnnnnnnnnnnnnnnnnnnnnnnnnnnnnnnnnnnnnnnnnnnnnnnnnnnnnnnnnnnnnnnnnnnnnnnnnnnnnnnnnnnnnnnnnnnnnnnnnnnnnnnnnnnnnnnnnnnnnnnnnnnnnnnnnnnnnnnnnnnnnnnnnnnnnnnnnnnnnnnnnnnnnnnnnnnnnnnnnnnnnnnnnnnnnnnnnnnnnnnnnnnnnnnnnnnnnnnnnnnnnnnnnnnnnnnnnnnnnnnnnnnnnnnnnnnnnnnnnnnnnnnnnnnnnnnnnnnnnnnnnnnnnnnnnnnnnnnnnnnnnnnnnnnnnnnnnnnnnnnnnnnnnnnnnnnnnnnnnnnnnnnnnnnnnnnnnnnnnnnnnnnnnnnnnnnnnnnnnnnnnnnnnnnnnnnnnnnnnnnnnnnnnnnnnnnnnnnnnnnnnnnnnnnnnnnnnnnnnnnnnnnnnnnnnnnnnnnnnnnnnnnnnnnnnnnnnnnnnnnnnnnnnnnnnagttttttgagcttatttccaaagctcagagcaacagagcagatgaccaacgtgggctgctaaggaaggaagacctggtgttgccagagttcctccgtttacctcctggttccacagaactcaccct

SEQ ID NO: 25152 - DNA, 422 bp, Macaca Mulatta
ccatttcctccctcagaccccaacaaagcttcagcttccacctccaggacccctgctcggctccatcatcagctgctgcccccatctgaggccctgctggccccagccacctacaggcctgtcacctatcagagcctgtactctggagcctcaaaccacctagggatcccaaggacccgaccggcaccataccccctccccaacatccgggctgatagtgatcaaggaggcctgcctctcccagctgggctggggctcctgtcccccactgtggtgtgcctggggcctggccaggactcccagtgatggcagaagccctgtggggaagtcctgctaccctggaccttacacccagcgtgggaatcagcctctgccccaccccgtccagccccacctctgtctcaaggacagcagagtaggtg

SEQ ID NO: 25153 - DNA, 721 bp, Macaca Mulatta
gggtctcaataaggagccctttaggaagaactataatttaatcacgtttgattccttggagccaatgcaactattacaagttctcagtgatgttctggctgagattgacccaaagcaacttgtggatttaagagaggagatgccagagcagacagccaaacgaatgttgagccttcttggtattcttaaatacaaaccttcaggaaatgccacagacatgagtacttttcgtcagggtttggtgattggaagtaaacctgtaatttacccagtgctccactggcttcttcagaggactaatgaactgaagaaaagagcatatttagctcgttttttaataaaacttgaggtaccaagtgagtttcttcaggatgaaactgtggctgacaccaataaacagtatgaagagttaatggaagcctttaaaactttgcataaagaatatgagcagctcaaagcatctggattttctacagcagaaataagaaaggatatcagtgcaatggaagaagaaaaggatcagctcattaagagagttgaacatctgaagaaaagggtggagacagctcagaattatcaatggatgcttaaaatagcaaggcaacttcgagttgaaaaagagagagaagaatatcttgcgcaacagaaacaggaacaaaagaaatcagctatttttatgcagtgccaaaagattgcaaaagagttacaaaaccaggcttgc

SEQ ID NO: 25154 - DNA, 1662 bp, Macaca Mulatta
  misc_feature (1)...(1662): n = A,T,C or G
atggcagagcaggtggccctgagccggacccaggtgtgcgggatcctgcgggaagagctgttccagggcgatgccttccatcagtcggatacacacatattcatcatcatgggtgcatcgnnnnnnnnnnnnnnnnnnnnnnnnnnnnnnnnnnnnnnnnnnnnnnnnnnnnnnnnnnnnnnnnnnnnnnnnnnnnnnnnnnnnnnnnnnnnnnnnnnnnnnnnnnnnnnnnnnnnnnnnnnnnnnnnnnnnnnnnnnnnnnnnnaggccaccccagaggagaagctcaagctggaggacttctttgcccgcaactcctatgtggctggccagtacgatgaggcagcctcctaccagcgcctcaacagccacatgaatgccctccacctggggtcacaggccaaccgcctcttctacctggcgttgccccccaccgtctacgaggctgtcaccaagaacattcacgagtcctgcatgagtcaganaggctggaaccgcatcattgtggagaagcccttcgggagggacctgcagagctccgacaggctgtccaaccacatctcctccctgttccgcgaggaccagatctaccgcatcgaccactacctgggcaaggagatggtgcaaaacctcatggtgctgannnnnnnnnnnnnnnnnnnnnnnnnnnnnnnnnnnnnnnnnnnnnnnnnnnnnnnnnnnnnnnnnnnnnnnnnnnnnnnnnnnnnnnnnnnnnnnnnnnnnnnnnnnnnnnnnnnnnnnnnnnnnnnnnnnnnnnnnnnnnnnnnnnnnnnnnnnnnnnnnnnnnnnnnnnnnnnnnnnnnnnnnnnnnnnnnnnnnnnnnnnnnnnnnnnnnnnnnnaggtcaaggtgttgaaatgtatctcagaggtgcaggccaacaatgtggtcctgggccagtacgtggggaaccccgatggagagggcgaggccaccaaagggtacctggacgaccccacaaaaccccacgggtccactaccgccacttttgcagccgtcgtcctctatgtggagaatgaaaggtgggatgnnnnnnnnnnnnnnnnnnnnnnnnnnnnnnnnnnnnnnnnnnnnnnnnnnnnnnnnnnnnnnnnnnnnnnnnnnnnnnnnnnnnnnnnnnnnnnnnnnnnnnnnnnnnnnnnnnnnnnnnnnnnnnnnnnnnnnnnnnnnnnnnnnnnnnnnnnnnnnnnnnnnnnnnnnnnnnnnnnnnnnnnnnnnnnnnnnnnnnnnnnnnnnnnnnnnnnnnnnnnnnnnnnnnnnnnnnnnnnnnnnnnnnnnnnnnnnnnnnnnnnnnnnnnnnnnnnnnnnnnnnnnnnnnnnnnnnnnnnnnnnnnnnnnnagcgacgagctccgggaggcctggcgtattttcactccactgctacaccagattgagctggagaagcccaagcccatcccctacctttatggcagnagccgaggccccatggaggcagatgagctgatgaagagagtgggtttccagtatgagggcacctacaagtgggtgaacccccacaagctctgaggcctgggcacccacctccaccctcgccatggccaccctccttcccgccgcccaaccctgagtcgggaggactctgtgaccattggcctcagctgcacattcctggccctgggc

SEQ ID NO: 25155 - DNA, 2664 bp, Macaca Mulatta
  misc_feature (1)...(2664): n = A,T,C or G
ctcggacccttcttggcctctgctcagctactctggtcttgactcaatgactttgctttgcgttcttcctagagtcttagtttctttctttctcccctgggctcctgtctcacactatctccctgccctctgctctcacaggctggggatgtttataaagtgaggaccctggccccctgctgagtagagctggaaaagctgtaactctgtttcctgaggtgagggcatgaaaacaagaggtctagctttaacannnnnnnnnnnnnnnnnnnnnnnnnnnnnnnnnnnnnnnnnnnnnnnnnnnnnnnnnnnnnnnnnnnnnnnnnnnnnnnnnnnnnnnnnnnnnnnnnnnnnnnnnnnnnnnnnnnnnnnnnnnnnnnnnnnnnnnnnnnnnnnnnnnnnnnnnnnnnnnnnnnnnnnnnnnnnnnnnnnnnnnnnnnnnnnnnnnnnnnnnnnnnnnnnnnnnnnnnnnnnnnnnnnnnnnnnnnnnnnnnnnnnnnnnnnnnnnnnnnnnnnnnnnnnnnnnnnnnnnnnnnnnnnnnnnnnnnnnnnnnnnnnnnnnnnnnnnnnnnnnnnnnnnnnnnnnnnnnnnnnnnnnnnnnnnnnnnnnnnnnnnnnnnnnnnnnnnnnnnnnnnnnnnnnnnnnnnnnnnnnnnnnnnnnnnnnnnnnnnnnnnnnnnnnnnnnnnnnnnnnnnnnnnnnnnnnnnnnnnnnnnnnnnnnnnnnnnnnnnnnnnnnnnnnnnnnnnnnnnnnnnnnnnnnnnnnnnnnnnnnnnnnnnnnnnnnnnnnnnnnnnnnnnnnnnnnnnnnnnnnnnnnnnnnnnnnnnnnnnnnnnnnnnnnnnnnnnnnnnnnnnnnnnnnnnnnnnnnnnnnnnnnnnnnnnnnnnnnnnnnnnnnnnnnnnnnnnnnnnnnnnnnnnnnnnnnnnnnnnnnnnnnnnnnnnnnnnnnnnnnnnnnnnnnnnnnnnnnnnnnnnnnnnnnnnnnnnnnnnnnnnnnnnnnnnnnnnnnnnnnnnnnnnnnnnnnnnnnnnnnnnnnnnnnnnnnnnnnnnnnnnnnnnnnnnnnnnnnnnnnnnnnnnnnnnnnnnnnnnnnnnnnnnnnnnnnnnnnnnnnnnnnnnnnnnnnnnnnnnnnnnnnnnnnnnnnnnnnnnnnnnnnnnnnnnnnnnnnnnnnnnnnnnnnnnnnnnnnnnnnnnnnnnnnnnnnnnnnnnnnnnnnnnnnnnnnnnnnnnnnnnnnnnnnnnnnnnnnnnnnnnnnnnnnnnnnnnnnnnnnnnnnnnnnnnnnnnnnnnnnnnnnnnnnnnnnnnnnnnnnnnnnnnnnnnnnnnnnnnnnnnnnnnnnnnnnnnnnnnnnnnnnnnnnnnnnnnnnnnnnnnnnnnnnnnnnnnnnnnnnnnnnnnnnnnnnnnnnnnnnnnnnnnnnnnnnnnnnnnnnnnnnnnnnnnnnnnnnnnnnnnnnnnnnnnnnnnnnnnnnnnnnnnnnnnnnnnnnnnnnnnnnnnnnnnnnnnnnnnnnnnnnnnnnnnnnnnnnnnnnnnnnnnnnnnnnnnnnnnnnnnnnnnnnnnnnnnnnnnnnnnnnnnnnnnnnnnnnnnnnnnnnnnnnnnnnnnnnnnnnnnnnnnnnnnnnnnnnnnnnnnnnnnnnnnnnnnnnnnnnnnnnnnnnnnnnnnnnnnnnnnnnnnnnnnnnnnnnnnnnnnnnnnnnnnnnnnnnnnnnnnnnnnnnnnnnnnnnnnnnnnnnnnnnnnnnnnnnnnnnnnnnnnnnnnnnnnnnnnnnnnnnnnnnnnnnnnnnnnnnnnnnnnnnnnnnnnnnnnnnnnnnnnnnnnnnnnnnnnnnnnnnnnnnnnnnnnnnnnnnnnnnnnnnnnnnnnnnnnnnnnnnnnnnnnnnnnnnnnnnnnnnnnnnnnnnnnnnnnnnnnnnnnnnnnnnnnnnnnnnnnnnnnnnnnnnnnnnnnnnnnnnnnnnnnnnnnnnnnnnnnnnnnnnnnnnnnnnnnnnnnnnnnnnnnnnnnnnnnnnnnnnnnnnnnnnnnnnnnnnnnnnnnnnnnnnnnnnnnnnnnnnnnnnnnnnnnnnnnnnnnnnnnnnnnnnnnnnnnnnnnnnnnnnnnnnnnnnnnnnnnnnnnnnnnnnnnnnnnnnnnnnnnnnnnnnnnnnnnnnnnnnnnnnnnnnnnnnnnnnnnnnnnnnnnnnnnnnnnnnnnnnnnnnnnnnnnnnnnnnnnnnnnnnnnnnnnnnnnnnnnnnnnnnnnnnnnnnnnnnnnnnnnnnnnnnnnnnnnnnnnnnnnnnnnnnnnnnnnnnnnnnnnnnnnnnnnnnnnnnnnnnnnnnnnnnnnnnnnnnnnnnnnnnnnnnnnnnnnnnnnnnnnnnnnnnnnnnnnnnnnnnnnnnnnnnnnnnnnnnnnnnnnnnnnnnnnnnnnnnnnnnggagcaggtggattcgaaggcctgtctagcacgaggacccaaaggtcttgtcagtggccagtacctctgccgcctttcccagagagggggtccagtggacaccttggaaggaggctggactgtgggccatcttctgcaagctagacccagcccaatagggggcggacgtgagtgcttagaaggggcgcatgaaggtgggggtgatgctgaaggggaagggagccctagtggggattggtgcgtgtg

SEQ ID NO: 25156 - DNA, 444 bp, Macaca Mulatta
tgtcttagagtattccaagttcctatcccttgttttagaacctgggcccacatttgcatgtgataactgagcttagagcaatagttggatatgatatctaagtataaatgcaataaaagtaattggcacgttcttttggttcacattaggtttgaatgaccaagtgcgtgctggccactgggagtggatcggtggtgaacctgttgccttcaccaatggaagaagagggccctctcaacgctccaagcttggaaagagctgtgttttggttcaaagacaaggcaaatggcaagtaaaggactgtaggagagccaaaccttataattatgtgtgttccagaaaactctaaatataacagaccctacaggtggccacctggaatttgtcacctatttatttacaggatctgtgaatattgctccatagaaaactaattgctatgac

SEQ ID NO: 25157 - DNA, 105 bp, Macaca Mulatta
cagcggtctgtatggacccaggcttgtcaaactgtaccacacacatcgtgacagtcaccattaacggagatgatgccgaaaacgccaggccgaagccaaagccag

SEQ ID NO: 25158 - DNA, 694 bp, Macaca Mulatta
  misc_feature (1)...(694): n = A,T,C or G
nnnnnnnnnnnnnnnnnnnnnnnnnnnnnnnnnnnnnnnnnnnnnnnnnnnnnnnnnnnnnnnnnnnnnnnnnnnnnnnnnnnnnnnnnnnnnnnnnnnatccccaaataactcactgaagggtctcaaaggcgaacaagttttaccaaaatgaatcctttttcagttaacagatcaaatggatgagttctgaccctctcaagttcctttccccagttagagtggggaactgggcaagtgttaactgtgggactcactgcagcgtcctaccctaaaggcacgagaagacagaaatgcaacctgcggagctgggcttggatcccaagtcacagtttggcccctgctacaggaggctgccctgctcagagagagatttaatagggagctgaaggaatccttagggggccagggagatgtgactgagactggttttccacgtgaatgagacggggttggtggagggtttggtgctacagccagtcggaagatttgcaaatgcgaacacattcctgtgtggggcacgctaccctttgtcagttattgtgaatatgtgtattttaagcaataagattcagctggtcagacttttctgggcagtctcggtgacgcatttcctgtgctgtgattgttctgaagacagagtggctctaaccactgtgagagcccgaataaattgtccccaaaaaaaaaaaaa

SEQ ID NO: 25159 - DNA, 179 bp, Macaca Mulatta
gcagactttggtttcgcacagcacatgtccccgtgggatgagaagcacgtgctccgtggctccccactctacatggcccccgagatggtgtgccagcggcagtatgacgcccgcgtagaaatctggtccgtcggggtcatcctgtatggtgagacctcttttccctgcttctcacgctg

SEQ ID NO: 25160 - DNA, 593 bp, Macaca Mulatta
  misc_feature (1)...(593): n = A,T,C or G
ggggctctttttcttcagcgaggcgactgagctggttggtggcggcggtcgagcggcagacgcaaacatgcagnnnnnnnnnnnnnnnnnnnnnnnnnnnnnnnnnnnnnnnnnnnnnnnnnnnnnnnnnnnnnnnnnnnnnnnnnnnnnnnnnnnnnnnnnnnnnnnnnnnnnnnnnnnnnnnnnnnnnnnnnnnnnnnnnnnnnnnnnnnnnnnnnnnnnnnnnnnnnnnnnnnnnnnnnnnnnnnnnnnnnnnnnnnnnnnnnnnnnnnnnnnnnnnnnnnnnnnnnnnnncattattgagccttccctccgccagcttgcccataaatataactgctacaagatgatatgccgcaagtgctatgctcgtcttctcctcttgctgtcaactgcctctcaataaattcgttcctccattacccttgccccctatgcgtgtacccaaccttcttctatgttttcggtaacgttcgctttgcctggcgtctctcttcccactaacctcctctctattttcttctcacattactccattcttactattatctcctcttcccttcattctcttctctgtattctctcttcctctt

SEQ ID NO: 25161 - DNA, 1170 bp, Macaca Mulatta
  misc_feature (1)...(1170): n = A,T,C or G
tcacgctttgggtgtcttgacttttaagtttttccgctagtttcaggaacgcgaccggcagcctcgggcaggggagacgggactgtaggtcagagaagagacggcgattggccgccgggaatcctctgaagcaggagactgccctatccagnnnnnnnnnnnnnnnnnnnnnnnnnnnnnnnnnnnnnnnnnnnnnnnnnnnnnnnnnnnnnnnnnnnnnnnnnnnnnnnnnnnnnnnnnnnnnnnnnnnnnnnnnnnnnnnnnnnnnnnnnnntccctcagcaacctggcggagcagctgcaggccgcacagaacctgcggttcgaggatgtgccggcgcttcgggccttcccagacttaaaagagcggctgaggcgcaagcagctggctgctggtgacatcgtcctggacaagctaggggaaaggcnnnnnnnnnnnnnnnnnnnnnnnnnnnnnnnnnnnnnnnnnnnnnnnnnnnnnnnnnnnnnnnnnnnnnnnnnnnnnnnnnnnnnnnnnnnnnnnnnnnnnnnnnnnnnnnnnnnnnnnnnnnnnnnnnnnnnnnnnnnnnnnnnnnnnnnnnnnnnnnnnnnnnnnnnnnnnnnnnnnnnnnnnnnnnnnnnnnnnnnnnnnnnnnnnnnnnnnnnnnnnnnnnnnnnnnnnnnnnnnnnnnnnnnnnnnnnnnnnnnnnnnnnnnnnnnnnnnnnnnnnnnnnnnnnnnnnnnnnnnnnatcctattcaatgttttcttcttcctggaagagtaaggaagctgtgtttatctggagaccacggcaccacagttgaagactgacattgctgcaccctgatatttctaaagaaacttcagtatttcaatctgatatatttgaaatatcaatgtctcgaacctgagaactgggtcttggggagaattagtgcttagatgtctgatgttggagctgctgcacaccaggccatggctgagagtatgtgagccacgccttgcccttttctgaggccagggacgtggatggagatagacagcaggcaaggtggtgctgaagaacacggtgccttgcctccattgtagacttgaataggtgggaggcaaggacaggagacaaagagccccactgcccttggcatcatccaaagcattgtctgttgaaagcaggtcccagttttgtgtc

SEQ ID NO: 25162 - DNA, 187 bp, Macaca Mulatta
  misc_feature (1)...(187): n = A,T,C or G
natatgtgcagcgggggctacagcgagtggggctggacccccagctgccactgaatctggctgcccttcaggcccaccaggcccaggagaaccgtgtggtagccttcttcagcctggctctactgcttgccccactggtggagacgcttattctactggaccggctgctgtaccttcaggagcaggg

SEQ ID NO: 25163 - DNA, 274 bp, Macaca Mulatta
acttgcattaccaggacccagagacagattttgtgtctattctcccaggcttttaaactagaacctatctagcaaatggctccactgattctgggtcagtgtacctctcccgcaagtctacctttcgtatggcaccagcacagactggcatcttccctggcctagcccgagtctcatccttctttcccctaccctgtcatcatctgctctcctagcagagtgactttttctaatgctaaaccggatcatgtggctctcttcttaaaaccccttc

SEQ ID NO: 25164 - DNA, 2578 bp, Macaca Mulatta
  misc_feature (1)...(2578): n = A,T,C or G
gacagttattttaaagcagctgtcactgacttggacaaactccttgatgattttgaacagaacccagnnnnnnnnnnnnnnnnnnnnnnnnnnnnnnnnnnnnnnnnnnnnnnnnnnnnnnnnnnnnnnnnnnnnnnnnnnnnnnnnnnnnnnnnnnnnnnnnnnnnnnnnnnnnnnnnnnnnnnnnnnnnnnnnnnnnnnnnnnnnnnnnnnnnnnnnnnnnnnnnnnnnnnnnnnnnnnnnnnnnnnnnnnnnnnnnnnnnnnnnnnnnnnnnnnnnnnnnnnnnnnnnnnnnnnnnnnnnnnnnnnnnnnnnnnnnnnnnnnnnnnnnnnnnnnnnnnnnnnnnnnnnnnnnnnnnnnnnnnnnnnnnnnnnnnnnnnnnnnnnnnnnnnnnnnnnnnnnnnnnnnnnnnnnnnnnnnnnnnnnnnnnnnnnnnnnnnnnnnnnnnnnnnnnnnnnnnnnnnnnnnnnnnnnnnnnnnnnnnnnnnnnnnnnnnnnnnnnnnnnnnnnnnnnnnnnnnnnnnnnnnnnnnnnnnnnnnnnnnnnnnnnnnnnnnnnnnnnnnnnnnnnnnnnnnnnnnnnnnnnnnnnnnnnnnnnnnnnnnnnnnnnnnnnnnnnnnnnnnnnnnnnnnnnnnnnnnnnnnnnnnnnnnnnnnnnnnnnnnnnnnnnnnnnnnnnnnnnnnnnnnnnnnnnnnnnnnnnnnnnnnnnnnnnnnnnnnnnnnnnnnnnnnnnnnnnnnnnnnnnnnnnnnnnnnnnnnnnnnnnnnnnnnnnnnnnnnnnnnnnnnnnnnnnnnnnnnnnnnnnnnnnnnnnnnnnnnnnnnnnnnnnnnnnnnnnnnnnnnnnnnnnnnnnnnnnnnnnnnnnnnnnnnnnnnnnnnnnnnnnnnnnnnnnnnnnnnnnnnnnnnnnnnnnnnnnnnnnnnnnnnnnnnnnnnnnnnnnnnnnnnnnnnnnnnnnnnnnnnnnnnnnnnnnnnnnnnnnnnnnnnnnnnnnnnnnnnnnnnnnnnnnnnnnnnnnnnnnnnnnnnnnnnnnnnnnnnnnnnnnnnnnnnnnnnnnnnnnnnnnnnnnnnnnnnnnnnnnnnnnnnnnnnnnnnnnnnnnnnnnnnnnnnnnnnnnnnnnnnnnnnnnnnnnnnnnnnnnnnnnnnnnnnnnnnnnnnnnnnnnnnnnnnnnnnnnnnnnnnnnnnnnnnnnnnnnnnnnnnnnnnnnnnnnnnnnnnnnnnnnnnnnnnnnnnnnnnnnnnnnnnnnnnnnnnnnnnnnnnnnnnnnnnnnnnnnnnnnnnnnnnnnnnnnnnnnnnnnnnnnnnnnnnnnnnnnnnnnnnnnnnnnnnnnnnnnnnnnnnnnnnnnnnnnnnnnnnnnnnnnnnnnnnnnnnnnnnnnnnnnnnnnnnnnnnnnnnnnnnnnnnnnnnnnnnnnnnnnnnnnnnnnnnnnnnnnnnnnnnnnnnnnnnnnnnnnnnnnnnnnnnnnnnnnnnnnnnnnnnnnnnnnnnnnnnnnnnnnnnnnnnnnnnnnnnnnnnnnnnnnnnnnnnnnnnnnnnnnnnnnnnnnnnnnnnnnnnnnnnnnnnnnnnnnnnnnnnnnnnnnnnnnnnnnnnnnnnnnnnnnnnnnnnnnnnnnnnnnnnnnnnnnnnnnnnnnnnnnnnnnnnnnnnnnnnnnnnnnnnnnnnnnnnnnnnnnnnnnnnnnnnnnnnnnnnnnnnnnnnnnnnnnnnnnnnnnnnnnnnnnnnnnnnnnnnnnnnnnnnnnnnnnnnnnnnnnnnnnnnnnnnnnnnnnnnnnnnnnnnnnnnnnnnnnnnnnnnnnnnnnnnnnnnnnnnnnnnnnnnnnnnnnnnnnnnnnnnnnnnnnnnnnnnnnnnnnnnnnnnnnnnnnnnnnnnnnnnnnnnnnnnnnnnnnnnnnnnnnnnnnnnnnnnnnnnnnnnnnnnnnnnnnnnnnnnnnnnnnnnnnnnnnnnnnnnnnnnnnnnnnnnnnnnnnnnnnnnnnnnnnnnnnnnnnnnnnnnnnnnnnnnnnnnnnnnnnnnnnnnnnnnnnnnnnnnnnnnnnnnnnnnnnnnnnnnnnnnnnnnnnnnnnnnnnnnnnnnnnnnnnnnnnnnnnnnnnnnnnnnnnnnnnnnnnnnnnnnnnnnnnnnnnnnnnnnnnnnnnnnnnnnnnnnnnnnnnnnnnnnnnnnnnnnnnnnnnnnnnnnnnnnnnnnnnnnnnnnnnnnnnnnnnnnnnnnnnnnnnnnnnnnnnnnnnnnnnnnnnnnnnnnnnnnnnnnnnnnnnnnnnnnnnnnnnnnnnnnnnnnnnnnnnnnnnnnnnnnnnnnnnnnnnnnnnnnnnnnnnnnnnnnnnnnnnnnnnnnnnnnnnnnnnnnnnnnnnnnnnnnnnnnnnnnnnnnnnnnnnnnnnnnnnnnnnnnnnnnnnnnnnnnnnnnngctcaggcatttgaaaggatgatgagtccaactggttctaatcttaaatctaatcattccgacgaatgtactattgtccagcctcctcaggagaaccagacgtccagtataccttcaccaacaactttgccagtctcagcacttaaacaaccaaatgttgaagg

SEQ ID NO: 25165 - DNA, 131 bp, Macaca Mulatta
gtacaatggtgctttacccaatggagatagaggacggaggaaaagcagatttgccctctacaagcggcccaaggcaaatggtgtcaaacccagcacagtccatgtgatatccacgccccaggcatctaagg

SEQ ID NO: 25166 - DNA, 220 bp, Macaca Mulatta
ttgctattgataccttttcttgccaagatttatttaaagttggccaagataccaagaaggtggcttgcaggggtatctttagcgtctcataagtgtaaacagtcattgctttcaagatcatccgaaacaagaattaatagagagaaaaaaatatataaagcatgtgttgaaaatcctcacgctcatgataacttaagggataacaatagtaggtaacact

SEQ ID NO: 25167 - DNA, 502 bp, Macaca Mulatta
ggagccgtttccctggggagatggtaaccatactctattccataaccctcatgtgaatccacttccaactggctacgaagatgaataaagagaatctggaccactacctgggcaccagggaccacagcactggtttggaccattactctgcatatggaccagaaaaagtatacgggaccttaagctcatcttcttgtatcaaatgatgactggtatactggtcttccatccctttgcttgtggcaggagatggcttaaataaataacttaaacttcaaaaaggaccatattacaagttataaaaaaatgtgataaatgacttatttgtatttgtcaaaaatttggtagaggccacatagcccatttagaactttttttgacctctttagccctcaagaggtttcttaaacaatttgatgaggcgcgcagcgcccatcgagggaaatacccggggtaaaaagctgtttcataggaaacccctgcaaaaaactccggctggcta

SEQ ID NO: 25168 - DNA, 521 bp, Macaca Mulatta
tgtttctgtctgtgtttcttggtcacctttgtaatcccaccatgcggggagatcatgatttccatagaccacttggcctcactcagcagctcgcatttccaaggccatgcccccagttccctatccatgtcctgagccaccttagggcagtccatgtttgggcagccataactgctgactgaagagctggagagaatgatgccactgctgctgtttttaaacaaggggaaaaatatggggcagcagagaatgttcatatcctctaggcccattcagagtcagaaaagactcaggtcttttcccaatctcaaagttatctttaataaaattctaataaaggaaatggcgcacacctgaactaacaaagtcaaagatgctaacaaaggacaccaacagacatttcgcaattgtgtcccataggtaaactctcagagttttcttaagaataagcaactaaaatgttttcttccatatccctagaaagcctactgaagtacagaattcctagactgacctttttg

SEQ ID NO: 25169 - DNA, 721 bp, Macaca Mulatta
ttatatccaggggacacacaatgctattgaaattactgaaaacaaaatatcttatatcttatttacttgtagaaatctgtaattctattgtgcctatgataaattcacataggcagtatctttaataggttaatatcgatgaagatttttaattacaataatgagttcactacggatgattaacacaccacactggcgaaccatctcaatgtaagggtggtttggcaacacctccttgctttactgtttggtgtaggtaaatccagtttacttcctaaatttcagtaggctttatgctgtgtttatgcccccaatttattttaacaaaagaagattaaaaagtaaaagaaccacgagtaagatattatttaaatgttgaaatcttaaaaacctgcccccaaggtttcagaagccaagttcttttaacagtatttttacaaatactgcctagtatattcaacagaaggactgtggtcatgtcacaggtaaccacaattttcaggtttcttaaaagcagctgtaactgactcagtattttatcttgagatttccctgaataatatatttatcttaagagcattcacgtttcaaattagtattggaacacctggaattgcaacaacttttgtcttttacatatacttacatcttttaaaaaatgtcttcaaaacctacctttctcaaattcttttggctctatttatttttgcatttcaccaaa

SEQ ID NO: 25170 - DNA, 141 bp, Macaca Mulatta
agcagtgagacattggacgtgtttgctcatgaagatgcggtatatggcttgtctgtgagcccagtgaatgacaacatttttgccagttcctcagatgatggccgggttctcatttgggacatccgggaatctccccatgga

SEQ ID NO: 25171 - DNA, 99 bp, Macaca Mulatta
ggtccccttctttaggaaacgcaagcaccatacctgtccttgctcacccaacctgctgtgctccaggttcccagacggcaggtaccgctgctccatgga

SEQ ID NO: 25172 - DNA, 139 bp, Macaca Mulatta
aggtggtccgggggctgagtgcaggcgcccgggtctttgagtacatggccctgagcccctgcatcccactgtctgggggctgctgcatccccaaagagcacctgcgtggctccgtcacgtttcagaacgtctgcttcag

SEQ ID NO: 25173 - DNA, 515 bp, Macaca Mulatta
  misc_feature (1)...(515): n = A,T,C or G
ggttcacccacccgtccttgatgctaggttctagtgtacctggtcacccagcagccatcccccacccggccattgtgcccccctcagggaagcaggagcttcagtccttcgaccgcaacctnnnnnnnnnnnnnnnnnnnnnnnnnnnnnnnnnnnnnnnnnnnnnnnnnnnnnnnnnnnnnnnnnnnnnnnnnnnnnnnnnnnnnnnnnnnnnnnnnnnnnnnnnnnnnnnnnnnnnnnnnnnnnnnnnnnnnnnnnnnnnnnnnnnnnnnnnnnnnnnnnnnnnnnnnnnnnnnnnnnnnnnnnnnnnnnnnnnnnnnnnnnnnnnnnnnnnnnnnnnnnnnnnnnnnnnnnnnnnnnnnnnnnnnnnnnnnnnnnnnnnnnnnnnnnnnnnnnnnnnnnnnnnnnnnnnnnnnnnnnnnnnnnnnnnnnnnnnncagagacaaactggcccagagaactcaaggatggtaatggacaagaagagtcactgtccatgtcttcttctctagccc

SEQ ID NO: 25174 - DNA, 143 bp, Macaca Mulatta
atggagccagctcacctccctcgcatgaagcagaaaggactcaagattgccaagggcatcttctgagggcatctccccagggtctggctggctggtagccgagcacttatggaccagagtggcccaggccagctgggcacctt

SEQ ID NO: 25175 - DNA, 517 bp, Macaca Mulatta
atgctggacgtactcagattgcaccaggctctcaaactgtcctagggattgggccaggaccagcagacctaattgacaaagtcactggccacctaaaactttactaggtggactttgatatgacagtaacccttccatcacaggtgtttgaagcctgtcagattctaacaaaagctgaatttcttcacccaatttaaatgttcttaagatgaaaataaaacctattcccatgttctatggttggcagttgtcatcttgggcttaaaaagagtagttggttaaatggtcttggtggttcaagtgagaggctgaaacaaatatttaagatgagagaaacaggtcaatacaattggattaaaagggaggaaacagcattcccctatacatggttaggtccctttgtgtgttggtagcccttccctgagactatgtccccctggaggtcgaggttcaagggtattcccactagaggcaagctgcagtttgttcccctgctgtcactttttgggtgactgat

SEQ ID NO: 25176 - DNA, 800 bp, Macaca Mulatta
ctttgagttctgtgagttgcatgccaacaatgcctccaattccagctcggagtcagtcccaggaaaatatgcgaagttctccaaacccgtttattaccggcttgaccaggacaaatcctttcagtgacaggactgctgctcctggaaacccatttaaagccgagtctcaagaatcagaggcaacttcatggttctccaaagaagagcccgttactatcaatcctttcccttctctgcagcctctcagtcataacgaaggcaaggcttcatcttcacttgatggctttaaggaaagttttgatctacaggggcagtctacattaaaaattagcaacccaaaaggatgggtaacctttgaggaagaagaggactttggtgtgaaagggaagtcaaagtcagcttgttcagatttactgggtaatctgccaagttcattttccagctccaacctgacattgaatgatgactggaataaaggtacaaatgtctctttctgtgtgttgccatcaagaagacctcctccacctcctgtccctctgctcctgcctggcaccagccctccagtagatcctttcacgaccttggcctctaaggcttcgcccacactggactttacagaaagataacgccacgcaacagaagacagtgggtatttgcttttggcaggtagagccaagagaattgggcattcgtatttcattatgtgcaataagtcattgtaagtgcactgatatcttcacaaaacaccactatttgatgtatgcagagttggaatatgtgtatattggaaataaggaaaa

SEQ ID NO: 25177 - DNA, 1269 bp, Macaca Mulatta
  misc_feature (1)...(1269): n = A,T,C or G
cagatttccacccagaagacagagaaggagccagtggtcatggaatgggctggggtcaaagactgggtgcttgggaactgaggcagccgccgtttcagcctggccaggcannnnnnnnnnnnnnnnnnnnnnnnnnnnnnnnnnnnnnnnnnnnnnnnnnnnnnnnnnnnnnnnnnnnnnnnnnnnnnnnnnnnnnnnnnnnnnnnnnnnnnnnnnnnnnnnnnnnnnnnnnnnnnnnnnnnnnnnnnnnnnnnnnnnnnnnnnnnnnnnnnnnnnnnnnnnnnnnnnnnnnnnnnnnnnnnnnnnnnnnnnnnnnnnnnnnnnnnnnnnnnnnnnnnnnnnnnnnnnnnnnnnnnnnnnnnnnnnnnnnnnnnnnnnnnnnnnnnnnnnnnnnnnnnnnnnnnnnnnnnnnnnnnnnnnnnnnnnnnnnnnnnnnnnnnnnnnnnnnnnnnnnnnnnnnnnnnnnnnnnnnnnnnnnnnnnnnnnnnnnnnnnnnnnnnnnnnnnnnnnnnnnnnnnnnnnnnnnnnnnnnnnnnnnnnnnnnnnnnnnnnnnnnnnnnnnnnnnnnnnnnnnnnnnnnnnnnnnnnnnnnnnnnnnnnnnnnnnnnnnnnnnnnnnnnnnnnnnnnnnnnnnnnnnnnnnnnnnnnnnnnnnnnnnnnnnnnnnnnnnnnnnnnnnnnnnnnnnnnnnnnnnnnnnnnnnnnnnnnnnnnnnnnnnnnnnnnnnnnnnnnnnnnnnnnnnnnnnnnnnnnnnnnnnnnnnnnnnnnnnnnnnnnnnnnnnnnnnnnnnnnnnnnnnnnnnnnnnnnnnnnnnnnnnnnnnnnnnnnnnnnnnnnnnnnnnnnnnnnnnnnnnnnnnnnnnnnnnnnnnnnnnnnnnnnnnnnnnnnnnnnnnnnnnnnnnnnnnnnnnnnnnnnnnnnnnnnnnnnnnnnnnnnnnnnnnnnnnnnnnnnnnnnnnnnnnnnnnnnnnnnnnnnnnnnnnnnnnnnnnnnnnnnnnnnnnnnnnnnnnnnnnnnnnnnnnnnnnnnnnnnnnnnnnnnnnnnnnnnnnnnnnnnnnnnnnnnnnnnnnnnnnnnnnnnnnnnnnnnnnnnnnnnnnnnnnnnnnnnnnnnnnnnnnnnnnnnnnnnnnnnnnnnnnnnnnnnnnnnnnnnnnnnnnnnnnnnnnnnnnnnnnnnnnnnnnnccaggtacatccagacactgaaggaccacaggccccggatggtgtgggacaaccaggcctcggagcacttcttcgagtacaagaag

SEQ ID NO: 25178 - DNA, 867 bp, Macaca Mulatta
attttctccctccggggggggggagagttatattttggcccaaagggcgaaacaagtggagggtgtaaaggtcctcgcgggaggaggttcgcgggttttcaataaacgggcacggtattgggaaaaggagctttcccaaattttggaccaaaaaaatcgttttatcgaagaattgcaacacgcgggttaatttcccattgaaggtgggccaggagccggggaagcataaaatttaaaaattggggggcctcgcgtgggaattccccgttggattaaattccccgtcaaagggcccttcaggaaactcccatcggggattttgtttcaagaacccctcggttttgcccgcccggggggttttttgatggggtggggagtccaaagccctattgcaggcccaaggatttccttaggaaaacagggtaagggccatggttcatttaccatacgggggccccgggcgcccaaacggaatgggtttgaaaagctttttggagggcccgaggcgggcccaacaagatttatgaataggagtgtgtggaaagcgattttcggattcttcacgtttttatttctctcagaagtttaaaatgtgagcattcgatagttcagccagactcttcacttccaggtaacttcttcattgggtcgcaattcccttttaaataacgcactcttgttccggaaggcagttagccgttcatcattctttctgtctaaataacatccaatgacaaatcccatagggacaagaacatgaacccagtggtcccgcacaatctgaagtaagttcaccatgatagctgcagcctcagtgccaacagggaccccgagaccaagggcaactcagccacccgcgccagtccc

SEQ ID NO: 25179 - DNA, 638 bp, Macaca Mulatta
  misc_feature (1)...(638): n = A,T,C or G
gaaggaaaactgaaacatggaagaagcagcttcgcaaagaagtgaagttgcagagacaacaagtgtctaaatggtctgaagaaataaagaactatattgaagaacgttctggagaggatcctctagtaaagggaattccagaagacaagaatccctttaaagaaaaaggcagctgcgttgtttcataaataacttgggagaaactgcatcctaagtggaagaactagtttgttttagttttcccagaaaaaaccaacatgctttttaaggaaggaagaatgaaattaaaaggagactttcttaagcaccatatagataggggttatgtagaaaagcatatgtgctactcatctttgctcactatgcagtcttttttaagagggcagagagtatcaaaggtgcaattatggaaatatgagcattacttgagcatgacacttctttcagtatattgcttgatgcttcaaataaagtgttatcnnnnnnnnnnnnnnnnnnnnnnnnnnnnnnnnnnnnnnnnnnnnnnnnnnnnnnnnnnnnnnnnnnnnnngnnnnnnnnnnnnnnnnnnnnnnnnnnnnnnnnnnnnnnnnnnnnnnnnnnngcgttatccaacttaatcgccttgaagcacatcccc

SEQ ID NO: 25180 - DNA, 2415 bp, Macaca Mulatta
  misc_feature (1)...(2415): n = A,T,C or G
gaagctgccaggccaggaggagtttgaagcctccagtgctnnnnnnnnnnnnnnnnnnnnnnnnnnnnnnnnnnnnnnnnnnnnnnnnnnnnnnnnnnnnnnnnnnnnnnnnnnnnnnnnnnnnnnnnnnnnnnnnnnnnnnnnnnnnnnnnnnnnnnnnnnnnnnnnnnnnnnnnnnnnnnnnnnnnnnnnnnnnnnnnnnnnnnnnnnnnnnnnnnnnnnnnnnnnnnnnnnnnnnnnnnnnnnnnnnnnnnnnnnnnnnnnnnnnnnnnnnnnnnnnnnnnnnnnnnnnnnnnnnnnnnnnnnnnnnnnnnnnnnnnnnnnnnnnnnnnnnnnnnnnnnnnnnnnnnnnnnnnnnnnnnnnnnnnnnnnnnnnnnnnnnnnnnnnnnnnnnnnnnnnnnnnnnnnnnnnnnnnnnnnnnnnnnnnnnnnnnnnnnnnnnnnnnnnnnnnnnnnnnnnnnnnnnnnnnnnnnnnnnnnnnnnnnnnnnnnnnnnnnnnnnnnnnnnnnnnnnnnnnnnnnnnnnnnnnnnnnnnnnnnnnnnnnnnnnnnnnnnnnnnnnnnnnnnnnnnnnnnnnnnnnnnnnnnnnnnnnnnnnnnnnnnnnnnnnnnnnnnnnnnncagtatcagaaccccctgagacagaagctgcctccaggagccgaggcagggactgtgctggcaggggagctgggctnnnnnnnnnnnnnnnnnnnnnnnnnnnnnnnnnnnnnnnnnnnnnnnnnnnnnnnnnnnnnnnnnnnnnnnnnnnnnnnnnnnnnnnnnnnnnnnnnnnnnnnnnnnnnnnnnnnnnnnnnnnnnnnnnnnnnnnnnnnnnnnnnnnnnnnnnnnnnnnnnnnnnnnnnnnnnnnnnnnnnnnnnnnnnnnnnnnnnnnnnnnnnnnnnnnnnnnnnnnnnnnnnnnnnnnnnnnnnnnnnnnnnnnnnnnnnnnnnnnnnnnnnnnnnnnnnnnnnnnnnnnnnnnnnnnnnnnnnnnnnnnnnnnnnnnnnnnnnnnnnnnnnnnnnnnnnnnnnnnnnnnnnnnnnnnnnnnnnnnnnnnnnnnnnnnnnnnnnnnnnnnnnnnnnnnnnnnnnnnnnnnnnnnnnnnnnnnnnnnnnnnnnnnnnnnnnnnnnnnnnnnnnnnnnnnnnnnnnnnnnnnnnnnnnnnnnnnnnnnnnnnnnnnnnnnnnnnnnnnnnnnnnnnnnnnnnnnnnnnnnnnnnnnnnnnnnnnnnnnnnnnnnnnnnnnnnnnnnnnnnnnnnnnnnnnnnnnnnnnnnnnnnnnnnnnnnnnnnnnnnnnnnnnnnnnnnnnnnnnnnnnnnnnnnnnnnnnnnnnnnnnnnnnnnnnnnnnnnnnnnnnnnnnnnnnnnnnnnnnnnnnnnnnnnnnnnnnnnnnnnnnnnnnnnnnnnnnnnnnnnnnnnnnnnnnnnnnnnnnnnnnnnnnnnnnnnnnnnnnnnnnnnnnnnnnnnnnnnnnnnnnnnnnnnnnnnnnnnnnnnnnnnnnnnnnnnnnnnnnnnnnnnnnnnnnnnnnnnnnnnnnnnnnnnnnnnnnnnnnnnnnnnnnnnnnnnnnnnnnnnnnnnnnnnnnnnnnnnnnnnnnnnnnnnnnnnnnnnnnnnnnnnnnnnnnnnnnnnnnnnnnnnnnnnnnnnnnnnnnnnnnnnnnnnnnnnnnnnnnnnnnnnnnnnnnnnnnnnnnnnnnnnnnnnnnnnnnnnnnnnnnnnnnnnnnnnnnnnnnnnnnnnnnnnnnnnnnnnnnnnnnnnnnnnnnnnnnnnnnnnnnnnnnnnnnnnnnnnnnnnnnnnnnnnnnnnnnnnnnnnnnnnnnnnnnnnnnnnnnnnnnnnnnnnnnnnnnnnnnnnnnnnnnnnnnnnnnnnnnnnnnnnnnnnnnnnnnnnnnnnnnnnnnnnnnnnnnnnnnnnnnnnnnnnnnnnnnnnnnnnnnnnnnnnnnnnnnnnnnnnnnggtgcgcaaagggctcagcgacttctcctcagtcctggccatcctgctgggctgtggccttgaggctttcctgggcctagccacaccaaagctcatggtgcccagagagttcaannnnnnnnnnnnnnnnnnnnnnnnnnnnnnnnnnnnnnnnnnnnnnnnnnnnnnnnnnnnnnnnnnnnnnnnnnnnnnnnnnnnnnnnnnnnnnnnnnnnnnnnnnnnnnnnnnnnnnnnnnnnnnnnnnnnnnnnnnnnnnnnnnnnnnnnnnnnnnnnnnnnnnnnnnnnnnnnnnnnnnnnnnnnnnntgtgtggctgtgctgatgctactctcatcagtgcttggactgccttggtatgtctcagccactgtcatctccctggctcacatggacagtcttcggagagagagcagagcctgtgcccctggggagctccccaacttcctgggtatcagg

SEQ ID NO: 25181 - DNA, 722 bp, Macaca Mulatta
tctacacagggaatttttacccgtaggtaaaagtggggagagctcaaacgtagttaataaggaaggtaatttgtttttcttttacctaaaagaaagataaaattccttctgtgactacaggtctctgagaaattatctttcaaaagagatttcattgctcataagagtgttgtggcctattgataaaaacaattttgttcactttcttgtcttgaaaaaaagtggccttagctttttgcaatacttgaataaagtgtgtactcgcaaaagaatttctgtagcacagcattagagactcataacttttctgcaagaaatacaaacttacatcttccttttactaccttaagaatactagtgagctaacacctcaatctcagacgagcaactcatagaacctacaatgacgtttaatgcaaattgtaggaatttacatgtttacaaatcatcttcaactggttgtgcagcaattcagtaaaatatctttgtattataaaaatgtgaagaaaaaatgtaaactgatgtaaaggaggtactgtcatttcaattaatctatgtttaatagcttttccttctgaactttgcaaagccttcttggtaaacacattgcaaagcattctgtgggaggttcagcctccttgtgtgtactgtactgtgcagacatgaaaaaattaacccgtttactgtgtgcgtgtaaatagcctggtcatcaggccattttc

SEQ ID NO: 25182 - DNA, 1549 bp, Macaca Mulatta
  misc_feature (1)...(1549): n = A,T,C or G
ctgttgtagcaaacagtgacgaatctcaacttctgacaccaggaaagatgagtcagcgccaaggaaaagaagcttatccaacgccaaccaaagatttgtatcagccatctcttagtccagcaagtcctcatagccagggnnnnnnnnnnnnnnnnnnnnnnnnnnnnnnnnnnnnnnnnnnnnnnnnnnnnnnnnnnnnnnnnnnnnnnnnnnnnnnnnnnnnnnnnnnnnnnnnnnnnnnnnnnnnnnnnnnnnnnnnnnnnnnnnnnnnnnnnnnnnnnnnnnnnnnnnnnnnnnnnnnnnnnnnnnnnnnnnnnnnnnnnnnnnnnnnnnnnnnnnnnnnnnnnnnnnnnnnnnnnnnnnnnnnnnnnnnnnnnnnnnnnnnnnnnnnnnnnnnnnnnnnnnnnnnnnnnnnnnnnnnnnnnnnnnnnnnnnnnnnnnnnnnnnnnnnnnnnnnnnnnnnnnnnnnnnnnnnnnnnnnnnnnnnnnnnnnnnnnnnnnnnnnnnnnnnnnnnnnnnnnnnnnnnnnnnnnnnnnnnnnnnnnnnnnnnnnnnnnnnnnnnnnnnnnnnnnnnnnnnnnnnnnnnnnnnnnnnnnnnnnnnnnnnnnnnnnnnnnnnnnnnnnnnnnnnnnnnnnnnnnnnnnnnnnnnnnnnnnnnnnnnnnnnnnnnnnnnnnnnnnnnnnnnnnnnnnnnnnnnnnnnnnnnnnnnnnnnnnnnnnnnnnnnnnnnnnnnnnnnnnnnnnnnnnnnnnnnnnnnnnnnnnnnnnnnnnnnnnnnnnnnnnnnnnnnnnnnnnnnnnnnnnnnnnnnnnnnnnnnnnnnnnnnnnnnnnnnnnnnnnnnnnnnnnnnnnnnnnnnnnnnnnnnnnnnnnnnnnnnnnnnnnnnnnnnnnnnnnnnnnnnnnnnnnnnnnnnnnnnnnnnnnnnnnnnnnnnnnnnnnnnnnnnnnnnnnnnnnnnnnnnnnnnnnnnnnnnnnnnnnnnnnnnnnnnnnnnnnnnnnnnnnnnnnnnnnnnnnnnnnnnnnnnnnnnnnnnnnnnnnnnnnnnnnnnnnnnnnnnnnnnnnnnnnnnnnnnnnnnnnnnnnnnnnnnnnnnnnnnnnnnnnnnnnnnnnnnnnnnnnnnnnnnnnnnnnnnnnnnnnnnnnnnnnnnnnnnnnnnnnnnnnnnnnnnnnnnnnnnnnnnnnnnnnnnnnnnnnnnnnnnnnnnnnnnnnnnnnnnnnnnnnnnnnnnnnnnnnnnnnnnnnnnnnnnnnnnnnnnnnnnnnnnnnnnnnnnngctcttgaagaaaatccttatttccgtttgaagaaagtagtgaaatggtatttgtcaggattctataaaaagccaaagnnnnnnnnnnnnnnnnnnnnnnnnnnnnnnnnnnnnnnnnnnnnnnnnnnnnnnnnnnnnnnnnnnnnnnnnnnnnnnnnnnnnnnnnnnnnnnnnggtgtcccatcatccaccaatatctgccttttatgttagtaatcgaaaagatggattttgtcttagtggtagtatcctggctaagtccaagttttatgg

SEQ ID NO: 25183 - DNA, 642 bp, Macaca Mulatta
accgccggggtcacgggtcccgcgtctgtccgaagtcgccgcactcgggctgctcaggtctctgcggagggcgcgcacatggcgactcaggcgaactccctcagctacgcggggtgcaacttcttgcgccaacgtctggtcctgtctaccctgagcgggcgccccgtcaaaatccgaaagattcgggccagagacgacaacccgggcctccgagatttcgaagccagcttcataagactgttggataaaataacaaatggttctcgaattgaaataaaccaaacaggaacaaccttatattatcagcctggcctcctgtatggtggatctgtggaacatgactgtagcgtccttcgtggcattggctattacctggagagtcttctttgcttggctccatttatgaagcacccgttaaaaatagttctacgaggagtgaccaatgatcaggttgacccttcagttgatgttcttaaggcgacagcactccctttgtggaaacaatttgggattgatggtgaatcatttgaactgaagattgtgcgacggggaatgcctcctggaggaggaggccaaatgaatactcatgtcctgtaacgaaggtcttgaagcccattcaaatcacagatcaggaaaaatcac

SEQ ID NO: 25184 - DNA, 338 bp, Macaca Mulatta
tctgcctagatagagaaaactaggagaaaatgctggaaagcttggatcacgtcctcttactaacttgccctcaccccttacctccctaccagtggtcaggagataattaagcgttaatcagaaccaaccatcctctctgctgcctcgtctacctaggtacctgctttctaccctttcctttgaaagaccctatttactctctaggtcattccctttgaaagaccctttttattctctaacactgccttaatttctcccctatttctacggaagaagctttagtttccctttgctaacaggacctaccacaccaatcccaacaagctacaacccctatc

SEQ ID NO: 25185 - DNA, 130 bp, Macaca Mulatta
cacccctcagatggcgaggcatgcctgcactgctcacctgaagcttggcttctgtctgtacatgttggacttgtgactccaagttttccgggttaagaaggctcacaggattcacatggggagagaggac

SEQ ID NO: 25186 - DNA, 721 bp, Macaca Mulatta
atcggcacgaggcgcgggggcactaaggcacaagggccacagcagcagccgggtcagagggtcccagctatgccaaaaagttgcgctctggcttgctgggctgcttggagctggtgggaccgtgagcgtcgtctatatctttggaaacaactcagtggacgaaaatggtgccaagattcctgatgagtttgacaatgatccaattctggtacagcagttgcgccggacatacaaatatttcaaagattatagacagatgatcatcgagcccaccagcccttgccttctcccagaccctctgcaggagccgtactaccagccaccctacacgctcgttttggagctcactggcgtcctcttgcatcctgagtggtcgctggccactggctggaggtttaagaagcgcccaggcatcgagaccttgttccagcagctcgcccctttatatgaaattgtcatctttacgtcagagactggcatgactgcatttccactcattgatagcgtggacccccacggcttcatctcctaccgcctattccgggacgccacaagatacatggatggacaccatgttaaggacatttcatgtctgaatcgggatccagctcgagtagtagttgtggactgcaagaaggaagccttccgcctacagccctataacggcgtcgccctgcggccctgggacggaactctgatgaccgggtcttattggacctgt

SEQ ID NO: 25187 - DNA, 239 bp, Macaca Mulatta
  misc_feature (1)...(239): n = A,T,C or G
cattactcatggagccttgcatggactagcctacctacattctcatgcattgattcatagnnnnnnnnnnnnnnnnnnnnnnnnnnnnnnnnnnnnnnnnnnnnnnnnnnnnnnnnnnnnnnnnnnnnnnnnnnnnnnnnnnnnnnnnnnnnnnnnnnnnnnnnnnnnnnnngatggctccagaggtgatcttagctatggatgaaggacagattgatgggaaagttgatatttggtca

SEQ ID NO: 25188 - DNA, 3092 bp, Macaca Mulatta
  misc_feature (1)...(3092): n = A,T,C or G
agatggagttttgctctagttgcccaggctggagtacaaagacgcgatctcggctcaccgcaagctccgcctcccaggttcaagcgattctcctgcctcannnnnnnnnnnnnnnnnnnnnnnnnnnnnnnnnnnnnnnnnnnnnnnnnnnnnnnnnnnnnnnnnnnnnnnnnnnnnnnnnnnnnnnnnnnnnnnnnnnnnnnnnnnnnnnnnnnnnnnnnnnnnnnnnnnnnnnnnnnnnnnnnnnnnnnnnnnnnnnnnnnnnnnnnnnnnnnnnnnnnnnnnnnnnnnnnnnnnnnnnnnnnnnnnnnnnnnnnnnnnnnnnnnnnnnnnnnnnnnnnnnnnnnnnnnnnnnnnnnnnnnnnnnnnnnnnnnnnnnnnnnnnnnnnnnnnnnnnnnnnnnnnnnnnnnnnnnnnnnnnnnnnnnnnnnnnnnnnnnnnnnnnnnnnnnnnnnnnnnnnnnnnnnnnnnnnnnnnnnnnnnnnnnnnnnnnnnnnnnnnnnnnnnnnnnnnnnnnnnnnnnnnnnnnnnnnnnnnnnnnnnnnnnnnnnnnnnnnnnnnnnnnnnnnnnnnnnnnnnnnnnnnnnnnnnnnnnnnnnnnnnnnnnnnnnnnnnnnnnnnnnnnnnnnnnnnnnnnnnnnnnnnnnnnnnnnnnnnnnnnnnnnnnnnnnnnnnnnnnnnnnnnnnnnnnnnnnnnnnnnnnnnnnnnnnnnnnnnnnnnnnnnnnnnnnnnnnnnnnnnnnnnnnnnnnnnnnnnnnnnnnnnnnnnnnnnnnnnnnnnnnnnnnnnnnnnnnnnnnnnnnnnnnnnnnnnnnnnnnnnnnnnnnnnnnnnnnnnnnnnnnnnnnnnnnnnnnnnnnnnnnnnnnnnnnnnnnnnnnnnnnnnnnnnnnnnnnnnnnnnnnnnnnnnnnnnnnnnnnnnnnnnnnnnnnnnnnnnnnnnnnnnnnnnnnnnnnnnnnnnnnnnnnnnnnnnnnnnnnnnnnnnnnnnnnnnnnnnnnnnnnnnnnnnnnnnnnnnnnnnnnnnnnnnnnnnnnnnnnnnnnnnnnnnnnnnnnnnnnnnnnnnnnnnnnnnnnnnnnnnnnnnnnnnnnnnnnnnnnnnnnnnnnnnnnnnnnnnnnnnnnnnnnnnnnnnnnnnnnnnnnnnnnnnnnnnnnnnnnnnnnnnnnnnnnnnnnnnnnnnnnnnnnnnnnnnnnnnnnnnnnnnnnnnnnnnnnnnnnnnnnnnnnnnnnnnnnnnnnnnnnnnnnnnnnnnnnnnnnnnnnnnnnnnnnnnnnnnnnnnnnnnnnnnnnnnnnnnnnnnnnnnnnnnnnnnnnnnnnnnnnnnnnnnnnnnnnnnnnnnnnnnnnnnnnnnnnnnnnnnnnnnnnnnnnnnnnnnnnnnnnnnnnnnnnnnnnnnnnnnnnnnnnnnnnnnnnnnnnnnnnnnnnnnnnnnnnnnnnnnnnnnnnnnnnnnnnnnnnnnnnnnnnnnnnnnnnnnnnnnnnnnnnnnnnnnnnnnnnnnnnnnnnnnnnnnnnnnnnnnnnnnnnnnnnnnnnnnnnnnnnnnnnnnnnnnnnnnnnnnnnnnnnnnnnnnnnnnnnnnnnnnnnnnnnnnnnnnnnnnnnnnnnnnnnnnnnnnnnnnnnnnnnnnnnnnnnnnnnnnnnnnnnnnnnnnnnnnnnnnnnnnnnnnnnnnnnnnnnnnnnnnnnnnnnnnnnnnnnnnnnnnnnnnnnnnnnnnnnnnnnnnnnnnnnnnnnnnnnnnnnnnnnnnnnnnnnnnnnnnnnnnnnnnnnnnnnnnnnnnnnnnnnnnnnnnnnnnnnnnnnnnnnnnnnnnnnnnnnnnnnnnnnnnnnnnnnnnnnnnnnnnnnnnnnnnnnnnnnnnnnnnnnnnnnnnnnnnnnnnnnnnnnnnnnnnnnnnnnnnnnnnnnnnnnnnnnnnnnnnnnnnnnnnnnnnnnnnnnnnnnnnnnnnnnnnnnnnnnnnnnnnnnnnnnnnnnnnnnnnnnnnnnnnnnnnnnnnnnnnnnnnnnnnnnnnnnnnnnnnnnnnnnnnnnnnnnnnnnnnnnnnnnnnnnnnnnnnnnnnnnnnnnnnnnnnnnnnnnnnnnnnnnnnnnnnnnnnnnnnnnnnnnnnnnnnnnnnnnnnnnnnnnnnnnnnnnnnnnnnnnnnnnnnnnnnnnnnnnnnnnnnnnnnnnnnnnnnnnnnnnnnnnnnnnnnnnnnnnnnnnnnnnnnnnnnnnnnnnnnnnnnnnnnnnnnnnnnnnnnnnnnnnnnnnnnnnnnnnnnnnnnnnnnnnnnnnnnnnnnnnnnnnnnnnnnnnnnnnnnnnnnnnnnnnnnnnnnnnnnnnnnnnnnnnnnnnnnnnnnnnnnnnnnnnnnnnnnnnnnnnnnnnnnnnnnnnnnnnnnnnnnnnnnnnnnnnnnnnnnnnnnnnnnnnnnnnnnnnnnnnnnnnnnnnnnnnnnnnnnnnnnnnnnnnnnnnnnnnnnnnnnnnnnnnnnnnnnnnnnnnnnnnnnnnnnnnnnnnnnnnnnnnnnnnnnnnnnnnnnnnnnnnnnnnnnnnnnnnnnnnnnnnnnnnnnnnnnnnnnnnnnnnnnnnnnnnnnnnnnnnnnnnnnnnnnnnnnnnnnnnnnnnnnnnnnnnnnnnnnnnnnnnnnnnnnnnnnnnnnnnnnnnnnnnnnnnnnnnnnnnnnnnnnnnnnnnnnnnnnnnnnnnnnnnnnnnnnnnnnnnnnnnnnnnnnnnnnnnnnnnnnnnnnnnnnnnnnnnnnnnnnnnnnnnnnnnnnnnnnnnnnnnnnnnnnnnnnnnnnnnnnnnnnnnnnnnnnnnnnctagtgactaaatttataaatgagattcagagccacttgattaatagaagatatatactttgaaaaatacagtgagacacactgaaaaaaaattcaccttttgcagtacttttcattggattgcttcataatttcttggtgttggaaaattaattcctaaagcaacaagattaaaggatgcttgggtaagcaattagtttacctgtcttttctgggaccttacatggttcatccatgattgcattttcttttagaattggagtttaatgaataaaaactttaatataatct

SEQ ID NO: 25189 - DNA, 360 bp, Macaca Mulatta
agactccacttcagcctacagctccctgcttacctttcacctgtccactcctcggtcccatcacctgtaccatgcccgcctgtggctgcacatgctccccacccttcctggcactctttgcttgaggatcttccgatggggaccaaggaggaggcaccaaaggtcccgcacccttttggctgagcaccacatcaccaacctgggctggcatgccttaactctgccctctagtggcttgaggggtgagaagtctggtgtcctgaaactgcaactagactgcagacccctagaaggcaacaacagcacagttactggacaaccaaggcggctcctggacacagcaggacaccagcagccctt

SEQ ID NO: 25190 - DNA, 1599 bp, Macaca Mulatta
atggaaggggattcttaccacaatgcaaccaccgtcaatggcaccccagtatatcaccagcctttggaacgccacaggttgtgggaagtcatcagcattgcagcagtgactgctgtggtaagcctgatcactattgtgggcaatgtcttggtcatgatctccttcaaagtcaacagccagctcaagacagttaacaactattacctgctcagcttagcctgtgcagatctcatcattgggatcttctccatgaacctctacaccacctacatcctcatgggacgctgggctcttgggagtctggcttgtgacctttggcttgcactggactacgtggccagcaacgcttctgtcatgaaccttctggtgatcagttttgaccgttacttttccatcacaagacccttgacgtatcgggccaagcgtactccgaaaagggctggcgtcatgattggcttggcctggctgatctccttcatcctctgggccccagcaatcctctgctggcagtacttggttgggaagcggacagttccactggatgagtgccagatccagtttctctcagagcccaccatcacttttggcactgccattgctgctttctacatccctgtttctgtcatgaccatcctctactgtcgaatctaccgggaaacagagaagcgaaccaaggacctggctgacctccagggttctgactctgtgaccgaagctgagaagagaaagccagctcatagggctctgttcagatcttgcttgcgctgtcctcgacccaccctggcccagagggaaaggaaccagacctcctggtcatcctcccgcaggagcgcctccaccagtgggaagccatcccaagccactgacccaagcaccaaccaggccaaagctgagcagctcaccacctgtagcagttacccttcctcagaggatgaggacaagcccgccactgaccctgtcctccaagtggtctacaagagtcggggtaaggaaagcccaggggaagaattcagttctgaagacgctgaggaaacttttgtgaaagctcaaactgaaaaacatgactctgacaccccaaactactttctgtctccagcagctgctcatagacccaagagtcagaaatgtgtggcctataagttccgattggtggtaaaagctgacgggacccaggagaacaacaacggctgtcacaaggtgaaaatcatgccctgctccttcccagtggccaaggagccttcaacgaaaggcctcaatcccaaccccagccatcaaatgaccaaacgaaagagaatggtcctagtcaaagagaggaaagcagcccagacactgagtgccattctcctggccttcatcatcacatggaccccgtataacatcatggtcctggtttctaccttctgtgacaagtgtgtcccagtcaccctgtggcacttgggctactggttgtgctatgtcaatagcactgtcaaccccatctgctatgccctctgcaacagaaccttcaggaagacctttaagatgctgcttctctgccgatggaaaaagaaaaaagtggaagagaagttgtactggcaggggaacagcaagcttccctga

SEQ ID NO: 25191 - DNA, 787 bp, Macaca Mulatta
ggggagcgcgctagtcagctccctgaagggagtgacagcggttgggtgcccgcggccacttttgccttcccggggagatgtcctttgcttctcagatgtaaatgcactttaagtttgttattcaacagtgaaaatgagtcatacagaggttaaattaaaaataccttttggaaataaattactagatgctgtttgtttggtacctaacaagagcttaacatatggaataattcttacacatggagcatcaggagatatgaatcttcctcatttgatgtcactggcatcccatcttgcatcccatgggtttttctgcctgagatttacctgtaaaggccttaatattgtacatagaattaaggcatataaatcagttttgaattacctacagacatcaggagaatacaaacttgctggtgtttttcttggaggtcgttcaatgggctcaagaacaactgcttctgtaatgtgtcacattgagccaaatgatggtgatgattttgttccgggtctcgtttgtatttcttaccccctgccccttccaaagcacccccataaactcatagatgaagaacctctttccctttaaaaacagccctgttcttgatttgttgtcccggctcaaccaaaaggataaagtggtggaaaacaaaattttgcttgcgacgaaaggttgaccaccatgaaaaatatccaaaggcctccccccaatataaaatcccaacttgtggaatttgaataaaagagccataaatcccttttccccacttgggccaactgtgttaaa

SEQ ID NO: 25192 - DNA, 3854 bp, Macaca Mulatta
  misc_feature (1)...(3854): n = A,T,C or G
cagtgactggtactacgcaagaagcncctttctgcagccaaagctgagctcggacattgtgggccaactgtatgagctgactgaggttcagtttgacctggcgtcgaggggctatgacttggatgctgcctggccaacatntgccagnnnnnnnnnnnnnnnnnnnnnnnnnnnnnnnnnnnnnnnnnnnnnnnnnnnnnnnnnnnnnnnnnnnnnnnnnnnnnnnnnnnnnnnagactcaagagatggtgtccaactttgacctgaacagccccctaaacaacgaggcattggagggttttgatgagatgcgactagagctggaccagttggaggtgcgggagaagcagctacaggagcgcatgcagcagctggacagagagaaccaggagctgagggcagctgtcagcctacaagaggagcaactgcagacagagagggagaggggacgcactgcagcagaggacaacgttcgcctcacttgcttggtggctgagctccagaagcagtgggaggtcacccaggccacccagaacactgtgaaggagctgcagacgtgcctacaggccctggagctaggagcagcagagaaggaggaggactaccacacagccctgcggcggctggagtccatgctgcagcccttggcacaggagcttaaggccacacgggactcactgggccagaagaaccagcatttagccagcatcccagactggctagccatggctcagcagaaggcagatacagcaccagacacaaagggccagcaagaacctattcccagtgatgcggcccgggagatccaggagctaggggagaagcttcgagccctagaaagggagagaaccaaggtcgaggaggtcaacaggcagcagagtgcccagctggagcagctggtcaaggagctgcagctgaaggaggatgcctgggccagcctggagcgcctggtgaaggagacggccccactccaggaggagttgtctgggaagggacaggaggcagaccagctctggcaacggctacaggagttgctggtgcactcgagctcccgggagcaggagctagcagagttgaggcgggagaaaaaacagcaacaggaggaaaaggagctgctggagcaggaggtcaggtccctgacccggcagctgcagttcctggagacccagctggcacaggtgagccaacatgtgagtgacttggaggagcagaagaagcagctcatccaggacaaagaccacctcagccagaaggtgggtgcgctcgagcggcttgctgggcagcccggcccagaactgccagtggcaggtgaaaagaatgaggccctggtccctgtgaactccagtctgcaagaggcctgtgggaagccagaggaggagcagaggggcctgcaggaggcacagttagatgataccaaggtgcaggagggcagccaggaggaagagctccggcaggccaacagggaactggagaaggagctgcagaatgtggtcgggcgtaaccagctcctggagggcaagctgcaagccctgcaggccgattaccaggctttgcagcagcgggaagcagccatccagggctccttggcctccctggaggccgagcaggccagcatccggcacttgggcgaccagatggaggcaagcttgctggnnnnnnnnnnnnnnnnnnnnnnnnnnnnnnnnnnnnnnnnnnnnnnnnnnnnnnnnnnnnnnnnnnnnnnnnnnnnnnnnnnnnnnnnnnnnnnnnnnnnnnnnnnnnnnnnnnnnnnnnnnnnnnnnnnnnnnnnnnnnnnnnnnnnnnnnnnnnnnnnnnnnnnnnnnnnnnnnnnnnnnnnnnnnnnnnnnnnnnnnnnnnnnnnnnnnnnnnnnnnnnnnnnnnnnnnnnnnnnnnnnnnnnnnnnnnnnnnnnnnnnnnnnnnnnnnnnnnnnnnnnnnnnnnnnnnnnnnnnnnnnnnnnnnnnnnnnnnnnnnnnnnnnnnnnnnnnnnnnnnnnnnnnnnnnnnnnnnnnnnnnnnnnnnnnnnnnnnnnnnnnnnnnnnnnnnnnnnnnnnnnnnnnnnnnnnnnnnnnnnnnnnnnnnnnnnnnnnnnnnnnnnnnnnnnnnnnnnnnnnnnnnnnnnnnnnnnnnnnnnnnnnnnnnnnnnnnnnnnnnnnnnnnnnnnnnnnnnnnnnnnnnnnnnnnnnnnnnnnnnnnnnnnnnnnnnnnnnnnnnnnnnnnnnnnnnnnnnnnnnnnnnnnnnnnnnnnnnnnnnnnnnnnnnnnnnnnnnnnnnnnnnnnnnnnnnnnnnnnnnnnnnnnnnnnnnnnnnnnnnnnnnnnnnnnnnnnnnnnnnnnnnnnnnnnnnnnnnnnnnnnnnnnnnnnnnnnnnnnnnnnnnnnnnnnnnnnnnnnnnnnnnnnnnnnnnnnnnnnnnnnnnnnnnnnnnnnnnnnnnnnnnnnnnnnnnnnnnnnnnnnnnnnnnnnnnnnnnnnnnnnnnnnnnnnnnnnnnnnnnnnnnnnnnnnnnnnnnnnnnnnnnnnnnnnnnnnnnnnnnnnnnnnnnnnnnnnnnnnnnnnnnnnnnnnnnnnnnnnnnnnnnnnnnnnnnnnnnnnnnnnnnnnnnnnnnnnnnnnnncaagttccagctgagtgctgaaatcatggactaccagagcagacttaannnnnnnnnnnnnnnnnnnnnnnnnnnnnnnnnnnnnnnnnnnnnnnnnnnnnnnnnnnnnnnnnnnnnnnnnnnnnnnnnnnnnnnnnnnnnnnnnnnnnnnnnnnnnnnnnnnnnnnnnnnnnnnnnnnnnnnnnnnnnnnnnnnnnnnnnnnnnnnnnnnnnnnnnnnnnnnnnnnnnnnnnnnnnnnnnnnnnnnnnnnnnnnnnnggacccagaaggaactcgaaaaagccacaaccaaaatcccagaggattacaacaaactctgccagggagtgacaaaccgcgagaggaatggacagaaaaagcttgctgacctggatgacctcaaaagaaccaagaagtatctcgaggagcggctgnnnnnnnnnnnnnnnnnnnnnnnnnnnnnnnnnnnnnnnnnnnnnnnnnnnnnnnnnnnnnnnnnnnnnnnnnnnnnnnnnnnnnnnnnnnnnnnnnnnnnnnnnnnnnnnnnnnnnnnnnnnnnnnnnnnnnnnnnnnnnnnnnnnnnnnnnnnnnnnnnnnnnnnnnnnnnnnnnnnnnnnnnnnnnnnnnnnnnnnnnnnnnnnnnnnnnnnnnnnnnnnnnnnnnnnnnnnnnnnnnnnnnnnnnnnnnnnnnnnnnnnnnnnnnnnnnnnnnnnnnnnnnnnnnnnnnnnnnnnnnnnnnnnnnnnnnnnnnnnnnnnnnnnnnnnnnnnnnnnnnnnnnnnnnnnnnnnnnnnnnnnnnnnnnnnnnnggagcaaatacagactacaggccaccggacgacgctgtgtttgatatcatcacagatgaggaattgtgccagatacaggagtctggctcctcgttgcctgaaacacccactgaaactgattctcttgacccaaatgtggctgaacagnnnnnnnnnnnnnnnnnnnnnnnnnnnnnnnnnnnnnnnnnnnnnnnnnnnnnnnnnnnnnnnnnnnnnnnnnnnnnnnnnnnnnnnnnnnnnnnatcaaagtacccctcacagtggatgagattgccagcttcggggagggtagcagggagctgtttgtgcggtccagcacctacagcctgatccccatcactgtggccgaagcaggcctcaccatcagctgggtcttctcctctgaccccaagagcatctccttcagcgtggtcttccaggaggctgaggacacaccgctggatcagtgtaaggt

SEQ ID NO: 25193 - DNA, 669 bp, Macaca Mulatta
gggccaggcgggccctgtgcagtttggggcaatgttgatagctcagcccaggacttgatgccatgagaggtggagagctatggtaggttcttgtgcagggttatgcccgtgtggaaggagagtttgagaaaagcagcccctgactcctgggtacccctggtctctctccttccagcgctggccaccaaacagacttacgtcacttacaccaaccatgcaatctagcgaggccatggagctgagcagcaggaggagccgtgaccctgtggatggtgcgttgggccagggccacacccaagggcccagctgatgtcttgcctgcccgtgggcacccacggatgtggctcggtgctgaggacagcagagcccccggccgtcactgctggcagcctgggcaagctgggtgagcgacaggagcacgaggggccggggcagtgccaggctaccacaagaacctgcatcttggaccattgcccctcccggccccaaaccacaggggctcaggccgtgtgggccccagtgctagatctttccctcccttcgtctctgtttgtgctgttggcgacccctctgtctgtctccagccctgtctttctgttctcttatctctttgtttcaccttttgcctctctggtgtccccggctgcttgtgctctcggccttttctgt

SEQ ID NO: 25194 - DNA, 339 bp, Macaca Mulatta
  misc_feature (1)...(339): n = A,T,C or G
agtctaaaagggaggcccgtgagtaccgtgatgctcaggagtttggnnnnnnnnnnnnnnnnnnnnnnnnnnnnnnnnnnnnnnnnnnnnnnnnnnnnnnnnnnnnnnnnnnnnnnnnnnnnnnnnnnnnnnnnnnnnnnnnnnnnnnnnnnnnnnnnnnnnnnnnnnnnnnnnnnnnnagtggtggccgtgtcctccccggcagtgccccctcccaccaaggttgtggccccgccctcgtccagcgacagcagcagcgatagctcctcggacagtgacagttcgactgatgactctgaggaggagcgagcccagcggctagctgagctccaggagcag

SEQ ID NO: 25195 - DNA, 1872 bp, Macaca Mulatta
  misc_feature (1)...(1872): n = A,T,C or G
ccccttaaaagggaaaacgagcacagaaccaagcacagccaaaccttcttccccagaaccagcaccgccgtctgaggcaatggacatagaccgtccaggcaccccggttccccctgttgaagttccagagctcatggatacagncagcctctttggaaccaggagctctggatgccaagccagtggagagtcctggagatcctaaccaactgacccggaaaggcaggaagaggaaaagtgtgacgtggcctgaggaaggcaaactgagagaatatttctattttgaattggatgaaactgaacgagnagtaaatgtgaataagatcaaggactttggtgaggcagctaagcgagagatactgtcagaccgacatgcatttgnnnnnnnnnnnnnnnnnnnnnnnnnnnnnnnnnnnnnnnnnnnnnnnnnnnnnnnnnnnnnnnnnnnnnnnnnnnnnnnnnnnnnnnnnnnnnnnnnnnnnnnnnnnnnnnnnnnnnnnnnnnnnnnnnnnnnnnnnnnnnnnnnnnnnnnnnnnnnnnnnnnnnnnnnnnnnnnnnnnnnnnnnnnnnnnnnnnnnnnnnnnnnnnnnnnnnnnnnnnnnnnnnnnnnnnnnnnnnnnnnnnnnnnnnnnnnnnnnnnnnnnnnnnnnnnnnnnnnnnnnnnnnnnnnnnnnnnnnnnnnnnnnnnnnnnnnnnnnnnnnnnnnnnnnnnnnnnnnnnnnnnnnnnnnnnnnnnnnnnnnnnnnnnnnnnnnnnnnnnnnnnnnnnnnnnnnnnnnnnnnnnnnnnnnnnnnnnnnnnnnnnnnnnnnnnnnnnnngcccaaacagtcatccttcagaggaactactgaaacaaccagacccttcagacaagatcaagcagatgctggngtgccacatggactcctaggccctggcccgatagccaatggtttcccaccagggggtcctgtgggccccaagggcatgcagcactttccccctggacctgggggacctatgccaggtnnnnnnnnnnnnnnnnnnnnnnnnnnnnnnnnnnnnnnnnnnnnnnnnnnnnnnnnnnnnnnnnnnnnnnnnnnnnnnnnnnnnnnnnnnnnnnnnnnnnnnnnnnnnnnnnnnnnnnnnnnnnnnnnnnnnnnnnnnnnnnnnnnnnnnnnnnnnnnnnnnnnnnnnnnnnnnnnnnnnnnnnnnnnnnnnnnnnnnnnnnnnnnnnnnnnnnnnnnnnnnnnnnnnnnnnnnnnnnnnnnnnnnnnnnnnnnnnnnnnnnnnnnnnnnnnnnnnnnnnnnnnnnnnnnnnnnnnnnnnnnnnnnnnnnnnnnnnnnnnnnnnnnnnnnnnnnnnnnnnnnnnnnnnnnnnnnnnnnnnnnnnnnnnnnnnnnnnnnnnnnnnnnnnnnnnnnnnnnnnnnnnnnnnnnnnnnnnnnnnnnnnnnnnnnnnnnnnnnnnnnnnnnnnnnnnnnnnnnnnnnnnnnnnnnnnnnnnnnnnnnnnnnnnnnnnnnnnnnnnnnnnnnnnnnnnnnnnnnnnnnnnnnnnnnnnnnnnnnnnnnnnnnnnnnnnnnnnnnnnnnnnnnnnnnnnnnnnnnnnnnnnnnnnnnnnnnnnnnnnnnnnnnnnnnnnnnnnnnnnnnnnnnnnnnnnnnnnnnnnnnnnnnnnnnnnnnnnnnnnnnnnnnnnnnnnnnnnnnnnnnnnnnnnnnnnnnnnnnnnnnnnnnnnnnnnnnnnnnnnnnnnnnnnnnnnnnnnnnnnnnnnnnnnnnnnnagacatgtcaaaccgccctgtctgcagacatttcatgatgaagggcaactgccgctatgagaacaactgtgccttctaccacccgggtgtcaatgggcccccactgcccta

SEQ ID NO: 25196 - DNA, 703 bp, Macaca Mulatta
ttaaatggaacagttttccctatctctccattttgcccaggaactgatgttggcaaagtactagtatgatcttttcaatccgttttctttcaggtagcaattgttgtattaggaaacaaaatcgacctttctgagcagagacaagtggacgctgaagtggcacagcagtgggcaaaaagtgagaaagtgagactgtgggaggtgactgttacagatcggaaaactctgattgaaccattcactttattagccagtaaactttctcaaccccagagcaaatcaagctttcctttgcctgggaggaaaaacaaaggtaactctagttctgagaactaaaaatcagtaatttcacaattgtatgttgaatagcgactgcctttaagtgtctgtgaacatggagtaatatcactatttaaaataggccatttgtatctacctttggtccttaggaaaattcccaaggaagtcatttaatgcactttagatgttaaaagtatttgggctaaggttattattgcctgttatgaaataatatattcttattctcattgtttgaaacctgtctttgaaattagcacctttgttatttatgttgtacttgtgaaaacagtaaaataaagtttggacagttatgcaaatgcacctatgtgtaacttccccctatccccaagctgtttcagaagataccataaatcattctgtt

SEQ ID NO: 25197 - DNA, 1249 bp, Macaca Mulatta
  misc_feature (1)...(1249): n = A,T,C or G
gaggctcctcctgtgcagcgcagctactgatggcaacctggctttctgggatctcaccaccgtgctagaccatggctccactgtcctggagcctccagtggatcctgggcttccctaccgnggcttggcaccccctgtctgactctgcaggcccacagctgtggtatcaacagcctgcacacgttgcccacccgtgagggccaccatctcgtggccagtggcagtgaagatggatccctccatgtcttcgtgcttgctgtggagatgctagagctagaagaggctgtgggagagggtgggctggtaccccagctgcgtgtgctagaggaatactgtgtcccctgtgcacatgctgcccatgtgacaggcctcaagatcctaagcccaagtatcatggtctcnnnnnnnnnnnnnnnnnnnnnnnnnnnnnnnnnnnnnnnnnnnnnnnnnnnnnnnnnnnnnnnnnnnnnnnnnnnnnnnnnnnnnnnnnnnnnnnnnnnnnnnnnnnnnnnnnnnnnnnnnnnnnnnnnnnnnnnnnnnnnnnnnnnnnnnnnnnnnnnnnnnnnnnnnnnnnnnnnnnnnnnnnnnnnnnnnnnnnnnnnnnnnnnnnnnnnnnnnnnnnnnnnnnnnnnnnnnnnnnnnnnnnnnnnnnnnnnnnnnnnnnnnnnnnnnnnnnnnnnnnnnnnnnnnnnnnnnnnnnnnnnnnnnnnnnnnnnnnnnnnnnnnnnnnnnnnnnnnnnnnnnnnnnnnnnnnnnnnnnnnnnnnnnnnnnnnnnnnnnnnnnnnnnnnnnnnnnnnnnnnnnnnnnnnnnnnnnnnnnnnnnnnnnnnnnnnnnnnnnnnnnnnnnnnnnnnnnnnnnnnnnnnnnnnnnnnnnnnnnnnnnnnnnnnnnnnnnnnnnnnnnnnnnnnnnnnnnnnnnnnnnnnnnnnnnnnnnnnnnnnnnnnnnnnnnnnnnnnnnnnnnnnnnnnnnnnnnnnnnnnnnnnnnnnnnnnnnnnnnnnnnnnnnnnnnnnnnnnnnnnnnnnnnnnnnnnnnnnnnnnnnnnnnnnnnnnnnnnnnnnnnnnnnnnnnnnnnnnnnnnnnnnnnnnnnnnnnnnnnnnnnnnnnnnnnnnnnnnnnnnnagtaggagctgaaatccatgctgagctgtaccaggaacttgcacatctagagacagagactgagtcactggcccatctctttgctcttgtgccncaggccagaataaagaatagagtgtagagtgt

SEQ ID NO: 25198 - DNA, 679 bp, Macaca Mulatta
tcactgatgtatgcaagcgaaagtaaggacatgaaggcccctttaactacattagctctgctctggtatcatactgtagtccgcccgttttttgccttggatggcagtgataacaaggcaggcctggatgaagccaaggaaattctccttaaaaaagaagctgcttatccaaattcttccctctttatgtttttcaagggacggatacaacgactagagtgtcaaatcaacagtgccttgacgtctttccacactgctttggaacttgcagtagatcagagagaaattcaacatgtctgtctctatgaaattggttggtgcagcatgatagagctcaatttcaaggatgcatttgattcctttgagaggctaaaaaacgagtccaggtggtcccagtgctattatgcctacttgactgcagtttgtcagggagccactggtgatgtggacggggcgcagattgtctttaaagaagttcagaaactcttcaaaaggaaaaacaatcagattgaacagttctcggtgaaaaaggcagagcgatttcggaagcaaaccccaaccaaagcactctgtgtgttggcgtccattgaagtgttgtacttgtggaaggctcttccaaactgttccctccccaacctgcagaggatgagtcaagcttgccatgaagcggatgattcat

SEQ ID NO: 25199 - DNA, 2390 bp, Macaca Mulatta
  misc_feature (1)...(2390): n = A,T,C or G
aggttttattgggatttaataatgcttataatgatggttggaaatctagtcatcataccagttggaatcacattctttacagagcaaacaacaacaccatggattattttcaatgtggcatcagatacagttttcctactggacctgatcatgaattttaggactggaactgtcaacgaagacagttctgaaatcatcctggaccccaaagtgatcaagatgaattatttaaaaagctggtttgtggttgacttcatctcatccatcccagggggattatatctttcttattgtagaaaaaggaatggattcagaagtttacaagacagccagggcacttcgcattgtgaggtttacaaaaattctcagtctcttgcgtttattacgactttcaaggttaattagatacatacatcagtgggnnnnnnnnnnnnnnnnnnnnnnnnnnnnnnnnnnnnnnnnnnnnnnnnnnnnnnnnnnnnnnnnnnnnnnnnnnnnnnnnnnnnnnnnnnnnnnnnnnnnnnnnnnnnnnnnnnnnnnnnnnnnnnnnnnnnnnnnnnnagatattccacatgacgtatgatcttgccagtgcagtggtgagaatttttaatctcatcggcatgatgctgctcctgtgtcactgggatggttgtcttcagttcttagtaccactactgcaggacttcccaccagattgctgggtgtctttaaatgaaatggttnnnnnnnnnnnnnnnnnnnnnnnnnnnnnnnnnnnnnnnnnnnnnnnnnnnnnnnnnnnnnnnnnnnnnnnnnnnnnnnnnnnnnnnnnnnnnnnnnnnnnnnnnnnnnnnnnnnnnnnnnnnnnnnnnnnnnnnnnnnnnnnnnnnnnnnnnnnnnnnnnnnnnnnnnnnnnnnnnnnnnnnnntctggattcttcgaggcggcagtatcaagagaagnagtataagcaagtggaacaatacatgtcattccataagttaccagctgatatgcgtcagaagatacatgattactatgaacacagataccaaggcaaaatctttgatgaggaaaatattctcaatgaactcaatgatcctctgagagaggnnnnnnnnnnnnnnnnnnnnnnnnnnnnnnnnnnnnnnnnnnnnnnnnnnnnnnnnnnnnnnnnnnnnnnnnnnnnnnnnnnnnnnnnnnnnnnnnnnnnnnnnnnnnnnnnnnnnnnnnnnnnnnnnnnnnnnnnnnnnnnnnnnnnnnnnnnnnnnnnnnnnnnnnnnnnnnnnnnnnnnnnnnnnnnnnnnnnnnnnnnnnnnnnnnnnnnnnnnnnnnnnnnnnnnnnnnnnnnnnnnnnnnnnnnnnnnnnnnnnnnnnnnnnnnnnnnnnnnnnnnnnnnnnnnnnnnnnnnnnnnnnnnnnnnnnnnnnnnnnnnnnnnnnnnnnnnnnnnnnnnnnnnnnnnnnnnnnnnnnnnnnnnnnnnnnnnnnnnnnnnnnnnnnnnnnnnnnnnnnnnnaggaaagaaaaattcaattcttctgcaaaagttccagaaggatctgaacactggtgttttcaacaatcaggagaacgaaatcctcaagcagattgtgaaacatgacagggagatggtgcaggcaatcgctcccatcaattatcctcaaatgacaaccctgaattccacatcgtcaactacgaccccgacctcccgcatgaggacacaatctccaccagtgtacacagcgaccagcctgtctcacagcaacctgcattcccccagtcccagcacacagaccccccagccatcagccatcctttcaccctgctcctacaccaccgccgtctgcagccctcctgtacagagccctctggccgctcgaactttccactatgcctcccccaccgcctcccagctgtcactcatgcaacagcagcctcagcagcaggtacagcagtcccagccgccgcagactcagccacagcagccgtctccgcagccacagacacctggcagctccacgccgaaaaacgaagtgcacaagagcacgcaggcgcttcacaacaccaacctgacccgggaagtcaggcccctctccgcctcgcagccctcgctgccccatgaggtgtccactctgatttccagacctcatcccactgtgggcgagtccctggcctccatccctcaacccgtgacggcggtccccggaacgggccttcaggcagggggcaggagcactgtcccgcagcgcgtcaccctcttccgacagatgtcgtcgggagccatcccccccaaccgaggagtccctccagcaccccctccaccagcagctgctcttcccagagagtcttcctcagtcttaaacacagacccagacgcagaaaagccacgatttgcttcaaatttatga

SEQ ID NO: 25200 - DNA, 278 bp, Macaca Mulatta
ctttttaccgaattccctcgattggcacctagccagaatcaaaatcatttgaaggattggttcttggagaacaagaggagtgaagtacctgaatgtagaaacaatgaggatggacctagtttaataatggaagaacagcacaagtgttcttcgaagagccttgaacataaaacagagacacctcctgtggaggagaatgtaactcagaaaattagtgacctggaaatttgtgctgatgagtttcctggatcctcagccacctaccgaatactggaggt

SEQ ID NO: 25201 - DNA, 771 bp, Macaca Mulatta
tcatggaagataatggaagagggagttatgaaatcactggtacccccaacgagggcttcctcagtgaacagaatcaatagttagcagtcaaccgtgtttcttttgctatccacaggtaggtggctttgacggagctaatcgacttaggagtgcagaagcctacagccctgtggctaacacttggcgcacaatccccactatgtttaaccctcgtagcaattttggcatcgaggtggtggacgacctcttgttcgtggtgggtggctttaatggttttaccaccacctttaatgttgagtgctatgacgaaaagaccgatgagtggtatgatgctcacgacatgagcatataccgcagtgctctgagctgctgtgtagtaccagggctggccaatgttggggaatatgcagctagacgggacaacttcccaggattagcactgcgagatgaagtaaaatattctgcttcaacaagtaccctacctgtatgagcctcttcatttagctaataaaaagtctaagcaataagaattaattcttttttttaaataaatgcagtgtttaaactttgaagagtactggaaaatgttcaacttaagagagccaatggttggatgaatgagggagtaggagggagggaagaaggcaattatatccaacagtgcataaagaagaaaaaaaaagtcacacagtacaaaccagctttaaagaaatatatttatttaaaacttacactgagacaattagtagctttaacagagaacaagatagc

SEQ ID NO: 25202 - DNA, 885 bp, Macaca Mulatta
cttactaggtgtcttacagagccaagtgtttctccttctaacaccttttccccagctacctttgctaacttgtatttaagaactttgtacttgagagtgaagtatttttggttattgttgtttttatcttttctggtttgtttagcagaataagtagaaaacatcagatcaaaaaatgcatgttatgtttaaataatattctagaatagtttactggagaaggtgtattaatctttcatttccctcacataacttacagataaagaagacctatcttcaaattgtccaggaccaacttctgcagatcatgattaagattatccccaataaagtagaaactcgaaaagtgttattatttcctagggatggacaattcagcagctggaaatccaaaattttttatgccagtaaagaaagagggactttatataatgttttgttcttttcgtactttatgagtgttcactgacttgaaaaaaataatgcaatggcatttcagaacacaagtatcatagagatggacagttacaatttattgctgtattgtgatacatgaggggtttaaggacaccaacaggtaactatcttattcccctcttcactttggaacaaattgagagataagaaatgggagtcagaggaagagaaaaatatccactttatcagtgaataaactgaaatagagaagaaggttgactttttctccagttgaacactctaatatttctccctgattggagagaacagcaggtctctgtcttgttggggcagagcccatctttgcattctgagaccagttagttttcaaggtcagggaaaccaccagggactggaccacacatgcttagttccttcttgtatcacctgtgggatgagacagttctc

SEQ ID NO: 25203 - DNA, 94 bp, Macaca Mulatta
  misc_feature (1)...(94): n = A,T,C or G
nctgcaccgtcgagggggcacccgccagctttggcaagagcttcgcgcagaaatctggctacttcctgtgccttagttctctgggcagcctaga

SEQ ID NO: 25204 - DNA, 659 bp, Macaca Mulatta
tctctcagttagtgagaaaaggctgaaaacctattgatacttgagagtgaatataagtctaaatgctgcttctataatttgttcagctaagggatagattggtcacactatttaagtgagcccagatcaaaaaagcggattgaaatttcctttagaaaagattctccatgatttgaattgcattctctttaaactcaccaatgtaatcattttgggaggagggagaacccacttactttccaaaaatgggtttatttaaacccacaaactcaagaggttgttgggggaactaggaaaataagggttttcaatgaactgcattactaggtagaggctgtgatccataggatttcattctaatgaccatgtgaagatgtctgagccctcctttgcctttcctcagaaaggatccttccaaggcaccaatcccttggatggataatgtaaggtattgttaactcactcatattgagatcatttttagagataccaggttttatatatcagcactagatggttccaccctcatggaataaaactgcttacaaatattttgaaaggaaaattgaccgaaattcttaaattgttactaaggcaatcatgcacaggtgatgtatgtcttatctgatttgcttttaactccttggtgccccaagctc

SEQ ID NO: 25205 - DNA, 1079 bp, Macaca Mulatta
  misc_feature (1)...(1079): n = A,T,C or G
gagaggccggagctggatgagctgacattagagcgtgtgctggaggaactggagaccctgtgccaccagaatatggccagggccatcgagacgcaggaggggctgggcatcgagtacgacgaggatgttgtctgcgacgtgtgtcgctctcccgagggcgaggatggcaacgagatggtcttctgtgacaagtgcaacgtctgtgtgcatcaggnnnnnnnnnnnnnnnnnnnnnnnnnnnnnnnnnnctggctgtgccggacgtgtgctttggtgtccagccaaagtgcctgctctgccccaagcgaggaggagccttgagcccaccagaagtgggaccaagtgggtgcacgtcagctgcgccctatggattcctgaggtnnnnnnnnnnnnnnnnnnnnnnnnnnnnnnnnnnnnnnnnnnnnnnnnnnnnnnnnnnnnnnnnnnnnnnnnnnnnnnnnnnnnnnnnnnnnnnnnnnnnnnnnnnnnnnnnnnnnnnnnnnnnnnnnnnnnnnnnnnnnnnnnnnnnnnnnnnnnnnnnnnnnnnnnnnnnnnnnnnnnnnnnnnnnnnnnnnnnnnnnnnnnnnnnnnnnnnnnnnnnnnnnnnnnnnnnnnnnnnnnnnnnnnnnnnnnnnnnnnnnnnnnnnnnnnnnnnnnnnnnnnnnnnnnnnnnnnnnnnnnnnnnnnnnnnnnnnnnnnnnnnnnnnnnnnnnnnnnnnnnnnnnnnnnnnnnnnnnnnnnnnnnnnnnnnnnnnnnnnnnnnnnnnnnnnnnnnnnnnnnnnnnnnnnnnnnnnnnnnnnnnnnnnnnnnnnnnnnnnnnnnnnnnnnnnnnnnnnnnnnnnnnnnnnnnnnnnnnnnnnnnnnnnnnnnnnnnnnnnnnnnnnnnnnnnnnnnnnnnnnnnnnnnnnnnnnnnnnnnnnnnnnnnnnnnnnnnnnnnnnnnnnnnnnnnnnnnnnnnnggttagaaatctgtgctacatggtgacaaggcgcgagagaacgaaacacgccatctgcaaactccaggagcagatattccacctgcagatgaaacttattgaacaggatctgtgtcgag

SEQ ID NO: 25206 - DNA, 14512 bp, Macaca Mulatta
  misc_feature (1)...(14512): n = A,T,C or G
gtgaatcagaaatcctgcaccatgagaagcaatatgagccattctactcatcttttgttgcactttccacacactatattacaacagtttgcagtctcannnnnnnnnnnnnnnnnnnnnnnnnnnnnnnnnnnnnnnnnnnnnnnnnnnnnnnnnnnnnnnnnnnnnnnnnnnnnnnnnnnnnnnnnnnnnnnnnnnnnnnnnnnnnnnnnnnnnnnnnnnnnnnnnnnnnnnnnnnnnnnnnnnnnnnnnnnnnnnnnnnnnnnnnnnnnnnnnnnnnnnnnnnnnnnnnnnnnnnnnnnnnnnnnnnnnnnnnnnnnnnnnnnnnnnnnnnnnnnnnnnnnnnnnnnnnnnnnnnnnnnnnnnnnnnnnnnnnnnnnnnnnnnnnnnnnnnnnnnnnnnnnnnnnnnnnnnnnnnnnnnnnnnnnnnnnnnnnnnnnnnnnnnnnnnnnnnnnnnnnnnnnnnnnnnnnnnnnnnnnnnnnnnnnnnnnnnnnnnnnnnnnnnnnnnnnnnnnnnnnnnnnnnnnnnnnnnnnnnnnnnnnnnnnnnnnnnnnnnnnnnnnnnnnnnnnnnnnnnnnnnnnnnnnnnnnnnnnnnnnnnnnnnnnnnnnnnnnnnnnnnnnnnnnnnnnnnnnnnnnnnnnnnnnnnnnnnnnnnnnnnnnnnnnnnnnnnnnnnnnnnnnnnnnnnnnnnnnnnnnnnnnnnnnnnnnnnnnnnnnnnnnnnnnnnnnnnnnnnnnnnnnnnnnnnnnnnnnnnnnnnnnnnnnnnnnnnnnnnnnnnnnnnnnnnnnnnnnnnnnnnnnnnnnnnnnnnnnnnnnnnnnnnnnnnnnnnnnnnnnnnnnnnnnnnnnnnnnnnnnnnnnnnnnnnnnnnnnnnnnnnnnnnnnnnnnnnnnnnnnnnnnnnnnnnnnnnnnnnnnnnnnnnnnnnnnnnnnnnnnnnnnnnnnnnnnnnnnnnnnnnnnnnnnnnnnnnnnnnnnnnnnnnnnnnnnnnnnnnnnnnnnnnnnnnnnnnnnnnnnnnnnnncagcactatcagaatttccagttgctgggtgcttggtgcttgttaaacagccttttcctcatattgaacctcagtcctactgcactggctgataaggggaaagagaaggacccgctggctgccctccgagtcagagacatcctttctcgtactaaagagggagtgggctctcctaaactggggcctggaaaagggnnnnnnnnnnnnnnnnnnnnnnnnnnnnnnnnnnnnnnnnnnnnnnnnnnnnnnnnnnnnnnnnnnnnnnnnnnnnnnnnnnnnnnnnnnnnnnnnnnnnnnnnnnnnnnnnnnnnnnnnnnnnnnnnnnnnnnnnnnnnnnnnnnnnnnnnnnnnnnnnnnnnnnnnnnnnnnnnnnnnnnnnnnnnnnnnnnnnnnnnnnnnnnnnnnnnnnnnnnnnnnnnnnnnnnnnnnnnnnnnnnnnnnnnnnnnnnnnnnnnnnnnnnnnnnnnnnnnnnnnnnnnnnnnnnnnnnnnnnnnnnnnnnnnnnnnnnnnnnnnnnnnnnnnnnnnnnnnnnnnnnnnnnnnnnnnnagacgatgacagtgagcctattttggggcaatggtttgaggagactatttctcccagtaaagagaaagcagcacctccgccccctcccccacctcctccactggaaagttctcctcgggttaaaagccccagtaagcaggcccctggtgagaagggcaacattttggcgagtcgcaaagatcctgagttttcttaggtctggcttccaacattttgaacttcatcacctcttccatgttgaactctcggaacaattttatccgaaactatctgagtgtatctctttcagaacaccatatggccaccctagccagtatcatcaaggaggtagacaaagatggactcaagggtnggttcatcagatgaagagtttgctgcagctctctatcacttcaaccactcgctggtaacctctgaccttcagtcacctaacctgcagnnnnnnnnnnnnnnnnnnnnnnnnnnnnnnnnnnnnnnnnnnnnnnnnnnnnnnnnnnnnnnnnnnnnnnnnnnnnnnnnnnnnnnnnnnnnnnnnnnnnnnnnnnnnnnnnnnnnnnnnnnnnnnnnnnnnnnnnnnnnnnnnnnnnnnnnnnnnnnnnnnnnnnnnnnnnnnnnnnnnnnnnnnnnnnnnnnnnnnnnnnnnnnnnnnnnnnnnnnnnnnnngaggatttgaatgtagaacacctgcagctgctcctccctttatagggacaacttcactgagacaggccggcgggccatattgacgctttttgtccagatcatccaggagttgttcgtcaacatggatgctcagatgcgctccgtgccactcatcttggctcgcctccttctcatctttgattatctgcttcatcagtactccaaagcccctgtgtatctgtttgagcaggtacagnnnnnnnnnnnnnnnnnnnnnnnnnnnnnnnnnnnnnnnnnnnnnnnnnnnnnnnnnnnnnnnnnnnnnnnnnnnnnnnnnnnnnnnnnnnnnnnnnnnnnnnnnnnnnnnnnnnnnnnnnnnnnnnnnnnnnnnnnnnnnnnnnnnnnnnnnnnnnnnnnnnnnnnnnnnnnnnnnnnnnnnnnnnnnnnnnnnnnnnnnnnnnnnnnnnnnnnnnnnnnnnnnnnnnnnnnnnnnnnnnnnnnnnnnnnnnnnnnnnnnnnnnnnnnnnnnnnnnnnnnnnnnnnnnnnnnnnnnnnnnnnnnnnnnnnnnnnnnnnnnnnnnnnnnnnnnnnnnnnnnnnnnnnnnnnnnnnnnnnnnnnnnnnnnnnnnnnnnnnnnnnnnnnnnnnnnnnnnnnnnnnnnnnnnnnnnnnnnnnnnnnnnnnnnnnnnnnnnnnnnnnnnnnnnnnnnnnnnnnnnnnnnnnnnnnnnnnnnnnnnnnnnnnnnnnnnnnnnnnnnnnnnnnnnnnnnnnnnnnnnnnnnnnnnnnnnnnnnnnnnnnnnnnnnnnnnnnnnnnnnnnnnnnnnnnnnnnnnnnnnnnnnnnnnnnnnnnnnnnnnnnnnnnnnnnnnnnnnnnnnnnnnnnnnnnnnnnnnnnnnnnnnnnnnnnnnnnnnnnnnnnnnnnnnnnnnnnnnnnnnnnnnnnnnnnnnnnnnnnnnnnnnnnnnnnnnnnnnnnnnnnnnnnnnnnnnnnnnnnnnnnnnnnnnnnnnnnnnnnnnnnnnnnnnnnnnnnnnnnnnnnnnnnnnnnnnnnnnnnnnnnnnnnnnnnnnnnnnnnnnnnnnnnnnnnnnnnnnnnnnnnnnnnnnnnnnnnnnnnnnnnnnnnnnnnnnnnccagagcctatttgctgcagaactttaatgaagagggaacaactgagaaaccttccaaggagaaactgcaaggctttgctgctgttttggctattggctctagtaggtgcaaggcaaatactctgggnnnnnnnnnnnnnnnnnnnnnnnnnnnnnnnnnnnnnnnnnnnnnnnnnnnnnnnnnnnnnnnnnnnnnnnnnnnnnnnnnnnnnnnnnnnnnnncgcaatgcctttgccaatgacaccatcccttcagagagttatatcagtgcagtgcaggctgcacacctggggactctctgtagccaaagtctgcccctggctgcttccctgaagcacaccctcctctcactggtcaggttgactggagatcttattgtttggtccgatgagatgaacccaccacaggtcattcggaccctgctaccacttcttttggaatcaagcactgagagtgttgctgagatcagtagcaactccctggaacgtatcttgggccctgctgagtctgatgagttcttggctcgtgtttatgagaagctgatcactggttgttacaacattctggccaatcatgcagatcctaacannnnnnnnnnnnnnnnnnnnnnnnnnnnnnnnnnnnnnnnnnnnnnnnnnnnnnnnnnnnnnnnnnnnnnnnnnnnnnnnnnnnnnnnnnnnnnnnnnnnnnnnnnnnnnnnnnnnnnnnnnnnnnnnnnnnnnnnnnnnnnnnnnnnnnnnnnnnnnnnnnnnnnnnnnnnnnnnnnnnnnnnnnnnnnnnnnnnnnnnnnnnnnnnnnnnnnnnnnnnnnnnnnnnnnnnnnnnnnnnnnnnnnnnnnnnnnnnnnnnnnnnnnnnnnnnnnnnnnnnnnnnnnnnnnnnnnnnnnnnnnnnnnnnnnnnnnnnnnnnnnnnnnnnnnnnnnnnnnnnnnnnnnnnnnnnnnnnnnnnnnnnnnnnnnnnnnnnnnnnnnnnnnnnnnnnnnnnnnnnnnnnnnnnnnnnnnnnnnnnnnnnnnnnnnnnnnnnnnnnnnnnnnnnnnnnnnnnnnnnnnnnnnnnnnnnnnnnnnnnnnnnnnnnnnnnnnnnnnnnnnnnnnnnnnnnnnnnnnnnnnnnnnnnnnnnnnnnnnnnnnnnnnnnnnnnnnnnnnnnnnnnnnnnnnnnnnnnnnnnnnnnnnnnnnnnnnnnnnnnnnnnnnnnnnnnnnnnnnnnnnnnnnnnnnnnnnnnnnnnnnnnnnnnnnnnnnnnnnnnnnnnnnnnnnnnnnnnnnnnnnnnnnnnnnnnnnnnnnnnnnnnnnnnnnnnnnnnnnnnnnnnnnnnnnnnnnnnnnnnnnnnnnnnnnnnnnnnnnnnnnnnnnnnnnnnnnnnnnnnnnnnnnnnnnnnnnnnnnnnnnnnnnnnnnnnnnnnnnnnnnnnnnnnnnnnnnnnnnnnnnnnnnnatgaagattctctttgcaataaactctgcacttttacgattacacagaaagaattcatgaaccagcattggtannnnnnnnnnnnnnnnnnnnnnnnnnnnnnnnnnnnnnnnnnnnnnnnnnnnnnnnnnnnnnnnnnnnnnnnnnnnnnnnnnnnnnnnnnnnnnnnnnnnnnnnnnnnnnnnnnnnnnnnnnnnnnnnnnnnnnnnnnnnnnnnnnnnnnnnnnnnnnnnnnnnnnnnnnnnnnnnnnnnnnnnnnnnnnnnnnnnnnnnnnnnnnnnnnnnnnnnnnnnnnnnnnnnnnnnnnnnnnnnnnnnnnnnnnnnnnnnnnnnnnnnnnnnnnnnnnnnnnnnnnnnnnnnnnnnnnnnnnnnnnnnnnnnnnnnnnnnnnnnnnnnnnnnnnnnnnnnnnnnnnnnnnnnnnnnnnnnnnnnnnnnnnnnnnnnncaggccaatttctccttcgctcctctcgtgttagacatgcttaatttccttatggatgccattcagaccaacttccagcaagcttcagctgtcgggagcagcagccgtgctcagcaagccctcagtgagctgcacacagtggagaaggcagtggagatgacagaccagctgatggnnnnnnnnnnnnnnnnnnnnnnnnnnnnnnnnnnnnnnnnnnnnnnnnnnnnnnnnnnnnnnnnnnnnnnnnnnnnnnnnnnnnnnnnnnnnnnnnnnnnnnnnnnnnnnnnnnnnnnnnnnnnnnnnnnnnnnnncatgggcgccgccaacatttggctgtcagccatgagaagggcaannnnnnnnnnnnnnnnnnnnnnnnnnnnnnnnnnnnnnnnnnnnnnnnnnnnnnnnnnnnnnnnnnnnnnnnnnnnnnnnnnnnnnnnnnnnnnnnnnnnnnnnnnnnnnnnnnnnnnnnnnnnnnnnnnnnnnnnnnnnnnnnnnnnnnnnnnnnnnnnnnnnnnnnnnnnnnnnnnnnnnnnnnnnnnnnnnnnnnnnnnnnnnnnnnnnnnnnnnnnnnnnnnnnnnnnnnnnnnnnnnnnnnnnnnnnnnnnnnnnnnnnnnnnnnnnnnnnnnnnnnnnnnnnnnnnnnnnnnnnnnnnnnnnnnnnnnnnnnnnnnnnnnnnnnnnnnnnnnnnnnnnnnnnnnnnnnnnnnnnnnnnnnnnnnnnnnnnnnnnnnnnnnnnnnnnnnnnnnnnnnnnnnnnnnnnnnnnnnnnnnnnnnnnnnnnnnnnnnnnnnnnnnnnnnnnnnnnnnnnnnnnnnnnnnnnnnnnnnnnnnnnnnnnnnnnnnnnnnnnnnnnnnnnnnnnnnnnnnnnnnnnnnnnnnnnnnnnnnnnnnnnnnnnnnnnnnnnnnnnnnnnnnnnnnnnnnnnnnnnnnnnnnnnnnnnnnnnnnnnnnnnnnnnnnnnnnnnnnnnnnnnnnnnnnnnnnnnnnnnnnnnnnnnnnnnnnnnnnnnnnnnnnnnnnnnnnnnnnnnnnnnnnnnnnnnnnnnnnnnnnnnnnnnnnnnnnnnnnnnnnnnnnnnnnnnnnnnnnnnnnnnnnnnnnnnnnnnnnnnnnnnnnnnnnnnnnnnnnnnnnnnnnnnnnnnnnnnnnnnnnnnnnnnnnnnnnnnnnnnnnnnnnnnnnnnnnnnnnnnnnnnnnnnnnnnnnnnnnnnnnnnnnnnnnnnnnnnnnnnnnnnnnnnnnnnnnnnnnnnnnnnnnnnnnnnnnnnnnnnnnnnnnnnnnnnnnnnnnnnnnnnnnnnnnnnnnnnnnnnnnnnnnnnnnnnnnnnnnnnnnnnnnnnnnnnnnnnnnnnnnnnnnnnnnnnnnnnnnnnnnnnnnnnnnnnnnnnnnnnnnnnnnnnnnnnnnnnnnnnnnnnnnnnnnnnnnnnnnnnnnnnnnnnnnnnnnnnnnnnnnnnnnnnnnnnnnnnnnnnnnnnnnnnnnnnnnnnnnnnnnnnnnnnnnnnnnnnnnnnnnnnnnnnnnnnnnnnnnnnnnnnnnnnnnnnnnnnnnnnnnnnnnnnnnnnnnnnnnnnnnnnnnnnnnnnnnnnnnnnnnnnnnnnnnnnnnnnnnnnnnnnnnnnnnnnnnnnnnnnnnnnnnnnnnnnnnnnnnnnnnnnnnnnnnnnnnnnnnnnnnnnnnnnnnnnnnnnnnnnnnnnnnnnnnnnnnnnnnnnnnnnnnnnnnnnnnnnnnnnnnnnnnnnnnnnnnnnnnnnnnnnnnnnnnnnnnnnnnnnnnnnnnnnnnnnnnnnnnnnnnnnnnnnnnnnnnnnnnnnnnnnnnnnnnnnnnnnnnnnnnnnnnnnnnnnnnnnnnnnnnnnnnnnnnnnnnnnnnnnnnnnnnnnnnnnnnnnnnnnnnnnnnnnnnnnnnnnnnnnnnnnnnnnnnnnnnnnnnnnnnnnnnnnnnnnnnnnnnnnnnnnnnnnnnnnnnnnnnnnnnnnnnnnnnnnnnnnnnnnnnnnnnnnnnnnnnnnnnnnnnnnnnnnnnnnnnnnnnnnnnnnnnnnnnnnnnnnnnnnnnnnnnnnnnnnnnnnnnnnnnnnnnnnnnnnnnnnnnnnnnnnnnnnnnnnnnnnnnnnnnnnnnnnnnnnnnnnnnnnnnnnnnnnnnnnnnnnnnnnnnnnnnnnnnnnnnnnnnnnnnnnnnnnnnnnnnnnnnnnnnnnnnnnnnnnnnnnnnnnnnnnnnnnnnggatcaggccttgctgagcaaagctgtacagtgtctcaacacatccagcaaagaaggcaaggatttggaccccgaggtgttccagaggctggtgatcacagctcgctccattgccatcatgcgccccaacaaccttgtccactttacggagtcaaagctgccccagatggaaacagnagaacgaatggatgaggggaaagaaccgcacaagcagctggaaggagattgctgtagtttcatcacccagcttgtgaaccacttctggaaactccatgcatctaaacccaagaatgccttcttggcacctgcctgccttccaggnntaactcatattgaagctactgtcaatgctctggtggacatcatccatggctactgcacctgtgagctggattgtattaacacagcatccaagatctacatgcagatgctcttgtgtcctnnnnnnnnnnnnnnnnnnnnnnnnnnnnnnnnnnnnnnnnnnnnnnnnnnnnnnnnnnnnnnnnnnnnnnnnnnnnnnnnnnnnnnnnnnnnnnnnnnnnnnnnnnnnnnnnnnnnnnnnnnnnnnnnnnnnnnnnnnnnnnnnnnnnnnnnnnnnnnnnnnnnnnnnnnnnnnnnnnnnnnnnnnnnnnnnnnnnnnnnnnnnnnnnnnnnnnnnnnnnnnnnnnnnnnnnnnnnnnnnnnnnnnnnnnnnnnnnnnnnnnnnnnnnnnnnnnnnnnnnnnnnnnnnnnnnnnnnnnnnnnnnnnnnnnnnnnnnnnnnnnnnnnnnnnnnnnnnnnnnnnnnnnnnnnnnnnnnnnnnnnnnnnnnnnnnnnnnnnnnnnnnnnnnnnnnnnnnnnnnnnnnnnnnnnnnnnnnnnnnnnnagcagcagcagtgccctgggcctgcagagcctgggactgtccggccaggcaccccagctcttcctctctggacgcaggaaccctctctgacaccacagcatcagnnnnnnnnnnnnnnnnnnnnnnnnnnnnnnnnnnnnnnnnnnnnnnnnnnnnnnnnnnnnnnnnnnnnnnnnnnnnnnnnnnnnnnnnnnnnnnnnnnnnnnnnnnnnnnnnnnnnnnnnnnnnnnnnnnnnnnnnnnnnnnnnnnnnnnnnnnnnnnnnnnnnnnnnnnnnnnnnnnnnnnnnnnnnnnnnnnnnnnnnnnnnnnnnnnnnnnnnnnnnnnnnnnnnnnnnnnnnnnnnnnnnnnnnnnnnnnnnnnnnnnnnnnnnnnnnnnnnnnnnnnnnnnnnnnnnnnnnnnnnnnnnnnnnnnnnnnnnnnnnnnnnnnnnnnnnnnnnnnnnnnnnnnnnnnnnnnnnnnnnnnnnnnnnnnnnnnnnnnnnnnnnnnnnnnnnnnnnnnnnnnnnnnnnnnnnnnnnnnnnnnnnnnnnnnnnnnnnnnnnnnnnnnnnnnnnnnnnnnnnnnnnnnnnnnnnnnnnnnnnnnnnnnnnnnnnnnnnnnnnnnnnnnnnnnnnnnnnaggatgtctccaagaagaatgagcgcagcgccctgaatgaagtccatctggtagtaatgagactcctgagtgtcttcatgtcccgcaccaaatctggatccaagtcttccatatgtgannnnnnnnnnnnnnnnnnnnnnnnnnnnnnnnnnnnnnnnnnnnnnnnnnnnnnnnnnnnnnnnnnnnnnnnnnnnnnnnnnnnnnnnnnnnnnnnnnnnnnnnnnnnnnnnnnnnnnnnnnnnnnnnnnnnnnnnnnnnnnnnnnnnnnnnnnnnnnnnnnnnnnnnnnnnnnnnnnnnnnnnnnnnnnnnnnnnnnnnnnnnnnnnnnnnnnnnnnnnnnnnnnnnnnnnnnnnnnnnnnnnnnnnnnnnnnnnnnnnnnnnnnnnnnnnnnnnnnnnnnnnnnnnnnnnnnnnnnnnnnnnnnnnnnnnnnnnnnnnnnnnnnnnnnnnnnnnnnnnnnnnnnnnnnnnnnnnnnnnnnnnnnnnnnnnnnnnnnnnnnnnnnnnnnnnnnnnnnnnnnnnnnnnnnnnnnnnnnnnnnnnnnnnnnnnnnnnnnnnnnnnnnnnnnnnnnnnnnnnnnnnnnnnnnnnnnnnnnnnnnnnnnnnnnnnnnnnnnnnnnnnnnnnnnnnnnnnnnnnnnnnnnnnnnnnnnnnnnnnnnnnnnnnnnnnnnnnnnnnnnnnnnnnnnnnnnnnnnnnnnnnnnngatggagcacctgaaagcctgtgcagagattgccgcccagcgaaccatcaactggcagaaattctgcatcaaagacgacccgtcctgtacttcctcctccaagtcagtttccttgtggacgagggcgtgtctccagtgctgctgcaactgctctcctgtgctctgtgtggcagcaaagtgctcgctgcactggcagcctctgcgggatcctccagtgcttcttcctcctcagcccctgtggctgccagttccggacaagccacaacacagtccaagtcttccactnnnnnnnnnnnnnnnnnnnnnnnnnnnnnnnnnnnnnnnnnnnnnnnnnnnnnnnnnnnnnnnnnnnnnnnnnnnnnnnnnnnnnnnnnnnnnnnnnnnnnnnnnnnnnnnnnnnnnnnnnnnnnnnnnnnnnnnnnnnnnnnnnnnnnnnnnnnnnnnnnnnnnnnnnnnnnnnnnnnnnnnnnnnnnnnnnnnnnnnnnatctacagaaattccagcaaatctcagcaggagctcctgctagatctgatgtggtccatctggccagaactcccagcctatggtcgtaaggctgcccagtttgtggacctactaggatatttctccctgaaaacgccacaaacggagaagaannnnnnnnnnnnnnnnnnnnnnnnnnnnnnnnnnnnnnnnnnnnnnnnnnnnnnnnnnnnnnnnnnnnnnnnnnnnnnnnnnnnnnnnnnnnnnnnnnnnnnnnnnnnnnnnnnnnnnnnnnnnnnnnnnnnnnnnnnnnnnnnnnnnnnnnnnnnnnnnnnnnnnnnnnnnnnnnnnnnnnnnnnnnnnnnnnnnnnnnnnnnnnnnnnnnnnnnnnnnnnnnnnnnnnnnnnnnnnnnnnnnnnnnnnnnnnnnnnnnnnnnnnnnnnnnnnnnnnnnnnnnnnnnnnnnnnnnnnnnnnnnnnnnnnnnnnnnnnnnnnnnnnnnnnnnnnnnnnnnnnnnnnnnnnnnnnnnnnnnnnnnnnnnnnnnnnnnnnnnnnnnnnnnnnnnnnnnnnnnnnnnnnnnnnnnnnnnnnnnnnnnnnnnnnnnnnnnnnnnnnnnnnnnnnnnnnnnnnnnnnnnnnnnnnnnnnnnnnnnnnnnnnnnnnnnnnnnnnnnnnnnnnnnnnnnnnnnnnnnnnnnnnnnnnnnnnnnnnnnnnnnnnnnnnnnnnnnnnnnnnnnnnnnnnnnnnnnnnnnnnnnnnnnnnnnnnnnnnnnnnnnnnnnnnnnnnnnnnnnnnnnnnnnnnnnnnnnnnnnnnnnnnnnnnnnnnnnnnnnnnnnnnnnnnnnnnnnnnnnnnnnnnnnnnnnnnnnnnnnnnnnnnnnnnnnnnnnnnnnnnnnnnnnnnnnnnnnnnnnnnnnnnnnnnnnnnnnnnnnnnnnnnnnnnnnnnnnnnnnnnnnnnnnnnnnnnnnnnnnnnnnnnnnnnnnnnnnnnnnnnnnnnnnnnnnnnnnnnnnnnnnnnnnnnnnnnnnnnnnnnnnnnnnnnnnnnnnnnnnnnnnnnnnnnnnnnnnnnnnnnnnnnnnnnnnnnnnnnnnnnnnnnnnnnnnnnnnnnnnnnnnnnnnnnnnnnnnnnnnnnnnnnnnnnnnnnnnnnnnnnnnnnnnnnnnnnnnnnnnnnnnnnnnnnnnnnnnnnnnnnnnnnnnnnnnnnnnnnnnnnnnnnnnnnnnnnnnnnnnnnnnnnnnnnnnnnnnnnnnnnnnnnnnnnnnnnnnnnnnnnnnnnnnnnnnnnnnnnnnnnnnnnnnnnnnnnnnnnnnnnnnnnnnnnnnnnnnnnnnnnnnnnnnnnnnnnnnnnnnnnnnnnnnnnnnnnnnnnnnnnnnnnnnnnnnnnnnnnnnnnnnnnnnnnnnnnnnnnnnnnnnnnnnnnnnnnnnnnnnnnnnnnnnnnnnnnnnnnnnnnnnnnnnnnnnnnnnnnnnnnnnnnnnnnnnnnnnnnnnnnnnnnnnnnnnnnnnnnnnnnnnnagacaacccagaagccactcagcagatgaatgacctgattattggcaaggtctccacagccctgaagggccactgggccaacccnnnnnnnnnnnnnnnnnnnnnnnnnnnnnnnnnnnnnnnnnnnnnnnnnnnnnnnnnnnnnnnnnnnnnnnnnnnnnnnnnnnnnnnnnnnnnnnnnnnnnnnnnnnnnnnnnnnnnnnnnnnnnnnnnnnnnnnnnnnnnnnnnnnnnnnnnnnnnnnnnnnnnnnnnnnnnnnnnnnnnnnnnnnnnnnnnnnnnnnnnnnnnnnnnnnnnnnnnnnnnnnnnnnnnnnnnnnnnnnnnnnnnnnnnnnnnnnnnnnnnnnnnnnnnnnnnnnnnnnnnnnnnnnnnnnnnnnnnnnnnnnnnnnnnnnnnnnnnnnnnnnnnnnnnnnnnnnnnnnnnnnnnnnnnnnnnnnnnnnnnnnnnnnnnnnnnnnnnnnnnnnnnnnnnnnnnnnnnnnnnnnnnnnnnnnnnnnnnnnnnnnnnnnnnnnnnnnnnnnnnnnnnnnnnnnnnnnnnnnnnnnnnnnnnnnnnnnnnnnnnnnnnnnnnnnnnnnnnnnnnnnnnnnnnnnnnnnnnnnnnnnnnnnnnnnnnnnnnnnnnnnnnnnnnnnnnnnnnnnnnnnnnnnnnnnnnnnnnnnnnnnnnnnnnnnnnnnnnnnnnnnnnnnnnnnnnnnnnnnnnnnnnnnnnnnnnnnnnnnnnnnnnnnnnnnnnnnnnnnnnnnnnnnnnnnnnnnnnnnnnnnnnnnnnnnnnnnnnnnnnnnnnnnnnnnnnnnnnnnnnnnnnnnnnnnnnnnnnnnnnnnnnnnnnnnnnnnnnnnnnnnnnnnnnnnnnnnnnnnnnnnnnnnnnnnnnnnnnnnnnnnnnnnnnnnnnnnnnnnnnnnnnnnnnnnnnnnnnnacaggccttctctcctcctttgttgaggtggaatctatcaaaagacactttaaaagtcgcttggtgggtactgtgctgaatggatacctgtgcttgcggaagctggtggttcagaggaccaagctgatcgatgagacgcaggacatgctgctggagatgctggaggacatgaccacaggtnnnnnnnnnnnnnnnnnnnnnnnnnnnnnnnnnnnnnnnnnnnnnnnnnnnnnnnnnnnnnnnnnnnnnnnnnnnnnnnnnnnnnnnnnnnnnnnnnnnnnnnnnnnnnnnnnnnnnnnnnnnnnnnnnnnnnnnnnnnnnnnnnnnnnnnnnnnnnnnnnnnnnnnnnnnnnnnnnnnnnnnnnnnnnnnnnnnnnnnnnnnnnnnnnnnnnnnnnnnnnnnnnnnnnnnnnnnnnnnnnnnnnnnnnnnnnnnnnnnnnnnnnnnnnnnnnnnnnnnnnnnnnnnnnnnnnnnnnnnnnnnnnnnnnnnnnnnnnnnnnnnnnnnnnnnnnnnnnnnnnnnnnnnnnnnnnnnnnnnnnnnnnnnnnnnnnnnnnnnnnnnnnnnnnnnnnnnnnnnnnnnnnnnnnnnnnnnnnnnnnnnnnnnnnnnnnnnnnnnnnnnnnnnnnnnnnnnnnnnnnnnnnnnnnnnnnnnnnnnnnnnnnnnnnnnnnnnnnnnnnnnnnnnnnnnnnnnnnnnnnnnnnnnnnnnnnnnnnnnnnnnnnnnnnnnnnnnnnnnnnnnnnnnnnnnnnnnnnnnnnnnnnnnnnnnnnnnnnnnnnnnnnnnnnnnnnnnnnnnnnnnnnnnnnnnnnnnnnnnnnnnnnnnnnnnnnnnnnnnnnnnnnnnnnnnnnnnnnnnnnnnnnnnnnnnnnnnnnnnnnnnnnnnnnnnnnnnnnnnnnnnnnnnnnnnnnnnnnnnnnnnnnnnnnnnnnnnnnnnnnnnnnnnnnnnnnnnnnnnnnnnnnnnnnnnnnnnnnnnnnnnnnnnnnnnnnnnnnnnnnnnnnnnnnnnnnnnnnnnnnnnnnnnnnnnnnnnnnnnnnnnnnnnnnnnnnnnnnnnnnnnnnnnnnnnnnnnnnnnnnnnnnnnnnnnnnnnnnnnnnnnnnnnnnnnnnnnnnnnnnnnnnnnnnnnnnnnnnnnnnnnnnnnnnnnnnnnnnnnnnnnnnnnnnnnnnnnnnnnnnnnnnnnnnnnnnnnnnnnnnnnnnnnnnnnnnnnnnnnnnnnnnnnnnnnnnnnnnnnnnnnnnnnnnnnnnnnnnnnnnnnnnnnnnnnnnnnnnnnnnnnnnnnnnnnnnnnnnnnnnnnnnnnnnnnnnnnnnnnnnnnnnnnnnnnnnnnnnnnnnnnnnnnnnnnnnnnnnnnnnnnnnnnnnnnnnnnnnnnnnnnnnnnttggatgctgacatctggaaaaagtttttgtctcgcccagccttgccgtttatcctgaggctgcttcggggcctggccatgcagcaccctgccacccaggtnnnnnnnnnnnnnnnnnnnnnnnnnnnnnnnnnnnnnnnnnnnnnnnnnnnnnnnnnnnnnnnnnnnnnnnnnnnnnnnnnnnnnnnnnnnnnnnnnnnnnnnnnnnnnnnnnnnnnnnnnnnnnnnnnnnnnnnnnnnnnnnnnnnnnnnnnnnnnnnnnnnnnnnnnnnnnnnnnnnnnnnnnnnnnnnnnnnnnnnnnnnnnnnnnnnnnnnnnnnnnnnnnnnnnnnnnnnnnnnnnnnnnnnnnnnnnnnnnnnnnnnnnnnnnnnnnnnnnnnnnnnnnnnnnnnnnnnnnnnnnnnnnnnnnnnnnnnnnnnnnnnnnnnnagcccacaaaggtcctgggcatttataccttcacgaagcgggtagccttggaggagatggagaataagccccggaaacagcagggctacagcaccgtgtcccacttcaacattgtgcactacgactgccacctggctgctgtcaggt

SEQ ID NO: 25207 - DNA, 243 bp, Macaca Mulatta
caggttacaatgagtggagggagttctgtggcctgcctcgcctggagacccccgctgacctgagcacagccatcgccagcaggagcgtggccgacaagatcctggacttgtacaagcatcctgacaacatcgacgtctggctgggaggcttagctgaaaacttcctccccagggctcggacaggccccctgtttgcctgtctcattgggaagcagatgaaggctctgcgggacggagactggt

SEQ ID NO: 25208 - DNA, 335 bp, Macaca Mulatta
  misc_feature (1)...(335): n = A,T,C or G
gagcggactacggggaggagtgtgaagattatacaagcagattttaccaaagatgacatctacgagcatattaaagaaaaacttacaggcttagaaattggaattttagnnnnnnnnnnnnnnnnnnnnnnnnnnnnnnnnnnnnnnnnnnnnnnnnnnnnnnnnnnnnnnnnnnnnnnnnnnnnnnnnnnnnnnnnnnnnnnnnnnnnnnagatgacacagctaattctgaaacatatggaatcaaggnaggcggaaaggtctcatcctgaacatttcttccgggatagccctgtttccttggcctctctactccatgtactcagcttccaagg

SEQ ID NO: 25209 - DNA, 962 bp, Macaca Mulatta
  misc_feature (1)...(962): n = A,T,C or G
agagggagcagtgaacagtgatagggtgtttccaccatggtcgtcactcaggccccggctggaatcaggggccacctccggatccgcagcctcctggcccggcagtgcctggcagagtttctgggtgtgtttgtgctcatgnnnnnnnnnnnnnnnnnnnnnnnnnnnnnnnnnnnnnnnnnnnnnnnnnnnnnnnnnnnnnnnnnnnnnnnnnnnnnnnnnnnnnnnnnnnnnnnnnnnnnnnnnnnnnnnnnnnnnnnnnnnnnnnnnnnnnnnnnnnnnnnnnnnnnnnnnnnnnnnnnnnnnnnnnnnnnnnnnnnnnnnnnnnnnnnnnnnnnnnnnnnnnnnnnnnnnnnnnnnnnnnnnnnnnnnnnnnnnnnnnnnnnnnnnnnnnnnnnnnnnnnngatgccctacagaactatacaggtgggaacctgacagtgactggccccaaggaaacagcctccatttttgccacctatcctgccccctatctgtccctgaacaacggcttcctggatcaggtnaggttctgggcaccggtatgctgatggtggggctcttagccatcctggacagacggaacaagggagtccctgcgggtctggagcctgtggtggtggggatgctgatcctggccatcgggttatccatgggtgccaactgtgggtttccactcaaccctgcccgggacttgggcccacgtctcttcacctacgtggctggctggggtcctgaagtcttcaggtgggagatagcctcccctggtgctggcctccactcaccttcctctgctaagggctctgtccctgggtccacagcactcagcctttaaatagctctcttggcctcttaggacagtgttctttctccaagtcacatgctccccctttctcccttgcttccctcccaacttttcactgaaatagtaagatttagaggttggtcttaggcatgccac

SEQ ID NO: 25210 - DNA, 203 bp, Macaca Mulatta
  misc_feature (1)...(203): n = A,T,C or G
ttggcttgagacacatgacccaaacgtagaatggagtacctgccttgtggcctttccatcacgtnnnnnnnctacaattacttcaagcacaggtggaatagaagaaatcttgatgaaataattgctggctagatcgtgcgtcctagtgattgttcctggcaccctgtcttctgttacctcagctgtcatcagcatttactgct

SEQ ID NO: 25211 - DNA, 949 bp, Macaca Mulatta
  misc_feature (1)...(949): n = A,T,C or G
gggctcttttccgtggcgcctcggaggcgttcagctgcttcaagatgaagctgaacatctccttcccagccactggctgccagaaactcattgaagtggacgatgaacgcaaacttcgtactttttatgagaagcgtatggccacagaagttgctgctgacgctctgggtgaagaatggaagggttatgtggtccgaatcagtggtgggaacgacaaacaaagtttccccatgaaacaaggtgtcttggcccctggccgtgtccgcctgctactgagtaaaggggcttcctgtttcagaccaaggagaacgggnnnnnnnnnnnnnnnnnnncgtttcgtgggttgcattgtgggatgcccaatctggagcgttcctccacctgggtttattgtgtaaaaaaaggagaagaaaggatatttcccgggacgggaatgaaacatacacatttcctccccccccccgggggccccctaaaaaagcttggccgaaatcccccaaacacttttcaattctccnnnnnnnnnnnnnnnnnnnnnnnnnncccccccaccttggtttgtttaaaaaaacccccttcttcttatataaaggggaggtaaaaacccagggaagccaagctcaccccaccaattttgctcggtccttggtttatttccccatgggtcctggggagataccaaacaggggggggcggatattctctccgttaagaaaacacccgttacttatgataaaataacacagggtgaagagaggggtgcccgaaaaatgggccctcaaacatttttttggtcgccccgcggaaattgaggggcgggccctatctggataaagacccccccatgggaaaaaagctggtcgaatgaacagttacgtagaagattccctcttcttttcggcgagggtggggtatacgtgttaataaagtacggagacatccgagccgt

SEQ ID NO: 25212 - DNA, 190 bp, Macaca Mulatta
caggaattgcagcgagaaaacactttcttacgtgcacagtttgcacagaagacagaagccttgagcagagaaaagattgaccttgaaaagaaactctctgcttctgaagttgaagtccagctcatcagagagtcgctcaaagtggcgctgcagaagcattctgaggaagtgaagaaacaggaagaaaggg

SEQ ID NO: 25213 - DNA, 674 bp, Macaca Mulatta
ctgtggctttatttcttgggagagggagaatgatgagaatttctcattaaaaggaggcttgctatattgggcacactgaaaattgtggtcccagtctgatacagccccctcacatctgcttgcctccagcaactccaacatatgtagtattgatcagaagataaatgaagagttgaaacctggttctgtatattgtgtattgatcttgttatgtattttcagctgttctggaagagataccgaaattcagtctttgctgtcactttctgagagcagtacagatgatgaggaggaagattttctcaacaagcaacatgtcattacactaccatggtcaaagagtacttaatgattatttgttgattactttttccatttggtacccagagtaaagcaaacaactgagaaaagtaaccaagtgattacctgtccaagtgctggagattttgattattaatgtctctgaagtttcaaggctacaaactaataaaagtaaaattataagttcaagggcttattcttccaatgatatattatatgtcaactactaatctatttcgtagattatattagtaaaatatggtgaatttgaagaaataactgttataactgtgtctataaaacctactatagggcagaacatgattatacttaaagtaatatttcattgtcca

SEQ ID NO: 25214 - DNA, 1056 bp, Macaca Mulatta
  misc_feature (1)...(1056): n = A,T,C or G
ggggctcttttcccggctggaaccatggagggtgcggaagagaagaagaaggttcctgctgtgccagaaacccttaagaaaaagcgaaggaatttcgcagagctgaagataaagcgcctgagaaagaagtttgcccaaaagatgcttcgaaaggcaaggaggaagcttatctatgaaaaagcgaagcactatcacaaggaatataggcagatgtacagaactgaaattcgaatggcgaggatggcaagaaaagctggcaacttctatgtacctgctgaacccaaattggcgtttgtcatcaggatcagaggtatcaatggcgtgagcccaaaggtccgaaaggtattgcagtttttgcgccttcgtcaaatcttcaatggaacctttgtgaagctcaacaaggcttccaattaacatgctgaaggattgtagaagccataatatatgccatgggggagtacccccaatcctggaaagtcaagataaaatggaaaccttagttctaatcaaacgggagggagtttaatggggccccaataatcacactatcagggaaaggtccggaaattatggccctttatggcctccagggaatagaaacactcccctttttgtggaaaatttgtggccctccccccggaaaatcatcttttttatgcggggttaaaaaaaattatatgtgtgagctaaaataccgaatatcacttgcaagaaagatgggtggaaggggggtaattttcccggaagtcttttcccgtacgtgaaagacggaattcctttcataatcctcagcggtnnnnnnnnnnnnnnnnnnnnnatccttttgtccagtaaaggaaagggcgccacacaatataaacaccttttaccaccgagattggggcctcactattttatgagagagttaatatcccttccactccccacaaataaatggtagggataaaatttgttaccattacaatataaggtatgctacccccacaactatatgtgtctaaataaagaggttgggtaatttattctcttgggccccaatatgtggacaaaggaaac

SEQ ID NO: 25215 - DNA, 675 bp, Macaca Mulatta
tgattgatttatttttttagtaagcattgacttaagtataagaacttaaaatagattattttttgtaattctctttggacctttttatgtttctactatgctggcatcctcaaaagctggaagaggcctgagcctctcagacctcttacctctgagaggtgagagaagtaaaatccaccagccaggctggccctaacatcctcatgggaagcctagttggaaacatcccagaagaatactgcctcaggtttccaaggcccatggggtgggatcagaatacctaaagaataagaattatgctttaagagttttatttgtttttcagggaaagtgtttctgtgctgcaggtaacaaagcactcagcgagattaatatagagatctacttctcagaagtattgcagcttcggtgcagcaagtcagtagtctggtttgttcctgtgagtctcttgtgtgttcatcctcggacataaggtcctcaaggttcatccatgctgtagcatatgacaggaattctttcctttttaggctaagattccattgtatgtatataccacatttcttgatctattcattcactgatggacatttgaatcacctctacatcttggctgttgtgaacaatctcagtaaccttcaagttaatagggattttaaagtgccttatacatatgca

SEQ ID NO: 25216 - DNA, 660 bp, Macaca Mulatta
caaatccgcaaacagatcatatcaataatccctttgttttcaaacacattagtaacctcaagagcatggatcattttgatgacattggtcccagtgttgtcatggcctccccaggcatgatgcaaagtggcttatccagagagttatttgaaagctggtgtactgataagaggaacggtgtcattatagcaggatactgcgtggaagggacacttgccaagcacatcatgtctgaacctgaagaaatcactactatgtctggacagaagttaccactgaaaatgtctgttgattacatttctttctcagctcacacggattaccagcaaaccagtgaatttattcgtgctttgaaaccgcctcatgtgattttagtccatggagaacagaacgaaatggccagattgaaagcagcactgattcgagaatatgaagataatgatgaagttcacatagaggttcataatcctcggaatacagaagcagtgaccttaaacttcagaggagaaaaactagcccaggttatgggatttttagcagacaaaaaaccagaacaaggccagcgggtctcaggaatacttgttcaaagaaactttaattatcacatactttctccttgcgaactgtccaattatactgacttggcaatgagcactgtaa

SEQ ID NO: 25217 - DNA, 326 bp, Macaca Mulatta
  misc_feature (1)...(326): n = A,T,C or G
ctggaagagtggctggaatgtctttgactttgttgttaccatgttnnnnnnnnnnnnnnnnnnnnnnnnnnnnnnnnnnnnnnnnnnnnnnnnnnnnnnnnnnnnnnnnnnnnnnnnnnnnnnnnnnnnnnnnnnnnnnnnnnnnnnnnnnnnnnnnnnnnnnnnnnnnnnnnnnnnnnnnnnnnnnnnnnnnncctctagagcatgaccttcctcttgatgttgctgctcatcttcttctacatttttgctgtgactggtgtctacttcttctcagactacacccgttcacctcgtcaggacctggagtaccatgtgttcttctc

SEQ ID NO: 25218 - DNA, 285 bp, Macaca Mulatta
gagtaataaaatgtcaccgacagggagcctctgagcctactctagttcaacaggctgcctaaaaaaaataaataagataaagggtcagcaacaacaaagaaaaaggacagttacagaaaataagcaagatttggaaaggaagtataatggcatttttttctcaaaggaagttcttgttttcacgtcaaatacgaaaagcagatcctgcaggagtaatccccttctttaagagccaagtattcgcccgtgcttaaattacaccatacagttctaattgtatataat

SEQ ID NO: 25219 - DNA, 3134 bp, Macaca Mulatta
  misc_feature (1)...(3134): n = A,T,C or G
ggtctcatatcttttgggtgaacagaagtctacctttgtggggcttacaggttnnnnnnnnnnnnnnnnnnnnnnnnnnnnnnnnnnnnnnnnnnnnnnnnnnnnnnnnnnnnnnnnnnnnnnnnnnnnnnnnnnnnnnnnnnnnnnnnnnnnnnnnnnnnnnnnnnnnnnnnnnnnnnnnnnnnatattctggccttccttaaggaatctatttgtcccagtctttctgaactgttggcttgccaaacatgccttggaaaatatgattnnnnnnnnnnnnnnnnnnnnnnnnnnnnnnnnnnnnnnnnnnnnnnnnnnnnnnnnnnnnnnnnnnnnnnnnnnnnnnnnnnnnnnnnnnnnnnnnnnnnnnnnnnnnnnnnnnnnnnnnnnnnnnnnnnnnnnnnnnnnnnnnnnnnnnnnnnnnnnnnnnnnnnnnnnnnnnnnnnnnnnnnnnnnnnnnnnnnnnnnnnnnnnnnnnnnnnnnnnnnnnnnnnnnnnnnnnnnnnnnnnnnnnnnnnnnnnnnnnnnnnnnnnnnnnnnnnnnnnnnnnnnnnnnnnnnnnnnnnnnnnnnnnnnnnnnnnnnnnnnnnnnnnnnnnnnnnnnnnnnnnnnnnnnnnnnnnnnnnnnnnnnnnnnnnnnnnnnnnnnnnnnnnnnnnnnnnnnnnnnnnnnnnnnnnnnnnnnnnnnnnnnnnnnnnnnnnnnnnnnnnnnnnnnnnnnnnnnnnnnnnnnnnnnnnnnnnnnnnnnnnnnnnnnnnnnnnnnnnnnnnnnnnnnnnnnnnnnnnnnnnnnnnnnnnnnnnnnnnnnnnnnnnnnnnnnnnnnnnnnnnnnnnnnnnnnnnnnnnnnnnnnnnnnnnnnnnnnnnnnnnnnnnnnnnnnnnnnnnnnnnnnnnnnnnnnnnnnnnnnnnnnnnnnnnnnnnnnnnnnnnnnnnnnnnnnnnnnnnnnnnnnnnnnnnnnnnnnnnnnnnnnnnnnnnnnnnnnnnnnnnnnnnnnnnnnnnnnnnnnnnnnnnnnnnnnnnnnnnnnnnnnnnnnnnnnnnnnnnnnnnnnnnnnnnnnnnnnnnnnnnnnnnnnnnnnnnnnnnnnnnnnnnnnnnnnnnnnnnnnnnnnnnnnnnnnnnnnnnnnagaaggccagcaatcgccagaacaatggcagaagatgtacggtagatgctctgggaatgaagtctaccacattgttttggaagaaagtacattttttgctgaatatgaaggaaagagttttacatatgcctctttccatgcacacaaaaagtnnnnnnnnnnnnnnnnnnnnnnnnnnnnnnnnnnnnnnnnnnnnnnnnnnnnnnnnnnnnnnnnnnnnnnnnnnnnnnnnnnnnnnnnnnnnnnnnnnnnnnnnnnnnnnnnnnnnnnnnnnnnnnnnnnnnnnnnnnnnnnnnnnnnnnnnnnnnnnnnnnnnnnnnnnnnnnnnnnnnnnnnnnnnnnnnnnnnnnnnnnnnnnnnnnnnnnnnnnnnnnnnnnnnnnnnnnnnnnnnnnnnnnnnnnnnnnnnnnnnnnnnnnnnnnnnnnnnnnnnnnnnnnnnnnnnnnnnnnnnnnnnnnnnnnnnnnnnnnnnnnnnnnnnnnnnnnnnnnnnnnnnnnnnnnnnnnnnnnnnnnnnnnnnnnnnnnnnnnnnnnnnnnnnnnnnnnnnnnnnnnnnnnnnnnnnnnnnnnnnnnnnnnnnnnnnnnnnnnnnnnnnnnnnnnnnnnnnnnnnnnnnnnnnnnnnnnnnnnnnnnnnnnnnnnnnnnnnnnnnnnnnnnnnnnnnnnnnnnnnnnnnnnnnnnnnnnnnnnnnnnnnnnnnnnnnnnnnnnnnnnnnnnnnnnnnnnnnnnnnnnnnnnnnnnnnnnnnnnnnnnnnnnnnnnnnnnnnnnnnnnnnnnnnnnnnnnnnnnnnnnnnnnnnnnnnnnnnnnnnnnnnnnnnnnnnnnnnnnnnnnnnnnnnnnnnnnnnnnnnnnnnnnnnnnnnnnnnnnnnnnnnnnnnnnnnnnnnnnnnnnnnnnnnnnnnnnnnnnnnnnnnnnnnnnnnnnnnnnnnnnnnnnnnnnnnnnnnnnnnnnnnnnnnnnnnnnnnnnnnnnnnnnnnnnnnnnnnnnnnnnnnnnnnnnnnnnnnnnnnnnnnnnnnnnnnnnnnnnnnnnnnnnnnnnnnnnnnnnnnnnnnnnnnnnnnnnnnnnnnnnnnnnaggttgttttccagtctcagtattatcacagagctaactcacccagccaacatgagattcatgcaattcagagccaaagactgttattctcttgcttcttcaaaactggaaaagnnnnnnnnnnnnnnnnnnnnnnnnnnnnnnnnnnnnnnnnnnnnnnnnnnnnnnnnnnnnnnnnnnnnnnnnnnnnnnnnnnnnnnnnnnnnnnnnnnnnnnnnnnnnnnnnnnnnnnnnnnnnnnnnnnnnnnnnnnnnnnnnnnnnnnnnnnnnnnnnnnnnnnnnnnnnnnnnnnnnnnnnnnnnnnnnnnnnnnnnnnnnnnnnnnnnnnnnnnnnnnnnnnnnnnnnnnnnnnnnnnnnnnnnntcttctactggagatgttcccattggaatctacaggactgagtctcagaaacttactacatctgagnnnnnnnnnnnnnnnnnnnnnnnnnnnnnnnnnnnnnnnnnnnnnnnnnnnnnnnnnnnnnnnnnnnnnnnnnnnnnnnnnnnnnnnnnnnnnnnnnnnnnnnnnnnnnnnnnnnnnnnnnnnnnnnnnnnnnnnnnnnnnnnnnnnnnnnnnnnnnnnnnnnnnnnnnnnnnnnnnnnnnnnnnnnnnnnnnnnnnnnnnnnnnnnnnnnnnnnnnnnnnnnnnnnnnnnnnnnnnnnnnnnnnnnnnnnnnnnnnnnnnnnnnnnnnnnnnnnnnnnnnnnnnnnnnnnnnnnnnnnnnnnnnnnnnnnnnnnnnnnnnnnnnnnnnnnnnnnnnnnnnnnnnnnnnnnnnnnnnnnnnnnnnnnnnnnnnnnnnnnnnnnnnnatacttaattcgaccagatccattggcctaccttccaaacagtgagcctagtcgaagaaacagcatctgcaatgtcactggtcaagattctcgtgaggaaactcaactttga

SEQ ID NO: 25220 - DNA, 245 bp, Macaca Mulatta
ataccaggattcacctgggccccgtgaggctgtgagccagctccgagaactttgccgtctgtggctcaggccagagacgcacacaaaagagcaaatcttggagctggtagtgctggagcagtttgttgccatcctacccaaagagctacagacttgggttcgagatcatcatccagagaatggagaggaggcagtgacagtgctggaggatttggagagtgaacttgatgaccctggacaaccgg

SEQ ID NO: 25221 - DNA, 393 bp, Macaca Mulatta
tttataactatatgacaatgacttcctcaagcccaaggccttatcttcaccccacgaacaataaagcaaagtaaagaacccggtgatcttcttggaaagaggagaggtgggaggggctgggatgcccctgggggctccagagaccgcagtcctgaaggctggggctagaggttggatgcatgggaatgggtggcatggaggtgatggccattcagactggcagcgggcaggcgaggggcacaagggagccagggaatgagggagtgagcaaaagtcgctgggctccccctgggttgcaaggcttcccggtctccctgcctgccctggggttgagggtggcgttcgtgccctgcctggcacctctcactgcacagcacatgggatctggtgctg

SEQ ID NO: 25222 - DNA, 286 bp, Macaca Mulatta
tcctcactcctcagacaaacccagacatgcccaaggtttgatgttatcttcattgtcatatcctttccagggtttccttttgatttccaccgacctgaagtatgaaacatcctcaaagcagcagccaagtttccatggttgggattttctgaacctgataagtggacagtggagggggaagtcagccccttgattgccagtttgcaattcaccccgggaagtaaatggtccttaaccccacaactactgtaaacccagaaggggaagacagtatacactggaattg

SEQ ID NO: 25223 - DNA, 221 bp, Macaca Mulatta
gtgccagcctggagacagccattgctgatgctgagcagcggggagataatgccctgaaggacgcccgggccaagctggacgagctggagggcgccctgcaccaggccaaggaggagctggcacggatgctgcgcgagtaccaggagctcatgagcctgaaactggccctggacatggagatcgccacctaccgcaagctgctggagggcgaggagtgcagg

SEQ ID NO: 25224 - DNA, 329 bp, Macaca Mulatta
gatgttgtgtcaggcgtcatttaaatattttcagtcagcagaggaagcaaagcgtgccattgaggctgtgctgtcagcggatcctcggtctgtgtaccgccggaagctttgccaagaccgccttttctactttaccatagacatagcgcatgtcacttgctggtttggtgatggctttgcagaggttctcaggatcaagccggcttctgagcctgtttatatgatggaccctgtggggtccttggtgtctctagggtcttaaggagcctccctcatgtctttaagatagcatcattgttttttggatgtggcttttgtattttctgaac

SEQ ID NO: 25225 - DNA, 561 bp, Macaca Mulatta
actcacccccacccctgctggcctctccccgcgctcaggacacgagacccagccatctctgcctctcctgcagtcactttattgccttcggccctgaatgaagcccacgaacggcggccccggggagagccggggatggccaccatgcccctcagccagccgctgccctgggcctgccctgcagacgtgcgactctgccgccacctgcgcgcagacccgccgcgtcccgagtcttctgagagcgatcagaagtttcgggcgggccgggcacggccccagctcagcctaagcctggcgggcgcgtgacaagcgcgcagacgcgccagcaccacctgatcctcctctacacccacgacaacagcctgcgcgtggcggcggcaggcgaggcggagcagcaggcgtgatacaacgccctgctcgaggcgcgcggtgccgcccgagccctgggttgccggggaccccgggggcttgtggctgtggtttctccgtggctcgcccctgccccaggtcaccgaaagttcaaacattaaagggtttgcatgtttagagttctccgggcac

SEQ ID NO: 25226 - DNA, 605 bp, Macaca Mulatta
  misc_feature (1)...(605): n = A,T,C or G
caaaatctgaaatgctccagtgagcatttcttttgagcatcacgttggcatttgaaaaagctannnnnnnnnnnnnnnnnnnnnnnnnnnnatgtgagccacggcacctggcctcccccacatccttatcaaagaagtatataatcaaacttttgaacttggacaatttgataggttgaatttcaggcaggatctgaaggccaacttctgcctcagcattatctaaatgatcttgatagtgctctgatacctgtgatccatggtgggacctccaactctagtttaccattagaaatagaattagtgtttttcattatagaacatcttttttagtgaaagaatgtgccgtattacatattgcaacctgatttgttaaaactaactccagcactaaagctgaaatgccacaaacactaaaagtataaatatgtctgatttttgaaacacataagctttactctttaggcaggaatgatcttttcaaatcattagcacaatatttaaatatctaaaaatttaagagatccatactttttgaagctttacaattaatttaagtactaaaaagacaaagatttcttctaagaaatttgtagcatttactg

SEQ ID NO: 25227 - DNA, 859 bp, Macaca Mulatta
caactgtagatgctgaagctgtccataaattgctgactttgattaaggacctattgactacattggaagctttgagttgacttctgacaacctttaaaaattcagacaacattatgatctaataaactttattttttaaaaatgaccatttttccattttctttcttggaaattaaacccttttaattcttatctaccttctacataatggttattgaatactccacaatatattaagtctagatgttatggtacatgcatacactttcaggctgttttatacccactgtcaccaatacacataaatgggggagggaaagctaggaaactgtatagggctgtatatatacttgtctcagcttaatgcaggaaattgttttaatttccagcatttttgtctaaactgttcaaaaaaaaactatgaacagagttcaaatacaggactgttttgaagagactttctaaagtgtactttaaaacatagtagtttttttacctttcacaaaactgagttacaagaatacttttgttttacagtgcatcccttcctaggaagtctcattaaaacactcactttttctaggggttgattttgaatgctgcacagggaagggaagaaaataatagtcttaacttttcttaaaggataccagaaacattgctggatataatttaagattagtgttttctctttcatagaaagaacgtacatactgggacatgagtacagttacagcaagtctaggtgtgctaacaaaacagggcacattcaagtacaataagattttgcttgaaattaaaaacaaactacatgagatttaagcattaaaatcatatttctcaatctgaatacatgtta

SEQ ID NO: 25228 - DNA, 145 bp, Macaca Mulatta
ggaaatgaatattcaacagctcaccaactacagaaagagcgtcatgtccttggcagaggcagggaagctgtaccgcacggacctggagattgtgctctgcagcgagccccccatgttaagtggggatgggggctgcttctccacc

SEQ ID NO: 25229 - DNA, 500 bp, Macaca Mulatta
  misc_feature (1)...(500): n = A,T,C or G
agtgacagacgcctctgncgggtgaaggaagacaagttgggtgacccngaccgagccgtggtgttccagtccccactgaccggtggctttcctcggggcagcccaggaaggccccaagaggacaatggattctggaactcgcccagttggtagctgctgtagcagccccgctgggctctcacgggagtacaaactagtgatgctgggtgctggtggtgtagggaagagtgccatgaccatgcagttcatcagccaccgattcccagaagatcatgatcccaccattgaagatgcttataagatcaggatccgtattgatgatgagcctgccaatctggacattttggatacagctggacaggcagagtttacagccatgcgggaccagtatatgagggcgggagaagggtttatcatctgttactctatcacggatcgtcgaagtttccatgaagttcgtgagttaaaacagcttatttatcgagtacgacgtactgatg

SEQ ID NO: 25230 - DNA, 832 bp, Macaca Mulatta
ggaatatagtaaatctaagtaaacatgtattactcaaagtaatatatttagaattatgtataagatcagaattgaatttaagttggtgacatctgcatcatttcataggatagaacttactcaaaataatgtaaatctttaaaaatataaattagaatgacaagtgagaatcataaatgttaatggtttcttacacttttttaaaatacagaaatatcatgttaaaaaaagcgagtgtatcatttctattaacagtaatttttctaaaaatgaggaaggaagtagcattagcagtaaagacccagaggtcatgacctttttgatcactctgaggacaatatttgaatgacaggagggcatattaatgtaataagcattcatttaaggaatagaccattttctttgacctcttctccggaaaagctttcacactggtgtttgggatctcatcattacggcatccatcccgctatctcaccacacaggggcatagaaataataatttttgaatttgtaaaaaggtccatttcaagtttactaaagggacccccaagggcaatataggaattcacccaaaatttaacctaattctttttttgcccctcaagagttacccaagagcaaaccagaaattgttaaaagcctgcctatttttgggacaagcctcgactaggtacacgcaaaccgtaatcttccacccggcataattgggggtacttttttaagcgctaaatttttttggcccaaaccttaattcccccacaaaaccacaatgggttaaactggggagggtttcgccaattttttttttaaacctgaggggaaaataaaa

SEQ ID NO: 25231 - DNA, 1962 bp, Macaca Mulatta
  misc_feature (1)...(1962): n = A,T,C or G
atggatgagctggtacacgacttagcctcagccttagagcagacatctgagcagaataagcttggtgagctgtgggaggagatggccctgagcccccggcagcagaggaggcagcttcggaaacgccgaggtcggaagcgtcgttctgacttcactcacctggcagagcatacctgctgctacagcgaggcctctgagtcaagtctggatgaggccactaaggactgtcgagaagtggctcccgtgaccaattttagtgactctgatgacacaatggtggccaaacgacacccagctctcaatgccattgttaagagtaagcagcattcttggcatgaatctgactcctttactgaaaatgcaccttgtcgaccactcaggcgcaggcggaaggtgaagcgagtgacatcagaggtggctgctagccttcagcagaaactgaaggtgtcagattggagctatgagagaggctgcaggttcaaatctgctaagaagcagcgtctgtcccgctggaaggagaatactccctggacctcatcaggccacggattgtgtgaatcagcagaaaacaggactttcctaagcaaagcaggaaggaaagaaaggatggagtgtgaaacagatgaacaaaaacnnnnnnnnnnnnnnnnnnnnnnnnnnnnnnnnnnnnnnnnnnnnnnnnnnnnnnnnnnnnnnnnnnnnnnnnnnnnnnnnnnnnnnnnnnnnnnnnnnnnnnnnnnnnnnnnnnnnnnnnnnnnnnnnnnnnnnnnnnnnnnnnnnnnnnnnnnnnnnnnnnnnnnnnnnnnnnnnnnnnnnnnnnnnnnnnnnnnnnnnnnnnnnnnnnnnnnnnnnnnnnnnnnnnnnnnnnnnnnnnnnnnnnnnnnnnnnnnnnnnnnnnnnnnnnnnnnnnnnnnnnnnnnnnnnnnnnnnnnnnnnnnnnnnnnnnnnnnnnnnnnnnnnnnnnnnnnnnnnnnnnnnnnnnnnnnnnnnnnnnnnnnnnnnnnnnnnnnnnnnnnnnnnnnnnnnnnnnnnnnnnnnnnnnnnnnnnnnnnnnnnnnnnnnnnnnnnnnnnnnnnnnnnnnnnnnnnnnnnnnnnnnnnnnnnnnnnnnnnnnnnnnnnnnnnnnnnnnnnnnnnnnnnnnnnnnnnnnnnnnnnnnnnnnnnnnnnnnnnnnnnnnnnnnnnnnnnnnnnnnnnnnnnnnnnnnnnnnnnnnnnnnnnnnnnnnnnnnnnnnnnnnnnnnnnnnnnnnnnnnnnnnnnnnnnnnnnnnnnnnnnnnnnnagttcacatggatgcagtggagccaaccacaccagcatcacaagcccccaaatcacccagctctgagtggttggtcaggacctctgcagcagagaaagccacagatgcaactactgctacattttttaaaatgccacaagaaaagagccctggatacagctagagagcaagacttcaccctccaggagctgactgggtgttgctgaagcaaatgttggactttgtgttagatagtcttgcatatcttaatcgacattcccagtcctttcaccaccagaaccaactcctctttcagacacagcagtggactctttctctcagaagatcatgttgtgggnnnnnnnnnnnnaatagtaaaatattgaggcaacaattttttacaaaaaggtcatcctctgctctatttgttaccttgttattgctgtctcaacatttactacagctccatttacagagctgttgcttttttgcagttgtctttgttcttgaaaaaccagtaactgcttctgcatacgttttgtgtagagcttttaatatcatttgaggaagttccaaatttgtagccagttccaaacaaatttaaatactgagttgaggcctgtatggaattgtttgcaggagataaggcttgcctttgagcctactcttgatttcacgcagagtgccaataagataaatcaa

SEQ ID NO: 25232 - DNA, 514 bp, Macaca Mulatta
  misc_feature (1)...(514): n = A,T,C or G
caatggattaaactgcttctttaaatttcttgcctggatttatactggttcagcaagtatgttctcagaagccatacactcattatctgatacttgtaatcagnnnnnnnnnnnnnnnnnnnnnnnnnnnnnnnnnnnnnnnnnnnnnnnnnnnnnnnnnnnnnnnnnnnnnnnnnnnnnnnnnnnnnnnnnnnnnnnnnnnnnnnnnnnnnnnnnnnnnnnnnnnnnnnnnnnnnnnnnnnnnnnnnnnnnnnnnnnnnnnnnnnnnnnnnnnnnnnnnnnnnnnnnnnnnnnnnnnnnnnnnnnnnnnnnnnnnnnnnnnnnnnnnnnnnnnnnnnnnnnnnnnnnnnnnnnnnnnnnnnnnnnnnnnnnnnnnnnnnnnnnnnnnnnnnnnnnnnnnnnnnngtaatggaaagtcgtgatcctagtacaaatgtgatattattggaggatactgctgcagtcttgggagttataatagcagccacttgcatgggccttacttctataacag

SEQ ID NO: 25233 - DNA, 792 bp, Macaca Mulatta
  misc_feature (1)...(792): n = A,T,C or G
cagcgatcctgacctgtgttcctgcctacagtgactcnnnnnnnnnnnnnnnnnnnnnnnnnnnnnnnnnnnnnnnnnnnnnnnnnnnnnnnnnnnnnnnnnnnnnnnnnnnnnnnnnnnnnnnnnnnnnnnnnnnnnnnnnnnnnnnnnnnnnnnnnnnnnnnnnnnnnnnnnnnnnnnnnnnnnnnnnnnnnnnnnnnnnnnnnnnnnnnnnnnnnnnnnnnnnnnnnnnnnnnnnnnnnnnnnnnnnnnnnnnnnnnnnnnnnnnnnnnnnnnnnnnnnnnnnnnnnnnnnnnnnnnnnnnnnnnnnnnnnnnnnnnnnnnnnnnnnnnnnnnnnnnnnnnnnnnnnnnnnnnnnnnnnnnnnnnnnnnnnnnnnnnnnnnnnnnnnnnnnnnnnnnnnnnnnnnnnnnnnnnnnnnnnnnnnnnnnnnnnnnnnnnnnnnnnnnnnnnnnnnnnnnnnnnnnnnnnnnnnnnnnnnnnnnnnnnnnnnnnnnnnnnnnnnnnnnnnnnnnnnnnnnnnnnnnnnnnnnnnnnnnnnnnnnnnnnnnnnnnnnnnnnnnnnnnnnnnnnnnnnnnnnnnnnnnnnnnnnnnnnnnnnnnnnnnnnnnnnnnnnnnnnnnnnnnnnnnnnnnnnnncccccgcatgaccccagcgacctgcgcaacctcgacgagctggnggtgagggagatcctgggccgctgcacctgccccgaccagttccccatgatcaaggtctcggaggggaagtaccgtgtgggggactcgagcctgctcatctttgtgcggg

SEQ ID NO: 25234 - DNA, 2994 bp, Macaca Mulatta
  misc_feature (1)...(2994): n = A,T,C or G
ttggaagggcgtccccggagaaccagtctgggatttactgtgaacagcatggaggagaatgaccccaagcccggcgaagcggcggcggcggtggagggacagcggcagccggaatccagccccggcggcggctcgggcggcagcggcggtggtagcagcccgggcgaagcggacaccgggcgccggcgggctctgatgctgcccgcggtcctgcaggcgcccggcaaccaccagcacccgcaccgcatcaccaacttcttcatcgacaacatcctgcggcccgagttcggccggcgaaaggacgcggggacctgcnnnnnnnnnnnnnnnnnnnnnnnnnnnnnnnnnnnnnnnnnnnnnnnnnnnnnnnnnnnnnnnnnnnnnnnnnnnnnnnnnnnnnnncggagcagctcttggggtccggctcccaagagccccggcagaacccgccgtgcacgcccggctcgggcgggccgctcccagccgccggcagcgactctccgggtgacggggaaggcggctccaagacgctctcgctgcatggtggcgccaagaaaggcagcgaccccgnnnnnnnnnnnnnnnnnnnnnnnnnnnnnnnnnnnnnnnnnnnnnnnnnnnnnnnnnnnnnnnnnnnnnnnnnnnnnnnnnnnnnnnnnnnnnnnnnnnnnnnnnnnnnnnnnnnnnnnnnnnnnnnnnnnnnnnnnnnnnnnnnnnnnnnnnnnnnnnnnnnnnnnnnnnnnnnnnnnnnnnnnnnnnnnnnnnnnnnnnnnnnnnnnnnnnnnnnnnnnnnnnnnnnnnnnnnnnnnnnnnnnnnnnnnnnnnnnnnnnnnnnnnnnnnnnnnnnnnnnnnnnnnnnnnnnnnnnnnnnnnnnnnnnnnnnnnnnnnnnnnnnnnnnnnnnnnnnnnnnnnnnnnnnnnnnnnnnnnnnnnnnnnnnnnnnnnnnnnnnnnnnnnnnnnnnnnnnnnnnnnnnnnnnnnnnnnnnnnnnnnnnnnnnnnnnnnnnnnnnnnnnnnnnnnnnnnnnnnnnnnnnnnnnnnnnnnnnnnnnnnnnnnnnnnnnnnnnnnnnnnnnnnnnnnnnnnnnnnnnnnnnnnnnnnnnnnnnnnnnnnnnnnnnnnnnnnnnnnnnnnnnnnnnnnnnnnnnnnnnnnnnnnnnnnnnnnnnnnnnnnnnnnnnnnnnnnnnnnnnnnnnnnnnnnnnnnnnnnnnnnnnnnnnnnnnnnnnnnnnnnnnnnnnnnnnnnnnnnnnnnnnnnnnnnnnnnnnnnnnnnnnnnnnnnnnnnnnnnnnnnnnnnnnnnnnnnnnnnnnnnnnnnnnnnnnnnnnnnnnnnnnnnnnnnnnnnnnnnnnnnnnnnnnnnnnnnnnnnnnnnnnnnnnnnnnnnnnnnnnnnnnnnnnnnnnnnnnnnnnnnnnnnnnnnnnnnnnnnnnnnnnnnnnnnnnnnnnnnnnnnnnnnnnnnnnnnnnnnnnnnnnnnnnnnnnnnnnnnnnnnnnnnnnnnnnnnnnnnnnnnnnnnnnnnnnnnnnnnnnnnnnnnnnnnnnnnnnnnnnnnnnnnnnnnnnnnnnnnnnnnnnnnnnnnnnnnnnnnnnnnnnnnnnnnnnnnnnnnnnnnnnnnnnnnnnnnnnnnnnnnnnnnnnnnnnnnnnnnnnnnnnnnnnnnnnnnnnnnnnnnnnnnnnnnnnnnnnnnnnnnnnnnnnnnnnnnnnnnnnnnnnnnnnnnnnnnnnnnnnnnnnnnnnnnnnnnnnnnnnnnnnnnnnnnnnnnnnnnnnnnnnnnnnnnnnnnnnnnnnnnnnnnnnnnnnnnnnnnnnnnnnnnnnnnnnnnnnnnnnnnnnnnnnnnnnnnnnnnnnnnnnnnnnnnnnnnnnnnnnnnnnnnnnnnnnnnnnnnnnnnnnnnnnnnnnnnnnnnnnnnnnnnnnnnnnnnnnnnnnnnnnnnnnnnnnnnnnnnnnnnnnnnnnnnnnnnnnnnnnnnnnnnnnnnnnnnnnnnnnnnnnnnnnnnnnnnnnnnnnnnnnnnnnnnnnnnnnnnnnnnnnnnnnnnnnnnnnnnnnnnnnnnnnnnnnnnnnnnnnnnnnnnnnnnnnnnnnnnnnnnnnnnnnnnnnnnnnnnnnnnnnnnnnnnnnnnnnnnnnnnnnnnnnnnnnnnnnnnnnnnnnnnnnnnnnnnnnnnnnnnnnnnnnnnnnnnnnnnnnnnnnnnnnnnnnnnnnnnnnnnnnnnnnnnnnnnnnnnnnnnnnnnnnnnnnnnnnnnnnnnnnnnnnnnnnnnnnnnnnnnnttttcttggagtggctgcttctgctatagagaacattcttccccgataaatatgtgtgtttacacatatgtctgtacgcatgtgannnnnnnnnnnnnnnnnnnnnnnnaggcgtgtttgagtctacagttctggaacgtggctatcttgtctttcaaaagaactcaaaatcctccaggatctagaggaaggaagaaaatgtgtaaataatcatttcttatcaccttttgtcttttcttgttttctaaagtatacattttatttttgaaggtgtggtacagtgtaaattaaatatattccatatatttcccaccaagtaccnnnnnnnnnnnnnnnnnnnnnnnnnnnnnatatataactccacactgtcttctgtttagtgtatggggaaagaccagtccaactgtccatctgtggctgggacagcacagggggtgtgcccatggctgannnngggtgtgcccatggctgagctgggagtcccagtggtctccctgaggactgagggtgaacttctctctttgccttaaacctcttcatttcattgcagtaatagttttactttgtacataatagcataaacctttttaaaaaggaaagtataaaaacaaaagttgtaatttaaaagtctgtgaataaccatctgctgcttaggaaactcaatgaaatgacatgcctttttagcagaaagcaaagttggtttctgtttttgttttcttt

SEQ ID NO: 25235 - DNA, 935 bp, Macaca Mulatta
atcagagagcctgaccatgtggaactggaagaagatagggctggacaacttaacatgcgtggagtttttctgcatgtccttggagatgccttgggttcagtgattgtagtagtaaatgctttagtcttttacttttcttggaaaggttgttctgaaggggatttttgtgtgaacccgtgtttccctgacccctgcaaagcatttgtagaaataattaatagtactcatgcatcagtttatgaggctggtccttgctgggtgctatatttagatccaactctttgtgttgtaatggtttgtatacttctttacacaacctatccattacttaaggaatctgctctgattcttctacaaactgttcctaaacaaattgatatcagaaatttgataaaagaacttcgaaatgttgaaggagttgaggaagttcatgaattacatgtttggcagcttgctggaagcagaatcattgccactgctcacataaaatgtgaagatccaacatcatacatggaggtggctaaaaccattaaagacgtttttcataatcacggaattcatgctactaccattcagcctgaatttgctagtgtaggctctaaatcaagtgtagtcccgtgtgaacttgcctgcagaactcagtgtgctttgaagcaatgttgtgggacactaccacaagcccattctggaaaggatgcagaaaagaccccaacagttagcatttcttgtttagaacttagtaacaatctagagaagaaacccaggaggactaaagccgaaaacatccctgctgttgtgatagagattaaaaatatgccaaacaaacaacctgaatcatctttgtgagtcttgaaaaagatgtgatatttgacttttgctttaaactgcaagaggaaaaagactccattgaaattctaagtttgccaagtagtgta

SEQ ID NO: 25236 - DNA, 322 bp, Macaca Mulatta
gtgagtttacccctatggagaatgtgagaggcccggggcctacctcaaaggagcgggggtcacgacgctagctagcagcgggccccctcccggtccccgggcccggcggcgcggcggcggctcggttgtgaggaggcggggaagcgggtgtccgggccccgccatggagggcatggacgtggacctggacccggagctgatgcagaagttcagctgcctgggcaccaccgacaaggacgtgctcatctccgagttccagaggctgctcggcttccagctcaatcctgccggttgcgccttcttcctggacatgaccaactgg

SEQ ID NO: 25237 - DNA, 326 bp, Macaca Mulatta
  misc_feature (1)...(326): n = A,T,C or G
gatttcgtctgctgcttgtggctatggattcacactgctgtcctctaagaccacagatattacgaaagtctgggggatgggactcaacaaagattctcagcttggatttcacaggagccggaaagataaaannnnnnnnnnnnnnnnnnnnnnnnnnnnnnnnnnnnnnnnnnnnnnnnnnnnnnnnnnnnnnnnnnnnnnnnnnnnnnnnnnnnnnnnnnnnnnnnnnnnnnnnnnnnnnnnnnnnnnnnnnnnnnnagtcttcagcatgggaaacaattcttatggacaatgtggaagaaaggtgatcgaaaatgaaatttaca

SEQ ID NO: 25238 - DNA, 507 bp, Macaca Mulatta
  misc_feature (1)...(507): n = A,T,C or G
gcgcgcacttccgggcacggtcgtggcgtgacgtcgggaggagggcagggacacgccgctttttggatgcctcctgtgcctggcgagagtcttgtctgagccggcaccaccacacggcccacaacatcttctcagggaagcctgtggaccctctgccaggcactgcaagaggtcaggacaggacagtgtgttcacaaggccagtttctgattgtccgccctgagggtgaggaccagtaggcagttcccaagatnnnnnnnnnnnnnnnnnnnnnnnnnnnnnnnnnnnnnnnnnnnnnnnnnnnngcatggctctctcaaccgataccacaacagccacccgcttcgggagcgggctcggaagctgtcacagggcatcctcatcatccgnnnnnnnnnnnnnnnnnnnnnnnnnnnnnnnnnnnnnnnnnnnnnnnnnnnnnnnggtgttcgttacaacgcagaaaagaagaaggtgggcaattactacacaaccccaatctacagg

SEQ ID NO: 25239 - DNA, 804 bp, Macaca Mulatta
caggatagcaaaacctgatctcataaaacctaggtcacaaaggacagccctgcaaaacagacgctatttggatcaagtgagccagttcctggaacctgaataatgactcctgaatcaagggatactacagatttgtctccacggggtacccaggagatggaaggcatcgtggtagtgaaggtggaggaggaagatgaagaagaccattttcaaaagcaaagaaacaaagtagagtcatcgccacaagttctcagtcactctacaaccatgaatgagagagccttattatcatcatatttagttgcatatagagtggcaaaggagaaaatggctcacacggcggctgaaaaaattatccttccagcatgtatggacatggtacggacaatttttgatgacaaatcagctgataaactaagaactatacctcttagtgataatacaatatctcgtcgaatctgtacgattgcaaaacatttggaagcaatgcttattacacggctgcagtctggtatagactttgcaatccaacttgatgagagcactgatattgcaagttgtcccacactcttggtctatgtcagatatgtgtggcaagatgatttcgtagaggatctcttatgttgtttaaatttaaattcacatataactggattagatttatttactgaattagaaaactgcattgttggtcagtataaattaaactggaaacattgtaaaggaatttcaagtgatggagcagccaatatgaccggaaaacacagcagacttactgaaaaattgttagaagcaacccacaac

SEQ ID NO: 25240 - DNA, 1599 bp, Macaca Mulatta
atggggaagaaagtggccatcattggagctggcgtgagtggcttggcctccatcaggagctgtctggaagaggggctggagcccacctgctttgagaagagcaatgacattgggggcctgtggaaattttcagaccatgcagaggagggcagggctagcatttacaaatcagtctttaccaactcttccaaagagatgatgtgtttcccagacttcccatatcctgatgacttccccaactttatgcacaacagcaagatccaggaatatctcactgcattcgccaaagaaaagagcctcctgaagtacatacaatttaagacatttgtatccagtgtaaataaacgtcctgattttgcaactactggccaatgggatgttaccactgaaagggatggtaaaagagaatcggctgtctttgatgctgtgatggtttgttctggacatcatgtctatcccaacctaccaaaagagtcctttccaggactaaaccactttaaaggcaaatgcttccacagcagggactacaaagaaccaggtgtattcaaaggaaagcgtgtcctggtggttggcctggggaattcgggctgtgatattgccacagaactcagccacacagcagaacaggtcgtgatcagctccagaagtggctcctgggtgatgagccgcgtctgggacaatggttatccctgggacatggtgcttatcactcgatttggaaccttcctcaagaacaatttaccgacagccatctctgactggttgtacatgaagcagatgaatgcaagattcaagcatgaaaactatggcttgatgcctttaaatggagtcctgaggaaagaacctgtatttaatgatgagctcccagcttgcattctgtgtggcattgtgtccgtaaagcctaatgtgaagaaattcacagagacttcggccatttttgaggatgggaccacatttgagggcattgactgtgtaatctttgcaacaggctatagttatacctacacgttccttgatgagtctatcatcaaaaacagaaacaatgagatcattttatttaaaggagtctttcctcctctacttgagaagtcaaccatagcagtgattggctttgtgcagtcccttggggctgccattcccacagttgacctccagtcccgctgggcagcacgagtaataaagggaacttgtactttgccttctatggaagacatgatgaatgatattaatgagaaaatggagagaaagcacaaatggtatggcaaaagcgagaccttacagacagattacattgtttatatggatgaactctcctccttcattggggtaaagcccaacatcccatggctgtttctcacagatcccaaattggccatggaagtttattttggcccttgtagtccctaccagtttaggctggtgggcccagggaagtggccaggagccagaaatgccatcctgacccagtgggaccggtcgttgaaacccttgcagacacgagtggtcgggagacttcaaaaaccttgcttctttttccattggctgaagccctttgcaattcctattctgttaatcgctgttttccttgggttgacctaa

SEQ ID NO: 25241 - DNA, 972 bp, Macaca Mulatta
cagctgcagcgtctttaagctcttccctctcaactcagggcaccttaactcctaccttcaagcctatctttggcagcatagatccacttaaaactatgcccatgatagctcctttctcctccaagcagacccctcctccatttactcatgcttctacccatcatttccatggcctggtcaaggccaccactgtggtcatgcccaccaccctagccagcacatctaaagactctgtttttaagccacctttggattttggtgtagtgaatgttacaggtgccataggcaacacttattctgtcccttccacttgcgacactttcctgcttaggactgctcaggccttcagagccgacttcaccccagccacaggattcattttcccaccacaccaccgtcctaccattcctactgtgcacacagtcaccatctttacccaggtcctttccagtgctgtccaaatatcccctagaagcagcactgctaatttcaggagtgtgggcagccctctgcccgcctcagccctagtatccacgaactggcctgcatcgtcccccagcgtctccagcctgactccagcaatcacaagtcccttgggatcaagctcaaggccacctttcccactatcccaaggagctaatccccagcctgcatttggtgccacagatggacagaaacaagggccttcccagccagcccttactccaagtgtcagtagctcttttctttttgggagctcagcagtggcattgccaaccccagtgccaactccagctcagccagccttcatcagtaccacacagtcagccttggggtgtttgataccctcagcctccacctctcaaacccctgccagcacctggccaggcattggcagcattccagcaggttttcccattagtcaagctagtacaactgggtttagaattgtaattcagacccaccaaatgggggcttttgcctcattgtttg

SEQ ID NO: 25242 - DNA, 1989 bp, Macaca Mulatta
  misc_feature (1)...(1989): n = A,T,C or G
gccaaatttcttgggaatcaacaggtgagctatgggcaaagcctgtcctttgactaccgtgtggacagaggaggcagacacccatctgcccacgatgtgatcctggaaggtgctggtctacggatcacagctcccttgatgccacttggcaagacactgccttgtgggctcaccaagacttacacactcaggnnnnnnnnnnnnnnnnnnnnnnnnnnnnnnnnnnnnnnnnnnnnnnnnnnnnnnnnnnnnnnnnnnnnnnnnnnnnnnnnnnnnnnnnnnnnnnnnnnnnnnnnnnnnnnnnnnnnnnnnnnnnnnnnnnnnnnnnnnnnnnnnnnnnnnnnnnnnnnnnnnnnnnnnnnnnnnnnnnnnnnnnnnnnnnnnnnnnnnnnnnnnnnnnnnnnnnnnnnnnnnnnnnnnnnnnnnnnnnnnnnnnnnnnnnnnnnnnnnnnnnnnnnnnnnnnnnnnnnnnnnnnnnnnnnnnnnnnnnnnnnnnnnnnnnnnnnnnnnnnnnnnnnnnnnnnnnnnnnnnnnnnnnnnnnnnnnnnnnnnnnnnnnnnnnnnnnnnnnnnnnnnnnnnnnnnnnnnnnnnnnnnnnnnnnnnnnnnnnnnnnnnnnnnnnnnnnnnnnnnnnnnnnnnnnnnnnnnnnnnnnnnnnnnnnnnnnnnnnnnnnnnnnnnnnnnnnnnnnnnnnnnnnnnnnnnnnnnnnnnnnnnnnnnnnnnnnnnnnnnnnnnnnnnnnnnnnnnnnnnnnnnnnnnnnnnnnnnnnnnnnnnnnnnnnnnnnnnnnnnnnnnnnnnnnnnnnnnnnnnnnnnnnnnnnnnnnnnnnnnnnnnnnnnnnnnnnnnnnnnnnnnnnnnnnnnnnnnnnnnnnnnnnnnnnnnnnnnnnnnnnnnnnnnnnnnnnnnnnnnnnnnnnnnnnnnnnnnnnnnnnnnnnnnnnnnnnnnnnnnnnnnnnnnnnnnnnnnnnnnnnnnnnnnnnnnnnnnnnnnnnnnnnnnnnnnnnnnnnnnnnnnnnnnnnnnnnnnnnnnnnnnnnnnnnnnnnnnnnnnnnnnnnnnnnnnnnnnnnnnnnnnnnnnnnnnnnnnnnnnnnnnnnnnnnnnnnnnnnnnnnnnnnnnnnnnnnnnnnnnnnnnnnnnnnnnnnnnnnnnnnnnnnnnnnnnnnnnnnnnnnnnnnnnnnnnnnnnnnnnnnnnnnnnnnnnnnnnnnnnnnnnnnnnnnnnnnnnnnnnnnnnnnnnnnnnnnnnnnnnnnnnnnnnnnnnnnnnnnnnnnnnnnnnnnnnnnnnnnnnnnnnnnnnnnnnnnnnnnnnnnnnnnnnnnnnnnnnnnnnnnnnnnnnnnnnnnnnnnnnnnnnnnnnnnnnnnnnnnnnnnnnnnnnnnnnnnnnnnnnnnnnnnnnnnnnnnnnnnnnnnnnnnnnnnnnnnnnnnnnnnnnnnnnnnnnnnnnnnnnnnnnnacattcctgcctcagaccactacgtggggccaaatggctttaaaagtctggctcaggaggccacgagattagcagaaagnccacgttgagtcagccagtaacatggagcaactgacaaaagaaactgaggactattccaaacaagccctctcactggtgcacaaggccctgcatgaaggaggcggaagcggaagcggtagccttgacggtgctgtggtgcagggggttgtggaaaannnnnnnnnnnnnnnnnnnnnnnnnnnnnnnnnnnnnnnnnnnnnnnnnnnnnnnnnnnnnnnnnnnnnnnnnnnnnnnnnnnnnnnnnnnnnnnnnnnnnnnnnnnnnnnnnnnnnnnnnnnnnnnnnnnnnnnnnnnnnncaggtggaagaagcaaagaggatcaaacaaaaagctgattcactctcaagcctggtgaccaggcatatggatgagttcaaacgtgcacaaaagaatctgggagactggaaagaagaaacacagcagctcttacagaatggaaagaatgggagag

SEQ ID NO: 25243 - DNA, 727 bp, Macaca Mulatta
gaaagatgcagctgactgtgctgactgaccgctcccaggggggaagcagcctgagagatggctcgctggagctcatggtgcaccgaaggctgctgaaggacgatgaacgcggagtttcggagccactaatggagaacgggtcgggggcgtgggtgcgagggcgccacctggtgctgctggacacagcccaggctgcagctgccgggcaccggctcctggccgagcaggaggtcctggccccgcaggtggtgctggccccgggtggcggcgccgcctacaatctcggggctcctccgcgcacgcagttctccgggttgcgcagggagctgccgccctcggtgcacctgctcacgctggctagctggggccccgagatgttgctgctgcgcttggagcaccagtttgccgtgggagaggattccggacgtaacctgagcgcccccgttaccttgaacttgagggacctgttctccaccttcaccatcacccgcctgcaggagaccacgctggtggccaaccagctccgtgaggcagcctccaggctcaagtggacaacaaacacaggccccacaccccagcaaactccctaccagctggacccggccaacatcacgctggaacccatggaaatccgcactttcctggcctcagttcagtggaaggaggtggatggttaggtctgctgggatggcccctccaagccaaggccccctgctccgggggcaga

SEQ ID NO: 25244 - DNA, 724 bp, Macaca Mulatta
  misc_feature (1)...(724): n = A,T,C or G
ttaccatagtagtttgagttatttccatatcttgcgagtccttccgaacgagtctcctttgctcggggctcgcaaccacccaatgatcgattcaggagaaaagaagcctgggcggagagcagannnnnnnnnnnnnnnnnnnnnnnnnnnnnnnnnnnnnnnnnnnnnnnnnnnnnnnnnnnnnnnnnnnnnnnnnnnnnnnnnnnnnnnnnnnnnnnnnnnnnnnnnnnnnnnnnnnnnnnnnnnnnnnnnnnnnnnnnnnnnnnnnnnnnnnnnnnnnnnnnnnnnnnnnnnnnnnnnnnnnnnnnnnnnaggcaagatccaaactgaaatggagactgttccagaagcaggaacacatgaagaattttcctgcaagcaaattagggaacaaattgcaagtgacttaaccaggtctcaagattccaccataaataactctcagttatttgaacaagatgatggctcctcccagattgaggaaagactatctacagttcacacaagagaaaaaccttcccagggtggaaagtgtaaacagtccttcaatgatgtttccatctttaatcttcctcggcagttatgttcaggagagaagtctcatacctgtgatgagtgtggaaaaagcttctgttacatctcagcccttcatattcatcagagagtccacatgggagtgaaatgctataagtgtgatgtgtgtggcaaggaatttagtcagagc

SEQ ID NO: 25245 - DNA, 103 bp, Macaca Mulatta
cttcagcgcggtcaaagttctacgtgcgagagccgccgaatgccaaacctaactggctgaaagttgggttgaccttgggcaccaccgtcgtcttgtgggtcta

SEQ ID NO: 25246 - DNA, 175 bp, Macaca Mulatta
gctagagaactggcagtttgaagaatggggaagccaagtgaccgtagtctcatcagacatgagggaatgggtggctccagagaaagcagacatcattgtcagcgagcttctgggctcatttgctgacaatgaattgtcgcctgagtgcctggatggagcccagcacttcctaaaa

SEQ ID NO: 25247 - DNA, 2390 bp, Macaca Mulatta
  misc_feature (1)...(2390): n = A,T,C or G
tgcaaatagtacggcactccgaacagacactaaaaacagctctcatctcaaagaacccagtgcttgtgtcacagtatgaggaattagatgctggggaacagcgtttaatgaatgaagccttccagccagccagtgatctctttggnnnnnnnnnnnnnnnnnnnnnnnnnnnnnnnnnnnnnnnnnnnnnnnnnnnnnnnnnnnnnnnnnnnnnnnnnnnnnnnnnnnnnnnnnnnnnnnnnnnnnnnnnnnnnnnnnnnnnnnnnnnnnnnnnnnnnnnnnnnnnnnnnnnnnnnnnnnnnnnnnnnnnnnnnnnnnnnnnnnnnnnnnnnnnnnnnnnnnnnnnnnnnnnnnnnnnnnnnnnnnnnnnnnnnnnnnnnnnnnnnnnnnnnnnnnnnnnnnnnnnnnnnnnnnnnnnnnnnnnnnnnnnnnnnnnnnnnnnnnnnnnnnnnnnnnnnnnnnnnnnnnnnnnnnnnnnnnnnnnnnnnnnnnnnnnnnnnnnnnnnnnnnnnnnnnnnnnnnnnnnnnnnnnnnnnnnnnnnnnnnnnnnnnnnnnnnnnnnnnnnnnnnnnnnnnnnnnnnnnnnnnnnnnnnnnnnnnnnnnnnnnnnnnnnnnnnnnnnnnnnnnnnnnnnnnnnnnnnnnnnnnnnnnnnnnnnnnnnnnnnnnnnnnnnnnnnnnnnnnnnnnnnnnnnnnnnnnnnnnnnnnnnnnnnnnnnnnnnnnnnnnnnnnnnnnnnnnnnnnnnnnnnnnnnnnnnnnnnnnnnnnnnnnnnnnnnnnnnnnnnnnnnnnnnnnnnnnnnnnnnnnnnnnnnnnnnnnnnnnnnnnnnnnnnnnnnnnnnnnnnnnnnnnnnnnnnnnnnnnnnnnnnnnnnnnnnnnnnnnnnnnnnnnnnnnnnnnnnnnnnnnnnnnnnnnnnnnnnnnnnnnnnnnnnnnnnnnnnnnnnnnnnnnnnnnnnnnnnnnnnnnnnnnnnnnnnnnnnnnnnnnnnnnnnnnnnnnnnnnnnnnnnnnnnnnnnnnnnnnnnnnnnnnnnnnnnnnnnnnnnnnnnnnnnnnnnnnnnnnnnnnnnnnnnnnnnnnnnnnnnnnnnnnnnnnnnnnnnnnnnnnnnnnnnnnnnnnnnnnnnnnnnnnnnnnnnnnnnnnnnnnnnnnnnnnnnnnnnnnnnnnnnnnnnnnnnnnnnnnnnnnnnnnnnnnnnnnnnnnnnnnnnnnnnnnnnnnnnnnnnnnnnnnnnnnnnnnnnnnnnnnnnnnnnnnnnnnnnnnnnnnnnnnnnnnnnnnnnnnnnnnnnnnnnnnnnnnnnnnnnnnnnnnnnnnnnnnnnnnnnnnnnnnnnnnnnnnnnnnnnnnnnnnnnnnnnnnnnnnnnnnnnnnnnnnnnnnnnnnnnnnnnnnnnnnnnnnnnnnnnnnnnnnnnnnnnnnnnnnnnnnnnnnnnnnnnnnnnnnnnnnnnnnnnnnnnnnnnnnnnnnnnnnnnnnnnnnnnnnnnnnnnnnnnnnnnnnnnnnnnnnnnnnnnnnnnnnnnnnnnnnnnnnnnnnnnnnnnnnnnnnnnnnnnnnnnnnnnnnnnnnnnnnnnnnnnnnnnnnnnnnnnnnnnnnnnnnnnnnnnnnnnnnnnnnnnnnnnnnnnnnnnnnnnnnnnnnnnnnnnnnnnnnnnnnnnnnnnnnnnnnnnnnnnnnnnnnnnnnnnnnnnnnnnnnnnnnnnnnnnnnnnnnnnnnnnnnnnnnnnnnnnnnnnnnnnnnnnnnnnnnnnnnnnnnnnnnnnnnnnnnnnnnnnnnnnnnnnnnnnnnnnnnnnttgtaatttgaaacctaaattctttcattgtttgatgtaagcaatatgatgtaaggcacattttataccccgagtcagtggtttcccttagattcattctcctacttgattgaacccatttaagtcgttttagaaaatggtggtttgctattaaaattaattggagagaatacttggtcattctattagcaaaaagagactgatggaacatggtgttttatggattctgttacagggcttatttcctccttgaataatgtactttaaaaattatctattcaattacattttattttcctacaaggtaagcacggttttagtcctgtagatcagccttcatcacaaactcttttgaactaagatgtgcctaggtgaataaactggggatgacggttttctggagaagatataaggtccatttgtgaatactctgcactatgagatcaggagaaaaatcatctaaaaaatcgttcactcttgctaaaaattttatgtgatgcatttattcagcaatcaaaagtgttgtgtataacttgtatatatttttggacaatttcttagggttcagcttaaaaatataatttgcctactgcaac

SEQ ID NO: 25248 - DNA, 148 bp, Macaca Mulatta
gcaccatgatataatctgaaaggggcagactaaaaaaaaagtctaaaccttacatgtgtaaaggctttatgttcactgtgagtgaaaatttttacattcatcaatatccttcttgtaagtcttaataaatattatagtgaaaaaaaaa

SEQ ID NO: 25249 - DNA, 1622 bp, Macaca Mulatta
  misc_feature (1)...(1622): n = A,T,C or G
gagcttactcacatagcattttggtgtatcaaaatgaaatgcaaggaaccaaaaataacataactgaaggcagtaaaagcaaaattaaataggaagatcatcagtcaaagaagacccactggagannnnnnnnnnnnnnnnnnnnnnnnnnnnnnnnnnnnnnnnnnnnnnnnnnnnnnnnnnnnnnnnnnnnnnnnnnnnnnnnnnnnnnnnnnnnnnnnnnnnnnnnnnnnnnnnnnnnnnnnnnnnnnnnnnnnnnnnnnnnnnnnnnnnnnnnnnnnnnnnnnnnnnnnnnnnnnnnnnnnnnnnnnnnnnnnnnnnnnnnnnnnnnnnnnnnnnnnnnnnnnnnnnnnnnnnnnnnnnnnnnnnnnnnnnnnnnnnnnnnnnnnnnnnnnnnnnnnnnnnnnnnnnnnnnnnnnnnnnnnnnnnnnnnnnnnnnnnnnnnnnnnnnnnnnnnnnnnnnnnnnnnnnnnnnnnnnnnnnnnnnnnnnnnnnnnnnnnnnnnnnnnnnnnnnnnnnnnnnnnnnnnnnnnnnnnnnnnnnnnnnnnnnnnnnnnnnnnnnnnnnnnnnnnnnnnnnnnnnnnnnnnnnnnnnnnnnnnnnnnnnnnnnnnnnnnnnnnnnnnnnnnnnnnnnnnnnnnnnnnnnnnnnnnnnnnnnnnnnnnnnnnnnnnnnnnnnnnnnnnnnnnnnnnnnnnnnnnnnnnnnnnnnnnnnnnnnnnnnnnnnnnnnnnnnnnnnnnnnnnnnnnnnnnnnnnnnnnnnnnnnnnnnnnnnnnnnnnnnnnnnnnnnnnnnnnnnnnnnnnnnnnnnnnnnnnnnnnnnnnnnnnnnnnnnnnnnnnnnnnnnnnnnnnnnnnnnnnnnnnnnnnnnnnnnnnnnnnnnnnnnnnnnnnnnnnnnnnnnnnnnnnnnnnnnnnnnnnnnnnnnnnnnnnnnnnnnnnnnnnnnnnnnnnnnnnnnnnnnnnnnnnnnnnnnnnnnnnnnnnnnnnnnnnnnnnnnnnnnnnnnnnnnnnnnnnnnnnnnnnnnnnnnnnnnnnnnnnnnnnnnnnnnnnnnnnnnnnnnnnnnnnnnnnnnnnnnnnnnnnnnnnnnnnnnnnnnnnnnnnnnnnnnnnnnnnnnnnnnnnnnnnnnnnnnnnnnnnnnnnnnnnnnnnnnnnnnnnnnnnnnnnnnnnnnnnnnnnnnnnnnnnnnnnnnnnnnnnnnnnnnnnnnnnnnnnnnnnnnnnnnnnnnnnnnnnnnnnnnnnnnnnnnnnnnnnnnnnnnnnnnnnnnnnnnnnnnnnnnnnnnnnnnnnnnnnnnnnnnnnnnnnnnnnnnnnnnnnnnnnnnnnnnnnnnnnnnnnnnnnnnnnnnnnnnnnnnnnnnnnnnnnnnnnnnnnnnnnnnnnnnnnnnnnnnnnnnnnnnnnnnnnnnnnnnnnnnnnnnnnnnnnnnnnnnnnnnnnnnnnnnnnnnnnnntaacacagaaagtgaaatgagttaacatttggccatactgatgtttgtgttacccaaaaatactactggatgcaaactgttatgtaaatctgagatttcactgacaactttaagataccaaccaaaacatttttattaaatgttcaaatgaaagcaagaaaataaaa

SEQ ID NO: 25250 - DNA, 791 bp, Macaca Mulatta
ggacatttgcagaagatggaggaggcaaagaaaaccaatttttgatgccccctgaggagactatattaacttttgccgaggtccaagggatgcaagaagctctccttggtactactgttatgaacaacattgttatttggaatttaaaaactggtcaactcttgaaaaagatgcacattgatgattcttaccaagcttcagtctgtcacaaagcctattctgaaatggggcttctgtttattgtcctgagtcatccctgtgccaaagagagtgagtcgttgcaaagccctgtgtttcagctgattgtgattaaccctaagacgactctcagtgtgggtgtgatgctgtactgtcttcctccagggcaggctggcaggttcctggaaggtgacgtgaaagatcaatgtgcagcagcaatcttgacttctggaacaattgccatttgggacttacttctcggtcagtgtactgccctcctcccacctatctctgaccaacattggtcttttgtgaagtggtcaggtacagactctcatttgctggctggacaaaaagatggaaatatatttgtataccactactcataagttagggtaaagcgaaaacacaattttctgggtatatggggcctcttagtattttttggagttttaaatataaaggagaatatctgaatgacattttaaaatatttacttgtatatgtccagacagacttattttttattctgatgatggtgggcaccctggatctttggaagtacatttatggtttactttgaagaaaaaggg

SEQ ID NO: 25251 - DNA, 1843 bp, Macaca Mulatta
  misc_feature (1)...(1843): n = A,T,C or G
ggcacttctgtatcttcaggaactggctgaagagctctcaacagccttgcctgctcctgtgtcctgtcctgagggccccaaggtgagcagccccaccaaaccgaagaagatccggcagccagcagcctgtccaggtggagaagaggtggatggtgctccacgggatgaagacttttttctccaggttgaggctgaagatgtggaagaaagtgagggcccaagtgagagctcgtctgaacctgagcctgcagtgccccgaagcaccccacgaggatctacttcaggnnnnnnnnnnnnnnnnnnnnnnnnnnnnnnnnnnnnnnnnnnnnnnnnnnnnnnnnnnnnnnnnnnnnnnnnnnnnnnnnnnnnnnnnnnnnnnnnnnnnnnnnnnnnnnnnnnnnnnnnnnnnnnnnnnnnnnnnnnnnnnnnnnnnnnnnnnnnnnnnnnnnnnnnnnnnnnnnnnnnnnnnnnnnnnnnnnnnnnnnnnnnnnnnnnnnnnnnnnnnnnnnnnnnnnnnnnnnnnnnnnnnnnnnnnnnnnnnnnnnnnnnnnnnnnnnnnnnnnnnnnnnnnnnnnnnnnnnnnnnnnnnnnnnnnnnnnnnnnnnnnnnnnnnnnnnnnnnnnnnnnnnnnnnnnnnnnnnnnnnnnnnnnnnnnnnnnnnnnnnnnnnnnnnnnnnnnnnnnnnnnnnnnnnnnnnnnnnnnnnnnnnnnnnnnnnnnnnnnnnnnnnnnnnnnnnnnnnnnnnnnnnnnnnnnnnnnnnnnnnnnnnnnnnnnnnnnnnnnnnnnnnnnnnnnnnnnnnnnnnnnnnnnnnnnnnnnnnnnnnnnnnnnnnnnnnnnnnnnnnnnnnnnnnnnnnnnnnnnnnnnnnnnnnnnnnnnnnnnnnnnnnnnnnnnnnnnnnnnnnnnnnnnnnnnnnnnnnnnnnnnnnnnnnnnnnnnnnnnnnnnnnnnnnnnnnnnnnnnnnnnnnnnnnnnnnnnnnnnnnnnnnnnnnnnnnnnnnnnnnnnnnnnnnnnnnnnnnnnnnnnnnnnnnnnnnnnnnnnnnnnnnnnnnnnnnnnnnnnnnnnnnnnnnnnnnnnnnnnnnnnnnnnnnnnnnnnnnnnnnnnnnnnnnnnnnnnnnnnnnnnnnnnnnnnnnnnnnnnnnnnnnnnnnnnnnnnnngcatggtggttttctggaaccttcccactaactcacccctgcagcggatacggctctctgatggctccttaaagctctaccccttccagtgtttcctagcccatgaccaggctgtacgtacccttcaatggtgcaaagctaacagnacagccatttccttgtctctgcggggagtgaccggaaaatcaaattctgggaccttcgacgaccttacgaacccataaactctatcaagcgcttcttgagtacagaactggcctggctgctcccctacaacggtgtcaccgtggctcaggacaactgctatgcctcnnnnnnnnnnnnnnnnnnnnnnnnnnnnnnnnnnnnnnnnnnnnnnnnnnnnnnnnnnnnnnnnnnnnnnnnnnnnnnnnnnnnnnnnnnnnnnnnnnnnnnnnnnnnnnnnnnnnnnnnnnnnnnnnnnnnnnnnnnnnnnnnnnnnnnnnnnnnnnnnnnnnnnnnnnnnnnnnnnnnnnnnnnnnnnnnnnnnnnnnnnnnnnnnnnnnnnnnncctatatataaagcagatctgataccgtatcaggacagtcctgaaggtcccgaccattcttctgcttcatctggggtccccaaccctcccaaggctcgaacttatactgaaactgtcaaccatcactacttgctctttcaagacacagatttg

SEQ ID NO: 25252 - DNA, 94 bp, Macaca Mulatta
agctgaccaacttcacccttgttcctgttcattggaaaaccgcttacactggattctgaggttttctctgggccatcttctgctgtttttccca

SEQ ID NO: 25253 - DNA, 1121 bp, Macaca Mulatta
  misc_feature (1)...(1121): n = A,T,C or G
gggtgacannnnnnnnnnnnnnnnnnnnnnnnnnnnnnnnnnnnnnnngagaaaagnnnnnnnnnnnnnnnnnnnnnnnnnnnnnnnggggtgagcagttaatggtattcattccacatacaatatctgtgtaaaacgatttcctgtaaaagtagctttaatggtttttgctctagaataccgtaggtctatccttagagcactcacgccatgctttcttccctgggttttaaacttcatataactttcagaaattggagagcaaaaattttgcttgtcactgcacatcaatataaaaaagcttatttaacttatcaaaacgtatttattgccaaactatgctttttttgttaattttgttcatatttatcgggatgacaaatccatagaatatattcttttatgttaaattatgatcttcatattaatcttaaaattttgtgacgtgtctttttccttttttccacagttttaatatattattcttcaacgacatttttttgtaactttacacttttttggnnnnnnnnnnnnnnnnnnnnnnnnnnnnnnnnnnnnnnnnnncaaaaaactgttggattatttattttagaaattcccccctttgtgtcggactgcaaattgagtttctttctctttaggcctttcacaactaggactgagaatgtatgtaaaagttctgtgacagtacagaagggaaaacaactttttatgtatagcttctnnnnnnnnnnnnnnnnnnnnnnnnngaaaccctttgacttccacgtgcccatctcaagacattccactcacagaatttgagggttctggattcccaggtctgggagtttttcccaatggttaatggtaaaacagaaactgggcaccacacacattaagatgaatgtaaattattattcctcttgctggtcactaccgtccctttccatttctcctttctttggggggaatttaannnnnnnnnnnnnnnnnnnnnnnnntggtaaccaactatttttccagttttaaaaaatccaattaaaacccccggttttctttcccaggaagccaaaaacataacgagaacacatattactttaaatactcccaatctcacaaaaccatcacttatacacacc

SEQ ID NO: 25254 - DNA, 569 bp, Macaca Mulatta
ctccagatttgaccagtacatgcacacagacgtgcctgagcgggacctcatagcctttcggcaggcctgggagctgcccctgctacgggtgaagagtgtgccagggcggcggctggctgatgggtgcacgctggacgggcgggctgggctggctgacgttgcccacgtactcaacggccttgctgagcagctgtggcaccaggaccaggtggcagctggcctgcttcccaaccccccagagagtgctcctgaatgaataacgagtgggtgcttgtgatcccacccccaaccctcaggtctcgacatagggcctgaggctgaggcaggaacatgggtcccatctggaagactagccagcatgacctgatatggaggatgtggccggagagggcccgcccccgagcagcactttccttgcagaattcatgccagggagttggggaacaaggccctgagctcgaacatctcccacggcctttccccctttggcagcacccgtggagggtgactggaagaaggggtgcctcttaagtgacttcaatcaagagcctttattggttgaggtgaca

SEQ ID NO: 25255 - DNA, 556 bp, Macaca Mulatta
  misc_feature (1)...(556): n = A,T,C or G
tctcttcaggcgtgttaggcagtgaggttgacctgtacttcccctggcccttggctgaagaggnagggctagtgaaaccgttaaacccctaggccatcatggccttgagacctgaggaccccagtagtgggttccggcacagcaacgtggtggccttcatcaacgagaaaatggccaggcacacgaaaggccccgagttctacctcgagaatatatccttatcctgggaggaggtggaagacaagctctgggccatcctggaggacagcgaggtgcccagcgaggtcaaagaggcctgtacctggggcagcttggccttgggcgtgcgctttgcccacaggcagggacagttacaaaaccgcagggtgcagtggctgcaaggctttgccaaactgcacagattagctgcgatggtcttggcctcaaacctgacggaattcaaagaacagcaggagatggaatgcaataaggcgaccttccagttgcggataacccagaccagccttgcggaggcgcagagagagcgggacatgctgagatggaagctcctccatgc

SEQ ID NO: 25256 - DNA, 1701 bp, Macaca Mulatta
  misc_feature (1)...(1701): n = A,T,C or G
cagaagctgcatataccctcctcttatatgatgagctactggaatggtctgatcggcccctcagggagttcctgacctaccccatgcaaacagaatggcagcgcaaagagcacctgcacctcaccatcatccagaactttgacagaggcaaannnnnnnnnnnnnnnnnnnnnnnnnnnnnnnnnnnnnnnnnnnnnnnnnnnnnnnnnnnnnnnnnnnnnnnnnnnnnnnnnnnnnnnnnnnnnnnnnnnnnnnnnnnnnnnnnnnnnnnnnnnnnnnnnnnnnnnnnnnnnnnnnnnnnnnnnnnnnnnnnnnnnnnnnnnnnnnnnnnnnnnnnnnnnnnnaataaggagtttgtgtgtcgagggcatgactacgagaggctggaagccttccaacagagaatgctgaacgagttcccccacgccatcgccatgcagcatgccaaccagcccgatgagaccattttccaggcagaagctcannatttgcagatatatgctgtgacccccattccggagagccaggaggtcctgcagagagagggcgttccggacaacatcaaaagtttctataaagtgaatcacatctggaaattccgctatgaccgaccatttcacaaaggcacaaaagataaagagaatgaattcaagnnnnnnnnnnnnnnnnnnnnnnnnnnnnnnnnnnnnnnnnnnnnnnnnnnnnnnnnnnnnnnnnnnnnnnnnnnnnnnnnnnnnnnnnnnggtagaaatgagtcctctggaaaatgcaattgaagtgctggaaaataagaatcagcaactaaagactctgattagtcagtgtcagacaagacagatgcagaatattaatcccctgacgatgtgcctgaatggagttatagatgctgcagttaatggtggtgtttccaggtaccaagaggnaggcattctttgtcaaagaatatatcttaagtcaccctgaagatggggagaaaattgcacgattaagagagctgatgcttgagcaggnnnnnnnnnnnnnnnnnnnnnnnnnnnnnnnnnnnnnnnnnnnnnnnnnnnnnnnnnnnnnnnnnnnnnnnnnnnnnnnnnnnnnnnnnnnnnnnnnnnnnnnnnnnnnnnnnnnnnnnnnnnnnnnnnnnnnnnnnnnnnnnnnnnnnnnnnnnnnnnnnnnnnnnnnnnnnnnnnnnnnnnnnnnnnnnnnnnnnnnnnnnnnnnnnnnnnnnnnnnnnnnnnnnnnnnnnnnnnnnnnnnnnnnnnnnnnnnnnnnnnnnnnnnnnnnnnnnnnnnnnnnnnnnnnnnnnnnnnnnnnnnnnnnnnnnnnnnnnnnnnnnnnnnnnnnnnnnnnnnnnnnnnnnnnnnnnnnnnnncagccaagtccatctacctcaagcttgagttctactcactcggcttcacctaatgtgacaagttctgctccatcgagtgccagagnagcttctcctttgttgtctgacaaacacaaacattcccgagaaaactcttgcctgtccccaagagagagaccatgcagtgccatctatccaacacccgtggagccttcgcagncctttgcagaggatgctgtttaatcatattggagacggggccttgccacgcagtgacccaaatctctctgcacctgaaaaagnagcttccccagcaagacacacgacatcagtattcccctcacctgccgggc

SEQ ID NO: 25257 - DNA, 774 bp, Macaca Mulatta
  misc_feature (1)...(774): n = A,T,C or G
ggcgtggtggctcatgcttgtagtcctagcactgtgggaggccgaggcggggatcaccaggtcaggagattgagaccatcctggctaacatagtgaaactnnnnnnnnnnnnnnnnnnnnnnnnnctagccaggtgtggtggtgggcannnnnnnnnnnnnnnnnnnnnnnnnnnnnnnnnnnnnnnnngcacnnnnnnnnnnnnnannnnnnnnnnnnnnnnnnnnnngcnnnnnnnnnnnnnnnnnnaggcgacagagtannnnnnnnnnnnnnnnnnnnnnnnnnntcttccctgataaagccgcgggaaccaagttttccctcctcttaaagcttatgctaccatgtttgtaccactctgtaatgatcaatagcactggtcaaaggccttagtttaaaacctcactacttgttagctgtgtgaccttaggtcaattacagtcatgctttgtttaacaatgggcataagttgagaaatgtattgttaggtgatcttgttgctctgcaaacttcatagagtatacttttaaaaacctagatagtacagtcagctatacacctaagctctatgggatagcctattgctcctaggctacaaacctctacagcatgttactgttacctacataggcaaatatggtattcagtacagtaacacaacggcaagtatttgtgtgtctaacacagaaaagtactgcaaaaatatgttactataaattattggatctcccactgtatatggtggtctgttgtttgactgaaacgttgttc

SEQ ID NO: 25258 - DNA, 754 bp, Macaca Mulatta
  misc_feature (1)...(754): n = A,T,C or G
gtctatattactgcataattttgctgcttctcaatatcatagacacagtgaatagatgatgactatatggcttatatacaaacattctatgtacaatttcaagggagactaaactttaggctagtaatctttactattgaatctgtctgatatagatcttagggttgttgaagaagctacccttgtctatttgggctaaccatagaacttcatttattttcctcacaagagtttcctagaccaactccccatcattcacatgttcctctttactctttaactattttgctggcttgcccgaaaatttgcctgccaagtcttccttataagatacatcatggtaacttttgttgtcctgtaagattctgcaacacagtcaagaattatacaattctactagcaatacataaggacccaaaaagtcttctgctaagctcagaggctgggactaaagcatgaggactatgccaggtatagaacttggactcataattccctatccaatttttcatgcagttgtccagtcgggaagtaaggttggaaagtaagtctcatttactgattcgtttatgggtagactggggttaacccaccaccacaaagcaaattagagagcttaatgtgaaaccataccattggttggcatttccttgagttgctacttcattcatcctcccaacttaccagtgcacggtagaagtattgtgcacatagctttttggaatatcctgactggngcctaagaagagcattc

SEQ ID NO: 25259 - DNA, 1247 bp, Macaca Mulatta
  misc_feature (1)...(1247): n = A,T,C or G
gaagtcgctgcctgtcctggacccatctggggattactactactggtggctgaacacaatggtcttcccagtcatgtataacctcatcatcctcgtgtgcagntgcagagcctgcttcccggacttgcagcacggttatctggtggcctggttggtgctggactacacgagtgacctgctgtacctactannnnnnnnnnnnnnnnnnnnnnaggattcttggaacagggcatcctggtggtggacaagggtaggatatcgagtcgctacgttcgcacctggagtttcttgttggacctggcttccctgatgcccacagacgtggtctacgtgcggctgggtccgcacacacccaccctgaggctgaaccgctttctccgcgcaccccgcctcttcgaggccttcgaccgcacagagacccgcacagcttacccaaatgcctttcgcattgccaaactgatgctttacatttttgtcgtcatccattggaacagctgcctatactttgccctatcccggtatctgggcttcgggcgtgacacatgggtgtacccgggccccgcgcagcctggctttgagcggctgcggcgccagtacctctacagcttttacttctccacgctaatcctgactacagtgagcgatacaccgccgccagnnnnnnnnnnnnnnnnnnnnnnnnnnnnnnnnnnnnnnnnnnnnnnnnnnnnnnnnnnnnnnnnnnnnnnnnnnnnnnnnnnnnnnnnnnnnnnnnnnnnnnnnnnnnnnnnnnnnnnnnnnnncccagatcatgcgctggtgaagaagtacatgaagctgcagcacgtcaaccacaagctggaacggcgagttattgactggnnggtatcagcacctgcagatcaacaagaagataaccatngaggtagccatcttacagcacttgcctgagcggctgcgggcagaagtggctgtgtctgtgcacctaactattctgagccaggtgcagatctttcagaactgtgaagccagcctgctggaggagctggtgctgaagctgcagccccagacctactcaccaggcgaatatgtatgccgcaaaggggacattggccgagagatgtacatcatccgagagggtcaactggccgtggtggcagatgatggtatcacacagtatgctgtgctcggtgcaggactctactttggggagatcagcatcatcaacatcaaaggtgggtatcccagtatttgttccagggacgagg

SEQ ID NO: 25260 - DNA, 8070 bp, Macaca Mulatta
  misc_feature (1)...(8070): n = A,T,C or G
gaggacgtgccgtggaagaagatccagcagaacacattcacgcgctggtgcaatgagcacctcaagtgcgtgggcaagcgcttgaccgacctgcagcgcgacgtcagcgacgggctcaggctcatcgcgctgctcgaggtgctcagccagaagcgcatgtaccgcaagttccacccgcgccccaactttcgccaaatgaagctggagaacgtgtccgtggccctcgagttcctggagcgtgagcacatcaagcttgtgtccatannnnnnnnnnnnnnnnnnnnnnnnnnnnnnnnnnnnnnnnnnnnnnnnnnnnnnnnnnnnnnnnnnnnnnnnnnnnnnnnnnnnnnnnnnnnnnnnnnnnnnnnnnnnnnnnnnnnnnnnnnnnnnnnnnnnnnnnnnnnnnnnnnnnnnnnnnnnnnnnnnnnnnnnnnnnnnnnnnnnnnnnnnnnnnnnnnnnnnnnnnnnnnnnnnnnnnnnnnnnnnnnnnnnnnnnnnnnnnnnnnnnnnnnnnnnnnnnnnnnnnnnnnnnnnnnnnnnnnnnnnnnnnnnnnnnnnnnnnnnnnnnnnnnnnnnnnnnnnnnnnnnnnnnnnnnnnnnnnnnnnnnnnnnnnnnnnnnnnnnnnnnnnnnnnnnnnnnnnnnnnnnnnnnnnnnnnnnnnnnnnnnnnnnnnnnnnnnnnnnnnnnnnnnnnnnnnnnnnnnnnnnnnnnnnnnnnnnnnnnnnnnnnnnnnnnnnnnnnnnnnnnnnnnnnnnnnnnnnnnnnnnnnnnnnnnnnnnnnnnnnnnnnnnnnnnnnnnnnnnnnnnnnnnnnnnnnnnnnnnnnnnnnnnnnnnnnnnnnnnnnnnnnnnnnnnnnnnnnnnnnnnnnnnnnnnnnnggccaaggtggttcccaacaatgacaaagaccgcacctacgctgtctcctatgtgcccaaggtcgctgggttacacaaggtnaggtgaccgtgctctttgctggccagaacattgaacgcagtccctttgaggtgaacgtgggcatggccctgggagatgccaacaaggtgtcagcccgtggtcctggcctggaacctgtgggcaatgtggccaacaaacccacctactttgacatctacactgcnnnnnnnnnnnnnnnnnnnnnnnnnnnnnnnnnnnnnnnnnnnnnnnnnnnnnnnnnnnnnnnnnnnnnnnnnnnnnnnnnnnnnnnnnnnnnnnnnnnnnnnnnnnnnnnnnnnnnnnnnnnnnnnnnnnnnnnnnnnnnnnnnnnnnnnnnnnnnnnnnnnnnnnnnnnnnnnnnnnnnnnnnnnnnnnnnnnnnnnnnagcctgtaaccccaatgcctgccgcgcctctgggcgaggcctgcagcccaagggtgttcgtgtgaaagaggtggctgacttcaaggtgtttaccaagggtgccggcagcggggagctcaaggtcacagtcaaggggccaannnnnnnnnnnnnnnnnnnnnnnnnnnnnnnnnnnnnnnnnnnnnnnnnnnnnnnnnnnnnnnnnnnnnnnnnnnnnnnnnnnnnnnnnnnnnnnnnnnnnnnnnnnnnnnnnnnnnnnnnnnnnnnnnnnnnnnnnnnnnnnnnnnnnnnnnnnnnnnnnnnnnnnnnnnnnnnnnnnnnnnnnnnnnnnnnnnnnnnnnnnnnnnnnnnnnnnnnnnnnnnnnnnnnnnnnnnnnnnnnnnnnnnnnnnnnnnnnnnnnnnnggcttctccatcgaggggccctctcaagccaagattgaatgtgatgacaagggggatggctcttgcgatgtgcggtactggcctacggagcctggggagtacgctgtgcacgtcatctgtgacgacgaggacatccgagactcacccttcattgcccacatcttgcccgccccacctgactgcttcccagatannnnnnnnnnnnnnnnnnnnnnnnnnnnnnnnnnnnnnnnnnnnnnnnnnnnnnnnnnnnnnnnnnnnnnnnnnnnnnnnnnnnnnnnnnnnnnnnnnnnnnnnnnnnnnnnaggacgcggacggctgtcccatcgacatcaaggtgatccccaacggcgatggcaccttccgctgctcctacgtgcccaccaagcccattaagcacaccatcatcatctcctggggnnnnnnnnnnnnnnnnnnnnnnnnnnnnnnnnnnnnnnnnnnnnnnnnnnnnnnnnnnnnnnnnnnnnnnnnnnnnnnnnnnnnnnnnnnnnnnnnnnnnnnnnnnnnnnnnnnnnnnnnnnnnnnnnnnnnnnnnnnnnnnnnnnnnnnnnnnnnnnnnnnnnnnnnnnnnnnnnnnnnnnnnnnnnnnnnnnnnnnnnnnnnnnnnnnnnnnnnnnnnnnnnnnnnnnnnnnnnnnnnnnnnnnnnnnnnnnnnnnnnnnnnnnnnnnnnnnnnnnnnnnnnnnnnnnnnnnnnnnnnnnnnnnnnnnnnnnnnnnnnnnnnnnnnnnnnnnnnnnnnnnnnnnnnnnnnnnnnnnnnnnnnnnnnnnnnnnnnnnnnnnnnnnnnnnnnnnnnnnnnnnnnncaggtgtggaagttgggaagcccacccacttcacggtgctgaccaagggagccggcaaggccaagttggatgtgcagtttgcagggacagccaagggcgaggctgtgcgggactttgagatcatagacaaccatgactattcctacactgtcaagtacactgctgtccagcagnnnnnnnnnnnnnnnnnnnnnnnnnnnnnnnnnnnnnnnnnnnnnnnnnnnnnnnnnnnnnnnnnnnnnnnnnnnnnnnnnnnnnnnnnnnnnnnnnnnnnnnnnnnnnnnnnnnnnnnnnnnnnnnnnnnnnnnnnnnnnnnnnnnnnnnnnnnnnnnnnnnnnnnnnnnnnnnnnnnnnnnnnnnnnnnnnnnnnnnnnnnnnnnnnnnnnnnnnnnnnnnnnnnnnnnnnnnnnnnnnnnnnnnnnnnnnnnnnnnnnnnnnnnnnnnnnnnnnnnnnnnnnnnnnnnnnnnnnnnnnnnnnnnnnnnnnnnnnnnnnnnnnnnnnnnnnnnnnnnnnnnnnnnnnnnnnnnnnnnnnnnnnnnnnnnnnnnnnnnnnnnnnnnnnnnnnnnnnnnnnnnnnnnnnnnnnnnnnnnnnnnnnnnnnnnnnnnnnnnnnnnnnnnnnnnnnnnnnnnnnnnnnnnnnnnnnnnnnnnnnnnnnnnnnnnnnnnnnnnnnnnnnnnnnnnnnnnnnnnnnnnnnnnnnnnnnnnnnnnnnnnnnnnnnnnnnnnnnnnnnnnnnnnnnnnnnnnnnnnnnnnnnnnnnnnnnnnnnnnnnnnnnnnnnnnnnnnnnnnnnnnnnnnnnnnnnnnnnnnnnnnnnnnnnnnnnnnnnnnnnnnnnnnnnnnnnnnnnnnnnnnnnnnnnnnnnnnnnnnnnnnnnnnnnnnnnnnnnnnnnnnnnnnnnnnnnnnnnnnnnnnnnnnnnnnnnnnnnnnnnnnnnnnnnnnnnnnnnnnnnnnnnnnnnnnnnnnnnnnnnnnnnnnnnnnnnnnnnnnnnnnnnnnnnnnnnnnnnnnnnnnnnnnnnnnnnnnnnnnnnnnnnnnnnnnnnnnnnnnnnnnnnnnnnnnnnnnnnnnnnnnnnnnnnnnnnnnnnnnnnnnnnnnnnnnnnnnnnnnnnnnnnnnnnnnnnnnnnnnnnnnnnnnnnnnnnnnnnnnnnnnnnnnnnnnnnnnnnnnnnnnnnnnnnnnnnnnnnnnnnnnnnnnnnnnnnnnnnnnnnnnnnnnnnnnnnnnnnnnnnnnnnnnnnnnnnnnnnnnnnnnnnnnnnnnnnnnnnnnnnnnnnnnnnnnnnnnnnnnnnnnnnnnnnnnnnnnnnnnnnnnnnnnnnnnnnnnnnnnnnnnnnnnnnnnnnnnnnnnnnnnnnnnnnnnnnnnnnnnnnnnnnnnnnnnnnnnnnnnnnnnnnnnnnnnnnnnnnnnnnnnnnnnnnnnnnnnnnnnnnnnnnnnnnnnnnnnnnnnnnnnnnnnnnnnnnnnnnnnnnnnnnnnnnnnnnaggggagccggcaccgggggccttggcctagccatcgagggtccctcggaagccaagatgtcctgcaaggacaacaaggatggtagctgcactgtggagtacatccccttcacccctggagactatgacgtcaacatcaccttcggggggcggcccatcccaggncagggagcccattccgggtgccggtgaaggatgtggtggaccctggaaaggtgaagtgctcggggccagggctgggggctggtgtcagggcccgggtcccccagaccttcacagtggactgcagtcaagctggccgggcacccctgcaggtggctgtgctgggccccacaggtnnnnnnnnnnnnnnnnnnnnnnnnnnnnnnnnnnnnnnnnnnnnnnnnnnnnnnnnnnnnnnnnnnnnnnnnnnnnnnnnnnnnnnnnnnnnnnnnnnnnnnnnnnnnnnnnnnnnnnnnnnnnnnnnnnnnnnnnnnnnnnnnnnnnnnnnnnnnnnnnnnnnnnnnnnnnnnnnnnnnnnnnnnnnnnnnnnnnnnnnnnnnnnnnnnnnnnnnnnnnnnnnnnnnnnnnnnnnnnnnnnnnnnnnnnnnnnnnnnnnnnnnnnnnnnnnnnnnnnggaccccgagggtaaacccaagaaggccaacatccgggacaatggggatggcacgtacactgtgtcctacctgccagacatgagcggccggtacaccatcaccatcaagtatggcggcgatgagatcccctactcacccttccgcatccatgctctgcccaccggggacgccagcaagtgcctcgtcacannnnnnnnnnnnnnnnnnnnnnnnnnnnnnnnnnnnnnnnnnnnnnnnnnnnnnnnnnnnnnnnnnnnnnnnnnnnnnnnnnnnnnnnnnnnnnnnnnnnnnnnnnnnnnnnnnnnnnnnnnnnnnnnnnnnnnnnnnnnnnnnnnnnnnnnnnnnnnnnnnnnnnnnnnnnnnnnnnnnnnnnnnnnnnnnnnnnnnnnnnnnnnnnnnnnnnnnnnnnnnnnnnnnnnnnnnnnnnnnnnnnnnnnnnnnnnnnnnnnnnnnnnnnnnnnnnnnnnnnnnnnnnnnnnnnnnnnnnnnnnnnnnnnnnnnnnnnnnnnnnnnnnnnnnnnnnnnnnnnnnnnnnnnnnnnnnnnnnnnnnnnnnnnnncaggagaggtgcggatgccctcagggaagacggcgcggcccaacatcaccgacaacaaggacggcaccatcacggtgaggtacgcacccaccgagaaaggcctgcaccagatggggatcaagtatgacggcaaccacatccctgnnnnnnnnnnnnnnnnnnnnnnnnnnnnnnnnnnnnnnnnnnnnnnnnnnnnnnnnnnnnnnnnnnnnnnnnnnnnnnnnnnnnnnnnnnnnnnnnnnnnnnnnnnnnnnnnnnnnnnnnnnnnnnnnnnnnnnnnnnnnnnnnnnnnnnnnnnnnnnnnnnnnnnnnnnnnnnnnnnnnnnnnnnnnnnnnnnnnnnnnnnnnnnnnnnnnnnnnnnnnnnnnnnnnnnnnnnnnnnnnnnnnnnnnnnnnnnnnnnnnnnnnnnnnnnnnnnnnnnnnnnnnnnnnnnnnnnnnnnnnnnnnnnnnnnnnnnnnnnnnnnnnnnnnnnnnnnnnnnnnnnnnnnnnnnnnnnnnnnnnnnnnnnnnnnnnnnnnnnnnnnnnnnnnnnnnnnnnnnnnnnnnnnnnnnnnnnnnnnnnnnnnnnnnnnnnnnnnnnnnnnnnnnnnnnnnnnnnnnnnnnngggatctccttcactcccaaggaggtgggggagcatgtggtgagcgtgcgcaagagtggcaagcacgtcaccaacagccccttcaagatcctggtggggccatctgagatcggggacgccagcaaggtgcgggtctggggcaagggcctttctgagggacacacgttccaggtggcggagttcatcgtggatactcgcaatgcaggnnnnnnnnnnnnnnnnnnnnnnnnnnnnnnnnnnnnnnnnnnnnnnnnnnnnnnnnnnnnnnnnnnnnnnnnnnnnnnnnnnnnnnnnnnnnnnnnnnnnnnnnnnnnnnnnnnnnnnnnnnnnnnnnnnnnnnnnnnnnnnnnnnnnnnnnnnnnnnnnnnnnnnnnnnnnnnnnnnnnnnnnnnnnnnnnnnnnnnnnnnnnnnnnnnnnnnnnnnnnnnnnnnnnnnnnnnnnnnnnnnnnnnnnnnnnnnnnnnnnnnnnnnnnnnncagggaactggttccagatggtgtctgcccaggagcgcctgacgcgcaccttcacacgcagcagccacacctacacccgcacggagcgcacggaaatcagcaagacgcggggcggggagacaaagcgcgaggtgcgggtggaggagtccacccaggtcggcggggaccccttccctgctgtgtttggggacttcctgggccgggagcgcctgggctccttcggcagcatcacccggcagcaggagggtgannnnnnnnnnnnnnnnnnnnnnnnnnnnnnnnnnnnnnnnnnnnnnnnnnnnnnnnnnnnnnnnnnnnnnnnnnnnnnnnnnnnnnnnnnnnnnnnnnnnnnnnnnnnnnnnnnnnnnnnnnnnnnnnnnnnnnnnnnnnnnnnnnnnnnnnnnnnnnnnnnnnnnnnnnnnnnnnnnnnnnnnnnnnnnnnnnnnnnnnnnnnnnnnnnnnnnnnnnnnnnnnnnnnnnnnnnnnnnnnnnnnnnnnnnnnnnnnnnnnnnnnnnnnnnnnnnnnnnnnnnnnnnnnnnnnnnnnnnnnnnnnnnnnnnnnnnnnnnnnnnnnnnnnnnnnnnnnnnnnnnnnnnnnnnnnnnnnnnnnnnnnnnnnnnnnnnnnnnnnnnnnnnnnnnnnnnnnnnnnnnnnnnnnnnnnnnnnnnnnnnnnnnnnnnnnnnnnnnnnnnnnnnnnnnnnnnnnnnnnnnnnnnnnnnnnnnnnnnnnnnnnnnnnnnnnnnnnnnnnnnnnnnnnnnnnnnnnnnnnnnnnnnnnnnnnnnnnnnnnnnnnnnnnnnnnnnnnnnnnnnnnnnnnnnnnnnnnnnnnnnnnnnnnnnnnnnnnnnnnnnnnnnnnnnnnnnnnnnnnnnnnnnnnnnnnnnnnnnnnnnnnnnnnnnnnnnnnnnnnnnnnnnnnnnnnnnnnnnnnnnnnnnnnnnnnnnnnnnnnnnnnnnnnnnnnnnnnnnnnnnnnnnnnnnnnnnnnnnnnnnnnnnnnnnnnnnnnnnnnnnnnnnnnnnnnnnnnnnnnnnnnnnnnnnnnnnnnnnnnnnnnnnnnnnnnnnnnnnnnnnnnnnnnnnnnnnnnnnnnnnnnnnnnnnnnnnnnnnnnnnnnnnnnnnnnnnnnnnnnnnnnnnnnnnnnnnnnnnnnnnnnnnnnnnnnnnnnnnnnnnnnnnnnnnnnnnnnnnnnnnnnnnnnnnnnnnnnnnnnnnnnnnnnnnnnnnnnnnnnnnnnnnnnnnnnnnnnnnnnnnnnnnnnnnnnnnnnnnnnnnnnnnnnnnnnnnnnnnnnnnnnnnnnnnnnnnnnnnnnnnnnnnnnnnnnnnnnnnnnnnnnnnnnnnnnnnnnnnnnnnnnnnnnnnnnnnnnnnnnnnnnnnnnnnnnnnnnnnnnnnnnnnnnnnnnnnnnnnnnnnnnnnnnnnnnnnnnnnnnnnnnnnnnnnnnnnnnnnnnnnnnnnnnnnnnnnnnnnnnnnnnnnnnnnnnnnnnnnnnnnnnnnnnnnnnnnnnnnnnnnnnnnnnnnnnnnnnnnnnnnnnnnnggcaccaacatgatgatggtgggcgtgcacggccccaagactccctgtgaggaggtgtacgtgaagcacatagggaaccgggtgtacaatgtcacctacactgtcaaggagaaaggggactacatcttcatcgtcaagtggggtgacgaaagtgtccctggaagccccttcaaagttaaggtcccttgaatgccaaaaaagtacctccccagcctcagcccccacctccagcc

SEQ ID NO: 25261 - DNA, 311 bp, Macaca Mulatta
caggtacatggtaaagcataaatcccacttgagattctgaattatttggctcctccatttctggaaattgagactcaagctttatgaatttatcaagaacttaaaaatgaagaaggtcacagattgatcttttataagaccttatttgatgctttgtgcttcaaggagatgatgcctgtcatccatataagcaaactttttggcttacgactatttttttaatattagccttctagtctgtaatggaaattgtatattttgatagaagttttttctcccattggttaaattagcattacttaaaatttgtt

SEQ ID NO: 25262 - DNA, 268 bp, Macaca Mulatta
ggtggcccaggccagtgtggagcaggtgaggtcgctgctggcccatgaggtagacgtggactgccagacggcctctggatacacgcccctcctgatcgccgtccaggaccagcgacccgacctctgtgccctgcttttggcacacggtgccgatgccaacctagtggatgaggatggttgggccccactgcactttgcagcccagaatggggatgaccgcactgcgcgcctgctcctggaccacggggcctgtgtggatgcccaggaa

SEQ ID NO: 25263 - DNA, 621 bp, Macaca Mulatta
  misc_feature (1)...(621): n = A,T,C or G
gggaaagtacagtctcaaaaccaccaacagcagcagtacctgcagcccttttttttggagagaagtttaaatgctttactgttggggcagtccatttctaatcctgacttggtgacagtatcatgtgtatttataaaacaaggctagccatatttaggacaactgaagaaaagctnnnnnnnnnnnnnnnnnnncaaacttgaacactgaagcaacctcaagcatctctttattttgatgatatatttttgtaaggaaaataaatattcagatgatcaggaatgtatataactaaatgaaatcaagaaaaaataacagtatgcatttaaaaggacagaattatgaaattatatgagtgcttagaatggggctaagggaagtgctgaaatagagcaaaggatggaagataatatagactatcacccactgtaaatgttttgcagtggctgtgttttaaatgggattattaaaagttgatctctatgaaatgtcaaaagccttaacttttcagggctttgcaatttttgtaaatggggaaagaaattaagaaacaatccctagggtaaaataaaacccgtaaaaaacccaaaaagcccctttaagggttttgaatggccattt

SEQ ID NO: 25264 - DNA, 136 bp, Macaca Mulatta
tagatatggcaaaccaggctgtaatgcagagacctgtgactacttcctcagctaccggatgataggggctgatgtagaatttgagctgagtgcaaaacacagactggttgggtagcagttggattctcttcagaca

SEQ ID NO: 25265 - DNA, 640 bp, Macaca Mulatta
  misc_feature (1)...(640): n = A,T,C or G
cacgcacttcccctgggttaccttcccagagccgacacagctggtcagccctcttcccgctcctgaacctttactgactgactttgagctctgtgactccatcagtcctcgcaggaattaatttaccacccagtgattcaatccacttgcgcgccatagctctgagctcctctgtgtgacatgccacagatgattattgcacacctgggtcctgccccagcaggccatgcccctccctcatgctgtgcccgttgctgcaacttccccccaccccaccacgggctgcaggaattcagcctttagaggcagaggcggctgcagcggctcctaaggtcaaaccccagcgtgactgcgtaacaatgttagctggctgttttcaaatgactggattccagacaaagtcctacaaattgaccttatttttgaaaatatgttaagggttttttaatagagaatggannnnnnnnnnnnnnnnnnntgggaacctccagattcttactgaaaattatccttctataagatagcagagagatttattcaaggtaatttgataacctaaaatcaatgctccatttttatcacatgtgggatttgttgctcaatcatattcgacattagcttttatgttcctaatatatct

SEQ ID NO: 25266 - DNA, 1078 bp, Macaca Mulatta
  misc_feature (1)...(1078): n = A,T,C or G
ggccccagatcgtatcacatccatatgacacttggaatgtgacagggcaagatgtgatctttggctgtgaggtgtttgcctaccccatggcctccatcgagtggaggaaggatggcttggacatccagctgccaggggatgacccccacatctccgtgcagnnnnnnnnnnnnnnnnnnnnnnnnnnnnnnnnnnnnnnnnnnnnnnnnnnnnnnnnnnnnnnnnnnnnnnnnnnnnnnnnnnnnnnnnnnnnnnnnnnnnnnnnnnnnnnnnnnnnnnnnnnnnnnnnnnnnnnnnnnnnnnnnnnnnnnnnnnnnnnnnnnnnnnnnnnnnnnnnnnnnnnnnnnnnnnnnnnnnnnnnnnnnnnnnnnnnnnnnnnnnnnnnnnnnnnnnnnnnnnnnnnnnnnnnnnnnnnnnnnnnnnnnnnnnnnnnnnnnnnnnnnnnnnnnnnnnnnnnnnnnnnnnnnnnnnnnnnnnnnnnnnnnnnnnnnnnnnnnnnnnnnnnnnnnnnnnnnnnnnnnnnnnnnnnnnnnnnnnnnnnnnnnnnnnnnnnnnnnnnnnnnnnnnnnnnnnnnnnnnnnnnnnnnnnnnnnnnnnnnnnnnnnnnnnnnnnnngaccagtggggtataaaggggcccatgcaggagatgccctggccagtaggccctccatcaggttgttccccaggctgggatgggggccagagcagacacggaggtggaggcaccaggattctccacttcatccagccttgctccgccacacttctaactgcccttcctcccaggccctggttcttgctatttcctggtccccaaagtttacctagcttgtttgccctttccccaaattcatcttccagaacttttccctctctcgtaagccccagttgcacctactgactgcaagtcccctttgctgtctgccctcttttgcacaagagagagcacagcagagcgtggcttagttcagtgcagagagatgggtgaggccagctccagatcttataccgctctgtgctggacaaaacctagcacagggctaggcaccaataaagatttctaatgatgcacagac

SEQ ID NO: 25267 - DNA, 154 bp, Macaca Mulatta
tttgaagtgtattgctgtctacgtttgcttccctgactttcacaggatgagcagagtgcattccttgaaaacatgttctttttttgttgtatagaatggggataatgaagggggtgagaaagtaggccttttactaatttattcatctatttga

SEQ ID NO: 25268 - DNA, 177 bp, Macaca Mulatta
  misc_feature (1)...(177): n = A,T,C or G
gtaaatacccagcagtgggattgctggatcatatgaaaatgccagactatatttcatcagcaacatctgagagttccagttgctctacaccctnnnnnnnnnnnnnnnnnnnnnnnnnnnnnnnnnnnnnnngaaggacaaattacaatgcattttgaaagactggtctacagtcaa

SEQ ID NO: 25269 - DNA, 5750 bp, Macaca Mulatta
  misc_feature (1)...(5750): n = A,T,C or G
gtgtaccatggagtgtggtagccatggagtctgctccttaggaatttgccagtgtgaagaaggctgggtaggaccaacatgtgaggaacgctcctgtcattctcattgtactgagcatggccaatgcaaagatggaaaatgtgagtgtagccctggatgggagggcgaccactgcacaattgnnnnnnnnnnnnnnnnnnnnnnnnnnnnnnnnnnnnnnnnnnnnnnnnnnnnnnnnnnnnnnnnnnnnnnnnnnnnnnnnnnnnnnnnnnnnnnnnnnnnnnnnnnnnnnnnnnnnnnnnnnnnnnnnnnnnnnnnnnnnnnnnnnnnnnnnnnnnnnnnnnnnnnnnnnnnnnnnnnnnnnnnnnnnnnnnnnnnnnnnnnnnnnnnnnnnnnnnnnnnnnnnnnnnnnnnnnnnnnnnnnnnnnnnnnnnnnnnnnnnnnnnnnnnnnnnnnnnnnnnnnnnnnnnnnnnnnnnnnnnnnnnnnnnnnnnnnnnnnnnnnnnnnnnnnnnnnnnnnnnnnnnnnnnnnnnnnnnnnnngcaggcgtgcctgtgtgattcgaggccaagtggtggccgtagatggaactcctctagtgggagtgaatgtcagtttcttgcaccacagtgattatgggtttaccatcagccgacaagatggaannnnnnnnnnnnnnnnnnnnnnnnnnnnnnnnnnnnnnnnnnnnnnnnnnnnnnnnnnnnnnnnnnnnnnnnnnnnnnnnnnnnnnnnnnnnnnnnnnnnnnnnnnnnnnnnnnnnnnnnnnnnnnnnnnnnnnnnnnnnnnnnnnnnnnnnnnnnnnnnnnnnnnnnnnnnnnnnnnnnnnnnnnnnnnnnnnnnnnnnnnnnnnnnnnnnnnnnnnnnnnnnnnnnnnnnnnnnnnnnnnnnnnnnnnnnnnnnnnnaggttgtacaggaggaaattcccattccctccagctttgtgaggctgagttacctgagcagccgcacccctgggtataaaaccctgctacggatccttctgacacattcaacgattcctgtcgggatgataaaagtacacctcacagtagctgtggaagggcgactcacacagaagtggtttcccgccgcaattaatcttgtctacacgtttgcttggaacaagaccgacatctatggacagaaggtttggggcctggcagaggctttggnnnnnnnnnnnnnnnnnnnnnnnnnnnnnnnnnnnnnnnnnnnnnnnnnnnnnnnnnnnnnnnnnnnnnnnnnnnnnnnnnnnnnnnnnnnnnnnnnnnnnnnnnnnnnnnnnnnnnnnnnnnnnnnnnnnnnnnnnnnnnnnnnnnnnnnnnnnnnnnnnnnnnnnnnnnnnnnnnnnnnnnnnnnnnnnnnnnnnnnnnnnnnnnnnnnnnnnnnnnnnnnnnnnnnnnnnnnnnnnnnnnnnnnnnnnnnnnnnnnnnnnnnnnnnnnnnnnnnnnnnnnnnnnnnnnnnnnnnnnnnnnnnnnnnnnnnnnnnnnnnnnnnnnnnnnnnnnnnnnnnnnnnnnnnnnnnnnnnnnnnnnnnnnnnnnnnnnnnnnnnnnnnnnnnnnnnnnnnnnnnnnnnnnnnnnnnnnnnnnnnnnnnnnnnnnnnnnnnnnnnnnnnnnnnnnnnnnnnnnnnnnnnnnnnnnnnnnnnnnnnnnnnnnnnnnnnnnnnnnnnnnnnnnnnnnnnnnnnnnnnnnnnnnnnnnnnnnnnnnnnnnnnnnnnnnnnnnnnnnnnnnnnnnnnnnnnnnnnnnnnnnnnnnnnnnnnnnnnnnnnnnnnnnnnnnnnnnnnnnnnnnnnnnnnnnnnnnnnnnnnnnnnnnnnnnnnnnnnnnnnnnnnnnnnnnnnnnnnnnnnnnnnnnnnnnnnnnnnnnnnnnnnnnnnnnnnnnnnnnnnnnnnnnnnnnnnnnnnnnnnnnnnnnnnnnnnnnnnnnnnnnnnnnnnnnnnnnnnnnaggtgcgattagagtggccaacagaccttgcagtcaatcctatggacaattcattgtatgtcttggataacaacattgtgttgcaaatttctgagaataggcgcgtgcggatcattgcaggacgccccattcactgccaggtgccaggcattgatcatttcctggtcagcaaggtagcaattcactccactctagagtcagcgagggccatcagtgtctcccacagcgggctgctcttcatagctgaaacagacgagaggaaagtaaaccgcattcagcaagtaaccaccaatggggagatctccatcatcgctggtgcccccactgactgtgactgcaaaattgatcnnnnnnnnnnnnnnnnnncaggtgatggtggctatgcgaaagatgcaaagatgaaagccccttcctccttagcagtgtcgcctgatggtaccctctatgtggcagacctgggaaatgttcgaattcgtaccatcagcaggaaccaagcccacctgaatgacatgaacctttatgagattgcttcacctgctgatcaggaactgtaccagttcactgtaaatggaacccacctacacaccctgaacttgataacaagggactatgtttataacttcacctacaattctgaaggtgacttgggtgcaattaccagcagcaatggcaattcagtgcacattcgccgtgatgcaggtggaatgcccgtatggcttgtggtgcctggcgggcaagtatactggctgactataagcagcaatgnnnnnnnnnnnnnnnnnnnnnnnnnnnnnnnnnnnnnnnnnnnnnnnnnnnnnnnnnnnnnnnnnnnnnnnnnnnnnnnnnnnnnnnnnnnnnnnnnnnnnnnnnnnnnnnnnnnnnnnnnnnnnnnnnnnnnnnnnnnnnnnnnnnnnnnnnnnnnnnnnnnnnnnnnnnnnnnnnnnnnnnnnnnnnnnnnnnnnnnnnnnnnnnnnnnnnnnnnnnnnnnnnnnnnnnnnnnnnnnnnnnnnnnnnnnnnnnnnnnnnnnnnnnnnnnnnnnnnnnnnnnnnagaaaatactcagagtacctatcgggtgagtccagatggttccctgcgtgtcacttttgccagcggaatggagatcaacctcagctcagagccccacatcctggcaggggcagtcaaccctaccctgggcaaatgcaacatctcattgcccggannnnnnnnnnnnnnnnnnnnnnnnnnnnnnnnnnnnnnnnnnnnnnnnnnnnnnnnnnnnnnnnnnnnnnnnnnnnnnnnnnnnnnnnnnnnnnnnnnnnnnnnnnnnnnnnnnnnnnnnnnnnnnnnnnnnnnnnnnnnnnnnnnnnnnnnnnnnnnnnnnnnnnnnnnnnnnnnnnnnnnnnnnnnnnnnnnnnnnnnnnnnnnnnnnnnnnnnnnnnnnnnnnnnnnnnnnnnnnnnnnnnnnnnnnnnnnnnnnnnnnnnnnnnnnnnnnnnnnnnnnnnnnnnnnnnnnnnnnnnnnnnnnnnnnnnnnnnnnnnnnnnnnnnnnnnnnnnnnnnnnnnnnnnnnnnnnnnnnnnnnnnnnnnnnnnnnnnnnnnnnnnnnnnnnnnnnnnnnnnnnnnnnnnnnnnnnnnnnnnnnnnnnnnnnnnnnnnnnnnnnnnnnnnnnnnnnnnnnnnnnnnnnnnnnnnnnnnnnnnnnnnnnnnnnnnnnnnnnnnnnnnnnnnnnnnnnnnnnnnnnnnnnnnnnnnnnnnnnnnnnnnnnnnnnnnnnnnnnnnnnnnnnnnnnnnnnnnnnnnnnnnnnnnnnnnnnnnnnnnnnnnnnnnnnnnnnnnnnnnnnnnnnnnnnnnnnnnnnnnnnnnnnnnnnnnnnnnnnnnnnnnnnnnnnnnnnnnnnnnnnnnnnnnnnnnnnnnnnnnnnnnnnnnnnnnnnnnnnnnnnnnnnnnnnnnnnnnnnnnnnnnnnnnnnnnnnnnnnnnnnnnnnnnnnnnnnnnnnnnnnnnnnnnnnnnnnnnnnnnnnnnnnnnnnnnnnnnnnnnnnnnnnnnnnnnnnnnnnnnnnnnnnnnnnnnnnnnnnnnnnnnnnnnnnnnnnnnnnnnnnnnnnnnnnnnnnnnnnnnnnnnnnnnnnnnnnnnnnnnnnnnnnnnnnnnnnnnnnnnnnnnnnnnnnnnnnnnnnnnnnnnnnnnnnnnnnnnnnnnnnnnnnnnnnnnnnnnnnnnnnnnnnnnnnnnnnnnnnnnnnnnnnnnnnnnnnnnnnnnnnnnnnnnnnnnnnnnnnnnnnnnnnnnnnnnnnnnnnnnnnnnnnnnnnnnnnnnnnnnnnnnnnnnnnnnnnnnnnnnnnnnnnnnnnnnnnnnnnnnnnnnnnnnnnnnnnnnnnnnnnnnnnnnnnnnnnnnnnnnnnnnnnnnnnnnnnnnnnnnnnnnnnnnnnnnnnnnnnnnnnnnnnnnnnnnnnnnnnnnnnnnnnnnnnnnnnnnnnnnnnnnnnnnnnnnnnnnnnnnnnnnnnnnnnnnnnnnnnnnnnnnnnnnnnnnnnnnnnnnnnnnnnnnnnnnnnnnnnnnnnnnnnnnnnnnnnnnnnnnnnnnnnnnnnnnnnnnnnnnnnnnnnnnnnnnnnnnnnnnnnnnnnnnnnnnnnnnnnnnnnnnnnnnnnnnnnnnnnnnnnnnnnnnnnnnnnnnnnnnnnnnnnnnnnnnnnnnnnnnnnnnnnnnnnnnnnnnnnnnnnnnnnnnnnnnnnnnnnnnnnnnnnnnnnnnnnnnnnnnnnnnnnnnnnnnnnnnnnnnnnnnnnnnnnnnnnnnnnnnnnnnnnnnnnnnnnnnnnnnnnnnnnnnnnnnnnnnnnnnnnnnnnnnnnnnnnnnnnnnnnnnnnnnnnnnnnnnnnnnnnnnnnnnnnnnnnnnnnnnnnnnnnnnnnnnnnnnnnnnnnnnnnnnnnnnnnnnnnnnnnnnnnnnnnnnnnnnnnnnnnnnnnnnnnnnnnnnnnnnnnnnnnnnnnnnnnnnnnnnnnnnnnnnnnnnnnnnnnnnnnnnnnnnnnnnnnnnnnnnnnnnnnnnnnnnnnnnnnnnnnnnnnnnnnnnnnnnnnnnnnnnnnnnnnnnnnnnnnnnnnnnnnnnnnnnnnnnnnnnnnnnnnnnnnnnnnnnnnnnnnnnnnnnnnnnnnnnnnnnnnnnnnnnnnnnnnnnnnnnnnnnnnnnnnnnnnnnnnnnnnnnnnnnnnnnnnnnnnnnnnnnnnnnnnnnnnnnnnnnnnnnnnnnnnnnnnnnnnnnnnnnnnnnnnnnnnnnnnnnnnnnnnnnnnnnnnnnnnnnnnnnnnnnnnnnnnnnnnnnnnnnnnnnnnnnnnnnnnnnnnnnnnnnnnagactatcctgggcattcagtgtgaactccagaaacagctcaggaatttcatttccttggaccaactacctatgactccccgatacaatgatggacggtgccttgaaggagggaagcaaccaaggtttgctgctgtcccttctgtttttgggaaaggtataaaatttgccatcaaggatggcatagtaacagctgatattataggagtagccaatgaagatagcaggcggcttgctgccattctcaataatgcccattacctggaaaacctacattttaccatagaggggagggacactcattacttcattaagcttggatctctggaggaagacctggtgctcattggtaacactggggggaggcgaattctggagaatggtgtcaatgtcactgtgtcccagatgacttctgtgttgaatgggagaactagacggtttgca

SEQ ID NO: 25270 - DNA, 458 bp, Macaca Mulatta
  misc_feature (1)...(458): n = A,T,C or G
ggggggttgcagacggagggcaggtcttcctcttttctgagactggatctgtttaaacagcaaacacccacagatggcccagaggtggcggcagtcagagtgtgtgggtgtttttagggttctttagcgttgcttctttgaccaggggtggtggtcccagccagtttggtgctgacggtgagaggaaattagaacctgtttgcaaattgtccaacccaccccctcaacatgaggggcttccattttctgtgtttcgtaagggaaatgtttccttcaggccgccatgttcctgatattagttctgatttctttttaaccaatgttatcatgattaagaaaatttccagcactttaatggccaattaactgagaatgtaagaaaattgatgctgtacaaggcaaataaaactgtttattaaccnnnnnnnnnnnnnnnnnnnnnnnnnnnnnnnnnnnnc

SEQ ID NO: 25271 - DNA, 358 bp, Macaca Mulatta
  misc_feature (1)...(358): n = A,T,C or G
gggtgtgacagatgtgttgtgtgaagcttgtgaccagttgggatggacaaaacccaccaagatcctgattgaagctattcctttggccttacaannnnnnnnnnnnnnnnnnnnnnnnnnnnnnnnnnnnnnnnnnnnnnnnnnnnnnnnnnnnnnnnnnnnnnnnnnnnnnnnnnnnnnnnnnnnnnnnnnnnnnnnnnnnnnnnnnnnnnnnnnnnnnnnnnnnnnnnnnnnnnnnnnnnnnnnnnnnnnnnnnnnnnnnnnnnnnnnnnnnnnnnnnnnnaggttgacaagatcctcaaagtgatccctcgagatcggaaaacattcctcttctctgccaccatgaccaagaagg

SEQ ID NO: 25272 - DNA, 153 bp, Macaca Mulatta
tccctgggtgggggccccgagggcccgtgcttctgccccaccccctgcaacctgacgcgctatgggaaagagatctccatggtcaggatccccaacaggggctcagcccggtacctggcgaggaagtacaaccgcaatgagacctacatacgg

SEQ ID NO: 25273 - DNA, 1785 bp, Macaca Mulatta
  misc_feature (1)...(1785): n = A,T,C or G
agccacacggaacgctgctgactggtggctctctcactggatctctcagctgaaggctgagaatagctcccaagaggtgcaagcctccaccagcccagcttatacggggctcttctctccgcaactgctcctcttttcccccggaaacctctnnnnnnnnnnnnnnnnnnnnnnnnnnnnnnnnnnnnnnnnnnnnnnnnnnnnnnnnnnnnnnnnnnnnnnnnnnnnnnnnnnnnnnnnnnnnnnnnnnnnnnnnnnnnnnnnnnnnnnnnnnnnnnnnnnnnnnnnnnnnnnnnnnnnnnnnnnnnnnnnnnnnnnnnnnnnnnnnnnnnnnnnnnnnnnnnnnnnnnnnnnnnnnnnnnnnnnnnnnnnnnnnnnnnnnnnnnnnnnnnnnnnnnnnnnnnnnnnnnnnnnnnnnnnnnnnnnnnnnnnnnnnnnnnnnnnnnnnnnnnnnnnnnnnnnnnnnnnnnnnnnnnnnnnnnnnnnnnnnnnnnnnnnnnnnnnnnnnnnnnnnnnnnnnnnnnnnnnnnnnnnnnnnnnnnnnnnnnnnnnnnnnnnnnnnnnnnnnnnnnnnnnnnnnnnnnnnnnnnnnnnnnnnnnnnnnnnnnnnnnnnnnnnnnnnnnnnnnnnnnnnnnnnnnnnnnnnnnnnnnnnnnnnnnnnnnnnnnnnnnnnnnnnnnnnnnnnnnnnnnnnnnnnnnnnnnnnnnnnnnnnnnnnnnnnnnnnnnnnnnnnnnnnnnnnnnnnnnnnnnnnnnnnnnnnnnnnnnnnnnnnnnnnnnnnnnnnnnnnnnnnnnnnnnnnnnnnnnnnnnnnnnnnnnnnnnnnnnnnnnnnnnnnnnnnnnnnnnnnnnnnnnnnnnnnnnnnnnnnnnnnnnnnnnnnnnnnnnnnnnnnnnnnnnnnnnnnnnnnnnnnnnnnnnnnnnnnnnnnnnnnnnnnnnnnnnnnnnnnnnnnnnnnnnnnnnnnnnnnnnnnnnnnnnnnnnnnnnnnnnnnnnnnnnnnnnnnnnnnnnnnnnnnnnnnnnnnnnnnnnnnnnnnnnnnnnnnnnnnnnnnnnnnnnnnnnnnnnnnnnnnnnnnnnnnnnnnnnnnnnnnnnnnnnnnnnnnnnnnnnnnnnnnnnnnnnnnnnnnnnnnnnnnnnnnnnnnnnnnnnnnnnnnnnnnnnnnnnnnnnnnnnnnnnnnnnnnnnnnnnnnnnnnnnnnnnnnnnnnnnnnnnnnnnnnnnnnnnnnnnnnnnnnnnnnnnnnnnnnnnnnnnnnnnnnnnnnnnnnnnnnnnnnnnnnnnnnnnnnnnnnnnnnnnnnnnnnnnnnnnnnnnnnnnnnnnnnnnnnnnnnnnnnnnnnnnnnnnnnnnnnnnnnnnnnnnnnnnnnnnnnnnnnnnnnnnnnnnnnnnnnnnnnnnnnnnnnnnnnnnnnnnnnnnnnnnnnnnnnnnnnnnnnnnnnnnnnnnnnnnnnnnnnnnnnnnnnnnnnnnnnnnnnnnnnnnnnnnnnnnnnnnnnnnnnnnnnnnnnnnnnnnnnnnnnnnnnnnnnnnnnnnnnnnnnnnnnnnnnnnnnnnnnnnnnnnnnnnnnnnnnnnnnnnnnnnnnnnnnnnnnnnnnnnnnnnnnnnnnnnnnnnnnnnnnnnnnnnnnnnnncacgatcgtgaactcagacgggttgtgggttctacaagcggggagagtggtagagctagactccccggccaacttgcgcaaccagctccactcgatattccagcagctgctgcagagcagcccgcagagagtccccgcctcactcggaggt

SEQ ID NO: 25274 - DNA, 121 bp, Macaca Mulatta
tggcctgaccaggaactactgcaggaatccagattctgggaaacaaccctggtgttacacgactgatccatgtgtgaggtgggagtactgcaacctgacacaatgctcagaaacagaatca

SEQ ID NO: 25275 - DNA, 3961 bp, Macaca Mulatta
  misc_feature (1)...(3961): n = A,T,C or G
tgggggccacgtttgtctgggccttgggccttttgatgccgcagatgctgctctttgtggctnnnnnnnnnnnnnnnnnnnnnnnnnnnnnnnnnnnnnnnnnnnnnnnnnnnnnnnnnnnnnnnnnnnnnnnnnnnnnnnnnnnnnnnnnnnnnnnnnnnnnnnnnnnnnnnnnnnnnnnnnnnnnnnnnnnnnnnnnnnnnnnnnnnnnnnnnnnnnnnnnnnnnnnnnnnnnnnnnnnnnnnnnnnnnnnnnnnnnnnnnnnnnnnnnnnnnnnnnnnnnnnnnnnnnnnnnnnnnnnnnnnnnnnnnnnnnnnnnnnnnnnnnnnnnnnnnnnnnnnnnnnnnnnnnnnnnnnnnnnnnnnnnnnnnnnnnnnnnnnnnnnnnnnnnnnnnnnnnnnnnnnnnnnnnnnnnnnnnnnnnnnnnnnnnnnnnnnnnnnnnnnnnnnnnnnnnnnnnnnnnnnnnnnnnnnnnnnnnnnnnnnnnnnnnnnnnnnnnnnnnnnnnnnnnnnnnnnnnnnnnnnnnnnnnnnnnnnnnnnnnnnnnnnnnnnnnnnnnnnnnnnnnnnnnnnnnnnnnnnnnnnnnnnnnnnnnnnnnnnnnnnnnnnnnnnnnnnnnnnnnnnnnnnnnnnnnnnnnnnnnnnnnnnnnnnnnnnnnnnnnnnnnnnnnnnnnnnnnnnnnnnnnnnnnnnnnnnnnnnnnnnnnnnnnnnnnnnnnnnnnnnnnnnnnnnnnnnnnnnnnnnnnnnnnnnnnnnnnnnnnnnnnnnnnnnnnnnnnaggtcttctacgtgggcccggcccgccgcctgacactggctggcgcgcgtgcacagtgccgccgccagggtgccgcgctggcctcggtgggacagctgcacctggnnnnnnnnnnnnnnnnnnnnnnnnnnnnnnnnnnnnnnnnnnnnnnnnnnnnnnnnnnnnnnnnnnnnnnnnnnnnnnnnnnnnnnnnnnnnnnnnnnnnnnnnnnnnnnnnnnnnnnnnnnnnnnnnnnnnnnnnnnnnnnnnnnnnnnnnnnnnnnnnnnnnnnnnnnnnnnnnnnnnnnnnagctcatcaccccacatcacaacatggagacctagagaccccatcctctggggatgagggggagattctgtcagcagaggggcccccagttagagaactggagcacacactggaggaggaagaggtggtcacccctgacttccaggagcctctggtgtnnnnnnnnnnnnnnnnnnnnnnnnnnnnnnnnnnnnnnnnnnnnnnnnnnnnnnnnnnnnnnnnnnnnnnnnnnnnnnnnnnnnnnnnnnnnnnnnnnnnnnnnnnnnnnnnnnnnnnnnnnnnnnnnnnnnnnnnnnnnnnnnnnnnnnnnnnnnnnnnnnnnnnnnnnnnnnnnnnnnnnnnnnnnnnnnnnnnnnnnnnnnnnnnnnnnnnnnnnnnnnnnnnnnnnnnnnnnnnnnnnnnnnnnnnnnnnnnnnnnnnnnnnnnnnnnnnnnnnnnnnnnnnnnnnnnnnnnnnnnnnnnnnnnnnnnnnnnnnnnnnnnnnnnnnnnnnnnnnnnnnnnnnnnnnnnnnnnnnnnnnnnnnnnnnnnnnnnnnnnnnnnnnnnnnnnnnnnnnnnnnnnnnnnnnnnnnnnnnnnnnnnnnnnnnnnnnnnnnnnnnnnnnnnnnnnnnnnnnnnnnnnnnnnnnnnnnnnnnnnnnnnnnnnnnnnnnnnnnnnnnnnnnnnnnnnnnnnnnnnnnnnnnnnnnnnnnnnnnnnnnnnnnnnnnnnnnnnnnnnnnnnnnnnnnnnnnnnnnnnnnnnnnnnnnnnnnnnnnnnnnnnnnnnnnnnnnnnnnnnnnnnnnnnnnnnnnnnnnnnnnnnnnnnnnnnnnnnnnnnnnnnnnnnnnnnnnnnnnnnnnnnnnnnnnnnnnnnnnnnnnnnnnnnnnnnnnnnnnnnnnnnnnnnnnnnnnnnnnnnnnnnnnnnnnnnnnnnnnnnnnnnnnnnnnnnnnnnnnnnnnnnnnnnnnnnnnnnnnnnnnnnnnnnnnnnnnnnnnnnnnnnnnnnnnnnnnnnnnnnnnnnnnnnnnnnnnnnnnnnnnnnnnnnnnnnnnnnnnnnnnnnnnnnnnnnnnnnnnnnnnnnnnnnnnnnnnnnnnnnnnnnnnnnnnnnnnnnnnnnnnnnnnnnnnnnnnnnnnnnnnnnnnnnnnnnnnnnnnnnnnnnnnnnnnnnnnnnnnnnnnnnnnnnnnnnnnnnnnnnnnnnnnnnnnnnnnnnnnnnnnnnnnnnnnnnnnnnnnnnnnnnnnnnnnnnnnnnnnnnnnnnnnnnnnnnnnnnnnnnnnnnnnnnnnnnnnnnnnnnnnnnnnnnnnnnnnnnnnnnnnnnnnnnnnnnnnnnnnnnnnnnnnnnnnnnnnnnnnnnnnnnnnnnnnnnnnnnnnnnnnnnnnnnnnnnnnnnnnnnnnnnnnnnnnnnnnnnnnnnnnnnnnnnnnnnnnnnnnnnnnnnnnnnnnnnnnnnnnnnnnnnnnnnnnnnnnnnnnnnnnnnnnnnnnnnnnnnnnnnnnnnnnnnnnnnnnnnnnnnnnnnnnnnnnnnnnnnnnnnnnnnnnnnnnnnnnnnnnnnnnnnnnnnnnnnnnnnnnnnnnnnnnnnnnnnnnnnnnnnnnnnnnnnnnnnnnnnnnnnnnnnnnnnnnnnnnnnnnnnnnnnnnnnnnnnnnnnnnnnnnnnnnnnnnnnnnnnnnnnnnnnnnnnnnnnnnnnnnnnnnnnnnnnnnnnnnnnnnnnnnnnnnnnnnnnnnnnnnnnnnnnnnnnnnnnnnnnnnnnnnnnnnnnnnnnnnnnnnnnnnnnnnnnnnnnnnnnnnnnnnnnnnnnnnnnnnnnnnnnnnnnnnnnnnnnnnnnnnnnnnnnnnnnnnnnnnnnnnnnnnnnnnnnnnnnnnnnnnnnnnnnnnnnnnnnnnnnnnnnnnnnnnnnnnnnnnnnnnnnnnnnnnnnnnnnnnnnnnnnnnnnnnnnnnnnnnnnnnnnnnnnnnnnnnnnnnnnnnnnnnnnnnnnnnnnnnnnnnnnnnnnnnnnnnnnnnnnnnnnnnnnnnnnnnnnnnnnnnnnnnnnnnnnnnnnnnnnnnnnnnnnnnnnnnnnnnnnnnnnnnnnnnnnnnnnnnnnnnnnnnnnnnnnnnnnnnnnnnnnnnnnnnnnnnnnnnnnnnnnnnnnnnnnnnnnnnnnnnnnnnnnnnnnnnnnnnnnnnnnnnnnnnnnnnnnnnnnnnnnnnnnnnnnnnnnnnnnnnnnnnnnnnnnnnnnnnnnnnnnnnnnnnnnnnnnnnnnnnnnnnnnnnnnnnnnnnnnnnnnnnnnnnnnnnnnnnnnnnnnnnnnnnnnnnnnnnnnnnnnnnnnnnnnnnnnnnnnnnnnnnnnnnnnnnnnnnnnnnnnnnnnnnnnnnnnnnnnnnnnnnnnnnnnnnnnnnnnnnnnnnnnnnnnnnnnnnnnnnnnnnnnnnnnnnnnnnnnnnnnnngcaattcgagaactggcgagagaaccagccggacaatttctttgcgggtggcgaggactgtgtggtgatggtggcgcatgaaagcgggcgctggaacgatgtcccctgcaactacaacctaccctatgtctgcaagaagggcacannnnnnnnnnnnnnnnnnnnnnnnnnnnnnnnnnnnnnnnnnnnnnnnnnnnnnnnnnnnnnnnnnnnnnnnnnnnnnnnnnnnnnnnnnnnnnnnnnnnnnnnnnnnnnnnnnnnnnnnnnnnnnnnnnnnnnnnnnnnnnnnnnnnnnnnnnnnnnnnnnnnnnnnnnnnnnnnnnnnnnnnnnnnnnnnnnnnnnnnnnnnnnnnnnnnnnnnnnnnnnnnnnnnnnnnnnnnnnnnnnnnnnnnnnnaatcccacaaggagcgcagaaaacacaagaaacacccaatggaggactgggagaaggatgaaggaaatttctgctga

SEQ ID NO: 25276 - DNA, 8317 bp, Macaca Mulatta
  misc_feature (1)...(8317): n = A,T,C or G
tgccgtgagtccggagatgccccccgacctactggccttccccgggccccgaccctcgttcagggactcccgcgggcgaggggcggccttcggcttccccggggcctccccacgggcgtcgcggaggcgagcctggtcaccactggcctcgccccagccctcgctgaagagcctgccgggccccggctaccgctcacccttggcgcccccgtcgcctcagctgtccttgcgcgcgggacccttccagccgcccttcccgcccccggcccgccagccccgctcgctgcaggagtccccagccccacgcagagccgcggggcgcctgggcccaccccgctcgccgctgccgggctcacccaggccaccctcgccgcccccggggctgggccacagcccgcggcgccgctccctgaatctgccctcgcacctcccgcacacgtggcggcgcctcagcgagccacccactcgggctgtgaagccacgagtgcgcccgcccttccaccgaccgcccggggccggagccggggcctggcgggcgcccctggagcaccgggaaagcccgcgagaagccgaggactcagaggtgccctggaccgtgcccccgctggcccccatctgggacgtggacatgcctcccacccaacgcccaccctccccctggccaggaggtgcaggcagccgccgaggcttttccaggccaccccctggccggaaaacccctttctccagnnnnnnnnnnnnnnnnnnnnnnnnnnnnnnnnnnnnnnnnnnnnnnnnnnnnnnnnnnnnnnnnnnnnnnnnnnnnnnnnnnnnnnnnnnnnnnnnnnnnnnnnnnnnnnnnnnnnnnnnnnnnnnnnnnnnnnnnnnnnnnnnnnnnnnnnnnnnnnnnnnnnnnnnnnnnnnnnnnnnnnnnnnnnnnnnnnnnnnnnnnnnnnnnnnnnnnnnnnnnnnnnnnnnnnnnnnnnnnnnnnnnnnnnnnnnnnnnnnnnnnnnnnnnnnnnnnnnnnnnnnnnnnnnnnnnnnnnnnnnnnnnnnnnnnnnnnnnnnnnnnnnnnnnnnnnnnnnnnnnnnnnnnnnnnnnnnnnnnnnnnnnnnnnnnnnnnnnnnnnnnnnnnnnnnnnnnnnnnnnnnnnnnnnnnnnnnnnnnnnnnnnnnnnnnnnnnnnnnnnnnnnnnnnnnnnnnnnnnnnnnnnnnnnnnnnnnnnnnnnnnnnnnnnnnnnnnnnnnnnnnnnnnnnnnnnnnnnnnnnnnnnnnnnnnnnnnnnnnnnnnnnnnnnnnnnnnnnnnnnnnnnnnnnnnnnnnnnnnnnnnnnnnnnnnnnnnnnnnnnnnnnnnnnnnnnnnnnnnnnnnnnnnnnnnnnnnnnnnnnnnnnnnnnnnnnnnnnnnnnnnnnnnnnnnnnnnnnnnnnnnnnnnnnnnnnnnnnnnnnnnnnnnnnnnnnnnnnnnnnnnnnnnnnnnnnnnnnnnnnnnnnnnnnnnnnnnnnnnnnnnnnnnnnnnnnnnnnnnnnnnnnnnnnnnnnnnnnnnnnnnnnnnnnnnnnnnnnnnnnnnnnnnnnnnnnnnnnnnnnnnnnnnnnnnnnnnnnnnnnnnnnnnnnnnnnnnnnnnnnnnnnnnnnnnnnnnnnnnnnnnnnnnnnnnnnnnnnnnnnnnnnnnnnnnnnnnnnnnnnnnnnnnnnnnnnnnnnnnnnnnnnnnnnnnnnnnnnnnnnnnnnnnnnnnnnnnnnnnnnnnnnnnnnnnnnnnnnnnnnnnnnnnnnnnnnnnnnnnnnnnnnnnnnnnnnnnnnnnnnnnnnnnnnnnnnnnnnnnnnnnnnnnnnnnnnnnnnnnnnnnnnnnnnnnnnnnnnnnnnnnnnnnnnnnncagatcctggaggcaacacccctcttggagtccttcggtaatgccaaaaccgtcaggaacgacaactccagccgctttgggaagttcatggaaatctttctggaaggnnnnnnnnnnnnnnnnnnnnnnnnnnnnnnnnnnnnnnnnnnnnnnnnnnnnnnnnnnnnnnnnnnnnnnnnnnnnnnnnnnnnnnnnnnnnnnnnnnnnnnnnnnnnnnnnnnnnnnnnnnnnnnnnnnnnnnnnnnnnnnnnnnnnnnnnnnnnnnnnnnnnnnnnnnnnnnnnnnnnnnnnnnnnnnnnnnnnnnnnnnnnnnnnnnnnnnnnnnnnnnnnnnnnnnnnnnnnnnnnnnnnnnnnnnnnnnnnnnnnnnnnnnnnnnnnnnnnnnnnnnnnnnnnnnnnnnnnnnnnnnnnnnnnnnnnnnnnnnnnnnnnnnnnnnnnnnnnnnnnnnnnnnnnnnnnnnnnnnnnnnnnnnnnnnnnnnnnnnnnnnnnnnnnnnnnnnnnnnnnnnnnnnnnnnnnnnnnnnnnnnnnnnnnnnnnnnnnnnnnnnnnnnnnnnnnnnnnnnnnnnnnnnnnnnnnnnnnnnnnnnnnnnnnnnnnnnnnnnnnnnnnnnnnnnnnnnnnnnnnnnnnnnnnnnnnnnnnnnnnnnnnnnnnnnnnnnnnnnnnnnnnnnnnnnnnnnnnnnnnnnnnnnnnnnnnnnnnnnnnnnnnnnnnnnnnnnnnnnnnnnnnnnnnnnnnnnnnnnnnnnnnnnnnnnnnnnnnnnnnnnnnnnnnnnnnnnnnnnnnnnnnnnnnnnnnnnnnnnnnnnnnnnnnnnnnnnnnnnnnnnnnnnnnnnnnnnnnnnnnnnnnnnnnnnnnnnnnnnnnnnnnnnnnnnnnnnnnnnnnnnnnnnnnnnnnnnnnnnnnnnnnnnnnnnnnnnnnnnnnnnnnnnnnnnnnnnnnnnnnnnnnnnnnnnnnnnnnnnnnnnnnnnnnnnnnnnnnnnnnnnnnnnnnnnnnnnnnnnnnnnnnnnnnnnnnnnnnnnnnnnnnnnnnnnnnnnnnnnnnnnnnnnnnnnnnnnnnnnnnnnnnnnnnnnnnnnnnnnnnnnnnnnnnnnnnnnnnnnnnnnnnnnnnnnnnnnnnnnnnnnnnnnnnnnnnnnnnnnnnnnnnnnnnnnnnnnnnnnnnnnnnnnnnnnnnnnnnnnnnnnnnnnnnnnnnnnnnnnnnnnnnnnnnnnnnnnnnnnnnnnnnnnnnnnnnnnnnnnnnnnnnnnnnnnnnnnnnnnnnnnnnnnnnnnnnnnnnnnnnnnnnnnnnnnnnnnnnnnnnnnnnnnnnnnnnnnnnnnnnnnnnnnnnnnnnnnnnnnnnnnnnnnnnnnnnnnnnnnnnnnnnnnnnnnnnnnnnnnnnnnnnnnnnnnnnnnnnnnnnnnnnnnnnnnnnnnnnnnnnnnnnnnnnnnnnnnnnnnnnnnnnnnnnnnnnnnnnnnnnnnnnnnnnnnnnnnnnnnnnnnnnnnnnnnnnnnnnnnnnnnnnnnnnnnnnnnnnnnnnnnnnnnnnnnnnnnnnnnnnnnnnnnnnnnnnnnnnnnnnnnnnnnnnnnnnnnnnnnnnnnnnnnnnnnnnnnnnnnnnnnnnnnnnnnnnnnnnnnnnnnnnnnnnnnnnnnnnnnnnnnnnnnnnnnnnnnnnnnnnnnnnnnnnnnnnnnnnnnnnnnnnnnnnnnnnnnnnnnnnnnnnnnnnnnnnnnnnnnnnnnnnnnnnnnnnnnnnnnnnnnnnnnnnnnnnnnnnnnnnnnnnnnnnnnnnnnnnnnnnnnnnnnnnnnnnnnnnnnnnnnnnnnnnnnnnnnnnnnnnnnnnnnnnnnnnnnnnnnnnnnnnnnnnnnnnnnnnnnnnnnnnagctgagggcagagtggaggtgccaggtggagggggcgtggctgcgggagcaggaggnaggagctgagcaagcgggaggtagtggctgtggggcacctggaggtaccggctgagctggctgggctcttgcaagcagtggcaggncaggcctcaggctggcccaggtgcctcaggtggcccctgtgcggactcctcggctccaggctgagccccgtgtcacactgcccctggacatcaacaactatcctatggccaagtttgtccggtgccacttcaaggnnnnnnnnnnnnnnnnnnnnnnnnnnnnnnnnnnnnnnnnnnnnnnnnnnnnnnnnnnnnnnnnnnnnnnnnnnnnnnnnnnnnnnnnnnnnnnnnnnnnnnnnnnnnnnnnnnnnnnnnnnnnnnnnnnnnnnnnnnnnnnnnnnnnnnnnnnnnnnnnnnnnnnnnnnnnnnnnnnnnnnnnnnnnnnnnnnnnnnnnnnnnnnnnnnnnnnnnnnnnnnnnnnnnnnnnnnnnnnnnnnnnnnnnnnnnnnnnnnnnnnnnnnnnnnnnnnnnnnnnnnnnnnnnnnnnnnnnnnnnnnnnnnnnnnnnnnnnnnnnnnnnnnnnnnnnnnnnnnnnnnnnnnnnnnnnnnnnnnnnnnnnnnnnnnnnnnnnnnnnnnnnnnnnnnnnnnnnnnnnnnnnnnnnnnnnnnnnnnnnnnnnnnnnnnnnnnnnnnnnnnnnnnnnnnnnnnnnnnnnnnnnnnnnnnnnnnnnnnnnnnnnnnnnnnnnnnnnnnnnnnnnnnnnnnnnnnnnnnnnnnnnnnnnnnnnnnnnnnnnnnnnnnnnnnnnnnnnnnnnnnnnnnnnnnnnnnnnnnnnnnnnnnnnnnnnnnnnnnnnnnnnnnnnnnnnnnnnnnnnnnnnnnnnnnnnnnnnnnnnnnnnnnnnnnnnnnnnnnnnnnnnnnnnnnnnnnnnnnnnnnnnnnnnnnnnnnnnnnnnnnnnnnnnnnnnnnnnnnnnnnnnnnnnnnnnnnnnnnnnnnnnnnnnnnnnnnnnnnnnnnnnnnnnnnnnnnnnnnnnnnnnnnnnnnnnnnnnnnnnnnnnnnnnnnnnnnnnnnnnnnnnnnnnnnnnnnnnnnnnnnnnnnnnnnnnnnnnnnnnnnnnnnnnnnnnnnnnnnnnnnnnnnnnnnnnnnnnnnnnnnnnnnnnnnnnnnnnnnnnnnnnnnnnnnnnnnnnnnnnnnnnnnnnnnnnnnnnnnnnnnnnnnnnnnnnnnnnnnnnnnnnnnnnnnnnnnnnnnnnnnnnnnnnnnnnnnnnnnnnnnnnnnnnnnnnnnnnnnnnnnnnnnnnnnnnnnnnnnnnnnnnnnnnnnnnnnnnnnnnnnnnnnnnnnnnnnnnnnnnnnnnnnnnnnnnnnnnnnnnnnnnnnnnnnnnnnnnnnnnnnnnnnnnnnnnnnnnnnnnnnnnnnnnnnnnnnnnnnnnnnnnnnnnnnnnnnnnnnnnnnnnnnnnnnnnnnnnnnnnnnnnnnnnnnnnnnnnnnnnnnnnnnnnnnnnnnnnnnnnnnnnnnnnnnnnnnnnnnnnnnnnnnnnnnnnngaaacccccagcaccagaggcacagccgaagtctgtaggcaccggtccccctgccaaacctgtgcttcttcgtgtcactccaaagcccttggctccagcccctctgaaggctccaaggctcaccactaagcctgtggctgcccctgttctagctcaggatcaggcttctccagaaaccancttcaccctccccagagttggtccggtactcaacgctcaactcggagcacttcccacagcccacacagcagatcaagaatattgtcaggcagtaccagcagccattccggggaggccggcccgaggccctcaggnnnnnnnnnnnnnnnnnnnnnnnnnnnnnnnnnnnnnnnnnnnnnnnnnnnnnnnnnnnnnnnnnnnnnnnnnnnnnnnnnnnnnnnnnnnnnnnnnnnnnnnnnnnnnnnnnnnnnnnnnnnnnnnnnnnnnnnnnnnnnnnnnnnnnnnnnnnnnnnnnnnnnnnnnnnnnnnnnnnnnnnnnnnnnnnnnnnnnnnnnnnnnnnnnnnnnnnnnnnnnnnnnnnnnnnnnnnnnnnnnnnnnnnnnnnnnnnnnnnnnnnnnnnnnnnnnnnnnnnnnnnnnnnnnnnnnnnnnnnnnnnnnnnnnnnnnnnnnnnnnnnnnnnnnnnnnnnnnnnnnnnnnnnnnnnnnnnnnnnnnnnnnnnnnnnnnnnnnnnnnnnnnnnnnnnnnnnnnnnnnnnnnnnnnnnnnnnnnnnnnnnnnnnnnnnnnnnnnnnnnnnnnnnnnnnnnnnnnnnnnnnnnnnnnnnnnnnnnnnnnnnnnnnnnnnnnnnnnnnnnnnnnnnnnnnnnnnnnnnnnnnnnnnnnnnnnnnnnnnnnnnnnnnnnnnnnnnnnnnnnnnnnnnnnnnnnnnnnnnnnnnnnnnnnnnnnnnnnnnnnnnnnnnnnnnnnnnnnnnnnnnnnnnnnnnnnnnnnnnnnnnnnnnnnnnnnnnnnnnnnnnnnnnnnnnnnnnnnnnnnnnnnnnnnnnnnnnnnnnnnnnnnnnnnnnnnnnnnnnnnnnnnnnnnnnnnnnnnnnnnnnnnnnnnnnnnnnnnnnnnnnnnnnnnnnnnnnnnnnnnnnnnnnnnnnnnnnnnnnnnnnnnnnnnnnnnnnnnnnnnnnnnnnnnnnnnnnnnnnnnnnnnnnnnnnnnnnnnnnnnnnnnnnnnnnnnnnnnnnnnnnnnnnnnnnnnnnnnnnnnnnnnnnnnnnnnnnnnnnnnnnnnnnnnnnnnnnnnnnnnnnnnnnnnnnnnnnnnnnnnnnnnnnnnnnnnnnnnnnnnnnnnnnnnnnnnnnnnnnnnnnnnnnnnnnnnnnnnnnnnnnnnnnnnnnnnnnnnnnnnnnnnnnnnnnnnnnnnnnnnnnnnnnnnnnnnnnnnnnnnnnnnnnnnnnnnnnnnnnnnnnnnnnnnnnnnnnnnnnnnnnnnnnnnnnnnnnnnnnnnnnnnnnnnnnnnnnnnnnnnnnnnnnnnnnnnnnnnnnnnnnnnnnnnnnnnnnnnnnnnnnnnnnnnnnnnnnnnnnnnnnnnnnnnnnnnnnnnnnnnnnnnnnnnnnnnnnnnnnnnnnnnnnnnnnnnnnnnnnnnnnnnnnnnnnnnnnnnnnnnnnnnnnnnnnnnnnnnnnnnnnnnnnnnnnnnnnnnnnnnnnnnnnnnnnnnnnnnnnnnnnnnnnnnnnnnnnnnnnnnnnnnnnnnnnnnnnnnnnnnnnnnnnnnnnnnnnnnnnnnnnnnnnnnnnnnnnnnnnnnnnnnnnnnnnnnnnnnnnnnnnnnnnnnnnnnnnnnnnnnnnnnnnnnnnnnnnnnnnnnnnnnnnnnnnnngctgtgcggggaccatgaggtcatgcgggatgaatgttactgccaagttgtgaagcagatcacagacaataccagctccaagcagnnnnnnnnnnnnnnnnnnnnnnnnnnnnnnnnnnnnnnnnnnnnnnnnnnnnnnnnnnnnnnnnnnnnnnnnnnnnnnnnnnnnnnnnnnnnnnnnnnnnnnnnnnnnnnnnnnnnnnnnnnnnnnnnnnnnnnnnnnnnnnnnnnnnnnnnnnnnnnnnnnnnnnnnnnnnnnnnnnnnnnnnnnnnnnnnnnnnnnnnnnnnnnnnnnnnnnnnnnnnnnnnnnnnnnnnnnnnnnnnnnnnnnnnnnnnnnnnnnnnnnnnnnnnnnnnnnnnnnnnnnnnnnnnnnnnnnnnnnnnnnnnnnnnnnnnnnnnnnnnnnnnnnnnnnnnnnnnnnnnnnnnnnnnnnnnnnnnnnnnnnnnnnnnnnnnnnnnnnnnnnnnnnnnnnnnnnnnnnnggccagcatgtgtgcccactcagtcgccgtgcttacatcctggatgtggcctcagagatggagcaggtggacggcggctacatgctgtggttccggcgtgtgctctgggatcagccactcaagttcgagaatgagctatatgtgaccatgcactacaaccaggtnnnnnnnnnnnnnnnnnnnnnnnnnnnnnnnnnnnnnnnnnnnnnnnncccagcgagcagctgctgcagcaggtgtccaagctggcttcactgcagcatcgcgccaaggaccacttctacctgccgagcgtnnnnnnnnnnnnnnnnnnnnnnnnnnnnnnnnnnnnnnnnnnnnnnnnnnnnnnnnnnnnnnnnnnnnnnnnnnnnnnnnnnnnnnnnnnnnnnnnnnnnnnnnnnnnnnnnnnnnnnnnnnnnnnnnnnnnnnnnnnnnnnnnnnnnnnnnnnnnnnnnnnnnnnnnnnnnnnnnnnnnnnnnnnnnnnnnnnnnnnnnnnnnnnnnnnnnnnnnnnnnnnnnnnnnnnnnnnnnnnnnnnnnnnnnnnnnnnnnnnnnnnnnnnnnnnnnnnnnnnnnnnnnnnnnnnnnnnnnnnnnnnnnnnnnnnnnnnnnnnnnnnnnnnnnnnnnnnnnnnnnnnnnnnnnnnnnnnnnnncgctaggggacgtggcggcccagcacaccttgcagctgcagctggagcag

SEQ ID NO: 25277 - DNA, 644 bp, Macaca Mulatta
  misc_feature (1)...(644): n = A,T,C or G
gggcagcagcgacagcggcatcatgtgtctcgatatccacgtggaccacccctacctggtggcagtgggccactatgacggcaacgtggccatttacaacctcaagaagccccactcccagccctccttccgcagctcagccaagtctggcaagcactcggaccctgtgtggcaggtcaagtggcagaaggatgacatggaccaaaaccttaacttcttctctgtgtcatctgacggcaggattgtgtcttggactctcgtgaagagcgagctggttcacgtagatgtcatcaagctgaaggtggaaggcagcaccacggaagttcctgaggggttgcagctacacacagtgggttgtggcactgcctttgacttccacaaagagattgactacatgttcctagtgggcacagaggagggaaaaatctacaagtgctctaaatcctactccagccaattcctcgacacctatgatgcccacaacatggcagtggacgctgtgtcctgnaacccataccacaccaaggtcttcatgtcctgcagctccgactggacagtgaagatctgggaccacaccatcaagaccccgatgttcatctatgaactgaactcagccgtgggtgatgtggcctgggcacatactn

SEQ ID NO: 25278 - DNA, 634 bp, Macaca Mulatta
  misc_feature (1)...(634): n = A,T,C or G
ggggttaaatgtctttaaattttaccacttacaacactacatgcccataaaatatatccagtcagtactgtattttaaaatcccttgaaatgatattattagggttaaaattacttggattgtttctgaagtttgctcctgaaaactactgtttgagcactgaaaccttacaaatgcctaactaggcatttgagattgagcaaggctacttgttatctcatgaaatgcctgttgccgagttattttgaatagaaatattttaaagtatcaaaaacagatcttagttttagagagtttggaaaaggaattatatttctctttttcctgattctgtattccacaaatcttgatgaagtgaaaaatacctgcttttatctggtgagcctgctagctaatataagtattggaacaggaaaaatttgtcatcttttaatttatgtaaaaggatttaaaaatttttagggattaacccaaatttttaaccgttaagaactttttggccgaaccaaattttaaacccgggnnnnnnnnnnnnnnnnnnnnncacggccaccnnnnnnnnnnnnnnnnnnnnnnnnggggcatttttggctccaaccccagggggttttatacccccccccaattttccaaa

SEQ ID NO: 25279 - DNA, 107 bp, Macaca Mulatta
gggtcagcgacgagaaagatgcccggggctaccttcaagctcttgcttccaagatgaccgaagagctcgaggctttgaggagttctagtctggggtcaagaacactg

SEQ ID NO: 25280 - DNA, 738 bp, Macaca Mulatta
  misc_feature (1)...(738): n = A,T,C or G
gggactatccaagggggtctccaggacggacttcagatcactgtcaatgggactgttctcagctccagtggaannaggtttgctgtgactttcagaccagcttcggtggaaacgacctgcctttccacttcaaccctccattgaaagagggagggtaagtggtgtgcaacacaaggcagaaaggaagctgggagcctgaggataggaagatgcacattctctcccagcagggaatgccctttgacctctgcttcctggtgcagagctcagatttcaaggtgannnnnnnnnnnnnnnnnnnnnnnnnnnnnnnnnnnnnnnnnnnnnnnnnnnnnnnnnnnnnnnnnnnnnnnnnnnnnnnnnnnnnnnnnnnnnnnnnnnnnnnnnnnnnnnnnnnnnnnnnnnnnnnnnnnnnnnnnnnnnnnnnnnnnnnnnnnnnnactcccgccctcccacctgtgatgtacccccaccccgcctatnnnatgccttttgtcaccaccattccgggaggactgtatccatccaagtccatcatcctgtcgggcactgtcctgcccagtgctcagaggtnaggttccacatcaacctgtgctctgggagccacatcgccttccacctgaacccccgttttgatgagaacgctgtggtccgcaacacccagatcaacaactgttgggggtctgaggagcgaagtctgccccgaaaaatgcccttcgtccgaggccagagcttctc

SEQ ID NO: 25281 - DNA, 138 bp, Macaca Mulatta
tggccgagttcccgtcgaaagtgagcacgcggaccagcagtctctgcgcagagcgccggggcctcggtgtcggcgctgcgcccggacctgggcttcgtgcgctccagcctcggggcgctcatgctgctgcagctggtg

SEQ ID NO: 25282 - DNA, 2592 bp, Macaca Mulatta
  misc_feature (1)...(2592): n = A,T,C or G
gagactggtgagccaaagaatttcgagcctgggggagatggaagcaggagaggagggaagcgggatgacgttgcctggtggaggcggatgcagaaggnnnnnnnnnnnnnnnnnnnnnnnnnnnnnnnnnnnnnnnnnnnnnnnnnnnnnnnnnnntgccgtgggatttttctacctctattttcgagatcctggaagagaaatcacttggaagcactttgtacagaattacctggccagaggtctggtnnnnnnnnnnnnnnnnnnnnnnnnnnnnnnnnnnnnnnnnnnnnnnnnnnnnnnnnnnnnnnnnnnnnnnnnnnnnnnnnnnnnnnnnnnnnnnnnnnnnnnnnnnnnnnnnnnnnnnnnnnnnnnnnnnnnnnnnnnnnnnnnnnnnnnnnnnnnnnnnnnnngggagcagtgctcactggtcctcctggtaccggcaagacccttcttgccaaagcaactgcaggggaggccagtgtgcccttcatcactgtgaacgggtccgagttcctggaaatgtttgttggcgttgggccagcaagggnnnnnnnnnnnnnnnnnnnnnnnnnnnnnnnnnnnnnnnnnnnnnnnnnnnnnnnnnnnnnnnnnnnnnnnnnnnnnnnnnnnnnnnnnnnnnnnnnnnnnnnnnnnnnnnnnnnnacatcaaaggcaggtcctccatctttaaggtccacttgcgcccactgaagctggacgagagcctcaataaggacaccctggcgaggaagctggcagtgctcaccccaggcttnnnnnnnnnnnnnnnnnnnnnnnnnnnnnnnnnnnnnnnnnnnnnnnnnnnnnnnnnnnnnnnnnnnnnnnnnnnnnnnnnnnnnnnnnnnnnnnnnnnnnnnnnnnnnnnnnnnnnnnnnnnnnnnnnnnnnnnnnnnnnnnnnnnnnnnnnnnnnnnnnnnnnnnnnnnnnnnnnnnnnnnnnnnnnnnnnnnnnnnnnnnnnnnnnnnnnnnnnnnnnnnnnnnnnnnnnnnnnnnnnnnnnnnnnnnnnnnnnnnnnnnnnnnnnnnnnnnnnnnnnnnnnnnnnnnnnnnnnnnnnnnnnnnnnnnnnnnnnnnnnnnnnnnnnnnnnnnnnnnnnnnnnnnnnnnnnnnnnnnnnnnnnnnnnnnnnnnnnnnnnnnnnnnnnnnnnnnnnnnnnnnnnnnnnnnnnnnnnnnnnnnnnnnnnnnnnnnnnnnnnnnnnnnnnnnnnnnnnnnnnnnnnnnnnnnnnnnnnnnnnnnnnnnnnnnnnnnnnnnnnnnnnnnnnnnnnnnnnnnnnnnnnnnnnnnnnnnnnnnnnnnnnnnnnnnnnnnnnnnnnnnnnnnnnnnnnnnnnnnnnnnnnnnnnnnnnnnnnnnnnnnnnnnnnnnnnnnnnnnnnnnnnnnnnnnnnnnnnnnnnnnnnnnnnnnnnnnnnnnnnnnnnnnnnnnnnnnnnnnnnnnnnnnnnnnnnnnnnnnnnnnnnnnnnnnnnnnnnnnnnnnnnnnnnnnnnnnnnnnnnnnnnnnnnnnnnnnnnnnnnnnnnnnnnnnnnnnnnnnnnnnnnnnnnnnnnnnnnnnnnnnnnnnnnnnnnnnnnnnnnnnnnnnnnnnnnnnnnnnnnnnnnnnnnnnnnnnnnnnnnnnnnnnnnnnnnnnnnnnnnnnnnnnnnnnnnnnnnnnnnnnnnnnnnnnnnnnnnnnnnnnnnnnnnnnnnnnnnnnnnnnnnnnnnnnnnnnnnnnnnnnnnnnnnnnnnnnnnnnnnnnnnnnnnnnnnnnnnnnnnnnnnnnnnnnnnnnnnnnnnnnnnnnnnnnnnnnnnnnnnnnnnnnnnnnnnnnnnnnnnnnnnnnnnnnnnnnnnnnnnnnnnnnnnnnnnnnnnnnnnnnnnnnnnnnnnnnnnnnnnnnnnnnnnnnnnnnnnnnnnnnnnnnnnnnnngatgactcagcactgcccctcaacagggatgactcagcagggatgactcaggactgcccctcaacagggatgactcagcagggatgactcagcactgcccaacagggatgactcagcagggatgactcagcactgcccctcaacagggatgactcagcannnnnnnnnnnnnnnnnnnnnnnnnnnnnnnnnnnnnnnnnnnnnnnnnnnnnnnnnnnnnnnnnnnnnnnnnnnnnnnnnnnntcagcagggatgattcagcagagataactcagggatgactgactgcccctcagcagggatgagtctgttttgctccaatggaagcatccctagtgtccatcagcaggtgaatggccgaagtggcatatactgtagtcaaattcagctataaaaaggaataaagtatcaatgcatgccacaacatgggtgaacctagaaaatactgttctaaatgcaagaagccagacacaaaaggccgcataacatatggttccatttatgtgaaatgtgcagaataataataaacatgtatagaatagcaaatctgtagggacagacatgaggtgagtggttgccagaggtggaaatgggaattaactataaatagcacagggcaccttacagagatgatggaaatgtcctaaaactagattat

SEQ ID NO: 25283 - DNA, 792 bp, Macaca Mulatta
  misc_feature (1)...(792): n = A,T,C or G
gggaagagctataaattgaacagtgccattaaccttgagaagagtttatatttatccttggaaagggacatttttggcatgttctttatttacttgcattctcatgtcattaaatgtgtttttcataagttctctctgttttaatttattagtggagttgggcaattgaatctatataaaatgcaggtgagaggttatataaaatctaaaataattcatgttatggataaaatggaaaatgatcttgaaggccacaagtnnnnnnnnnnnnnnnnnnnntcctggaaatctgatgtacttcagtcttcatattttaatagacattgatggcatcctgcatggataaagttgatgttcaacttgactttccaatgccttctctcaaccttagacagatactctttgtttggatttttaaagttattacagagttttccaatgtagtatcctaatttaattaattctaatatttttttctgttttaggccttccaggtattagcacaacttataaaagaatctttatgaagaaattaaactaggtnnnnnnnnnnnnnnnnnnnnnnnnnnnnnnnnnnnnnnnnnnnnnnnangagggagatcacttgagcccaggaattcaaggctgcagtaagctacgatcacaccactgcactgtggcctgcgtggcagaacaagaccctgtctcttaaanagagaaagatagaaatcaaactaatcatgctgctcatggatttttcaataaaatttcttgttttgggcaggnnnnnnnnnnnnnnnnnnnnnnnnnnnn

SEQ ID NO: 25284 - DNA, 407 bp, Macaca Mulatta
ctggtttaagatgattcagattatccttgtactttgaggagaagtttcttatttggagtcttttggaaacagtcttagtcttttaacttggaaagattaggtattaatcccctctattgctctccgaaaaccaataaagtgattacaccccatgcacatggctccgtggtggtgacgccgggggctggtgggaggagtgcctgggaccacagagggccctgggtagaggggtcgcaggggacttgtcaccagggcagctgcaggacccctcccacggaggagaccccctcggctgggaggcctgggccctcagcttggcgtcagccttgctactgttcgctgggaggcccttcctgcatcgcgtccccttccgccccagcctgggcctgtgcatggggatgtctgtt

SEQ ID NO: 25285 - DNA, 747 bp, Macaca Mulatta
  misc_feature (1)...(747): n = A,T,C or G
cagataaaactcatcagtgctttgaaacgagcagctctgaaccaaaggaatcatttgattcaagtaaccattggatcttcccaaggcaatggtgnnnnnnnnnnnnnnnnnnnnnnnnnnnnnnnnnaagtcggcccgctctccctcatctctctctgataatctagacttttccaaacaagatggcaacaccactaggcaagagatgtccccagctggcgtcccgttgctgggaatgcagcttaacgaagcgaaacccaaaaaagacccccgaaacgttcagcagaatgaagatgccacccaatacgaagagtccattctgaccaaactcatcgtggannnnnnnnnnnnnnnnnnnnnnnnnnnnnnnnnnnnnnnnnnnnnnnnnnnnnnnnnnnnnnnnnnnnnnnnnnnnnnnnnnnnnnnnnnnnnnnnnnnnnnnnnnnnnnnnnnnnnnnnnnnnnnnnnnnnnnnnnnnnnnnnnnnnnnnnnnnnnnnnnnnnnnnnnnnnnnnnnnnnnnnnnnnnnnnnnnnnnnnnnnnnnnnnnnnnnnnnnnnnnnnnnnnnnnnnnnnnnnnnnnnnnnnnnnnnnnnnnnnnnnnnnnnnnnnnnnnnnnnnnnnnnnnnnnnnnnnnnnnnnnnnnnnnnnnnnnnnnnnnagggctccatttattacaatcaagagggtacgtgttggtacgagggagactgggtgcaaaacatcaagaagggctggggaataagatg

SEQ ID NO: 25286 - DNA, 293 bp, Macaca Mulatta
ggcctgttgggcggccaggaagaggcgtcccaggaagccggcatgccaacaggagcgggctgcagccccacctttccagccctgggcatcgggatggactcttgcgtcatccccctgaggcacgggggcctgtcactggtgcagaccacggacttcttttaccccttggtggaagatccctacatgatggggcgcatagcttgagccaacgtgctgagtgacctctacgccatggggattactgagtgtgacaacatgttgatgatactcagcgtcagccagagtatgagtga

SEQ ID NO: 25287 - DNA, 788 bp, Macaca Mulatta
  misc_feature (1)...(788): n = A,T,C or G
ggatcctgttcccagtgggttttctgcaggggaagttctgattcccttagctgacgaatatgaccctatgtttcctaatgattatgagaaagtagtgaagcgccaaagagaggaacgacagagacagcgggagctggaaagacaaaaggaaatagaagaaagggaaaannnnnnnnnnnnnnnnnnnnnnnnnnnnnnnnnnnnnnnnnnnnnnnnnnnnnnnnnnnnnnnnnnnnnnnnnnnnnnnnnnnnnnnnnnnnnnnnnnnnnnnnnnnnnnnnnnnnnnnnnnnnnnnnnnnnnnnnnnnnnnnnnnnnnnnnnnnnnnnnnnnnnnnnnnnnnnnnnnnnnnnnnnnnnnnnnnnnnnnnnnnnnnnnnnnnnnnnnnnnnnnnnnnnnnnnnnnnnnnnnnnnnnnnnnnnnnnnnnnnnnnnnnnnnnnnnnnnnnnnnnnnnnnnnnnnnnnngggcacggtggcgcacaagatcatgcagaagtacggcttccgggagggccagggtctggggaagcacgagcaggggctgagcaccgccttgtcagtggagaagaccagcaagcgtggcggcaagatcatcgtgggtgacgccacagagaaagnnnnnnnnnnnnnnnnnnnnnnnnnnnnnnnnnnnnnnnnnnnnnnnnnnnnnnnnnnnnnnnnnnnnnnnnngaacatggttggtgcgggagaggtggatgaagacttggaagttgaaaccaaggaagaatgtgaaaaatatggcaaagttggaaaatgtgtgatatttga

SEQ ID NO: 25288 - DNA, 284 bp, Macaca Mulatta
agaaagtgacttcaaaaataactgatcacgatagattattttattttacttttttttaaactcctcctcctctttccccactgaaccaaaaataaatcccatccctaaaacctgccttttccttttatgcaaaactgaaaatggcaatacattattatagccatactggtatagatagtgtttgcgtttggctatgtgttatttgttttctttttttttaaattatgaatatgtgtaaaatctgaggtaacttgctaacgtgaatggtcatataactttaaaga

SEQ ID NO: 25289 - DNA, 434 bp, Macaca Mulatta
tatcaggtactatgcttagtatacaggtgatgaaataatctgtacaccaaacccccaagtcacaaatgttcctacataacaaacctgcacatgtacccctgaacataaaattaaaattaaaatactgaaaataattcactgtgatttttattgtactgatgccattattaatcaagttctgataagtaggtagtctctgctctatctccacctttctgaaccctatgtgtatcactttggattaattctagatatcttctccaccctccttgccccagactgaatctgtattatgtgatactgagtcttctttctaaatgttacctgttatctctttcctttatttctactattatctttatctggatcagaattattgtcataggctcctaactggtcctcctgcttaaagtttctacccactcaatcaatta

SEQ ID NO: 25290 - DNA, 594 bp, Macaca Mulatta
ggatatgaagaaatcaatgaagactatggaaattttatggaagaaaatccaaagaaaggtctgctgagtgaaatgaaaaaaaaaggaagaactttctttggaaccatggataccctacctccaccaacagaagacccaatgatcaatgagattggacaattccagagctttgcagataaaaacatttttcagtcccgaaaaatgtggatagtgctgtttggatctgctttggctcatggatgtgtagctcttatcactaggcttgtttctgacaggtctaaagtaccatctctagaactgatttttatccgttctgttttgcaggtcttatctgtgttagttgtgtgttactatcaggaggccccctttggacccagtggatacagattacgactcttcttttatggtgtatgcaatgtcatttctatcacttgtgcttatacatcattttcaatagtccctcccagcaatgggaccactatgtggagagccacaactacagtcttcagtgccattttggcttttttacttgtagatgagaaaatggcttatgttgacatggctacagttgtttgcagcatcttaggtgtttgt

SEQ ID NO: 25291 - DNA, 447 bp, Macaca Mulatta
  misc_feature (1)...(447): n = A,T,C or G
ggggcgtgtgcatcgcccagtcggtgaagataccacgggagcccaaggcaggcgagtttgacaagatcatccgccgcctcctggagacttcgaacgccagggcagtcatcatcttcgccaatgaggatgacatcaggnggtgggcaccgggaaccatgcaggtgtgggcagagccacaggtcctgtcctgctggagaccttcccaggcgagcctgaccccaccctgggatccggagaggtgggtgnnggccattcgtgggtccctggagggatggaggagggcttctggaagaatatcacggcctcaaaagccaaaaggaccagctgcaatggtggtgtctcaggcagcgaaagaccagggaggggaggccctcaagccccatcctgacaccctcagagctgcacagaggtggcacccagtcccttgaggcgtgcaggtcccctgag

SEQ ID NO: 25292 - DNA, 126 bp, Macaca Mulatta
gatctttcaaacaatcgtcttacaactgttcctgctagtttttcttctctgtccagtctggtgagactcgaatcaatctagtaatcaactgaagagtttaccagcagaaataaatagaatgaaaag

SEQ ID NO: 25293 - DNA, 765 bp, Macaca Mulatta
  misc_feature (1)...(765): n = A,T,C or G
gggtgcagacaaatgtgaagaacttctggaaaagacagtgaaaaactgcttggccctggctgatgataagaagctgaaatccattgcatttccatccatcggcagcggcaggaacggttttccaaagcagacagcagctcagctgattctgaaggccatctccagttacttcgtgtccacaatgtcctcttccatcaaaacggtgtacttcgtgctttttgacagcgagagtataggcatctacgtgcaggaaatggccaagctggacgccaactaggctgagcaacgacagaaccagctgcaccatgtaccccacctccaannnnnnnnnnnnnnnnnnnnnnttcactcctactgggaggtgggacccctttcattttcagttttgctcatccagggaaaataaggctttggtttccagttcaattgtttttgaccttctaaaatgtttttatgttagcactgatagttggcattactgttgttaagcactgtgttccagaccgtgtctgacttattgtaacccaggagaattttatagttttattttaatgaaacccttattgacccacagcaatgggggagaacagcgtcttttactttgtcgccgaaacccggaaagccccgttttgtaaccctgggtttgtgggggcttttatcgtacaccccagtgggcgtttctttttttactctaaagggnnnnnnnnnnnnnnnnnnnnnnnnnnnnnnncatgaaattttgcaccagaacctaaatttttgggt

SEQ ID NO: 25294 - DNA, 331 bp, Macaca Mulatta
atacaagaaataactttgaagggaaaaaagtcattagcttagaatatgaagggtatctacccatggcggaaaatgaagtcaaaaacatttgtagtgacatcaggcagaaatggccagtcaaacacatagcagtgttccatggacttggcctggttccagggtcagaagcaagcataatcagtgctgtgtcctcagcccacagagctgcatctcttgaagctgtgagctatgccactgatactttaaaagccaagatgcccatatgccaaaggaaatatacgaagagtcatcatcttggaaaggaaacatagagtgctttggggcattcaac

SEQ ID NO: 25295 - DNA, 191 bp, Macaca Mulatta
aaggagcggacgcctgggatcagagcgccctgtttagcaataacggctggagcacgtcctacaagttacgggagagtcggctgtgaaggagacgttcgcttgtcccctgtgttcccgctccatataacctccagaccccagccttgcctcgcgctgggaggggagatccagaatgaaaggcaagaaaggta

SEQ ID NO: 25296 - DNA, 667 bp, Macaca Mulatta
  misc_feature (1)...(667): n = A,T,C or G
actcccttccctattgtatcactcattccttttttgttttgattttctccagctcagccctgccccaccccagcatctaagttttccttccatcctcnnnnnnnnnnnnnnnnnntctgtcttcctttcccttcccttcttctttctagctagtgcagatacttagtggggtggagaaacaaggaaaggaagtgatccttttctctctaaagtcagtcgtgcattgtattatgtggtcatctgtctgtacctgaagagctaccctacctcattgatgtccagagtagggcagtgatgctttcccaggccgcagatatgtcaagataacctttgagcacaggacccagctaagccagtgatatttaaggaatttctgcactttttatactttatgtttggggagattgaggaagagaatgtcccaggcaaataggatgggattcggggaagaaattcattccactgttctgtgagctcccacaccagtgtccagtaaccctgccccttctcaatacattagtcaagatacctaagtgtataggattttctcgctctttcagcccggtcctttggagtagaatggattgcaagttggttggtggtcacagtgcccatcattcttggcctgttacttatctgagatgagctcttttaactcaagtgaaac

SEQ ID NO: 25297 - DNA, 1884 bp, Macaca Mulatta
  misc_feature (1)...(1884): n = A,T,C or G
gtgttcatcagaacaacctttatggcagagtatgatcactatgaagatgatgggttcctcaacagtttcaatgacagcagccaggaggagcatcaagacttcctgcagttcaggaaggtctttctgccctgcatgtacctggtggtgtttgtctgtggcctggtggggaactccctggtgctggtcatatccatcttctaccataagctgcagagcctgacggacgtgttcctggtgaacctacccctggctgacctggtgtttgtctgcactctgcccttctgggcctatgcaggcatccatgaatggatctttggccaggtcatgtgcaagaccctactgggcgtctacactattaacttctacacatccatgctcatcctcacctgcatcactgtggatcgtttcattgtagtgggtaaggccaccaaggcctacaaccagcaagccaagaggatgacttgtggcaaggtcatctgcttgctcatctgggtgatatccctgctggtttccttgccccaaattatctatggcaatgtctttaatctggacaagctcatatgtggttatcatgacgaggagatttccactgtggttcttgccacccagatgacactggggttcttcttgccactgctcgccatgattgtctgctattcagtcataatcaaaacactgcttcatgctggaggcttccagaagcacagatctctaaagatcatcttccttgtgatggctgtnnnnnnnnnnnnnnnnnnnnnnnnnnnnnnnnnnnnnnnnnnnnnnnnnnnnnnnnnnnnnnnnnnnnnnnnnccagctttcactacattatcatagtgacagaggccatcgcatacctgagggcctgccttaaccctgtgctctatgcctttgtcagcctgaagtttcgaaagaacttctggaaacttgtgaaggacattggctgtctcccttaccttggggtctcacatcaatggaaatcttctgaggacaattccaagactttttctgcctcccacaatgtggaggccaccagcatgttccagctataggccttgccagcatttcgagaagctgctctggaatttgcaaggcatggttgtgtcctcttgatgtggtgaggcaggctttgtttatagtttgcgcattctcatggagaagttatcagacactctgactggtttggaatgcttcttctcaggcatgaacacgtactgttctcttcttgaacactcatgccgaaagcccaagtagggggtctaaagtttttaaggactttccttcctccatctccaagaatgctgaaatcaagggggatgacatgtgacttctatgatctcaggttctccttgattcggactggggctgaaggttgaagaggtgagcacagcccacaaagctgttggtggtaggtagcacgctgggtgcccaagctcagaaggctcttctgactactgggcaaacagtggagatcagagcagccatgaaaacaaatgctggcacctaacagaaatgagatcaggctctgcctcaccttgnggcttgacttttgtataggcagatgttcaaattgctttgattaatccagaataactagcaccagggactatgaatnnnnnnnnnnnnnnnnnnnnnnnnnnnnnnnnnnnnnnnnnnntggaatgcttgaaaaatgtgcaaaacagcatttaagactgtaatgaatctaagcagcatttctgaagtggactctttggtggctttgctcatttaaaaatgaaattttccaatgtctgcnnnnnnnnnnnnnnnnnnnnnnnnnnnnnnnnnnnnnnnnnnnnnnnnnnnnnnnnactagcatatgagtttcatagctaagaaataaaacttttaaagtctccaaac

SEQ ID NO: 25298 - DNA, 231 bp, Macaca Mulatta
cctcctaggaaggtccagaaaagccgcccctcaaacccgttccccccatccacagtagttccaccttcttccactgtaataaaagccagtctaggatgctgataaggcctgctggagtttgtacacaaacctgcagagagaaaacggtcggggtcctgaaccacagcatggtcctggaacagccactgccttcctctggccccggagggaagcttcagggaaggggctggc

SEQ ID NO: 25299 - DNA, 164 bp, Macaca Mulatta
agaaatggagaagaagctcttggaggaaagaactttaaaacagaaagtggagaacctattgctagaagctgagaaaagatgttctatattagactgtgacctcaaacagtcacagcagaaaataaatgagctccttaaacagaaagatgtgctgaatgaggatg

SEQ ID NO: 25300 - DNA, 497 bp, Macaca Mulatta
  misc_feature (1)...(497): n = A,T,C or G
ggatgcccgggccaggctcacatcactgccctgaagtccttgggctgcttcctcttacttcacctggtttatatcgtggccagccccttctccatcacctccaagacttatcctcctgatctcaccagtgtcttcatctgggagacactcatggcggcctatccttctcttcattctctcatgttgatcatggggattcctagggtgaagcagacttgtcagaagatcctgtggaagacagtgtgtgcttggagatgctggggcccatgatctaggaagaaaagtgtggtcagggcactcttgggacgctcttttgatagctgtctgtaagggagctgccttccatgtcttttaagatttccttcttttacacctatttaatgggatgagcacngaaaataccgatcaaaactcantactatttctcttttggcaatgaaagtactttttttttatgtacacagaaatcaagggtagggcttcctgttgggtaaaaa

SEQ ID NO: 25301 - DNA, 1377 bp, Macaca Mulatta
  misc_feature (1)...(1377): n = A,T,C or G
tctcgaggcaccgagatctcagagcaagctccgcccgtgagagagcccgagtggggaacgcaggcccctggagtggagcccagcaatggcctggagaagccggctcaggagctgaacggcagtgaggctaccgccccacaggactcgccccgccctgggaaaccggacgagagggacacctggcccgctgcccaggcccccaccagcagtggagagctggcaggcactcctgagccccaaggatcctgtgtgcagggtggccgggcggcaccgggacagcggcctgcccagggtgccacgggcactgacctggacttcgacttatccagcgacagcgagagcagcagtgagtccgagggcacgaagtctccctcctccgcctctgacggcgaaagnnnnnnnnnnnnnnnnnnnnnnnnnnnnnnnnnnnnncagagggagccggggcgctggctcagggcagttccctggagccggggcggcctgcagcactgagtctccccggagaggccgagcccggcacgcatgccccagacaaggggcccgagctgggtgggcaggaggagggcgagcgggacggcctctgcggcctgggcaatggctgtgccgacaggaaggaggcggagaccgagtcacagaacagcgagctgtcgggcgtcaccgcgggcgagtccctggaccagagnnnnnnnnnnnnnnnnnnnnnnnnnnnnnnnnnnnnnnnnnnnnnnnnnnnnnnnnnnnnnnnnnnnnnnnnnnnnnnnnnnnnnnnnnnnnnnnnnnnnnnnnnnnnnnnnnnnnnnnnnnnnnnnnnnnnnnnnnnnnnnnnnnnnnnnnnnnnnnnnnnnnnnnnnnnnnnnnnnnnnnnnnnnnnnnnnnnnnnnnnnnnnnnnnnnnnnnnnnnnnnnnnnnnnnnnnnnnnnnnnnnnnnnnnnnnnnnnnnnnnnnnnnnnnnnnnnnnnnnnnnnnnnnnnnnnnnnnnnnnnnnnnnnnnnnnnnnnnnnnnnnnnnnnnnnnnnnnnnnnnnnnnnnnnnnnnnnnnnnnnnnnnnnnnnnnnnnnnnnnnnnnnnnnnnnnnnnnnnnnnnnnnnnnnnnnnnnnnnnnnngcgctgggacaaggtggaggagcagctcttcccgctcagggacgatcacaccaagnnnnnngggagaacagtcctgcagcctttcccgaccgggattttgtgtgccccccaccaccttgttccacccgatgccggttcttcccaaggcccagcctggccccgaggttcgaatctacgactccaacacggggaagctcatcaggacgggcgcccgggggcccccagcgccccccagctccttacccctccaccgggagccctcttccttca

SEQ ID NO: 25302 - DNA, 694 bp, Macaca Mulatta
  misc_feature (1)...(694): n = A,T,C or G
agaattttaccttcaatgatgacttcagtcccagcagtaccagttcagcagaccnnnnnnnnnnnnnnnnnnnnnnnnnnnnnnnnnnnnnnnnnnnnnnnnnnnnnnnnnnnnnnnnnnnnnnnnnnnnnnnnnnnnnnnnnnnnnnnnnnnnnnnnnnnnnnnnnnnnnnnnnnnnnnnnnnnnnnnnnnnnnnnnnnnnnnnnnnnnnnnnnnnnnnnnnnnnnnnnnnnnnnnnnnnnnnnnnnnnnnnnnnnnnnnnnnnnnnnnnnnnnnnnnnnnnnnnnnnnnnnnnnnnnnnnaggctcttggaatgacagcatcccaggaccgagcagtggtcaaaaagaaactcaaggaaatgaagatgtctctagagaaggctcggaaggcccaagagaaaatggaaaaacaaagagaaaagctaaggagaaaggaacaagagcaaatgcagaggaagtccaaaaagacagaaaagatgacgtcaactgcagccgacggtgctggtgagcagtaacacataccctcttactgaagatggagattatccaagagaagtccccacctcttcctgccctgctctcctccagaggatgaagaagaaactaaatgataagggtaatgcggctctaggccggctgaggaaccgtgtgttgaataactgcattttctgcaatagaaggcactcttaatt

SEQ ID NO: 25303 - DNA, 794 bp, Macaca Mulatta
tggacaatcagggccatgggtggcctgggcccgggctggggctagggcacaggctcctttttatgtttcgaggcagtggcaaaaggactttttaatttatttcagatgaatgttttatggagaacttgttgcaatatgtataaaagggaaatctctattctgtgctcatttttctttcccattctttttctgtggggctggggccccagaaaaggttgtatatagtgggggaggtggtcaggagtattttctctttggtgaggacattgctgccaaggtttcaaggtaccccttatgtccttagagggtgaagggactcttccctcttctctggatcccagaaggaataagcagcatgggcccaggatggtttgggggagcagcagctgatgtttattagagaccagtacccctatgccagatcttgggggctttgcccccggaatcttttgcttcagcttcagtcgtcgctgtcgaactctgaggatagaccctgcagcaggggcagggacatggagtgcccgtcggggtccctggggcccccaccctgggctcctggtggagggctgcgggggctgaagagccagttctctgccagggttggggatagtcacagcttgacttatagctggtctttttcctccctagcttttccctctagtcctctgtgccatcccaatccccttaccagggccttctcattccatcgcaccatccccgggctccctcattccatctctttcaccagagccctgtgctgagtaagggattccccacatacttaattctcatgc

SEQ ID NO: 25304 - DNA, 4153 bp, Macaca Mulatta
  misc_feature (1)...(4153): n = A,T,C or G
aggtcacatttctgggttttaatgaagagacagatgccactcatgtacaggnaggatttagctgcagtttttttggactttccagatcttctgaattcactccacttctgcagtctaaatgaaaatgaaattatttgtatgaagaatataaataaaccatcagatataagcagtgatcctctaaatcagnnnnnnnnnnnnnnnnnnnnnnnnnnnnnnnnnnnnnnnnnnnnnnnnnnnnnnnnnnnnnnnnnnnnnnnnnnnnnnnnnnnnnnnnnnnnnnnnnnnnnnnnnnnnnnnnnnnnnnnnnnnnnnnnnnnnnnnnnnnnnnnnnnnnnnnnnnnnnnnnnnnnnnnnnnnnnnnnnnnnnnnnnnnnnnnnnnnnnnnnnnnnnnnnnnnnnnnnnnnnnnnnnnnnnnnnnnnnnnnnnnnnnnnnnnnnnnnnnnnnnnnnggaatgaacattactgcgctaaggaaccagtgtgatgctgcttcccaaacagttactggtcatcatttagaaacccatgatttaaagattctcattagctctggacagcagaagtcattggctaaaccctcaacttcctcagtgaatgtcctgggacctaaagaactaccttctgtgaaaacttcagtcacaacatccatttcagagccttggacccaaaggagtttctataggtcatctaatgcttcagataaagatagtgatttacagaaaacattttgttcgtcttctcctgcctactcatctgaatcagaatgttcaagtccaagtcctgttattttcttggatgaagagggatatcaaaaaagcttaaaagcaaaacttgagctgcctaaaattcctgtgatgaaagatgatatagaggattcagactcagaagtaagtgaattttttgatagttttgatcagtttgatgaactagaacaaactttagagacttacctgtttaataaagatcctgtcatagggaagtcatcacagannnnnnnnnnnnnnnnnnnnnnnnnnnnnnnnnnnnnnnnnnnnnnnnnnnnnnnnnnnnnnnnnnnnnnnnnnnnnnnnnnnnnnnnnnnnnnnnnnnnnnnnnnnnnnnnnnnnnnnnnnnnnnnnnnnnnnnnnnnnnnnnnnnnnnnnnnnnnnnnnnnnnnnnnnnnnnnnnnnnnnnnnnnnnnnnnnnnnnnnnnnnnnnnnnnnnnnnnnnnnnnnnnnnnnnnnnnnnnnnnnnnnnnnnnnnnnnnnnnnnnnnnnnnnnnnnnnnnnnnnnnnnnnnnnnnnnnnnnnnnnnnnnnnnnnnnnnnnnnnnnnnnnnnnnnnnnnnnnnnnnnnnnnnnnnnnnnnnnnnnnnnnnnnnnnnnnnnnnnnnnnnnnnnnnnnnnnnnnnnnnnnnnnnnnnnnnnnnnnnnnnnnnnnnnnnnnnnnnnnnnnnnnnnnnnnnnnnnnnnnnnnnnnnnnnnnnnnnnnnnnnnnnnnnnnnnnnnnnnnnnnnnnnnnnnnnnnnnnnnnnnnnnnnnnnnnnnnnnnnnnnnnnnnnnnnnnnnnnnnnnnnnnnnnnnnnnnnnnnnnnnnnnnnnnnnnnnnnnnnnnnnnnnnnnnnnnnnnnnnnnnnnnnnnnnnnnnnnnnnnnnnnnnnnnnnnnnnnnnnnnnnnnnnnnnnnnnnnnnnnnnnnnnnnnnnnnnnnnnnnnnnnnnnnnnnnnnnnnnnnnnnnnnnnnnnnnnnnnnnnnnnnnnnnnnnnnnnnnnnnnnnnnnnnnnnnnnnnnnnnnnnnnnnnnnnnnnnnnnnnnnnnnnnnnnnnnnnnnnnnnnnnnnnnnnnnnnnnnnnnnnnnnnnnnnnnnnnnnnnnnnnnnnnnnnnnnnnnnnnnnnnnnnnnnnnnnnnnnnnnnnnnnnnnnnnnnnnnnnnnnnnnnnnnnnnnnnnnnnnnnnnnnnnnnnnnnnnnnnnnnnnnnnnnnnnnnnnnnnnnnnnnnnnnnnnnnnnnnnnnnnnnnnnnnnnnnnnnnnnnnnnnnnnnnnnnnnnnnnnnnnnnnnnnnnnnnnnnnnnnnnnnnnnnnnnnnnnnnnnnnnnnnnnnnnnnnnnnnnnnnnnnnnnnnnnnnnnnnnnnnnnnnnnnnnnnnnnnnnnnnnnnnnnnnnnnnnnnnnnnnnnnnnnnnnnnnnnnnnnnnnnnnnnnnnnnnnnnnnnnnnnnnnnnnnnnnnnnnnnnnnnnnnnnnnnnnnnnnnnnnnnnnnnnnnnnnnnnnnnnnnnnnnnnnnnnnnnnnnnnnnnnnnnnnnnnnnnnnnnnnnnnnnnnnnnnnnnnnnnnnnnnnnnnnnnnnnnnnnnnnnnnnnnnnnnnnnnnnnnnnnnnnnnnnnnnnnnnnnnnnnnnnnnnnnnnnnnnnnnnnnnnnnnnnnnnnnnnnnnnnnnnnnnnnnnnnnnnnnnnnnnnnnnnnnnnnnnnnnnnnnnnnnnnnnnnnnnnnnnnnnnnnnnnnnnnnnnnnnnnnnnnnnnnnnnnnnnnnnnnnnnnnnnnnnnnnnnnnnnnnnnnnnnnnnnnnnnnnnnnnnnnnnnnnnnnnnnnnnnnnnnnnnnnnnnnnnnnnnnnnnnnnnnnnnnnnnnnnnnnnnnnnnnnnnnnnnnnnnnnnnnnnnnnnnnnnnnnnnnnnnnnnnnnnnnnnnnnnnnnnnnnnnnnnnnnnnnnnnnnnnnnnnnnnnnnnnnnnnnnnnnnnnnnnnnnnnnnnnnnnnnnnnnnnnnnnnnnnnnnnnnnnnnnnnnnnnnnnnnnnnnnnnnnnnnnnnnnnnnnnnnnnnnnnnnnnnnnnnnnnnnnnnnnnnnnnnnnnnnnnnnnnnnnnnnnnnnnnnnnnnnnnnnnnnnnnnnnnnnnnnnnnnnnnnnnnnnnnnnnnnnnnnnnnnnnnnnnnnnnnnnnnnnnnnnnnnnnnnnnnnnnnnnnnnnnnnnnnnnnnnnnnnnnnnnnnnnnnnnnnnnnnnnnnnnnnnnnnnnnnnnnnnnnnnnnnnnnnnnnnnnnnnnnnnnnnnnnnnnnnnnnnnnnnnnnnnnnnnnnnnnnnnnnnnnnnnnnnnnnnnnnnnnnnnnnnnnnnnnnnnnnnnnnnnnnnnnnnnnnnnnnnnnnnnnnnnnnnnnnnnnnnnnnnnnnnnnnnnnnnnnnnnnnnnnnnnnnnnnnnnnnnnnnnnnnnnnnnnnnnnnnnnnnnnnnnnnnnnnnnnnnnnnnnnnnnnnnnnnnnnnnnnnnnnnnnnnnnnnnnnnnnnnnnnnnnnnnnnnnnnnnnnnnnnnnnnnnnnnnnnnnnnnnnnnnnnnnnnnnnnnnnnnnnnnnnnnnnnnnnnnnnnnnnnnnnnnnnnnnnnnnnnnnnnnnnnnnnnnnnnnnnnnnnnnnnnnnnnnnnnnnnnnnnnnnnnnnnnnnnnnnnnnnnnnnnnnnnnnnnnnnnnnnnnnnnnnnnnnnnnnnnnnnnnnnnnnnnnnnnnnnnnnnnnnnnnnnnnnnnnnnnnnnnnnnnnnnnnnnnnnnnnnnnnnnnnnnnnnnnnnnnnnnnnnnnnnnnnnnnnnnnnnnnnnnnnnnnnnnnnnnnnnnnnnnnnnnnnnnnnnnnnnnnnnnnnnnnnnnnnnnnnnnnnnnnnnnnnnnnnnnnnnnnnnnnnnnnnnnnnnnnnnnnnnnnnnnnnnnnnnnnnnnnnnnnnnnnnnnnnnnnnnnnnnnnnnngctgatggtgaccaagattataaagtagaagagaagttggatatagaggctgtagcgcacccaagagaagtggatccgtttattctttcattaccaccaagttcttggatgtcaggtctgacgtataagtatcccagctgtgaaagtgtgacagacgaatatgcaggtcacattattcagatactaaaacaagaaggtggtaatattgagttgataatggatcagtatgccaatagacttgcctaccgatctgttaaatcaggattacaggaagcagctaagacaaccaaagtgcagtgcaattcaagaatgttccctgtgccaagttcacaagtgaaaacaaacgaactgttaatgttttcaaataaagagcaccaccaagaagcagacaaaaaaagacaaagtaaaagaagtgaagattacttttgtaaaaatcaaactt

SEQ ID NO: 25305 - DNA, 581 bp, Macaca Mulatta
atttcacagtactttttatttaaccctatcatgctagggcactatgcaatatatggctgtttcattttccttttgtctctttttcccaggtggtcttcgagggatagcacgaggtggtctgacaggactaacacttaccagcctctatgcactatataataactgggagcacatgaaaggctccttgctccaacagtcactctgaagattttgccaactcatgaatggaggacacttagtatctagatcattttataagacagtctggagttatcctctctctcctacctacaattagtttgaaaaattggagattttgatttgctgtgatgaaaatcctggatggttgaccaagactggcacttgttccagccattagtgagttgaagccaaaggcctttggtgactcactgagaaccatggttctcttctcctctggagaagatcttgcacattatctcttctcctcccccatgaactagaaaaccacttactcccagaattcaggtcatgcttgtcagtactatatcaccaagtctgttcatttaatgatccaaaactgtaatgttgcactgtattcc

SEQ ID NO: 25306 - DNA, 247 bp, Macaca Mulatta
  misc_feature (1)...(247): n = A,T,C or G
ggagctgcttccctacctggaaggaggatgctggggccaagggctggagggcttctgccgccacttggagctctataaccaatttgctgccaactcagagagatcccagaccaccctgcaggncaggagcagctaaagaaaaataaaggtttccggaggtttgtgcggcttcaggaaagccgccctgagtttgggggccttcagctccaggacctactccctctgcctctgcagcggctccagcagt

SEQ ID NO: 25307 - DNA, 652 bp, Macaca Mulatta
  misc_feature (1)...(652): n = A,T,C or G
tgatattgaggttatgtcaactgttcatatatcatctgtctataacgatgtgcctgtgattgaaggtgttgtttatatcgagcaactgccagaacaaatagttaccccttttactgatcaagttgcttgtcttaaagaaaatgagcagtcanaaagaaaatgagcagtcaccaccagttagtcccaaatctgtagtagaaaagaccacctctggcatatctaaaaaatctgtagagtctgtagaacttgcacagttggaggagaatgcaaaatattcctcagtatatgtggaggcagaagcagcagctctgctctctgacacatctttgaaaggtcagcctgaggcacctgcacaactcctggatgcagagggcgctgtcaaaataggctctgaaaaatctctgcaccttgaagtggggatcacttcaatagtctctgacaatactgggcaggaggagtctggggaaaactctgtaccccaggagatggaaggcaaacctgtgctctctggggaagctgcagaagcagtgcactcaggtacatctgtaaagtcatctagtggccccttccctcctgctccagaaggccttactgcaccagaaattgaaccagaaggggaagcaacagctgaataaggtttgatgaagccagn

SEQ ID NO: 25308 - DNA, 291 bp, Macaca Mulatta
  misc_feature (1)...(291): n = A,T,C or G
atggtttgggcaggtgcaccatccaatgtctgtggtaaacgggagagcttgtgtttttgaagtggaaaaaaacccaagagtttgtacagacatcccgtcttcccagagaaggtggacactcttgggctcattgtaaagtgcctgctgcatcaataaagctcttggcttattagtatatacattgcggtgtgttcatatatgtanaaaaacatggggtaantgnannatgggnanntggtannatgaatgagagttcagttgttccggaaacccgacgtgggaggagtagac

SEQ ID NO: 25309 - DNA, 569 bp, Macaca Mulatta
ggcagatgaaacagattcaggaacccctgcatctaagatagtacgcccagaaacgtattctttttagggctgcttcttcatctattctcaaaaataactgtcaaaatcatggatgattcagaatttgagtttatctgataatgaagaagagctggcctgcttcatttagaatgccctatttaattcacattttcctgtttcgtttttgattgaataccattaatatgtattacctgtactggttgttgcttttgaagagcttttaaaaagctgctcatgtttgttctttaggcttctcaggctcgtctgcattaccttagcgggttcattaagaaaacatctgatgctgagagtccacctatatctgaaagccaaactaaaccaaaggaagaaggtcagtggatcctgccccagctgcctcagagcacagtgctgtgactgacacttcttaaaaaattatcagtgggttgtgcttggtaaaaaggagacatttcagaacctcattccttgaggatcataaaaagttgcacaatttcagataactatatgaacattgcttcaattttcaa

SEQ ID NO: 25310 - DNA, 719 bp, Macaca Mulatta
agaaccagtgcagccagccaaaaggcaatcaatgctgcccaccaaaacagaaccagtgctgccagccaaaaggcaatcaatgctgcccgccaaaacacaatcactgctgccagccaaaacccccttgctgcattaaggccaggtgctgtagtttggagaccaagcccgaatgctcaccgcttaatgtggagtctgagcccaactcaccacaaactcaggacaagggctctcaaacccagcagcagccctatagcccacaaaataagtccagtccaagcaaatgggagcagaagtcaaacaaatagattgcccctggggccatgcctttcactttgtagggtggggtattactgagagtcaggctagacctatgtttagagaagcagttttcacagtgactaccatttccacccaacgagaggcttctatttcccatcatagctccctaccctagggaggcctccatctggaaatgggaggatgaagaagccggaatcatctttcctagtgatcctgacatttagacagcacagaaataaaagagcaataaaaagaacattgcctccctttgttcctttacttacctgtgaaaccatctcaccagcctggcctagagcccaagaaaatattatgggcatgtcctggaggtccaaggagcaagaactagcatcctgaagaacaaagcctctgctgagctggagcttagttgattgactcat

SEQ ID NO: 25311 - DNA, 337 bp, Macaca Mulatta
attaccaaacaataaacttggctagaccttgttttgaggattttacaagacatctgtagcaattagattttttttttctacattgaaagtagaaactgcctcctttcttctttccagtcagctattgatcttttcagctgttacaatctaaagtattcttatgatctgtgtaagctctgaatgaactttactcaataaaattaactttttggcttcttacttatgtgatacattttatattgctttgtttccacataccctttcctccttgtgaaaaagtttctgatggaagagggaaaatgcaggcatcttttattagggaaatccaatacttagt

SEQ ID NO: 25312 - DNA, 1170 bp, Macaca Mulatta
  misc_feature (1)...(1170): n = A,T,C or G
agttgattgcaggtcctcctggggccagaagggtgcctgggaggccaggttctgaggatcccctccatccagaagaaccacctgctcactctgtcccttcacgtgctgctgggaccatgggggctgnnnnnnnnnnnnnnnnnnnnnnnnnnnnnnnnnnnnnnnnnnnnnnnnnnnnnnnnnnnnnnnnnnnnnnnnnnnnnnnnnnnnnnnnnnnnnnnnnnnnnnnnnnnnnnnnnnnnnnnnnnnnnnnnnnnnnnnnnnnnnnnnnnnnnnnnnnnnnnnnnnnnnnnnnnnnnnnnnnnnnnnnnnnnnnnnnnnnnnnnnnnnnnnnnnnnnnnnnnnnnnnnnnnnnnnnnnnnnnnnnnnnnnnnnnnnnnnnnnnnnnnnnnnnnnnnnnnnnnnnnnnnnnnnnnnnnnnnnnnnnnnnnnnnnnnnnnnnnnnnnnnnnnnnnnnnnnnnnnnnnnnnnnnnnnnnnnnnnnnnnnnnnnnnnnnnnnnnnnnnnnnnnnnnnnnnnnnnnnnnnnnnnnnnnnnnnnnnnnnnnnnnnnnnnnnnnnnnnnnnnnnnnnnnnnnnnnnnnnnnnnnnnnnnnnnnnnnnnnnnnnnnnnnnnnnnnnnnnnnnnnnnnnnnnnnnnnnnnnnnnnnnnnnnnnnnnnnnnnnnnnnnnnnnnnnnnnnnnnnnnnnnnnnnnnnnnnnnnnnnnnnnnnnnnnnnnnnnnnnnnnnnnnnnnnnnnnnnnnnnnnnnnnnnnnnnnnnnnnnnnnnnnnnnnnnnnnnnnnnnnnnnnnnnnnnnnnnnnnnnnnnnnnnnnnnnnnnnaaccgcatgcacgagagcctgcacctgttcaacagtatctgcaaccaccgctacttcgccacgacgtccatcgtgctcttcctcaacaagaaggacgttttctttgagaagatcaagaaggcccacctcagcatctgtttcccggactacgatggnggacccaacacctacgaggacgccggcaactacatcaaggtgcagttcctcgagctcaacatgcggcgcgacgtgaaggagatctattcccacatgacgtgcgccaccgacacgcagaacgtcaagtttgtcttcgacgctgtcaccgacatcatcatcaaggagaacctcacagactgtggcctcttctga

SEQ ID NO: 25313 - DNA, 240 bp, Macaca Mulatta
gcccaggcctgtactgtcccttcccccggccagatcctgggagcaccctgcctgacccaggtggcaggggagaagcaaccgaccagtctggaggcccaggggaggtgcaccctgcaatgcggctggggggctgacagcctgatcctcccccaatctcagcagtgacatccccaaagagccactccctgaagtggagtttgttgcccgcatcaacaggaggccacctcaattccccgcagg

SEQ ID NO: 25314 - DNA, 929 bp, Macaca Mulatta
gccggaagacgtgaagagagttgcttctaagatgctccgaggaaagccggcagtggccgccctgggtgacctgactgacctgcccacgtacgagcacatccagactgccctgtcgagcaaggacggacgcctgcccaggacgtaccggctcttccggtagagccgctccccggcctgacagacccaggggctgcagctggagcctgttcctgtgcgtgttagtttggacacgaatttagtttaaaaagctgtctggttgtatgaacagtgcagacaatgtcaccacagcacccacgcagtttgcgttgcttcagaactcaatgtgccgatcagtggagtcagtgttgtgcctgacccgccgcaagccagcaagcaggtgcagcgcccagcgctggagtgcagcgtgccgtgaggaggccggtcagtgctccccctcctcgggggctctgggcacacggggctccacaggttccttggaggagccctgagccgggaagcagcggaggccagcctatcagagcctccctggaggccaccgtgctcctgtgttggtaccaggactcacctctgacaaacaggacaaggtgagggcccagtctgctctgaggagcgcggtccatgcgtttgcacgcggcttccctggtaataaacagctggcatcttagctcggtgttttccttctcgcctggggaggggcggttcttaagggctgtctgaattggcagcttttctaacatggaggccttcctccctgataattatctggttgacccagtgacttgaagcccgttctcatgcgacgtgctgatttcacggtgtcgcagcatgcacggggcggggtgacggcgggtgatggtgactggcagcaaagcctgcagatgccttagaggtagggagtgccgccagtccgaggagcggccacagatgtg

SEQ ID NO: 25315 - DNA, 627 bp, Macaca Mulatta
  misc_feature (1)...(627): n = A,T,C or G
agtgtttggcaaatgcacctggtatgttcatcttcaaagacgtcaggataatttggggatgtgctgtccctcctgcacctgcccctacattactgactttcctcttgcacctgaagctttttccagatcaaaatggatgtgcccacggggagcgggacctgcttgatggactcagaggacgctggaacaggagagtcgggtgaccgggccacagaaaaggaggtcatctgcccctgggagagcctgtgagggaaaggcaggcagagctgggggctctggaccaggaagatgctctgacagatgccatgggatgggccgcaggacacactcactcgagaaccaaagtgcatttgagtgacatttgagggtgggggagacaagatggggtagattgtggcaaagaatgctctggctggttaccaggggccaactccttctcctcctgaccctccctcccttgggcagaagaaaggcatgtagaccaggagactttccctgctgccttanaaacaataaaaggttaactttaagtttcttggaatgttagtgtgtgcctggttttgttagtaacttatgagctattatttatgagttaaactcacgtcttcttcaatcttctggacaaag

SEQ ID NO: 25316 - DNA, 820 bp, Macaca Mulatta
ggggacgtgctctcgcgagatttgggcctcttcctaagccggcgctcggcgagttctcccaggagaagaccatgttcagttcgagcgccaagatcgtgaagcccaatggcgagaagccggacgagttcgagtccggcatctcccaggctcttctggagctggagatgaactcggacctcaaggctcagctcagggagctgaatattacggcagccaaggaaattgaagttggtggtggtcggaaagctatcataatctttgttcctgttcctcaactgaaatctttccagaaaatccaagtccggctagtacgcgagttggagaaaaagttcagtgggaagcatgttgtctttatcgctcagaggagaattctgcctaagccaactcgaaaaagccgtacaaaaaattaaccggaagcgtcccaggaggccgtactctgacagctgggcatgatgccattctttgaagacttgggtcttccccagcgaaattgtggggcaagagaatcccccgtgaaactaaatgggagcccggctcctaaagggtcctttgggacaaggccccccagaacctggtggaacccaagggtgaaaattttttcgggggccttaaaaaaaactcccacgggcacggtttttaattttttaatttccccaagctttccactggcgcgcccccatgggtgcttagctacacaattttcttttccccgtgccataccgcagcggccataggtctacttatgcgccccctctgtccggggcccgccctcctgccccctctgcgcaaagggtttccttcacagagaccttctcgcttc

SEQ ID NO: 25317 - DNA, 862 bp, Macaca Mulatta
ttattattttcacattgaatttaaagtttagaaaactaatactctgaaatactgaaggattatttgtaggcattacatttcaaaggaataccgacattcctggttgcttgactacaaacattaattgcccactctttgatccatggtatcctataaacagtatgtatttgcaaaggttaggcaaataggatggctttggtgccgacgctgtcgcttgaggatgcgtgatgaaagattcagcgctgttacagtggaaagaaaagggtaactcatagattgcagaaactgacatcatatgacacagcatgttgagtcataatgatctctatggtaatattttggaatttcctcttcaggactatcagacctggttagatttgcgagagctggaatgcaaaatcggggagcgctatatcacccatgaaagcgatgacctgaggtgggagcagtacgcaggcgagcaggggctgcagtaccccacacacctgatcaatccaagtgctagccacagtgacagtcctgagactgaagaaacagaaatgaaagccctcggtgagcgtgtcagcttcctctgagttccatcttctataatctgtcaaaacactgtggaactaataaatacatacggtcaggtttaacatttgccttgcagaactgccattattttctgtcagatgagaacaaagctgttaaactgttagcactgttgatgtatctgagttgccaagacaaatcaacagaagcatttgtattttgtgtgaccaactgtgttgtataacaaaagttccctgaaacacgaaacttgttattgtgaatgattcatgttatatttaatgcattaaacctgtctccactgtgcctt

SEQ ID NO: 25318 - DNA, 541 bp, Macaca Mulatta
acatgatgaggttttcatgattgccgtacttgcccctggttgactgaatatccacagccacttacatatactaacccacgagaggctatcctgggataggagttccattttcactgattctgagacagaatggctggtgggcaccaaaacaaacccactcaacaatgtgatttttctttaaaagtaagaaaatccaaaacttacctatggagaaatgatgaattagattttgggcacagtgaggtattgtatcagtgtaacttctagaagcttaaagctggaaataaaggacaaaggacaagtacatgtttttaggaccaagaaggctgcagagcagatgggcaggatatggaccaagaagagctgcttctggaggaacacctactgtggacccaacatcccccgacacccaggtgctcagggatacaggggaggtgactatagatgaggaaattagtttgggagctttagtaacccgcccatgttcgtttagatcatagccatgctgagactttgtgtgtctagaacttcaaaatctgta

SEQ ID NO: 25319 - DNA, 669 bp, Macaca Mulatta
agatagagatggtcagagggaagaacaactgacaacatctctaatctgattttgattgttgctctgttttaaaaataatactaacctaaatcctcatgccttgactcagggttctgcaaatgcaagtaggaaattcaaatgtgtcagtggaagttcaaacacatttcaccaactcgtggagagttattatgtttggttgcacatttactgaggccggttttagccctgacacatgtacttagcaataagagcggaggctatgtgagccgaggatgctctgggagggcagtgggcagtgtctgaccccacagcaagccccaaacagttttgtgtcatttggttgctgtttctccctttgcagcaaggtttcgataggaacatgctggggaccttagctggggccaacagcctcaggaacttcacctcccgattctaagaagaggctgtccaagcaagttaggcttgcaggtaagaatcaatcgccccaccctcagggcaaaggatgcctccgggaccactgcaacagcctcagccagtctcagagacagaggctaggcctgtgctcccagggacacagaagcatcctttcgcccggctctggacaacacaaggagttgtgtagactgcttggctgggaacgtgggttgtcccacgttcaggacgttaggg

SEQ ID NO: 25320 - DNA, 910 bp, Macaca Mulatta
gactcctcttccctcttacccacttcttcctcatattcttggtaccgcctgtgttggagactgctcattttccttccaaattaatctcagaccccctaaaatattgacaacctagacaaccccacaaccgaggagccagactttcttttggactaacctccatagccctatcatggaggcagtgtacctggtagtgaatggggtgggcctggtgctggacgtgctgaccttggtgttggacctcaacttcctgctggtgtcctccctcctggcttccctggcctggctcctggccttcgtctacaacctgccgcacacggtactgactagtcttctgcacttgggccgcggagtcctgctttcattgctggccttgatcgaagccgtggtccggttcacatgtgggggcttgcaggccttgtgtaccctgctctatagctgctgctctggcctggagagcctaaagctcctggggcacctggcctctcacggggcactgcggagcagggaaatactgcaccggggcgtcctcagtgtggtctccaatggccatgctttgctgcgccaggcctgtgacatctgtgccattgccatgagcctggtggcttatgtgatcaacagcctggtcaacatctgcctcatcggcactcagaacctcttttccctggtgctggccctgtgggatacagtgaccgggcctctgtggaggatgacggatgtagtggctgccttcctagcccacatttccagcagtgctgtggccatggccatcctcctttggacaccctgccaactagccctggagctgctggcctcagctgcccgcctcctggccagctatgtgcttgtcaatctcactggcctggtgttgctggcttgcgtgctggcagtgacggtgactgtgttgcat

SEQ ID NO: 25321 - DNA, 857 bp, Macaca Mulatta
gtgaagcaggcgaagcagatgatcggaggccagcaactacctgcacttgccgccaggagtgggcagtcctttaggtctctcgggaaggccccagcctccctccccactgaagaaaagaagttggtaaccacagagcaaagtccctgggccctgggaaaagcctcatcacgggcagggctctggcccatagtggctggacagacactggcacagtcttgctggtctcctgggagcacacagacattgacacagacttgctggtctcttggaagagggcaagaccccaaaccagagcaaaatacacttccagctcttaaccaggctccttccagtcacaagtgtgcagaatcagaacagaagtaataccaatcaatgtcacatgaacaaacaagctgcccccagggtaccatttggggaggggaaatcttttctttctttccccctttaagaaaaaccagatctgcccccaacactttcccactgttattctttcctcatatcccaacactcagaactcttgtgacattagccagtgggggcttatggttgtgtgaaccatgtttgaaaatccagtgggccccaaccaaggagacagacagacttgcgtctctttcccccaacttctccacatggtcatcgtgaaataaaaagtccactctggagtcaagtatggaattcaattccgctggtcaggttggaaggtataggggctctcaaagcgatttccccaaccagacagagcccccactgaggggctaggaaccctcgggagaaaatggtgttctttcaaatcagtggcgatttcctgagcattcacgtgttctaggcccgggtgctagtcactgatgagagataca

SEQ ID NO: 25322 - DNA, 761 bp, Macaca Mulatta
  misc_feature (1)...(761): n = A,T,C or G
ggacgacaagcgagttaataatatntaagtctcagatgaaagaacgatcctgacatggcctcagcagtggctgccatccggacgttgctggagtcttgaagcgagataaaggggagacaatccagggcctgagggcgaatctcaccagtgccatagaaaccctgtgtggtgtggactcctccgtggcagtgtcctctggcggggagctcttcctccgcttcatcagccttacctccctggaatactccgattactccaaatgtaaaaagatcatgattgagcggggagaactttttctcagaagaatatcactgtcaagaaataaaattgcagatctgtgccatactttcatcaaagatggagcgacaatattgactcacgcctactccagagtggtcctgagagttctggaagcagccgtggcggccaagaagcgatttagtgtatacgtcacagagtcacagcctgatttgtcaggtaagaaaatggctaaagccctctgccacctcaacgtccctgtcactgtggtgctagatgctgctgtcggctacatcatggagaaggcagatcttgtcatagttggtgccgaaggagttgttgaaaacggaggaattattaacaagattggaaccaaccagatggctgtgtgtgccaaagcacagaataaacctttctatgcggttgcagaaagtttcacgtttgtccgactccttccactaaaccagcaagacgtccagataagttgaagtataggcagatat

SEQ ID NO: 25323 - DNA, 457 bp, Macaca Mulatta
agttttattcatctttactatctgtggcatgaccagctgtatctgaaagagaaaagacatgaaatataaaccaacctcctcatttctgttgagtaaaatgaagcaaagattggaaacactttctgaaaaagaaagcaatgataatagcagtggatacccacccccacagatgcacccaagagacaagccatttacatgcagatattcacagtcacatatagaaacacccacacggacacaaagaatgttgctgcagagactaaatgacatgcaacaggtgaagatgtatatgttatacacaagcccaggtaagcactcataattcacagataataaaacatctaggtttcattcctttgacatgtttgtatctttttaatttaaatgttgttactggcttaagatattttgtgttcttacagtagaaacgcttttaataaagtatttcagaataaac

SEQ ID NO: 25324 - DNA, 270 bp, Macaca Mulatta
ttgtgagatgtgtcagaacttcttcattgacagctgtgctgctcatgggccccctacatttataaaggacagtgcagtggaaaaggggcatcctaaccgttcagccctaagtctgcccccggggctgagaattgggccatcaggcatccctcaggccgggcttggagtatggaatgaggcatctgatctgccgctgggtctgcactttggcccctatgagggccgaattacacaggacgaagaggcagccaacaatggatactcttggct

SEQ ID NO: 25325 - DNA, 2019 bp, Macaca Mulatta
  misc_feature (1)...(2019): n = A,T,C or G
atgaaaaaacagaggaaaattctatggaggaaaggaatccacttagccttttctgagaaatggaacactgggtttggaggctttaagaagttttattttcaccaacacttgtgcattctgaaagctaagctgggaaggccaattactaggaatagacagttgagacatttccagggtggaaagaaagcccttcagatccagaaaacatgggtcaaggatgaacccccttgtgctaagaccaagttcagtgtggatactccacatgctagcactctgtcctctccagtgaaaagaaaggacactaaacacttcgtttcctcctcaaggactctcctgagactccaagcagagaagttgttgtcatcagcaaagaattctgaccatgaatactgcagagagaaaaatctcttgaagacagttactgactttccatccaatagtgctttaggtcaggccaatggtcacagacctaggacagacccacaggcttctgactttcccatgaagttcaatggggagagccaaagtccaggggagagtggcgcgattgtggtcaccttgagcaaccacaagagaaagggcttttgttacggctgctgccgagggccggagcaccacaggaatgggggacccttgattccaaagcagttccaacttaaccgacatagaagaatcaaattatctcctcttatgatgtatgagaaattatccatgattagatttcggtacaggattctcagatcccagcacttcagaaccaaaagcaaagtttgcaagctaagaaaagcccagcgaagctgggtacagaaggtcactnnnnnnnnnnnnnnnnnnnnnnnnnnnnnnnnnnnnnnnnnnnnnnnnnnnnnnnnnnnnnnnnnnnnnnnnnnnnnnnnnnnnnnnnnnnnnnnnnnnnnnnnnnnnnnnnnnnnnnnnnnnnnnnnnnnnnnnnnnnnnnnnnnnnnnnnnnnnnnnnnnnnnnnnnnnnnnnnnnnnnnnnnnnnnnnnnnnnnnnnnnnnnnnnnnnnnnnnnnnnnnnnnnnnnnnnnnnnnnnnnnnnnnnnnnnnnnnnnnnnnnnnnnnnnnnnnnnnnnnnnnnnnnnnnnnnnnnnnnnnnnnnnnnnnnnnnnnnnnnnnnnnnnnnnnnnnnnnnnnnnnnnnnnnnnnnnnnnnnnnnnnnnnngactctgggtcaggaaaatcggacaagttctcttagtgatgacggagtaaaactgtcagagtctggagcagatacatctgtgagtagtgtagatgggcctgtgtcccaaaaggctgttcacagtgagaactcataccagatggaggaggatggatctctcaagcagaacattcttagttctgagttgctggaccacccttactgtaaaagtccactggaggctcccctggtgtgcagtggactcaaactagaaaatcaagtaggaggtggaaaggacagtcagaaagcctctccagtggatgatgaacagctgtcagtctgtctgtctgnnnnnnnnnnnnnnnnnnnnnnnnnnnnnnnnnnnnnnnnnnnnnnnnnnnnnnnnnnnnnnnnnnnnnnnnnnnnnnnnnnnnnnnnnnnnnnnnnnnnnnnnnnnnnnnnnnnnnnnnnnnnnnnnnnnnnnnnnnnnnnnnnnnnnnnnnnnnnnnnnnnnnnnnnnnnnnnnnnnnnnnnnnnnnnnnnnnnnnnnnnnnnnnnnnnnnnnnnnnnnnnnnnnnnnnnnnnnnnnnnnnnnnnnnnnnnnnnnnnnnnnnnnnnnnnnnnnnnnnnnnnnnnnnnnnngttcacttcttcaacagcttttttcatagacagctggtaaccaaaggatataatggagtaaaaagatggactaaaaaggnnnnnnnnnnnnnnnnnnnnnnnnnnnnnnnctattcacctggaagtccactggtctctccttattgtgacactctctaatcgaattatttcattttatgatctctcaaggcattcattttaagttttgtgtagag

SEQ ID NO: 25326 - DNA, 604 bp, Macaca Mulatta
  misc_feature (1)...(604): n = A,T,C or G
gggtctcaatgggcagaagaagtaccagattcacctgaagagtgtgagtggtcccattgaggttctgctgnnnnnnnnnnnnnnnnnnnnnnnnnnnnnnnnnnnnnnnnnnnnnnnnnnnnnnnnnnnnnnnnnnnnnnnnnnnnnnnnnnnnnnnnnnnnnnnnnnnnnnnnnnnnnnnnnnnnnnnnnnnnnnnnnnnnnnnnnnnnnnnnnnnnnnnnnnnnnnnnnnnnnnnnnnnnnnnnnnnnnnnnnnnnnnnnnnnnnnnnnnnnnnnnnnnnnnnnnnnnnnnagtgagtggcggccctggaactgatagcaaggacagtggtgagctcagttcactcccactgggcccaacagcactggacacccggccactgcagtcttctgccctgctggannnnnnnnnnnnnnnnnnnnnnnnnnnnnnnnnnnnnnnnnnnnnnnnnnnnnnnnnnnnnnnngacccaacccttctacctcctttgagcccatcaannnnnnnnnnnnnnnnnnnnnnnnnnnnnnnnnnnnnnnnnnnnnnnnnnnnnnnnnnnnnnnagagtgcatgagctcggagctgctggaggagttgatgtc

SEQ ID NO: 25327 - DNA, 3903 bp, Macaca Mulatta
  misc_feature (1)...(3903): n = A,T,C or G
gagcggcccagacagagtcctcctacagagggagaggccagagaagctgcagaagacacaggcagggaaagacaaagattcaggaaaggagggctcaggaggagagtttggagaagccagacccctgggcgcctctcccaagcccaaggactaagttttctccatttcctttaaaggtccccagcccttctgaaaactgcctctgaccttggcaggagtccaagcccccaggctaacagagaggagctttccaaagctagggtgtggaggacttggtgccccagacggcctcagtccttcccagctccagtaccagtgccatgtcccagacaggcgcgcatcccgggaggggcttggcggggcgctggctgtggggagcccaaccctgcctcctgctccccattgtgccgctctcctggctggtgtggctgcttctgctactgctggcctctctcctgccctcggcctggctggccagccccctcccccgggaggaggagatcgtgtnnnnnnnnnnnnnnnnnnnnnnnnnnnnnnnnnnnnnnnnnnnnnnnnnnnnnnnnnnnnnnnnnnnnnnnnnnnnnnnnnnnnnnnnnnnnnnnnnnnnnnnnnnnnnnnnnnnnnnnnnnnnnnnnnnnnnnnnnnnnnnnnnnnnnnnnnnnnnnnnnnnnnnnnnnnnnnnnnnnnnnnnnnnnnnnnnnnnnnnnnnnnnnnnnnnnnnnnnnnnnnnnnnnnnnnnnnnnnnnnnnnnnnnnnnnnnnnnnnnnnnnnnnnnnnnnnnnnnnnnnnnnnnnnnnnnnnnnnnnnnnnnnnnnnnnnnnnnnnnnnnnnnnnnnnnnnnnnnnnnnnnnnnnnnnnnnnnnnnnnnnnnnnnnnnnnnnnnnnnnnnnnnnnnnnnnnnnnnnnnnnnnnnnnnnnnnnnnnnnnnnnnnnnnnnnnnnnnnnnnnnnnnnnnnnnnnnnnnnnnnnnnnnnnnnnnnnnnnnnnnnnnnnnnnnnnnnnnnnnnnnnnnnnnnnnnnnnnnnnnnnnnnnnnnnnnnnnnnnnnnnnnnnnnnnnnnnnnnnnnnnnnnnnnnnnnnnnnnnnnnnnnnnnnnnnnnnnnnnnnnnnnnnnnnnnnnnnnnnnnnnnnnnnnnnnnnnnnnnnnnnnnnnnnnnnnnnnnnnnnnnnnnnnnnnnnnnnnnnnnnnnnnnnnnnnnnnnnnnnnnnnnnnnnnnnnnnnnnnnnnnnnnnnnnnnnnnnnnnnnnnnnnnnnnnnnnnnnnnnnnnnnnnnnnnnnnnnnnnnnnnnnnnnnnnnnnnnnnnnnnnnnnnnnnnnnnnnnnnnnnnnnnnnnnnnnnnnnnnnnnnnnnnnnnnnnnnnnnnnnnnnnnnnnnnnnnnnnnnnnnnnnnnnnnnnnnnnnnnnnnnnnnnnnnnnnnnnnnnnnnnnnnnnnnnnnnnnnnnnnnnnnnnnnnnnnnnnnnnnnnnnnnnnnnnnnnnnnnnnnnnnnnnnnnnnnnnnnnnnnnnnnnnnnnnnnnnnnnnnnnnnnnnnnnnnnnnnnnnnnnnnnnnnnnnnnnnnnnnnnnnnnnnnnnnnnnnnnnnnnnnnnnnnnnnnnnnnnnnnnnnnnnnnnnnnnnnnnnnnnnnnnnnnnnnnnnnnnnnnnnnnnnnnnnnnnnnnnnnnnnnnnnnnnnnnnnnnnnnnnnnnnnnnnnnnnnnnnnnnnnnnnnnnnnnnnnnnnnnnnnnnnnnnnnnnnnnnnnnnnnnnnnnnnnnnnnnnnnnnnnnnnnnnnnnnnnnnnnnnnnnnnnnnnnnnnnnnnnnnnnnnnnnnnnnnnnnnnnnnnnnnnnnnnnnnnnnnnnnnnnnnnnnnnnnnnnnnnnnnnnnnnnnnnnnnnnnnnnnnnnnnnnnnnnnnnnnnnnnnnnnnnnnnnnnnnnnnnnnnnnnnnnnnnnnnnnnnnnnnnnnnnnnnnnnnnnnnnnnnnnnnnnnnnnnnnnnnnnnnnnnnnnnnnnnnnnnnnnnnnnnnnnnnnnnnnnnnnnnnnnnnnnnnnnnnnnnnnnnnnnnnnnnnnnnnnnnnnnnnnnnnnnnnnnnnnnnnnnnnnnnnnnnnnnnnnnnnnnnnnnnnnnnnnnnnnnnnnnnnnnnnnnnnnnnnnnnnnnnnnnnnnnnnnnnnnnnnnnnnnnnnnnnnnnnnnnnnnnnnnnnnnnnnnnnnnnnnnnnnnnnnnnnnnnnnnnnnnnnnnnnnnnnnnnnnnnnnnnnnnnnnnnnnnnnnnnnnnnnnnnnnnnnnnnnnnnnnnnnnnnnnnnnnnnnnnnnnnnnnnnnnnnnnnnnnnnnnnnnnnnnnnnnnnnnnnnnnnnnnnnnnnnnnnnnnnnnnnnnnnnnnnnnnnnnnnnnnnnnnnnnnnnnnnnnnnnnnnnnnnnnnnnnnnnnnnnnnnnnnnnnnnnnnnnnnnnnnnnnnnnnnnnnnnnnnnnnnnnnnnnnnnnnnnnnnnnnnnnnnnnnnnnnnnnnnnnnnnnnnnnnnnnnnnnnnnnnnnnnnnnnnnnnnnnnnnnnnnnnnnnctgatgccctcccccacagatgtggtactacatggggcagtcagcttgcgctacagcggagccactgcagcctcagagacactgtcaggccatgggccactggcccagcctttgacactgcaagtcctagtggctggcaacccccaggatgcacgcctccgatacagcttttttgtgccacggccaaccccttcaacaccacgccccactccccaggactggctgcaccgaagagcacagattctggagatccttcggcggcgcccctgggcgggcaggaaataacctcactatcccggctgccctttctgggcaccggggcctcggacttagctgggagaaagagagagcttctgttgctgcctcatgctaagactcagtggggaggggctgcgggcgtgagacctgcccctcctctcaccctaatgtgcaggctggccctgccctggtttcctgccctgggaggcagtgacgggttagtggatggaaggggctgacagacagccctccatctaaactgccccccctgacgtgcgggtcacaggagggagggggaaggcaggnnnnnnnnnnnnnnnnnnnnnnnnnnnnnnnnnnnnnnnnnnnnnnnnnnnnnnnnnnnnnnnnnnnnnnnnnnnnnnnnnnnnnnnnnnnnnnnnnnnnnnnnnnnnnnnnnnnnnnnnnnnnnnnnnnnnnnnnnnnnnnnnnnnnnnnnnnnnnnnnnnnnnnnnnnnnnnnnnnnnnnnnnnnnnnnnnnnnnnnnncttatgtatgaggtacaacctgttctgctttcctcttcctaaattttattttttgggaaaagaaaagggtagtagggtgggccttcagggagtgagggattatnnnnnnnnnnnnnnnnnnnnnnnnnnnnnnnnnnnnnnnnnnnnnnnnnnnnnnnnnnnnnnnnnnnnnnnnnnnnnnnnnnnnnnnnnnnnnnnnnnnnnnnnnnnnnnnnnnnnnnnnnnnnnnnnnnnnnnnnnnnnnnnnnnnnnnnnnnnnnnnnnnnnnnnnnnnnnnnnnnnnnnnnnnnnnnnnnnnnnnnnnnnnnnnnagacagagtctcgctgttgtcaccagggctggngtgatttcagcccactgcaacctccgccacccaggttccagcaattctcctgcctcagcctcccaagtagctgagattacagtcacccaccaccatgctcggctaatttttgnnnnnnnnnnctaatttttgtatttttagtagagacagggtttcaccatgttggccagcctggtctcgaactcctgacctcagttgatccacctgccttcgtctcccaaagtgctgggattacaggtgtgagcca

SEQ ID NO: 25328 - DNA, 957 bp, Macaca Mulatta
  misc_feature (1)...(957): n = A,T,C or G
aagttttctgtcactggacaccaaggagttttcggtggcacagctgnnnnnnnnnnnnnnnnnnnnnnnnnnnnnnnnnnnnnnnnnnnnnnnnnnnnnnnnnnnnnnnnnnnnnnnnnnnnnnnnnnnnnnnnnnnnnnnnnnnnnnnnnnnnnnnnnnnnnnnnnnnnnnnnnnnnnnnnnnnnnnnnnnnnnnnnnnnnnnnnnnnnnnnnnnnnnnnnnnnnnnnnnnnnnnnnnnnnnnnnnnnnnnnnnnnnnnnnnnnnnnnnnnnnnnnnnnnnnnnnnnnnnnnnnnnnnnnnnnnnnnnnnnnnnnnnnnnngcgctctgcacgtttgcactcagcaccggggacccaagccagcccgtgcgcctgttcaggggccggacctcgnnnnnnnnnnnnnnnnnnnnnnnnnnnnnnnnnnnnnnnnnnnnnnnnnnnnnnnnnnnnnnnnnnnnnnnnnnnngtacgcagagatgcctaaggcggagaagaacgctgtctcccatcgcttccgggccatgatggagctgcaggagtacttaggcagcttgacttttgcggatgggggaggcccctcaggccggggatctggggagggctagcctgaaacctcccgcatcaggcaggcacccctggaagtacttcgttcagggtttccccttcctgggggtgtcgagtagcctcaccagcgtgtctggaggagcagctggctctgctatgagaaactatgggcaagtggatgccattcttttgccgttaggattcactgctctctcttacaacctccaggcctgggatcctgcaaggaccttgggtggtaaagctggacttggtgggagtgagggcttggggaggaaccatgcaaatcaccttccatgttttttaaatgcaataaataacacttctggatgagacttgtttccaaaataaaccagctatatctgttttga

SEQ ID NO: 25329 - DNA, 779 bp, Macaca Mulatta
  misc_feature (1)...(779): n = A,T,C or G
gggactgcagctgcgagcgctgcctttcggatctcggctatagcttccgaacaccggcttgagtcctaagctgcggactcgcctgctgagtgggcatctcgcaggccagccagatgctgctttggggctgagttggactttttgtttattttttgttgttgacgcttactatcttcggaaaaagaggcatcgattcccattctcgggacttcccagatgttgctgcaactgggggattagaggaatggtgcaccctgggacccagtgttcaagatgtcaaagcgaggacgtggtaggtcctctggtgtgaaattccagatttccttgggtcttccagtaggagctgtgatcaactgtgctgataacacaggagccaaaaacctgtatatcatctctgtgaaggcgatcaagggatggctgaacagactttccgctgctggtgtcggtgacatggtgatggccacagtcaagaaaggcaaaccagagctcagaaaaatggtacatccagcagcggtcattcgacaatgaaagtcataccggagaaaagatggaaagtgtttatttccaagataatgcaggcggtcatagtgaagtaataaaggcggaaatgaaaaggtttctgccatttacgggaaccaggtaaccaaaaggaatagttgctaaaacttggtgggcccccctggattggtggccattggcggtggaatttccccccaataaatatttttggagagaagagaagnttgtatatgataggtaaaataacgcgaaaattgagc

SEQ ID NO: 25330 - DNA, 227 bp, Macaca Mulatta
  misc_feature (1)...(227): n = A,T,C or G
caggtaaaatagaactgcacgggaaacccatagaagttgagcactcggtcccaaaaaggcaaagnnnnnnnnnnnnnnnnnnnnnnnnnnnnnnnnnnnnnnnnnnnnnnnnnnnnnnnnnnnnnnnnnnnnnnnnnnnnnnnnnnnnnnnnnnnnnnnnnnnnnnnnnctgactcggttactgcagttgtaaatgtaacctattccagtaaggaccaagctagaca

SEQ ID NO: 25331 - DNA, 570 bp, Macaca Mulatta
  misc_feature (1)...(570): n = A,T,C or G
tattaagttgccagaaggaacccgtttgtcttcgcccctacacttctaactgttgctgctcattttgaggaggtgtctaaatcatgttgtgaagaacaaaacaaagtcaactgctttcaaacaagggnnnnnnnnnnnnnnnnnnnnnnnnnnnnnnnnnnnnnnnnnnnnnnnnnnnnnnnnnnnnnnnnnnnnnnnnnnnnnnnnnnnnnnnnnnnnnnnnnnnnnnnnnnnnnnnnnnnnnnnnnnnnnnnnnnnnnnnnnnnnnnnnnnnnnnnnnnnnnnnnnnnnnnnnnnnnnnnnnnnnnnnnnnnnnnnnnnnnnnnnnnnnnnnnnnnnnnnnnnnnnnnnnngagcaaggttatgaaccatatttgttcaaaacaagattctatctccagcaaaatcaaagagtgctgtgaaaagaaaataccagagcgtggccagtgcataattaactcaaataaagatgatagaccaaaggatttatctctaagagaagcaaaatttactgacagtgaaaatgtgtgtcaagaacgagatgctgacccagacatcttctttgcgaag

SEQ ID NO: 25332 - DNA, 824 bp, Macaca Mulatta
  misc_feature (1)...(824): n = A,T,C or G
gaaacttttagcggaccagagacgacttaagcgcgagcaagaagaggctgatattgcagctcgacgccnnnnnnnnnnnnnnnnnnnnnnnnnnnnnnnnnnnnnnnnnnnnnnnnnnnnnnnnnnnnnnnnnnnnnnnnnnnnnnnnnnnnnnnnnnnnnnnnnnnnnnnnnnnnnnnnnnnnnnnnnnnnnnnnnnnnnnnnnnnnnnnnnnnnggagcttcctctgcagaagggagatattgtttacatttataagcaaattgatcagaactggtatgaaggagaacaccacggccgggtgggaatcttcccacgcacctnnnnnagcttcttcctcctgctgagaaggctcagcccaaaaagttgacaccagtgcaggttttggaatatggagaagctattgctaagtttaactttaatggtgatacacaggtagaaatgtccttcagaaagnnnnnnnnnnnnnnnnnnnnnnnnnnnnnnnnnnnnnnnnnnnnnnnnnnnnnnnnnnnnnnnnnnnnnnnnnnnnnnnnnnnnnnnnnnnnnnnnnnnnnnnnnnnnnnnnnnnnnnnnnnnnnnnnnnnnnnnnnnnnnnnnnnnnnnnnnnnnnnnnnnnnnnnnnnnnnnnnnnnnnnnnnnnnnnncagcaacctcaagcccagcagcgaagagtcacccccgacaggagtcaagacctcacaagattnnnnnnnnnnnnnnnnnnnnnnnnnnnnnnnnnnnnnnnnnnnnnnnnnnnggaactacgcgatggagatatcgttgatgtcatggaaaaatgtgacgatggatggtttgttggt

SEQ ID NO: 25333 - DNA, 571 bp, Macaca Mulatta
ctgaaatcaatggctacacattccaaaccaatctaaacactatttccctttggtgtgggtttggttttgttgttcattttgaaatatacttttgaacactgagatccctaaaactactagatctctagaagtgtaattgtgaaagaaacttgcttgcagctttaacaaaatgagaaactcttcccaaataaaacttgttttgaagtttgtgtgacactttgcttcccttcaggttgggtgcctcttggtgacagtgttcagaaatgtaagcagcatgaggaagggagctggcactgggaggaagagccaggtttctgacttgtgttttggccactttcctgttgctcctattcttgccaatcagccaccccatttcctgtgaaaatctgccaccttgaggaaaggaacaagaatttcaaagggctaatggtctccctcctggtcttcccttggaacgtggatgttgatatgtgcaggtggtttcctgtcttgcttatcttcctttgcccttagctgatggctaaagggcagttttcagactattaaagactgtaatgtaagaatgagcctt

SEQ ID NO: 25334 - DNA, 89 bp, Macaca Mulatta
ggcttggcgggggctctgaggacgccaaggagatcatgcagcatcgcttctttgccggcatcgtgtggcagcacgtgtatgagaagaag

SEQ ID NO: 25335 - DNA, 685 bp, Macaca Mulatta
  misc_feature (1)...(685): n = A,T,C or G
aatgtcagttgatgcgtattgtggacacactggacgatttcatgtcatattttccttgggcagagaaaaagcaagatgtgaaagagcagatgttcaatgagctgctcacgtataatgcgcctcatcttatgcaagacttggacacatatttaggggggaaagagtggcttattggtaactctgtgagtatgttttatatcttaaaaaattcaagtgaataaaaagacaaaccaaaaaactatgaaaacttattgaaaaaaagttacctatagggagggaatagaatttacagcaagaacaaaggttaaactcctttaaataaannnnnnnnnnnnnnnnnnnnnnnnnnnnnnnnnnnnnnnnnnnnnnnnnnnnnnnnnnnnnnnnnnnnnnnnnnnnnnnnnnnnnnnnnnnnnnnnnnnnnnnnnnnnnnnnnnnnnnnnnnnnnnnnnnnnnnnnnnnnnnnnnnnnnnnnnnnnnnnnnnnnnnnnnnnnnnnnnnnnnnnnnnnnnnnnnnnnnnnnnnnnnnnnnnnnnnnnnnnnnnnnnnnnnnnnnnnnnnnnnnnnnnnnnnnnnnnnnnnnnnnnnnnnnnnnnnnnnnnnnnnnnnnnnnnnnnnnnnnnnnnnnnnnnnnnnnnnnnnnnnnnnnnnnnnnnnnnnnnnnnnnnnnnnnnnnnnnnnnnnn

SEQ ID NO: 25336 - DNA, 369 bp, Macaca Mulatta
gctctaatacactacctggagaaagtcttttccttattttcaataaatgtcagacattattgaaaagaaatggtctcagtcaatatggcacttttccctccctggttctgtaaatggggtccatatcttgttcaaaaactatatgtcctgccacgctatggttgatgttgacacagagtcctgtggtgtcctgcaaatggagatcccaccggtgactaatcccagacgattaatgttgtaaacaagtcaagttttgtgccccttaggaaatgaaccttaatctgactgtggccaagataagataaggaatagtcagatagggtgctttttcttccctcttttccaaaaaactgtctgaaagcatatacc

SEQ ID NO: 25337 - DNA, 2452 bp, Macaca Mulatta
  misc_feature (1)...(2452): n = A,T,C or G
tgtttattcagtagtcaaaatgcagctcatgcactctaattagcatgtcaaattattctctccgtttcagaggtgtagggcctttgtggagccttcttttcaataaataatttgccactcttgaaggttagacattctctttttatgaatgtacacataaaggttttgctttgctttgcttgttgttaattaaaatgaggaggaaagaatgcgttatcacccaatcatgtgtctttttagtcataggttagcttttcaagacacttcctgcatctctgacctgttgcacctctgttatcttnnnnnnnnnnnnnnnnnnnnnnnnnnnnnnnnnnngcacctctgttatcttagcagcaagcacctgcttcagctgacctttgagtcataacccatnnnnnnnnnnnnnnnnnnnnnnnnnnnnnnnnnnnnnnnnnnnnnnnnnnnnnnnnnnnnnnnnnnnnnnnnnnnnnnnnnnnnnnnnnnnnnnnnnnnnnnnnnnnnnnnnnnnnnnnnnnnnnnnnnnnnnnnnnnnnnnnnnnnnnnnnnnnnnnnnnnnnnnnnggaatgtttctccagtgggtcctttgtgctgccatatggttggttgccttggtggtcaatctgatattgcattgcccaaagttttggccttttgcaatgcttggaggctgcatttgggcaacaggnacagggaacattgctgttgtcccaattatcaaaaccattggattaggccttggaatcttaatctggggatcatttaatgccttaactggctgggcaagctcaaggtnnnnnnnnnnnnnnnnnnnnnnnnnnnnnnnnnnnnnnnnnnnnnnnnnnnnnnnnnnnnnnnnnnnnnnnnnnnnnagtgctttcatatttttgttcatcaaaagtgaaataccaaataacacgtgttccgtggataccactccattaataacagagcctgtgangtgatcaacaaaactcaagacccctgttcctgggtggataaactctctacagtacacccaccgcatagngggctgcagtcttgcagtgatatctggagtactctatggatctacatttgtgccaatcatctatatcaaggaccacagcaaaagaaatgatagtatatatgcaggggcaagccaatatgngatttagactatgtttttgcacacttcagtggcatctttcttacaagttctgtctactttctggcctactgcatagccatgaaaaatagtcctaagctatatcctgaagcagtcctaccaggnnnnnnnnnnnnnnnnnnnnnnnnnnnnnnnnnnnnnnnnnnnnnnnnnnnnnnnnnnnnnnnnnnnnnnnnnnnnnnnnnnnnnnnnnnnnnnnnnnnnnnnnnnnnnnnnnnnnnnnnnnnnnnnnnnnnnnnnnnnnnnnnnnnnnnnnnnnnnnnnnnnnnnnnnnnnnnnnnnnnnnnnnnnnnnnnnnnnnnnnnnnnnnnnnnnnnnnnnnnnnnnnnnnnnnnnnnnnnnnnnnnnnnnnnnnnnnnnnnnnnnnnnnnnnnnnnnnnnnnnnnnnnnnnnnnnnnnnnnnnnnnnnnnnnnnnnnnnnnnnnnnnnnnnnnnnnnnnnnnnnnnnnnnnnnnnnnnnnnnnnnnnnnnnnnnnnnnnnnnnnnnnnnnnnnnnnnnnnnnnnnnnnnnnnnnnnnnnnnnnnnnnnnnnnnnnnnnnnnnnnnnnnnnnnnnnnnnnnnnnnnnnnnnnnnnnnnnnnnnnnnnnnnnnnnnnnnnnnnnnnnnnnnnnnnnnnnnnnnnnnnnnnnnnnnnnnnnnnnnnnnnnnnnnnnnnnnnnnnnnnnnnnnnnnnnnnnnnnnnnnnnnnnnnnnnnnnnnnnnnnnnnnnnnnnnnnnnnnncaaaacttacgtttatttcaagttatattgcgccaactttacatcatctaccccttttagctcataatgcttttgattatcgccagataaagtccattctcagagaacaaaaatttttcatcattgagaatatgtgcataacataatacatacatacacaagtatatgcacgtacataaatacacacagatatgttgctaaaatgagattctaggttatcagtaacaatttaaaggaaccaaccactcttttgaatgtacaannnnnnnnnctgaaatacacttttctaaaaccctcttaactggaggttttcctgttttcttcttgttttaactggtggtttccagtaggcaaaataaaatgacaggcatgctagnnnnnnnnnnnnnnnnnnnnnnnnaagaaaactgaaattaagccagacagggtggcacacccctataatcccagctactggggaggctgaagcaggagggtcacttagcccaagagtgcaaatctgccagcctgggcaacattgcaaggtcccatctctgaaaaataaatttaatttaaatttgt

SEQ ID NO: 25338 - DNA, 691 bp, Macaca Mulatta
ctactaaagggcatcattcgagttccagcgccttgccactatgcgcacaagctggcttacctcgtgggacagtccattcaccaggaaccgaatcgttccctgtcaacccgtctcttttacctttgacctgcagaggaagacctgatgtgatactgaaaccacaacgtgtaagcctgtcttccttttgaagcaggatgtctgaaatattttcctaggtccatagctttaaattcccattgttcttgattggacatgggagagattcagagtgatatgttctactctcagtactatcacagactgatttttccagaaaggagaaatgacagggtttggcttgcagtttccctttcaaatatgtgacagagatctcataactaaacgtgactgaacatttttcaccccaagcagggccactctaataattaaaaagacgggacatttgtcacagagagtatatctgtgaacaagtaaactctacttagaaaactacatctgctttatttttgaaactttttttgttaacggacaggaaaggaagacataaaagtaacaacaccgaaatttctttctaatattttgtatttagaattaacctattactgatgagctacataggaagcattgtgctattccttgtactggggtgagaatttggatgtatttttggtggaaagtcataaagaaagct

SEQ ID NO: 25339 - DNA, 170 bp, Macaca Mulatta
agatgaactgacaccgagggaggccgagggcgagcctgatgaggtgggggtggactgcacccagctgaccttcttcccagccttacacgaaagtctgcactcagaagacttcttggaactgtgtcgggaaagacaaattattttacaagagcttcttgataaagaaaagg

SEQ ID NO: 25340 - DNA, 448 bp, Macaca Mulatta
  misc_feature (1)...(448): n = A,T,C or G
tttcaagagcatatgtttgaagtattggatcgggcaagaaggatgaatcgnnnnnnnnnnnnnnnnnnnnnnnnnnnnnnnnnnnnnnnnnnnnnnnnnnnnnnnnnnnnnnnnnnnnnnnnnnnnnnnnnnnnnnnnnnnnnnnnnnnnnnnnnnnnnnnnnnnnnnnnnnnnnnnnnnnnnnnnnnnnnnnnnnnnnnnnnnnnnnnnnnnnnnnnnnnnnnnnnnnnnnnnnnnnnnnnnnnnnnnnnnnnnnnnnagaagctgaaaagagtgaagattcctctggtgctgcaggcctttcaggcttacatcgcacatacagccaggattgtagctttaaaaacagcatgtaccatgttggagattatgtctatgtggaacctgcagaggccaacctacaaccacatatagtctgtattgaaagactgtgggaggattcagctgg

SEQ ID NO: 25341 - DNA, 1434 bp, Macaca Mulatta
ccattgttcgtgtccaaggcgctatgaggggtgacagaggccgtggtcgtggtgggcgctttggttccagaggaggcccaggaggagggttcaggccctttgtaccacatatcccatttgacttctatttgtgtgaaatggccttcccccgggtcaagccagcacctgatgaaacctccttcagtgaggccttgctgaagaggaatcaggacctggctcctaattctgctgaacaggcatctatcctttctctggtgacaaaaataaacaatgtgattgataatctgattgtggctccagggacatttgaagtgcaaattgaagaagttcgacaggtgggatcctataaaaaggggacaatgactacaggacacaatgtggctgacctggtggtgatacttaagatcctgccaacattggaagctgttgctgccctggggaacaaagttgtggaaagcctaagagcacaggatccttctgaagttttaaccatgctgaccaacgaaactggctttgaaatcagttcttctgatgctacagtgaagattctcattacaacagtgccacccaatcttcgaaaactggacccagaactccatttggatatcaaggtattgcagagtgccttagcagccatccgacatgcccgctggttcgaggaaaatgcttctcagtccacagttaaagttctcatcagactactgaaggacttgaggattcgttttcctggctttgagcccctcacaccctggatccttgacctactaggccattatgctgtgatgaacaaccccaccagacagcctttggccctaaacgttgcatacagacgctgcttgcagattctggctgcaggactgttcctgccaggttcagtgggtatcactgacccctgtgagagtggcaacttcagagtacacacagtcatgaccctagaacagcaggacatggtctgttacacagctcagactctcgtccgaatcctctcacatggtggctttaggaagatccttggccaggagggtgatgccagctatcttgcttctgaaatatctacctgggatggagtgatagtaacaccttcagaaaaggcttatgagaagccaccagagaagaaggaaggagaggaagaagaggagaatacagaagaaccacctcaaggagaggaagaagaaagcatggaaactcaggagtgatgttcccttcactcctttttctacccaagggggaagactggagcctaagctccctgctactggggctttacatggtgggcagacattttccgtggggataggggaagatagcaaagaaggaaaagtaaacctccacagaaagtgtcatttccaccgggggttttgaatatttgggcttttgctgcccaggtcctcccatttttgttgaacccttattggccattccattctatttaat

SEQ ID NO: 25342 - DNA, 529 bp, Macaca Mulatta
cttcaaaatgattgcagtaagtgtaatagctatttcatctaaaatatagtccaagctatcactatgaaatattatcacaaatgtgtccgtgcaagctccagaatagagctttgatggaaacttttctatagcaggttaatttcaataaaaatcattaaataatttaatactgtttttaaaaactccattaaaattgtaggcttaaaaattttcaatatataaatcattgcttttttaaaaaatgccattttcagtgttttcattgttattgtactacttctggctaacatgggaaaatgagcacatttatttatgattttcctgtatataatctttaaaatataagttgtatatttttctatgacagtaaaacttgtcttaagttgtgtttcatcttttttaacagatggcttccttgaatattgggagagcaggtgcctgtgtggtagtcatcaagcaaccttgacttattgatattgtactaagaaagattttacttgctggagtggttatttttatactgagtggc

SEQ ID NO: 25343 - DNA, 544 bp, Macaca Mulatta
ttgcagataccagatgctgtccgcaagtggccccaggagcctgggcttagttacccggagaccacaggtccctgtgcgaggatggggctgtgtgctctactggcctgagggtggctagagatggggtgaaggactccctgtggtcctgttccctggtgaggctgtggtaagagacccatggagcccaggaaccctgagcccaccactggagctgggagctgtgaactccgagacccctgctcctggcccctatgtggccatgatgccagcctgcctgaggcatggaggatccccctctaaaaaagtggtcatcatagggactggagaccaaggtctccaccaaagctgatgggcgctggggatgcaggcttccgccccgcccttccctttttcttggctctggagccttgggtccctgagaagactctcctgggactggtgtgctctgctgctctggggatttggcccacaaggaacccctacccagcccagtccacgcacaacagcgttcctgggcctccctctgggagctttctctgggtcc

SEQ ID NO: 25344 - DNA, 154 bp, Macaca Mulatta
agaaatcagccaaaattacaccatgtgcgctttgcaaatcattgagatcctcagcagaaatgattgaaaataccaatagcttggggaagacagagcttttctgttctgttaattgcttatctgcttacagagttaaaatggttacttctgcagg

SEQ ID NO: 25345 - DNA, 391 bp, Macaca Mulatta
  misc_feature (1)...(391): n = A,T,C or G
taatcnnttctttnnggggaaaaccccaanggngccctnnggnttccnggaaaaantttttcgcgggngggggaaccctttttcctttaaagaaagggaacccnnnaaaantggggaaattgttaaanttttgggaggganggggttnaatccgtccgggatttttttgttttnggaggtcccnngggaantttggccttnttccccnccctnncntagggngttcaaaaatcacngttccttccagaagctgcaagagnttcttagcagttcttggtttggaaccttttcccagtcttcatntttccaccctaaaantagagtgatcttcctaaaacttcacttaacccctcagctatgaaaaggcttccgggagtttccatgaaataac

SEQ ID NO: 25346 - DNA, 690 bp, Macaca Mulatta
ggcattctcccttctgttcgcattcattttctcttacatgctattggaagtcattaatgtctatcatgattctgaagatttgttttgtgttccttcacatttttgtcttaattggtaatctaatgttatcattgcaccacctattccttgtcattgcagaaaaaatgactctaaatcccacactaacatttcatcatttcatgtcattgactaaatgcaaagaggttctacttattttctgacaaatactgccaaaggccttgaattcaatgagtagaagaatttcaggcaaatgggctttgggaaaaagattttagaactcatcaaccctttctataaaatcaatcatgcaaaacaactctctactttgaaatgaagaccggtccttatcttcactgccctatcccctccatttctggaagagtttgccttgatcaagaagggagaaaaacagtctttaatgaggttctgtgtaggacaatatgtgatgtgggaaaaggagtatgatctcaagaatgaaggtttgaccaggagaggaggcacagttatgtatagcagaaccaccttgagaaagaaggttgagggtgccagtagtcagcttgttcataagtactgtagctggtgatggcaatcttagaagtcagttcccaaatagtttttggaatgttctctctagccttctaactcaga

SEQ ID NO: 25347 - DNA, 382 bp, Macaca Mulatta
  misc_feature (1)...(382): n = A,T,C or G
tggacatcttcaataaggagctactgctaatccccatccacctggaggtgcattggtccctcatctctgtcgatgtgaggcgacgcaccatcacctattttgactcgcagcgtaccctaaaccgccgctgccctaagnnnnnnnnnnnnnnnnnnnnnnnnnnnnnnnnnnnnnnnnnnnnnnnnnnnnnnnnnnnnnnnnnnnnnnnnnnnnnnnnnnnnnnnnnnnnnnnnnnnnnnnnnnnnnnnnnnnnnnnnnnnnnnnnnnnncagtattgcaagcatctggccctgtctcagccattcagcttcacccagcaggacatgcccaaacttcgtcggcagatctacaaggagctgtgtcactgcaaactcactgtgtg

SEQ ID NO: 25348 - DNA, 1666 bp, Macaca Mulatta
  misc_feature (1)...(1666): n = A,T,C or G
gcccacctgcctggccgagttcaagcagatcaggtccatcaggtgcctgccactggaggannnnnnnnnnnnnnnnnnnnnnnnnnnnnnnnnnnnnnnnnnnnnnnnnnnnnnnnnnnnnnnnnnnnnnnnnnnnnnnnnnnnnnnnnnnnnnnnnnnnnnnnnnnnnnnnnnnnnnnnnnnnnnnnnnnnnnnnnnnnnnnnnnnnnnnnnnnnnnngatggcgagaagcggaacaacctgccccagatccccatgctnaaacctggaggcccggcggtcccacnnnnnnnnnnnnnnnnnnnnnnnnnnnnnnnnnnnnnnnnnnnnnnnnnnnnnnnnnnnnnnnnnnnnnnnnnnnnnnnnnnnnnnnnnnnnnnnnnnnnnnnnnnnnnnnnnnnnnnnnnnnnnnnnnnnnnnnnnnnnnnnnnnnnnnnnnnnnnnnnnnnnnnnnnnnnnnnnnnnnnnnnnnnnnnnnnnnnnnnnnnnnnnnnnnnnnnnnnnnnnnnnnnnnnnnnnnnnnnnnnnnnnnnnnnnnnnnnnnnnnnnnnnnnnnnnnnnnnnnnnnnnnnnnnnnnnnnnnnnnnnnnnnnnnnnnnnnnnnnnnnnnnnnnnnnnnnnnnnnnnnnnnnnnnnnnnnnnnnnnnnnnnnnnnnnnnnnnnnnnnnnnnnnnnnnnnnnnnnnnnnnnnnnnnnnnnnnnnnnnnnnnnnnnnnnnnnnnnnnnnnnnnnnnnnnnnnnnnnnnnnnnnnnnnncagggacattgctgtccggaacatcctggtggcctcctctgagtgtgtgaagctgggggactttggtctttcccggtacattgaggatgaggactattacaaannnnaaagcctctgtgactcgtctccccatcctttgaatgtccccagagtccattaacttccgacgcttcacgacagccagtgatgtctggatgttnnnnnnnnnnnnnnnnnnnnnnnnnnnnnnnnnnnnnnnnnnnnnnnnnnnnnnnnnnnnnnnnnnnnnnnnnnnnnnnnnnnnnnnnnnnnnnnnnnnnnnnnnnnnnnnnnnnnnnnnnnnnnnnnnnnnnnnnnnnnnnnnnnnnnnnnnnnnnnnnnnnnnnnnnnnnnnnnnccgcttcaccgagctagtgtgcagcctcannnnnnnnnnnnnnnnnnnnnnnnnnnnnnnnnnnnnnnnnnnnnnnnnnnnnnnnnnnnnnnnnnnnnnnnnnnnnnnnnnnnnnnnnnnnnnnnnnnnnnnnnnnagcccagccgacctaagtacagactccctccgcaaaccaacctcctggctccgaagctgcagttccaggnnnnnnnnnnnnnnnnnnnnnnnnnnnnnnnnnnnnnnnnnnatggagtatccatctcccgttaactcactgcacaccccacctctccaccggcacaatgccttcaaacgccacagcatgcgggnnnnnnnnnnnnnnnnnnnnnnnnnnnnnnnnnnnnnnnnnnnnnnnnnnnnnnnnnnnnnnnnnnnnnnnnnnnnnnnnnnnnnnnnnnnnnnnnnnnnnnnnnnnnnnnnnnnnnnnnnnnnnnnnnnnnnnnnnnnnnnnnnnnnnnnnnnnnnnnnnnnnnnnnnnnnnnnnnnnnngacgccagagaaggaggtcggcta

SEQ ID NO: 25349 - DNA, 783 bp, Macaca Mulatta
ggggttcagggcttgaggaacccgcgccatgaagtgcgtgtttgttaccgtagggaccaccagctttgacgacctcattgcgtgtgtgtcggcgcccgacagtctgcaaaaaatcgagagcctcggttacaaccgacttatcctgcaaattggtagaggaacggtggtacctgaacccttcagtactgagtcgtttactctggatgtttacaggtacaaggattccttgagagaagacatccagaaagcagatcttgttattagtcacgcaggtgcaggaagctgtttggaggctctggaaaaaggaaagccactcgtagtggtcataaacgaaaagttgatgaacaatcatcagctggaactggcaaagcagctacacaaagagggtcatctcttttattgtacctgcagcacgcttcctgggctgttacagtcaatggacttatcaacactgaaatgttatcctcctggccagccagaaaaattttctgcatttttggataaagttgttggattacaaaaataaacactaaactctcaacactttaaaagcaacccccaaattcaacctatggaatgtgattaaatcaaattaaatacataatatatatatttacaaaataatataattaataaacttcctacatctatagaatgtataagaaattttatgggtgtgcacatttgccttggggtccaaatcctaatttcagttttagtaaactttctagaattttttccaatctttcagtatgtagttaagcattcccagattttcctccc

SEQ ID NO: 25350 - DNA, 353 bp, Macaca Mulatta
  misc_feature (1)...(353): n = A,T,C or G
gggatgaaagcagcagctgctgcccctgcctcagaggatgaggatgatgaggatgatgaagatgatgaggatgaggatgatgacgatgaggaagatgactctgaagaagaagctatggagactacaccagccaaaggaaagaaagctgcaaaagttgttcctgcaaaagccaagatccactacaggaagaagaagcagctcatgaggttacggaaacaggccgagaagaacgtggagaagaaaattgacaaatacacacaggtcctcaagacccacggactcctggtctgagtccaataaagactgttaattcctcgaaaannnnnnnnnnnnnnnnnnnnnnnnnnnnnnnc

SEQ ID NO: 25351 - DNA, 1179 bp, Macaca Mulatta
  misc_feature (1)...(1179): n = A,T,C or G
cgcactgccccacgccgcgggctagggannnnnnnnnnnnnnnnnnnnnnnnnnnnnnnnnnnnnnnnnnnnnnnnnnnnnnnnnnnnnnnnnnnnnnnnnnnnnnnnnnnnnnnnnnnnnnnnnnnnnnnnnnnnnnnnnnnnnnnnnnnnnnnnnnnnnnnnnnnnnnnnnnnnnnnnnnnnnnnnnnnnnnnnnnnnnnnnnnnnnnnnnnnnnnnnnnnnnnnnnnnnnnnnnnnnnnnnnnnnnnnnnnnnnnnnnnnnnnnnnnnnnnnnnnnnnnnnnnnnnnnnnnnnnnnnnnnnnnnnnnnnnnnnnnnnnnnnnnnnnnnnnnnnnnnnnnnnnnnnnnnnnnnnnnnnnnnnnnnnnnnnnnnnnnnnnnnnnnnnnnnnnnnnnnnnnnnnnnnnnnnnnnnnnnnnnnnnnnnnnnnnnnnnnnnnnnnnnnnnnnnnnnnnnnnnnnnnnnnnnnnnnnnnnnnnnnnnnnnnnnnnnnnnnnnnnnnnnnnnnnnnnnnnnnnnnnnnnnnnnnnnnnnnnnnnnnnnnnnnnnnnnnnnnnnnnnnnnnnnnnnnnnnnnnnnnnnnnnnnnnnnnnnnnnnnnnnnnnnnnnnnnnnnnnnnnnnnnnnnnnnnnnnnnnnnnnnnnnnnnnnnnnnnnnnnnnnnnnnnnnnnnnnnnnnnnnnnnnnnnnnnnnnnnnnnnnnnnnnnnnnnnnnnnnnnnnnnnnnnnnnnnnnnnnnnnnnnnnnnnnnnnnnnnnnnnnnnnnnnnnnnnnnnnnnnnnnnnnnnnnnnnnnnnnnnnnnnnnnnnnnnnnnnnnnnnnnnnnnnnnnnnnnnnnnnnnnnnnnnnnnnnnnnnnnnnnnnnnnnnnnnnnnnnnnnnnnnnnnnnnnnnnnnnnnnnnnnnnnnnnnnnnnnnnnnnnnnnnnnnnnnnnnnnnnnnnnnnnnnnnnnnnnnnnnnnnnnnnnnnnnnnnnnnnnnnnnnnnnnnnnnnnnnnnnnnnnnnnnnnnnnagattgataagaaacagtacaacaagatcttggaactcatccagagtggtgtggctgagggcgccaaactggaatgtggaggcaaaggactgggccgaaaggggtttttcattgagcccacggtgttttcaaatgtcactgatgatatgcggattgccaaggaggag

SEQ ID NO: 25352 - DNA, 589 bp, Macaca Mulatta
tgttacaaaagaacactgctagcactcagaaacttggagccattcttcaggtgaaagtgatgccttctgacattagtattgactgcattgatactttatttacaggtgttcttccagagagcaaagccctaaggactggatttccctgtgcctacttcatgatcaggaattccagttagtgtataaagaagcgatttttgtgtgccattcatgctggtctttttcacactgttttgagcttactgcagtatatgttttgggatttttctgtaaaatgggtgtaattttcctgacacaggtatgtaacaacaaaagaagttgcctgcatgccggtccaaattgttctgtataaagatgctcttaaaagatacagttatcctagaaccttaattcttttttatttgaaattttaagtcaagtcctttataaagaccatagcagtggaaaacagtgtactttttaaaaaattgctgaatataaaatgtttgaaaattttctttatgtgtgagacacataaagtatggggggaatacaacaatcaaaactaactttttgtagatagccatttcatttctttaaactgtttcaa

SEQ ID NO: 25353 - DNA, 821 bp, Macaca Mulatta
ggtgtttggtgtggcctgaagccacagatggcagcatctggggcagacccaagcctggacttgacttttctgttacaactttcctaaaacattagggcctcatgctcccaagacagatggccagctagaccatggcttctggggtggcccgcgtggccctatgttttctgtcacttgccttttgcaagggactgttgtccctgttcctcctagtctcctcctccccccatcccaggtgtccctcccgctttctccctggcctcctgtgtgctgtggctgtggctggtgtatagccacttggggcctgcacccagaggggtctccaaaggttggcagagcctcatactgccagggtgggtgctccccgttgtggagccttgctctggctgggctgagtgtgcacccacaaggcctgcacccacctgggatgtttctgcttccctacaggaccttcttctgaagtccaaaaggggaaaccaagttcacccctagaaaacagtgagctccggccccacctcctaaacacaaagccttgagaccagccttgagagaggccacactgcacacaccagacggcatccctgggacctgaacctagcacccaggaatctcaaactctctttggccctgaaccagagccagataaggaacagcttgggccactctaatgaaggccaacatggaggagagggagcagccagccgtttgggagaagatctcagggatccagactctcattcctttcctctggcccagtgaattcggtctctcccagccctgggggactccttccttgaaccctaataagaccccactggagt

SEQ ID NO: 25354 - DNA, 139 bp, Macaca Mulatta
  misc_feature (1)...(139): n = A,T,C or G
nggtctctttgagcctggagacatgaaatacgagatccaccgagaccccacactggacccctccctgatggagatgacagaggctgccctgcgcctgctaagcaggaacccccgcggcttcttcctctttgtggagggt

SEQ ID NO: 25355 - DNA, 2751 bp, Macaca Mulatta
  misc_feature (1)...(2751): n = A,T,C or G
agtgagcgattacagtctgacctggtagtatgcattgtaattggtgtgctatattttgctattcatgtaagcacagtcttcacagtattgcannnnnnnnnnnnnnnnnnnnnnnnnnnnnnnnnnnnnnnnnnnnnnnnnnnnnnnnnnnnnnnnnnnnnnnnnnnnnnnnnnnnnnnnnnnnnnnnnnnnnnnnnnnnnnnnnnnnnnnnnnnnnnnnnnnnnnnnnnnnnnnnnnnnnnnnnnnnnnnnnnnnnnnnnnnnnnnnnnnnnnnnnnnnnnnnnnnnnnnnnnnnnnnnnnnnnnnnnnnnnnnnnnnnnnnnnnnnnnnnnnnnnnnnnnnnnnnnnnnnnnnnnnnnnnnnnnnnnnnnnnnnnnnnnnnnnnnnnnnnnnnnnnnnnnnnnnnnnnnnnnnnnnnnnnnnnnnnnnnnnnnnnnnnnnnnnnnnnnnnnnnnnnnnnnnnnnnnnnnnnnnnnnnnnnnnnnnnnnnnnnnnnnnnnnnnnnnnnnnnnnnnnnnnnnnnnnnnnnnnnnnnnnnnnnnnnnnnnnnnnnnnnnnnnnnnnnnnnnnnnnnnnnnnnnnnnnnnnnnnnnnnnnnnnnnnnnnnnnnnnnnnnnnnnnnnnnnnnnnnnnnnnnnnnnnnnnnnnnnnnnnnnnnnnnnnnnnnnnnnnnnnnnnnnnnnnnnnnnnnnnnnnnnnnnnnnnnnnnnnnnnnnnnnnnnnnnnnnnnnnnnnnnnnnnnnnnnnnnnnnnnnnnnnnnnnnnnnnnnnnnnnnnnnnnnnnnnnnnnnnnnnnnnnnnnnnnnnnnnnnnnnnnnnnnnnnnnnnnnnnnnnnnnnnnnnnnnnnnnnnnnnnnnnnnnnnnnnnnnnnnnnnnnnnnnnnnnnnnnnnnnnnnnnnnnnnnnnnnnnnnnnnnnnnnnnnnnnnnnnnnnnnnnnnnnnnnnnnnnnnnnnnnnnnnnnnnnnnnnnnnnnnnnnnnnnnnnnnnnnnnnnnnnnnnnnnnnnnnnnnnnnnnnnnnnnnnnnnnnnnnnnnnnnnnnnnnnnnnnnnnnnnnnnnnnnnnnnnnnnnnnnnnnnnnnnnnnnnnnnnnnnnnnnnnnnnnnnnnnnnnnnnnnnnnnnnnnnnnnnnnnnnnnnnnnnnnnnnnnnnnnnnnnnnnnnnnnnnnnnnnnnnnnnnnnnnnnnnnnnnnnnnnnnnnnnnnnnnnnnnnnnnnnnnnnnnnnnnnnnnnnnnnnnnnnnnnnnnnnnnnnnnnnnnnnnnnnnnnnnnnnnnnnnnnnnnnnnnnnnnnnnnnnnnnnnnnnnnnnnnnnnnnnnnnnnnnnnnnnnnnnnnnnnnnnnnnnnnntggatgtggacaaagattcatccctggtgactctctgttatggactctgtgtactgggacggagagctttggggactgcatcccatcatatgtccannnnnnnnnnnnnnnnnnnnnnnnnnnnnnnnnnnnnnnnnnnnnnnnnnnnnnnnnnnnnnnnnnnnnnnnnnnnnnnnnnnnnnnnnnnnnnnnnnnnnnnnnnnnnnnnnnnnnnnnnnnnnnnnnnnnnnnnnnnnnnnnnnnnnnnnnnnnnnnnnnnnnnnnnnnnnnnnnnnnnnnnnnnnnnnnnnnnnnnnnnnnnnnnnnnnnnnnnnnnnnnnnnnnnnnnnnnnnnnnnnnnnnnnnnnnnnnnnnnnnnnnnnnnnnnnnnnnnnnnnnnnnnnnnnnnnnnnnnnnnnnnnnnnnnnnnnnnnnnnnnnnnnnnnnnnnnnnnnnnnnnnnnnnnnnnnnnnnnnnnnnnnnnnnnnnnnnnnnnnnnnnnnnnnnnnnnnnnnnnnnnnnnnnnnnnnnnnnnnnnnnnnnnnnnnnnnnnnnnnnnnnnnnnnnnnnnnnnnnnnnnnnnnnnnnnnnnnnnnnnnnnnnnnnnnnnnnnnnnnnnnnnnnnnnnnnnnnnnnnnnnnnnnnnnnnnnnnnnnnnnnnnnnnnnnnnnnnnnnnnnnnnnnnnnnnnnnnnnnnnnnnnnnnnnnnnnnnnnnnnnnnnnnnnnnnnnnnnnnnnnnnnnnnnnnnnnnnnnnnnnnnnnnnnnnnnnnnnnnnnnnnnnnnnnnnnnnnnnnnnnnnnnnnnnnnnnnnnnnnnnnnnnnnnnnnnnnnnnnnnnnnnnnnnnnnnnnnnnnnnnnnnnnnnnnnnnnnnnnnnnnnnnnnnnnnnnnnnnnnnnnnnnnnnnnnnnnnnnnnnnnnnnnnnnnnnnnnnnnnnnnnnnnnnnnnnnnnnnnnnnnnnnnnnnnnnnnnnnntaggcactagccacagctctcactctgcgcaatcaggcctggtcagacagtctcctgcccgggcctcagtagccagccagtcttcctactgctacagcagccggcattcgtccctccggatgtccaccactgggtttgtgccttgtcggcgctcttccaccagtcagatatcgcttcgaaacttgccatcatccatccaatcccgactgtcgatggtgaaccaaatggaaccctcagttcagagtggcctggcctgtgtgcagcacggcctcccttcctccagcagctccagccaaagcatcccagcctgcaaacatcacactctcgtgggctttcttgcaacagagggaggtcagagcagtgccactgatgcacagccaggcaacactttaagtcctgccaataattcacatgccagaaagggagaagtgatttacagagtccaa

SEQ ID NO: 25356 - DNA, 352 bp, Macaca Mulatta
cagccaggtgatgatggtcgtgacccaccaggaaagcaggctgatgggacagaccctcttgtgcaagaggggagaaacctaaccctgtttcacaacctgtgcagaagtagcttggctcactcgggcttaggaaagtgacagtcacctcattacccagcatagggctgggggcctgcagttcacctgcagagaggtccccaagatgtaactgtgtcttactgtacatattcggaggtcttcccatagaggaaggtgggcgatgctgaaatcaaccccctgcctatcttaagcatcttaagtaattactttctggagtaatcaggcgaaaatcaataaacaaatgaaatgtgca

SEQ ID NO: 25357 - DNA, 483 bp, Macaca Mulatta
ccgctgccactggtcgacgcccgcagcttcctccgttgccaattgcggggcttagagctcaacccagacacctgcaggtgccggaagctgcgaaggtgacacatggcttttcagactcagcggggtgacttgcctcataggctatattccagtggggggacaaagaggagtgctggtaaaaaacagccaagcccccaagaactcagcccaggcagaagctgctccaggacctgggcctctcagagggttcttctgccatcccttgtctccctgaggccatcatcaaacaggacagagtcggaagaggagactgggaagcagcaagagggggtcatataccagctcaggcgagaatggggtactgtctcagtttctaaccactctgtgcaagtaagcatcttacaactggctcttcctcctctcactaagaagacccagatctctgcataataggatttgggctttggttacaaagaactgttg

SEQ ID NO: 25358 - DNA, 1502 bp, Macaca Mulatta
  misc_feature (1)...(1502): n = A,T,C or G
gtgttccaccaggtcctgcctatgggaagctgaaaaatggaatttctgttgttctggaaaatggagttacaatttctccccaagatgtcttaaaaaagcctattgttggaagaaaaatctgcatattgggtgactgctctggggttgtgggtgaaatggaagaataaaagctgtgttttgaagcagacctgttgatccacgaagcgaccctggatgatgcccagatggacaaagcaaaggagcacggccacagcacaccacagatggcagccacatttgcaaagttgtgccgtgcaaagaggctggttctgactcacttcagtcagaggtacaaaccagttgccttggccagagaangagaaacagatggcattgcagaactaaaaaagcaagctgaatcagtgttagatctccaagaagtgactctagcagaannnnnnnnnnnnnnnnnnnnnnnnnnnnnnnnnnnnnnnnnnnnnnnnnnnnnnnnnnnnnnnnnnnnnnnnnnnnnnnnnnnnnnnnnnnnnnnnnnnnnnnnnnnnnnnnnnnnnnnnnnnnnnnnnnnnnnnnnnnnnnnnnnnnnnnnnnnnnnnnnnnnnnnnnnnnnnnnnnnnnnnnnnnnnnnnnnnnnnnnnnnnnnnnnnnnnnnnnnnnnnnnnnnnnnnnnnnnnnnnnnnnnnnnnnnnnnnnnnnnnnnnnnnnnnnnnnnnnnnnnnnnnnnnnnnnnnnnnnnnnnnnnnnnnnnnnnnnnnnnnnnnnnnnnnnnnnnnnnnnnnnnnnnnnnnnnnnnnnnnnnnnnnnnnnnnnnnnnnnnnnnnnnnnnnnnnnnnnnnnnnnnnnnnnnnnnnnnnnnnnnnnnnnnnnnnnnnnnnnnnnnnnnnnnnnnnnnnnnnnnnnnnnnnnnnnnnnnnnnnnnnnnnnnnnnnnnnnnnnnnnnnnnnnnnnnnnnnnnnnnnnnnnnnnnnnnnnnnnnnnnnnnnnnnnnnnnnnnnnnnnnnnnnnnnnnnnnnnnnnnnnnnnnnnnnnnnnnnnnnnnnnnnnnnnnnnnnnnnnnnnnnnnnnnnnnnnnnnnnnnnnnnnnnnnnnnnnnnnnnnnnnnnnnnnnnnnnnnnnnnnnnnnnnnnnnnnnnnnnnnnnnnnnnnnnnnnnnnnnnnnnnnnnnnnnnnnnnnnnnnnnnnnnnnnnnnnnnnnnnnnnnnnnnnnnnnnnnnnnnnnnnnnnnnnnnnnnnnnnnnnnnnnnnnnnnnnnattgagatacgcagcaagttaaagtttatactcttgatgtgaatatagtttaccaaaattagtgacataatgagtcaaattactaggtaagtcaaatccaaaagagtgaatatgttagaattgcaatgtcataccaaataacattcaaaagaaatgagccatcaagtgaagcttatgaacctggaggtaaaaaatgcttatctattaaactaaggtttcatttatgtgtccctattaataaacattatttgcc

SEQ ID NO: 25359 - DNA, 365 bp, Macaca Mulatta
  misc_feature (1)...(365): n = A,T,C or G
gtccaatgaagcgtcaagtggcagtaaagtcaacccgaggctttgcccttaaatcaacccatgggattgcaattaaatcaaccaacatggcctctgtggacaagggggagagtgcacctgttcgtaagaacacacgccaattctacgatggcgaggagtcttgctacatcatcgatgccaagcttgaaggcaacctgggccgctacctcaacncacagttgcagccccaacctgtttgtccagaatgtcttcgtggatacccatgatcttcgctttccctgggtggccttctttgccagcaanaagaatccgggctgggacagaacttacttgggactacaactacgaggtgggcagtgtggaag

SEQ ID NO: 25360 - DNA, 646 bp, Macaca Mulatta
  misc_feature (1)...(646): n = A,T,C or G
cttccatccggccatcagccgcgtgacgctggagatgcagcgcaagttcaacgtggagaagccggtcatcttcaacacgtaccagcgctacctcaagnnnnnnnnnnnnnnnnnnnnnnnnnnnnnnnnnnnnnnnnnnnnnnnnnnnnnnnnnnnnnnnnnnnnnnnnnnnnnnnnnnnnnnnnnnnnnnnnnnnnnnnnnnnnnnnnnnnnnnnnnnnnnnnnnnnnnnnnnnnnnnnnnnnnnnnnnnnnnnnnnnnnnnnnnccacaggtgcctggactacgtgctggaggagctgaagcacaacaccaaggccaaggtgatggtggcctcccacaacgaggacacagtgcgcttcacgctgcgcagnnnnnnnnnnnnnnnnnnnnnnnnnnnnnnnnnnnnnnnnnnnnnnnnnnnnnnnnnnnnnnnnnnnnnnnnnnnnnnnnnnnnnnnggccaggctggctaccccgtgtacaagtacgtgccctacggccccgtgatggaggtgctgccctacttgtcccgtcgcgccctggagaacagcagcctcatgaagggcgcccgtcgggagcggcagctgctgtggctggaactcttgcggcggctccgaactggcaacctcttccgtcgccctgccta

SEQ ID NO: 25361 - DNA, 649 bp, Macaca Mulatta
  misc_feature (1)...(649): n = A,T,C or G
ggggagagaacttagttatattttaaatcagaagtatgggtcagatcatgggacataacttctcagaatatatatatatatgtacatattctcatatgtaaagtcacatggttcatttatctttctgaatcagttatcaaagataaattggcaagtcagtacttaaaaagaaaaaaagatttgattgtcttcacagcagaaaagagtcattgcgtatctgatcaatatcaataactttagattctaagagtnnnnnnnnnnnnnnnnnnggctcctatttttccccctactgtctagcattataaaattagaagtgtattttcagtggaagaaacattcttcaataaataaagtaaggcattgtcatcaatgaagtaattaaaactggggcctgatctatgatatgcttttttctttcattaccctctagctgaaggacatccagttccccagctgtagttatgtatctgccttcaatgtctctgacaaatgtgctgtgttagtagagtttgatttgtatcatatgataatcttgcacttgactgagttggggcaaggcttcacataaaaaatgatttcttcacttttacacaagttagaaatatatccatttactaaatgatgattatatcagaacactactatgtan

SEQ ID NO: 25362 - DNA, 515 bp, Macaca Mulatta
gaccgtcatctctcccaacagggcctgacttgggagggcttccagacagctgaaggctgctaccgtaccgtgtgggagcgcctgggtctggccttccagaccccagaggcatactgccagcagcgggtgttccgctcactggcctacatgcggccactgagcatctgggccatgcagctagccctgcaacagcagctttttttaaaggcctccaggccaaaagtcgaacagggcacaggactaaggacagggcctatgtgtggaggaaaggaagccatggcaaacgtgagcccagagtgaaccgtctgaactgtgggaggaaagcactaatagcccagcctccagcctggcctttcctccttcccctctgaaccttctgcaaccctgagccatcaggacaatcataccccttcccttctccccacccagttgtgccagtaaatgggggttgagggtgacctaggcagcattagaatcacttatttatttctttcctcacccgttccctcactgca

SEQ ID NO: 25363 - DNA, 1879 bp, Macaca Mulatta
  misc_feature (1)...(1879): n = A,T,C or G
atgggctgcttcttctccaagagacggaaggctgacctgagtcgcggcccgagaacgaggaggagcggccaaagcagtacagctgggatcagcgcgagaaggtnnnnnnnnnnnnnnnnnnnnnnnnnnnnnnnnnnnnnnnnnnnnnnnnnnnnnnnnnnnnnnnnnnnnnnnnnnnnnnnnnnnnnnnnnnnnnnnnnnnnnnnnnnnnnnnnnnnnnnnnnnnnnnnnnnnnnnnnnnnnnnnnnnnnnnnnnnnnnnnnnnnnnnnnnnnnnnnnnnnnnnnnnnnnnnnnnnnnnnnnnnnnnnnnnnnnnnnnnnnnnnnnnnnnnnnnnnnnnnnnnnnnnnnnnnnnnnnnnnnnnnnnnnnnnnnnnnnnnnnnnnnnnnnnnnnnnnnnnnnnnnnnnnnnnnnnnnnnnnnnnnnnnnnnnnnnnnnnnnnnnnnnnnnnnnnnnnnnnnnnnnnnnnnnnnnnnnnnnnnnnnnnnnnnnnnnnnnnnnnnnnnnnnnnnnnnnnnnnnnnnnnnnnnnnnnnnnnnnnnnnnnnnnnnnnnnnnnnnnnnnnnnnnnnnnnnnnnnnnnnnnnnnnnnnnnnnnnnnnnnnnnnnnnnnnnnnnnnnnnnnnnnnnnnnnnnnnnnnnnnnnnnnnnnnnnnnnnnnnnnnnnnnnnnnnnnnnnnnnnnnnnnnnnnnnnnnnnnnnnnnnnnnnnnnnnnnnnnnnnnnnnnnnnnnnnnnnnnnnnnnnnnnnnnnnnnnnnnnnnnnnnnnnnnnnnnnnnnnnnnnnnnnnnnnnnnnnnnnnnnnnnnnnnnnnnnnnnnnnnnnnnnnnnnnnnnnnnnnnnnnnnnnnnnnnnnnnnnnnnnnnnnnnnnnnnnnnnnnnnnnnnnnnnnnnnnnnnnnnnnnnnnnnnnnnnnnnnnnnnnnnnnnnnnnnnnnnnnnnnnnnnnnnnnnnnnnnnnnnnnnnnnnnnnnnnnnnnnnnnnnnnnnnnnnnnnnnnnnnnnnnnnnnnnnnnnnnnnnnnnnnnnnnnnnnnnnnnnnnnnnnnnnnnnnnnnnnnnnnnnnnnnnnnnnnnnnnnnnnnnnnnnnnnnnnnnnnnnnnnnnnnnnnnnnnnnnnnnnnnnnnnnnnnnnnnnnnnnnnnnnnnnnnnnnnnnnnnnnnnnnnnnnnnnnnnnnnnnnnnnnnnnnnnnnnnnnnnnnnnnnnnnnnnnnnnnnnnnnnnnnnnnnnnnnnnnnnnnnnnnnnnnnnnnnnnnnnnnnnnnnnnnnnnnnnnnnnnnnnnnnnnnnnnnnnnnnnnnnnnnnnnnnnnnnnnnnnnnnnnnnnnnnnnnnnnnnnnnnnnnnnnnnnnnnnnnnnnnnnnnnnnnnnnnnnnnnnnnnnnnnnnnnnnnnnnnnnnnnnnnnnnnnnnnnnnnnnnnnnnnnnnnnnnnnnnnnnntgcttattttacctttttcaatttagagggatttgttactagttgatgaattagaatgaacctatgcacatttttatgtacacatatccagttatataattgcttcctagttgcattatatggcaaatgagattttgtacatagagttgacatgagactttgtaaattgaattttttaaagaaataggcatttgataaccagcttggcaagtaactctactaacagatgttggtatagctatttaaagactacttcgtaagtagtatgattatttgaataaattccacattgtttagttttttaatgcaactgctatatgactcttctgcttcctggtaagaaaaggtatatgcaatactaaaactatagaagcccaatcaccagcagtttttaaaaaggtgataacttgtattagctcttgcgggctatcaagagaattg

SEQ ID NO: 25364 - DNA, 768 bp, Macaca Mulatta
gcctccgtctgtcttgcacggttgatgcacttcaactgtggccgccctctgaggtgcttcatgccgtggagggcctctgggcgttgttgtttcagggttagcgtaagtcaccaccatggttacttctagagcggccgcttggtcgctcgctttccttttttgaaattttaattcttatctcaccacctaatagaacctgggcaggatgtagttagtatgaaataaatgaaaaagcaccaaactgacgaggctggaaaacactgtttttagactctgcttatgtgttttagtgttttgtatgcagaacgtctgtaattcccatccttagtaacgtccttattcatttaatcctttgcatttaggttgtggaaataaaactacaagtagaattagaagaaaaaaggaagaaagccttaaatttacagaaagtttccaggagaggtatgaccctttataaaaaggcttaccactgcttgggtggtactttgttcggattcttttctcagcaggcagtctcctggcactgtggcttcccacagaggacatctgctcatcagccagctgcctgattgttacatttctctttgtgtggccatcctagttttatgcttcagtgcttttgagatgtgctggtgtgagtcagcacccccaagttgataaactctgggacacagaactggggttcagtccctggacaagtgagtgaggagctccttgaggcatttgccatgcaggaggatccctgggtgcctggctgggtgacgcctc

SEQ ID NO: 25365 - DNA, 895 bp, Macaca Mulatta
  misc_feature (1)...(895): n = A,T,C or G
ggaacaaggtgctgattctggctgatggggacccctcgagcttcctgtcccgccagctgcctttcctgagtaccctccgacggctggaagaccaggccactgcatatgtatgtgagaatcaagcctgctcaatgcccatcactgatccctgtgaattacgaaaactgctacatccatgactgccccaacccccttggtctggggcagaaggtgaagcatcccaactgactagagactcaggccctgcagggccctatagaacctgtggccatccctgagcaccctgccaccaggtgacctcggccatactcactgccccccttgggcacccactcaccctagaataaacttaacagtgtcccgtggtaannnaaaaaccaacaaccccccccaccacaccccaccaccactccccccaccctccctacctcccccacgcccctttccccttcccctcttcactcccgtccctctcctccgccccccccctgcctccgacattaatctcattcgcgccgcccggcccccccggcgcatcaaacgacctcccctttcttttggggcccggggccgccgccggcaaagaggtttgatgggcccctcgtttgtcgggcgcggcccccagccgggctgagcattacttgccgccgttccccctttcctcaaaagaacaatacccggcccttcccgctggcccttatccccgccttcaccaaatacgagccctccggggtgatcaccgcctcctttttgtcacccttccacaccccgggaggggagcgcctcaacgtattctcattttttctccctccccagccggcgcgccgtcacacgaccacccgccacgaccaatgcactctgtcgacttctcccgtcccggcgcgcaatcgcggac

SEQ ID NO: 25366 - DNA, 598 bp, Macaca Mulatta
gccccttcagggctgcttgctgcagggtcctgcctcccacgggggagagagctgagaaggaagccagggaagtggccctttgcacactcccccacccgtggcaggggtgacttagggttggaatttgaaacagcattggagggggccctccgagaggccgctcactgccgctcttcactctcagcctgaatgcttcccaagccagtgtccaccaaagactcctcagagcaaaacacaagtctccaacaaacgccggcccctaagacctggcagacacagaccggatgctggcgtcctcctgggccaccagtccggagatgcgagtcttgccaagccactgcctacagtcttgttgtaggcaccaggtcctaacaatacatacagaaataagtaataaacaacaccttgcctggtgaagcatttgatgtgggttttgcttcacattggccctgcatggatggtggctagaaggttccacaaggacctggagaagcacctgagagtgtgtcccggggctggtgcagcattgtgcctgttgtgcagtggccttgctttcttaggaagaggcgtgcagaaatgaaaagttgcacacgttgct

SEQ ID NO: 25367 - DNA, 1165 bp, Macaca Mulatta
  misc_feature (1)...(1165): n = A,T,C or G
agctgtgcgaggctatcggcgcttcctcaaggtgagnnnnnnnnnnnnnnnnnnnnnnnnnnnnnnnnnnnnnnnnnnnnnnnnnnnnnnnnnnnnnnnnnnnnnnnnnnnnnnnnnnnnnnnnnnnnnnnnnnnnnnnnnnnnnnnnnnnnnnnnnnnnnnnnnnnnnnnnnnnnnnnnnnnnnnnnnnnnnnnnnnnnnnnnnnnnnnnnnnnnnnnnnnnnnnnnnnnnnnnnnnnnnnnnnnnnnnnnnnnnnnnnnnnnnnnnnnnnnnnnnnnnnnnnnnnnnnnnnnnnnnnnnnnnnnnnnnnnnnnnnnnnnnnnnnnnnnnnnnnnnnnnnnnnnnnnnnnnnnnnnnnnnnnnnnnnnnnnnnnnnnnnnnnnnnnnnnnnnnnnnnnnnnnnnnnnnnnnnnnnnnnnnnnnnnnnnnnnnnnnnnnnnnnnnnnnnnnnnnnnnnnnnnnnnnnnnnnnnnatgtggacctggagctgcgcctggcccgcttcgagcagctcatcagccgacgtcccctgctgctcaacagcgtcttgctgcgccaaaacccacaccacgtgcacgagtggcacaagcgcgtcgccctgcaccagggccgcccccgggagnnnnnnnnnnnnnnnnnnnnnnnnnnnnnnnnnnnnnnnnnnnnnnnnnnnnnnnnnnnnnnnnnnnnnnnnnnnnnnnnnnnnnnnnnnnnnnnnnnnnnnnnnnnnnnnnnnnnnnnnnnnnnnnnnnnnnnnnnnnnnnnnnnnnnnnnnnnnnnnnnnnnnnnnnnnnnnnnnnnnnnnnnnnnnnnnnacttcaagcaggtggatgtcctggcaagcgtgtggtgtcagtgcggggagttggagctccgacacgagaactacgatgaggccttgcggctgctgcganaaggccacggcgctgcctgcccgccgggccgagtactttgatggctcagagcccgtgcagaaccgcgtgtacaagtcgctgaaggtctggtccatgctcgccgacctggaggagagcctcggcaccttccagnagtccaccaaagccgtgtatgaccgcatcctggacctgcgcatcgcgacaccccagatcgtcatcaactatgccatgttcctggaggagcacaagtactttgaggagagcttcaagg

SEQ ID NO: 25368 - DNA, 667 bp, Macaca Mulatta
gaggctgcttctgagatccagcctggggactgtccaggctcctgtgtcccgcctgggatggaggggccactcatcaaaccctctactccccggctgccacccacactggacggacagcactgctacctgggtcttgacacaggtggtaccacttctcgcccacgtgccgtggcctggcccaccaagcactgggtccccggcacgtggacaaggccgctcaccatgtctgtggctggctggaggctgccctgggcccttcctgtgaccccatatctggagctcagggtgccctcacccctggggatctgcacccagccacccaatgcctgctgctccttgcttttggaggtcatccccctcccccacagtctctgcaatgtccccctgccaccctgtccaggctatgccctttttgggctcctcctgccccatgcctggggcacgtccctatttgtggtttacatgacaggccagtaacataggaagggcctggggagagtttctgggctgagccatatgtgattttcctgatgggcagcactgggccacagctggggctctggttggctgtgacctcccccagggcctggctgcatctcgggtccctgtggacagagctctccgggctgcagatgagagctgttctttttgggaaggagggggtctg

SEQ ID NO: 25369 - DNA, 254 bp, Macaca Mulatta
aacatcatgggcacagagcatcacatgagttgtttctctctttaaagaagattccctgtgaaaggatgcttttcctctcctctgcctgcgcaggaattctaacaggaatgggtaaggatggcagagggacacagtgcctgtctcgcctccatcagggagagcagccataccagggatgactgactctttgagcctgtcctcagaggatggcgaagcagctgggcagtggaggccttcatggtaaccaatgaaag

SEQ ID NO: 25370 - DNA, 577 bp, Macaca Mulatta
  misc_feature (1)...(577): n = A,T,C or G
ctcctttactgagctttattcaaattttgacatccttagaactgggaagaaataaattccacaactgcctttagccttctggatactttcttttatgaaatagaaaccttttccacagcagttctgcagcagttgctaatagatgctcgtggtagaacccatcaatcatctggtcctctgggcacttgtgagcatccctggtcttcatacctgtgagtgggctttgtctgtggtgaattactgtaaagatgctaccctcacttttcttggcaattatgtccatgaaatcaagagtgtgatgttctagttattttttcttatatatatattttaaatgttcaatattcaactattgaaacaaatgtacatctgtgaactagctaaaatcatcttatgtaccactagtatgcccagcacatttttaaaacagtcctgatttggcctccaagggtatttattgaattaccagcagtatctaggagaccacaaaggaatnaccacaaaggaatttatgctccagtgctagccataatttttctgagatggaatctgttaaataaaagcttttatcctctaa

SEQ ID NO: 25371 - DNA, 388 bp, Macaca Mulatta
ttcgtgcctaccagatggccaaagccaactctgggttcatggctatggtcaagaattttgtggctctcaagacacatccctttctggagggctagaggggtacagagagcctttgagggcacaactctggccatgaccaatggtgcccgggtgatgggtgctgctggggctggcttcttacttctgaaagacatgagcagcttcctgcagagctggaagcacctggaggatggggcaaggacagagacagcagaggaactgaggacacttgctaagaagctggagcaggacctggactagctcactgagcgccaccggcacctgctgcagaaggcaagccggacctgttccagctgccgtttaagggctgttcgaggatcccgtgtgg

SEQ ID NO: 25372 - DNA, 373 bp, Macaca Mulatta
cctaatgaggagtcaagagtgaaatatgccagaactgctttctcccacagacaatgccaatctcttctaaaaaaaacaaaattaaattaaaacagaatgttggtttaaaaacttcaaagtaattgtcaaactgctttgtacggttaacatattctgccaagtctatgaccacacgtctgtaccatgcaatttaactcttatttacattgttatgtttggtttggttatttgcttagatgtgcatacattcattcagcaaatactgaacaccagccacctgcacagcagttgcttttattagtcttaactctaccatttaaatctatgtgtccaagggggaaaatgtgttatatttgtaaccaaaaactactag

SEQ ID NO: 25373 - DNA, 297 bp, Macaca Mulatta
gttaagagactgaaaatagcagccatcagaaaccggcctttctgccgataaagttgcatggtaaatatttcattacagaattcatgttagagctttcatgccaagaatgttttcttacaaaattctctttttattgaggtttcactaataagcagcttctacttttgagcctcaacctaaagcagaactgttttctactggatttttcattaacagcaagctttttcttttatgtaaaataaatctattgtgaattgatatcagtgactcatttattaggtataattaatagccaaa

SEQ ID NO: 25374 - DNA, 585 bp, Macaca Mulatta
  misc_feature (1)...(585): n = A,T,C or G
nnnnnnnnnnnnnnnnnnnnnnnnnnnnnnnnnnnnnnnnnnnnnnnnnnnnnnnnnnnnnnnnnnnnnnnnnnnnnnnnnnnnnnnnnnnnnnnnnnnnnnnnnnnnnnnnnnnnnnnnnnnnnnnnnnnnnnnnnnnnnnnnnnnnnnnnnnnnnnnnnnnnnnnnnnnnnnnnnnnnnnnnnnnnnnnnnnnnnnnnnnnnnnnnnnnnnnnnnnnnnnnnnnnnnnnnntacaatcaatcacctttattccaggttagaacaagtccgtgcacactgcagacagaagagcacaagataggggcaatctcacagcaatataaggagtgggtgggcaggttagtctttttagattattttgccttacagagaaactactagactctgctgaaaataaccctgtctctcttctcccatttcttccataagaaaggctccttattctctctctttctaatgtaacatatcccaaatggaaggacagtttatgctcattcctcccacccaattctacaagtatctctctcttcttaagggagaagccagacagggaaagggagactntgggaaggtcctttaaggc

SEQ ID NO: 25375 - DNA, 1246 bp, Macaca Mulatta
  misc_feature (1)...(1246): n = A,T,C or G
gcccccgagagccgccgacatgaagaaagacgtgcggatcctgctggtgggagaacnnnnnnnnnnnnnnnnnnnnnnnnnnnnnnnnnnnnnnnnnnnnnnnnnnnnnnnnnnnnnnnnnnnnnnnnnnnnnnnnnnnnnnnnnnnnnnnnnnnnnnnnnnnnnnnnnnnnnnnnnnnnnnnnnnnnnnnnnnnnnnnnnnnnnnnnnnnnnnnnnnnnnnnnnnnnnnnnnnnnnnnnnnnnnnnnnnnnnnnnnnnnnnnnnnnnnnnnnnnnnnnnnnnnnnnnnnnnnnnnnnnnnnnnnnnnnnnnnnnnnnnnnnnnnnnnnnnnnnnnnnnnnnnnnnnnnnnnnnnnnnnnnnnnnnnnnnnnnnnnnnnnnnnnnnnnnnnnnnnnnnnnnnnnnnnnnnnnnnnnnnnnnnnnnnnnnnnnnnnnnnnnnnnnnnnnnnnnnnnnnnnnnnnnnnnnnnnnnnnnnnnnnnnnnnnnnnnnnnnnnnnnnnnnnnnnnnnnnnnnnnnnnnnnnnnnnnnnnnnnnnnnnnnnnnnnnnnnnnnnnnnnnnnnnnnnnnnnnnnnnnnnnnnnnnnnnnnnnnnnnnnnnnnnnnnnnnnnnnnnnnnnnnnnnnnnnnnnnnnnnnnnnnnnnnnnnnnnnnnnnnnnnnnnnnnnnnnnnnnnnnnnnnnnnnnnnnnnnnnnnnnnnnnnnnnnnnnnnnnnnnnnnnnnnnnnnnnnnnnnnnnnnnnnnnnnnnnnnnnnnnnnnnnnnnnnnnnnnnnnnnnnnnnnnnnnnnnnnnnnnnnnnnnnnnnnnnnnnnnnnnnnnnnnnnnnnnnnnnnnnnnnnnnnnnnnnnnnnnnnnnnnnnnnnnnnnnnnnnnnnnnnnnnnnnnnnnnnnnnnnnnnnnnnnnnnnnnnnnnnnnnnnnnnnnnnnnnnnnnnnnnnnnnnnnnnnnnnnnnnnnnnnnnnnnnnnnnnnnnnnnnnnnnnnnnnnnnnnnnnnnnnnnnnnnnnnnnnnnnnaaatacctcctgattgcactactgaattaaatcatcatgcatatttgtttctccaaagcacctttgacaagcatgatttggnggatagagactgtgctttgtcacctgatgagcttaaagatttatttaaagttttcccttacataccttgggggccagatgtgaataatacagtttgtaccaatgagagaggctggataacctaccagggattcctttcccagtggacg

SEQ ID NO: 25376 - DNA, 461 bp, Macaca Mulatta
tgatgagaggggtggggatgaagccagagtcaggattccttaacactttccttcagatgaaatccacgatgggatgaacctggagctttattaccaatagatgagaatcctcatcttcctgctgccctgctctccttttcccatcctcatcccctacactgggatagatgcttgtttataaaaactcaccttaataaagacttagatgttgctttgttgctgtctctttgcatgagagctgtctagtgatggatggattggtcgctgttaggtcatcactgcaccatcagtatgtacctgctgaaataagagctccagatcaactggatccatgagggcagagtagaccagcaggctgggagtctgtataggagcccagagagagctctggggtttgctgtgggtgtctgaaggtcaagagacgctgggattattgtcaccctaatagaccaaagagcctc

SEQ ID NO: 25377 - DNA, 301 bp, Macaca Mulatta
cctgcaggaccttctcctgctgagcaggtcactgactgcccggaacatgcatctcaccttctgaaaaagtcacactcccgtttctctactttaacaaacctcctgccctgagcccgcaagaccccacatcaaccaagctgggaaccgagaaccgggctcatcattaagacctgggcccttctgaagtctttgtaaaggaagcaatttccttctacctatctaagattttgtggcatgtttattttctaataaatatctgttctttggtcttgcaaaaactttggttttatttactcattct

SEQ ID NO: 25378 - DNA, 788 bp, Macaca Mulatta
  misc_feature (1)...(788): n = A,T,C or G
ggcagtcaagtttcatcttacgcaaaacataggagaattcatacaggaaagaaacctcacaagtgtgatgactgtgtcaaagcctttatttcacgttcatgccccattacacatcagagaatccgtactggacagagatcttacaagtgtcatgtgtggcaaggtctttagtctgaggtgactccttgcaggacatcaggaaattaatttttgaggtaatagttccaaatgcagtgagtatagcaaaccatcaaccattaattgacattagattcaaatcagcattgacttgagtttgagttgacttaacattgagttcaagcattaattgagattaaagtgtttatgttcagaggattaggccaggtgcgnnnnnnnnnnnnnnnnnnannnnnnnnnnnnnnnnnnnnnttgagtannnnnnnnnnnnnnnnnnnnnnnnnngnnnnnnnnnnnnnngatgtgagccattttcccagcctgttttttgtttcttcaacaaaaacggatagggatttttatgggtatcgtgttgaatctaaatcatactgggttatataaacatttgacaatattaattttttccaaaacatcaatatggggttgtatctttatatatattttttaatcatttcaatcaatgtttgtaaatgtccagtgtatgaattttctcacttcttttcggtttattcctaaggtatttcttacttttaagttctctagcaaatgggaagtggtttttaaaatttccatttaaaattggtttattggtaaaaggtatgaaaatt

SEQ ID NO: 25379 - DNA, 1177 bp, Macaca Mulatta
  misc_feature (1)...(1177): n = A,T,C or G
ggagacacggtacatgtgctctattaactcagaggctcactacagaaatatgtaatcagtgctgtgcatctgtctgcagcgaatgtacctcctggacaccaggaggggaaaaagcactttttcgattgtgctgagttagacatctgtgaattagactatggtgtcagtaatttttgcagaacaagtgcacaaccctgaggtatgtttagtctaggcaggtacgtttaagggtattttgatcctatttataatgaattcacaatttatgcctgcaaatttcagatgatttaacattttaaacctgttacattgaaaaacattgaagttcatcttgaaaaaagcattacaggtaagcatgggagggtgatattattttgtaaacataacacttttaaccttaacatgggagaaaaaaaagtgatgttaacctaagaatatgaagccctaatgtaaaagaaacgctattgatttggatggaaaccggaagctaataagtttggaattctggcccttgtaacaaacactgtttaaatttactttgtttatacgaaaactctcatcggatgtcttatgaagagacaaaggtccccacctacggagaaaaattgttgagcccattgtcgcaggtatataagatcttgttacatgcaactggtgggggaaagatatttactatgctcccctcctcttatctcgccgatgtttttttacgaagagggcgtcgttatggtacaaaaatggttgtgctatgnggaaattatacaccttcaatgaaacttactcgcggccccaatccagccgtcacctgtgcaagaaaattattctaaacagagatacaggccacttttttctccctatgcatcaaaaacaataaatctattgtataattttgtgacacaaatctttctatagggtcacccttggagggtgggccattctgctttggtctttacacggaggagacacggaggagactatataagtggggcagacaaacctactataaagaacggcgttttatgaataagaacaaacatgttactctcgccactctttaaagtatatccgaatatcagtatttatatatcaagtattgggccgtgagaaataacattatttgcggcgagtattcggggggtgtcaccgccacgagtgactctatatattaaataataag

SEQ ID NO: 25380 - DNA, 127 bp, Macaca Mulatta
ggttccaacagcaagtgtggccattgagggagcatccgccctaaaccgtgttcgttgggcccaagccggcaaagaagttgctgttggggactcagaaggccgtatttgggtctatgacgttggagag

SEQ ID NO: 25381 - DNA, 123 bp, Macaca Mulatta
gattactataaaacaggaataatccgttgtcctgatggcatatctattcctgaactgagagaagcatgtgactatctttgcatctcttttgaatatagtactattaaatgtagagatctcagt

SEQ ID NO: 25382 - DNA, 796 bp, Macaca Mulatta
  misc_feature (1)...(796): n = A,T,C or G
gggaaaggtannnnnnnnnnnnnnnnnnnnnctgctgttggatctagaaggtgaagaatttttttatgtatatatagacatatctatataaattgtctagctgaggcagggccttcagctatcatttggttaataaatacattttagtatttgcatttcctactgcctgcagagtttcaggtgcttgttgtgtgaaagttctgtagatgtgtgcaaatttaacaaaatgaaattgtatgtgtaaaaatgtacgatttttcactgtgcaactgtaaattataaataaaaaatatttttgctattcatggagtgtaatatttatgcacaccatcaaatagtttctgtactttttattgggtaaaaaaggaattgaacagcaacctcaacataagattttttttctcgtagcctcccactgattaaagaagcaaagtttgaagtttcatccttcaaaagggggttgtgagagaacaccgtagggcttttctccaatagaaaagccagattttgaaaaaatttttaagacaaaataggacatatttgcagnnnnnnnnnnnnnnnnnnngaaatatttatatacacacctccctctttcttccagttaaagaaccctcccgaatgttccctttttgaaaaaaatctaaaggaagccaactttttattctttgaaattgggaaaccgaagtccctccaacaatttaaccaattaattttcaagtcctaaaggggatatnnnnnnnnnnnnnnnnnnnnnnncaaatttggccaaaagagttttattgccagaatgaacatt

SEQ ID NO: 25383 - DNA, 311 bp, Macaca Mulatta
gcggtggcggccggagcgccccccagcggcggctgtgcaccttgttcgtgcttctgttgtcacagtagtcagtcggcggcagcagccgcggcagcagatgccgcggcccttggctcccaaggaggcggtggcggcggtggcggtgaaaaaaaaggcggcgggggcgcaggggccggaggaggctcggacttcggctgcagcgcggcggcaccgcgttccgagagcggcttcctgccatactcggccgcggtgcttagtaagacggccgtgagcccgccggaccagagggacgaggctccgctcaccagata

SEQ ID NO: 25384 - DNA, 652 bp, Macaca Mulatta
taggatatattcgaaaccatcatgtagcttccctttctttttatacccctggaaatacctggaaggtatatatacacattatatttcatgagtgactgctaccttggcctggaccagcagtatgacatctatctcaacgttacacaagcgagcctttctgcacaggtcaacaccaaggtctctgatgccctgactgacctggcattaaagtaacctgacctgaacaatccatttgaaaggagtggctaagaattctcattgttcagtcatctagacaacatcgaattacttgatgtttgccttgaaaggatcaacttctaacctcagccatccaggaaattgacagtggctgcagtattgactccagtgacataaagttaaccacagtggccttttaacaaatgttgccttttataatgttatctttatgagtttcttgatatgtgagatgaaaaagcatgtagactaatcttttaatttgtgtatatttgaggtgatatttaggagctatcagtcaaatatcacatctcacaatgtactgtctacatgaatattggcttaaactatcttaaggaaaactgcatcgaggtgtgacaagtgtcaggacttgtcacagatgcctaactctgccacataaaatataaatataaac

SEQ ID NO: 25385 - DNA, 687 bp, Macaca Mulatta
  misc_feature (1)...(687): n = A,T,C or G
aggtggccaagcaagaggagttcttcaacctatcccactgccaactggtgaccctcatcagccgtgacgacctgaacgtgcgctgcgagtccgaggtcttccacgcctgcatcaactgggtcaagtacgactgcgaacagcgacggttctatgtccaggcgctgctgcgggccgtgcgctgccactcgttgacgccgaactttctgcagatgcagaaagcagaagtgtgagatcctgcagtccgactcccgctgcaaggactacctggtcaagatcttcgaggatctttagggcacaagcccacgcaggtgatncccnnnnnnnnnnnnnnnnnnnnnnnnnnnnnnnnnnnnnnnnnnnnnnnnnnnnnnnnnnnnnnnnnnnnnnnnnnnnnnnnnnnnnnnnnnnnnnnnnnnnnnnnnnnnnnnnnnnnnnnnnnnnnnnnnnnnnnnnnnnnnnnnnnnnnnnnnnnnnnnnnnnnnnnnnnnnnnnnnnnnnnnnnnnnnnnnnnnnnnnnnnnnnnnnnnnnnnnnnnnnnnnnnnnnnnnnnnnnnnnnnnnnnnnnnnnnnnnnnnnnnnnncccccatgagcgtgccgcgcaaccgcatcggggtgggggtcatcgatgggcacatctagcagtcggcggctcccacggctgcatccaccacaacagtgtggagagg

SEQ ID NO: 25386 - DNA, 467 bp, Macaca Mulatta
actgagctccggctgccccacgtcaccctgcagtttgcagattccaagggcgatgtggggctgggcttggtgaaggaggggctggtcagtggtggaggtgcgcaaggagaaacagttccagaaagtgatcacagaatacctgaatgcccaggagtcagccaagagcgccaggctgaatctgtggcgctatggagactttcgagctgatgatgcagacgaatttggctacagccgctaaggaggggatcgggtttggaccccagcaccgctcacgccattccctcttcctctgccgggagggcgttttcacctccaaaccccagacaggggttgtagattgggtccagctttgcttcagtgtgtggaaatgtcttgtagggtggcattggggctggtgggggggtggaccccaatgctttcctggggcataaccttgtcctctgtgatgatgggcactgctatccaca

SEQ ID NO: 25387 - DNA, 701 bp, Macaca Mulatta
atgagggcagatcagaatggcaacagagggaaagaagacgatataaatgtgatgaatgtgggaaaagtttcagtcatagctcagaccttagtaaacacaggagaactcacactggagagaagccgtataaatgtgacgagtgtggaaaagccttcattcagcgctcacatctcattggacatcatagagtacacactggagtaaaaccctataaatgtaaagaatgtgggaaagatttcagtgggcgcacaggtcttattcaacatcagagaatccacacaggtgaaaaaccctatgaatgtgatgagtgtggaagacctttccgagtaagttcagctcttattagacatcaaagaattcacacagcaaataaactctactaatatagtagtgatatcaaaagttctttagacactcaggcctaactagttatcagagaatctaatttagaaaccttgagtttcctcagtgtggtcaaagcttcagtcatcattaaatttctctggcaccaaagaatctacctgagtaaaatgtccttttatttcaaattagttcagttttgagggggaatcaagaattctttcagaaagctttgtccactgacaacactggtcacctgcagtccaagatcaatggttcctggatgaaagacagtgaattaattctgtctctgctctagatccttttagttgaccattcac

SEQ ID NO: 25388 - DNA, 245 bp, Macaca Mulatta
aaccatcatcatcagaacaaaacagattttttccaaacaagtacaatgatagtgccgggttggcagttaactctttcaccctactaaattcaagagatcatctccatcctgtcctgtatattttctacatttctattaagaggctacttggtagtgtcagtgggcatctcttacaccttctagtagctcaagctagtaaaaccttgtacttctctattgcgccgccattaaaagcagcattagtg

SEQ ID NO: 25389 - DNA, 2695 bp, Macaca Mulatta
  misc_feature (1)...(2695): n = A,T,C or G
ccacagctccggagcaagcccctgccccggcccggccataccagggcgtccgcgtgaaggagccagtgaaggaactgctgaggaggaagcgaggccacgccagcagcggggcagcgcctgcacctacggcggtnnnnnnnnnnnnnnnnnnnnnnnnnnnnnnnnnnnnnnnnnnnnnnnnnnnnnnnnnnnnnnnnnnnnnnnnnnnnnnnnnnnnnnnnnnnnnnnnnnnnnnnnnnnnnnnnnnnnnnnnnnnnnnnnnnnnnnnnnnnnnnnnnnnnnnnnnnnnnnnnnnnnnnnnnnnnnnnnnnnnnnnnnnnnnnnnnnnnnnnnnnnnnnnnnnnnnnnnnnnnnnnnnnnnnnnnnnnnnnnnnnnnnnnnnnnnnnnnnnnnnnnnnnnnnnnnnnnnnnnnnnnnnnnnnnnnnnnnnnnnnnnnnnnnnnnnnnnnnnnnnnnnnnnnnnnnnnnnnnnnnnnnnnnnnnnnnnnnnnnnnnnnnnnnnnnnnnnnnnnnnnnnnnnnnnnnnnnnnnnnnnnnnnnnnnnnnnnnnnnnnnnnnnnnnnnnnnnnnnnnnnnnnnnnnnnnnnnnnnnnnnnnnnnnnnnnnnnnnnnnnnnnnnnnnnnnnnnnnnnnnnnnnnnnnnnnnnnnnnnnnnnnnnnnnnnnnnnnnnnnnnnnnnnnnnnnnnnnnnnnnnnnnnnnnnnnnnnnnnnnnnnnnnnnnnnnnnnnnnnnnnnnnnnnnnnnnnnnnnnnnnnnnnnnnnnnnnnnnnnnnnnnnnnnnnnnnnnnnnnnnnnnnnnnnnnnnnnnnnnnnnnnnnnnnnnnnnnnnnnnnnnnnnnnnnnnnnnnnnnnnnnnnnnnnnnnnnnnnnnnnnnnnnnnnnnnnnnnnnnnnnnnnnnnnnnnnnnnnnnnnnnnnnnnnnnnnnnnnnnnnnnnnnnnnnnnnnnnnnnnnnnnnnnnnnnnnnnnnnnnnnnnnnnnnnnnnnnnnnnnnnnnnnnnnnnnnnnnnnnnnnnnnnnnnnnnnnnnnnnnnnnnnnnnnnnnnnnnnnnnnnnnnnnnnnnnnnnnnnnnnnnnnnnnnnnnnnnnnnnnnnnnnnnnnnnnnnnnnnnnnnnnnnnnnnnnnnnnnnnnnnnnnnnnnnnnnnnnnnnnnnnnnnnnnnnnnnnnnnnnnnnnnnnnnnnnnnnnnnnnnnnnnnnnnnnnnnnnnnnnnnnnnnnnnnnnnnnnnnnnnnnnnnnnnnnnnnnnnnnnnnnnnnnnnnnnnnnnnnnnnnnnnnnnnnnnnnnnnnnnnnnnnnnnnnnnnnnnnnnnnnnnnnnnnnnnnnnnnnnnnnnnnnnnnnnnnnnnnnnnnnnnnnnnnnnnnnnnnnnnnnnnnnnnnnnnnnnnnnnnnnnnnnnnnnnnnnnnnnnnnnnnnnnnnnnnnnnnnnnnnnnnnnnnnnnnnnnnnnnnnnnnnnnnnnnnnnnnnnnnnnnnnnnnnnnnnnnnnnnnnnnnnnnnnnnnnnnnnnnnnnnnnnnnnnnnnnnnnnnnnnnnnnnnnnnnnnnnnnnnnnnnnnnnnnnnnnnnnnnnnnnnnnnnnnnnnnnnnnnnnnnnnnnnnnnnnnnnnnnnnnnnnnnnnnnnnnnnnnnnnnnnnnnnnnnnnnnnnnnnnnnnnnnnnnnnnnnnnnnnnnnnnnnnnnnnnnnnnnnnnnnnnnnnnnnnnnnnnnnnnnnnnnnnnnnnnnnnnnnnnnnnnnnnnnnnnnnnnnnnnnnnnnnnnnnnnnnnnnnnnnnnnnnnnnnnnnnnnnnnnnnnnnnnnnnnnnnnnnnnnnnnnnnnnnnnnnnnnnnnnnnnnnnnnnnnnnnnnnnnnnnnnnnnnnnnnnnnnnnnnnnnnnnnnnnnnnnnnnnnnnnnnnnnnnnnnnnnnnnnnnnnnnnnnnnnnnnnnnnnnnnnnnnnnnnnnnnnnnnnnnnnnnnnnnnnnnnnnnnnnnnnnnnnnnnnnnnnnnnnnnnnnnnnnnnnnnnnnnnnnnnnnnnnnnnnnnnnnnnnnnnnnnnnnnnnnnnnnnnnnnnnnnnnnnnnnnnnnnnnnnnnnnnnnnnnnnnnnnnnnnnnnnnnnnnnccaggctggagtgcaatggtgcgatctcggctcactgcaacctcacctcccaggttcaagtgattcccctgcgtcagcctcccaagtaactgggattacaggcatctgccaccacatccggctaattttttgtatttcagtagagatgggctttcaccatgttggtcaggatggtcttaatctcccgaccttgtgatccacccacctcagcctnnctctcaaagtgctgggattacaggcatgagccaccgcactcggccttttaccatgtgggtttctttagtgtcttaaaagcatccataacccaccattctgtggagccaaggtcccctctacccaaacaccctccctcctgcggacttctagagcctcagccagaagtaccgttaggtttaattttaatttgttttgctgaagaaacatcaggtttgtaggagactgagttgttagcagggatgcttagctcctgatagtgaacgtgtaccttgggaactggcacattcatctgctaatagcatcgtcgtcactattaagcagacacttcagctggtagaatccatgtagaagtcatggacttttctgggaaatga

SEQ ID NO: 25390 - DNA, 81 bp, Macaca Mulatta
tacgagttccagagagctctgtcctggtgactgtgcccaggttatgacgactaatcccaaaccgaacaagacattaaaggt

SEQ ID NO: 25391 - DNA, 755 bp, Macaca Mulatta
  misc_feature (1)...(755): n = A,T,C or G
aacattatttcagggatacaggagggcaggaggttatgaggctgtctggggaggctggtgagacccaggnccaggccccgggctcccctccaggcccggcgattgccgccatgaagctgaacgagcgcagcctggccttctacgccacctgcgacgccccagtggacaacgcaggcttcctgtacaagaagggcgggcgacacgcagcctaccaccggcgctggttcgtcctgcgcgggaacatgctcttctacttcgaggatgcggccagccgcgagcctgtgggcgtcatcatcctggagggctgcaccgtggagctggtggaggctgcggaggagttcgccttcgccgtgcgcttcgcggggacccgggcgcgcacctacgtgctggccgctgagagtcaggccgccatggagggttgggtcaaggccctgtcgcgtgccagcttcgactacctgcggctggtggtgcgtgagctggagcagcagctggcggctgtnnnnnnnnnnnnnnnnnnnnnnnnnnnnnnnnnnnnnnnnnnnnnnnnnnnnnnnnnnnnnnnnnnnnnnnnnnnnnnnnnnnnnnnnnnnnnnnnnnnnnnnnnnnnnnnnnnnnnnnnnnnnnnnnnnnnnnnnnnnnnnnnnnnnnncctcccgcccaggagaatggctgcgctgtctggagcactgaaggcactttcagacctggacccgagccccctccgccaccgcctcggcgccggtcctcggcacccc

SEQ ID NO: 25392 - DNA, 642 bp, Macaca Mulatta
gaggaaaatgaaagagaaaaggattagcagaagacattatgtcagtggaagagaaagccaatacccacctcctcttgggcatgtgcttagacgcctgtgctcgctaccttctgttctccaagcagccatcacaggcacaaaggatgtatgaaaaagctctgcagatttctgaagaaatacaaggagaaagacacccacagaccattgtgctgatgagtgacctggctactaccctggatgcacagggccgctttgatgaggcctatatttatatgcaaagggcatcagatctggcaagacagataaatcatcctgagctacacatggtactcagtaatctagctgcagttttgatgcacagagaacgatatacacaagcaaaagagatctaccaggaagcactgaagcaagcaaagctgaaaaaagatgaaatttctgtacaacacatcagggaagagttggctgagctgtcaaagaaaagtagacctttgacttaaattctgtcaagctctaaatccgtttttgtgtagggagaataatgtctagcaatgcggaagaatagctgtcattcctgtctctgtggcacccaaatcaatggcttaaatctgtcgtctttgatattcaggtttcctcaatttagcc

SEQ ID NO: 25393 - DNA, 701 bp, Macaca Mulatta
  misc_feature (1)...(701): n = A,T,C or G
ggatgttcagatataataaataaagaagtagtcagttttctagcaactcccagttgttccaaaatgttgacgtataggtgctcaggttgcatagcagtagaaaaatccctgaatagccgaaactttagcaagctcttgcactcttgcccataccaatgtgatcgtcacaaagtcattgtggaagctgaagacagatataaaagtgaactaaggaaattacttatctgtaacaaaaaaattctgctgaccccacgtagaagacgactcagtaatgaatctactacccctggaagaataaaaaaaagaagagttcgcaaaaactttactgaagaagaagtaaattaccttttcaatggagttaagaaaatgggaaatcactggaattcaattttgtggtctttcccctttcagcaaggacggaaggctgtggaccttgctcacaaataccgcaaactgaccaaaagccccatgtgtgcagcttcttctttggaagaagactgtcagtttagtttggatttttaaaatacagtgccttgaaagatacaacatttaaagtatttttctaaactctcatgagaaagaatgtggaaatgaggacacagtttttattaaacagtttttgtggatgctnnnnnnnnnnnnnnnnnnnnnnnnnnnnnnnnttgttcggcccgccttcgggcctttcgaagaagcttttn

SEQ ID NO: 25394 - DNA, 155 bp, Macaca Mulatta
aaagggaatcctttttcctaaagtttaactcacatctattgtcaccagttattatcttcccagttcagctccccttcttcttcccagccttcagcctctccctgcaacaaaataaagcacaccaagaacccactgaaacaaatccatatgcaaat

SEQ ID NO: 25395 - DNA, 937 bp, Macaca Mulatta
  misc_feature (1)...(937): n = A,T,C or G
ttgcttaccccacacggtgggtttttnnnnnnnnnnnnnnnnnnnnnnnnnnnnnnnnaatggnnnnnnnnnnnnnnnnnnccccccgtgggctccccactttttcccccaaggggttaaaaagggggtggtcctcccccccaaaggggaaaaggnnnnnnnnnnnnnnnnaannnnnnnnnnnnnnnnntcccaccatatttttttgcggccccaccgagggggccccccccctgtttttgtggtccccctattttttctcccctgtttaatggtggacactttgtgaattttccccccnnnnnnnnnnnnnnnnnnnnnnnnntcaaaaaatgtttataaaaaggcccccccaatctttcccccatgttgggccattttccaaagggcccccagtccattgcattcagccggttccgtttcaattaagtttccggggtttttccttaaaattatccccggaaagggaaagattttcggccccaccctccgtttgtttccgccaggcttcaatccagttttctcaggcatgttcccctttcctcatgagatttggtgaagaaaagtatttggcaaagttcttcaaagccacatcatcgcggtcaaagtagtaagacatgaacaggtaaacgtaggaagcgtagagctccagattgatctggcggttgatggcggcctctgagtcctggtggtagttctggcgcacctgcgaggtggacgcggtcgtcatggcggaggctaaggacaggcggcggcggcggtggctgcgcggcgctggagcggcggcggggcccttggggcagtccgaggacgcggtgaagaggagacggaaggctggctatgggcggccggccgggatgggggacgagcgccgggttccgtccaagcactgttgaagcaggaaaccccgacgactctcggcgaagaacgttttccc

SEQ ID NO: 25396 - DNA, 774 bp, Macaca Mulatta
  misc_feature (1)...(774): n = A,T,C or G
aggaagtgaagttgtacaagaacgcccgggagcgggagaagtnnnnnnnnnnnnnnnnnnnnnnnnnnnnnnnnnnnnnnnnnnnnnnnnnnnnnnnnnnnnnnnnnnnnnnnnnnnnnnnnnnnnnnnnnnnnnnnnnnnnnnnnnnnnnnnnnnnnnnnnnnnnnnnnnnnnnnnnnnnnnnnnnnnnnnnnnnnnnnnnnnnnnnnnnnnnnnnnnnnnnnnnnnnnnnnnnnnnnnnnnnnnnnnnnnnnnnnnnnnnnnnnnnnnnnnnnnnnnnnnnnnnnnnnnnnnnnnnnnnnnnnnnnnnnnnnnnnnnnnnnnnnnnnnnnnnnnnnnnnnnnnnnnnnnnnnnnnnnnnnnnnnnnnnnnnnnnnnnnnnnnnnnnnnnnnnnnnnnnnnnnnnnnnnnnnnnnnnnnnnnnnnnnnnnnnnnnnnnnnnnnnnnnnnnnnnnnnnnnnnnnnnnnnnnnnnnnnnnnnnnnnnnnnnnnnnnnnnnnnnnnnnnnnnnnnnnnnnnnnnnnnnnnnnnnnnnnnnnnnnnnnnnnnnnnnnnnnnnnnnnnnnnnnnnnnnnnnnnnnnnnnnnnnnnnnnnnnnnagcccgtggctccagcccctgcacttaagggcagagtctgaggcgatgactcctggtcccctatccgccacacaggccctggtcatccacataactcactgtctgcagctgcccatcttgtgtctgtctttggtgtcaggactttgggggccgggcccctccccacaataaagat

SEQ ID NO: 25397 - DNA, 1121 bp, Macaca Mulatta
  misc_feature (1)...(1121): n = A,T,C or G
tcctgatacctccacaatgtacctgggaacctcgagaactccagcctccctgtctggacccnnnnnnnnnnnnnnnnnnnnnnnnnnnnnnnnnnnnnnnnnnnnnnnnnnnnnnnnnnnnnnnnnnnnnnnnnnnnnnnnnnnnnnnnnnnnnnnnnnnnnnnnnnnnnnnnnnnnnnnnnnnnnnnngctcaggcctttgttcaagaacaccagtgttggccctctgtactctggctgcagactgaccttgctcanncctgagaaggatgggacagccactggagtggacgccatctgcacccaccgctttgatcccaccagccctggactggacagagagcggctatactgggagctgagccagctgaccaacagcatcacagagctgggcccctacaccctggacagagacagtctctatgtcaatggtcnnnnnnnnnnnnnnnnnnnnnnnnnnnnnnnnnnnnnnnnnnnnnnnnnnnnnnnnnnnnnnnnnnnnnnnnnnnnnnnnnnnnnnnnnnnnnnnnnnnnnnnnnnnnnnnnnnnnnnnnnnnnnnnnnnnnnnnnnnnnnnnnnnnnnnnnnnnnnnnnnnnnnnnnnnnnnnnnnnnnnnnnnnnnnnnnnnnnnnnnnnnnnnnnnnnnnnnnnnnnnnnnnnnnnnnnnnnnnnnnnnnnnnnnnnnnnnnnnnnnnnnnnnnnnnnnnnnnnnnnnnnnnnnnnnnnnnnnnnnnnnnnnnnnnnnnnnnnnnnnnnnnnnnnnnnnnnnnnnnnnnnnnnnnnnnnnnnnnnnnnnnnnnnnnnnnnnnnnnnnnnnnnnnnnnnnnnnnnnnnnnnnnnnnnnnnnnnnnnnnnnnnnnnnnnnnnnnnnnnnnnnnnnnnnnnnnnnnnnnnnnnnnnnnnnnnnnnnnnnnnnnnnnnnnnnnnnnnnnnnnnnnnnnnnnnnnnnnnnnnnnnnnnnnnnnnnnnnnnnnnnnnnnnnnnnnnnnnnnnnnnnnnnagctgccagccatctcctgatactattcaccctcaacttcaccatcactaacctgcagtatgaggagaacatgtggcctggctccaggaagttcaacactacagagagggtccttcagggt

SEQ ID NO: 25398 - DNA, 654 bp, Macaca Mulatta
cgcacgaatgcagagttttgtgtatataatgttaacgtaccgccgccgcttccctagcgacatgagatcttgtttttgaagatcctcatggaaggttgtacagagccccacatttgaggggaagtcctttcagttgatatgagacctctttaacgcccctcagtctgtggagtaaaggccttgtgatacacacagagccctcagcttctctccctctggaggaacaaggtctttcctgacagtcggagacacatcttgatgtatgttaataaaagcatttcaggctgtggggccatcatgtatattaatactccttatgtgtccagcatccatgtattcatttgagtgcccaatccctggacgagatgaactaggccttataaaaagtcaaagcctcaaagaaatggcacaaccatgttcttcagcactcagtctcttaattacagatcctcacgaagggtggtaagtggagctggaagctcttgtggccgtaggacatgctggtgagccctgagctggccttgtgcagagggctccgttcaaaggctcagggtgtctttgaggctgtttatcaagcttgggagctcttccaagtctgagaatgtttcgaaccctttttgcaaggtttcccactactagtataccatcatgtcc

SEQ ID NO: 25399 - DNA, 510 bp, Macaca Mulatta
tgtgtaagtttgacattctctgtaagatggataagtaagaagaaattctcaagatcagaaaaagacaagtaaaaagtcgccaaaggtcctgggcaagtgttttgaagtgtcaacgtacagagtagactgcagggtagggaggtggggaacttggtgggaaaacctaacttgaggccagactacatttaaagcaatttaaggacttcggagtgggaaagtccaagtagggaaatggtgatacaaggatggggcttggcagagacgtttgtagtcctgcacttaggataatgaaagccacaaacgtaaagaagtgttcagggggcagagaaacccttacaccatagggaatgaaccaactaggaaaggaaaaaaaagaaagcctgttgagctcataaaggaggtaattagcccaagctcccatctccagtttactcttgttttagtaaaccaagaaacacctctcagaaacggagctccatttcactcttgccacctagagatttaaaaaat

SEQ ID NO: 25400 - DNA, 1292 bp, Macaca Mulatta
  misc_feature (1)...(1292): n = A,T,C or G
caggactctgcccatttccatctgagaaatgctgaagaggaaaggatgattactatatttctgacaacctggttacaggaaccaatgactttcaaagatgtagctgtggagttcactcaggacgagtggatgatgctggattctgctcaaagaagtctgtacagagatgtgatgttggaaaactatagaaatctcacctccttggaatatcaattgtgcaagcttactgtgatctccccattggatcaagaagagataaggaatatggaaaagagaattccccaaggcatcttnnnnnnnnnnnnnnnnnnnnnnnnnnnnnnnnnnnnggaatatcaattgtgcaagcttactgtgatctccccattggatcaagaagagataaggaatatggaaaagagaattccccaaggcatcttntacaaaaagagtacacatattctaaacatggaatgcacttcacacataatatgtttcacatacctaacaatttgcatatggtacagaattcctgtgaatgtaataaaaatgaaaccctgtgtcatcaatcatcccttaagaaacaaggacaaactcatactgaaaagaaacatgaatgtaatcaatgtggaaaagccttcaaaaggatttctaatcttgctttacacaagaaaagtcacatgggtgagaaacaatatgaatgtaaagaatgtggtaaagtgttcaatgattcctcaaccttaaggagacatataagaactcacactggagagaaaccctatgaatgtaatcagtgtggaaaagctttcagtcaaaaaacatccctnnnnnnnnnnnnnnnnnnnnnnnnnnnnnnnnnnnnnnnnnnnnnnnnnnnnnnnnnnnnnnnnnnnnnnnnnnnnnnnnnnnnnnnnnnnnnnnnnnnnnnnnnnnnnnnnnagaactcacactggagagaaaccctatgaatgtaatcagtgtggaaaannnnnnnnnnnnnnnnnnnnnnnnnnnnnnnnnnnnnnnnnnnnnnnnnnnnnnnnnnnnnnnnnnnnnnnnnnnnnnnnnnnnnnnnnnnnnnnnnnnnnnnnnnnnnnnnnnnnnnnnnnnnnnnnnnnnnnnnnnnnnnnnnnnnnnnnnnnnnnnnnnnnnnnnnnnnnnnnnnnnnnnnnnnnnnnnnnnnnngagaaacaatatgaatgtaaagaatgtggtaaagtgttcaatgattcctcaaccttaaggagacatataagaactcacactggagagaaaccctatgaatgtaatcagtgtggaaaagctttcagtca

SEQ ID NO: 25401 - DNA, 1349 bp, Macaca Mulatta
atgctgctacgtctccagtgaatgttattttggaggaagtctgtatgctagacaaggaggaaggagatggataaagcagatgtttattggggcattccttatcccagctatggtgtgtggcactgccttcttcatcaatttcatagccatttattaccatgcttcaagagccattccttttggaacaatggtggccgtttgttgcatctgtttttttgttattcttcctctaaatcttgttggtacaatacttggccgaaatctgtcaggtcagcccaactttccttgtcgtgtcaatgctgtgcctcgtcctataccggagaaaaaatggttcatggagcctgcagttattgtttgcctgggtggaattttaccttttggttcaatctttattgaaatgtatttcatcttcacgtctttctgggcatataagatctattatgtctatggcttcatgatgctggtgctggttatcctgtgcattgtgactgtctgtgtgactattgtgtgcacatattttctactaaatgcagaagattacaggtggcaatggacaagttttctctctgctgcatcaactgcaatctatgtttacatgtattccttttactactattttttcaaaacaaagatgtatggcttatttcagacatcattttactttggatatatggcggtatttagcacagccttggggataatgtgtggagcgattggttacatgggaacaagtgcctttgtccgaaaaatctatactaatgtgaaaattgactagagacccaagaaaacctggaacttcagatcaatttctttttcataggggtggaactcgcacagcaaaaacaaacgcaagaagagatttgggctttaacacaccgggtactttgtgggtctctcttttgtcgatggcttaaagtaacatctatttccattgatcctaggttcttactgactgctttctccaactgttcacagcaaatgcttggattttacgcagtaggcattactacagtacatggctaatcttcccaaaaaactagctcattaaagaatgaaatagacccagctctcttcagtggaagaggacaaatagttttattttaagcattttgttcccaataaaaataaattagaggggaaactttgggatgctaaaaatttacttggaaatagggaatccttcctggggcaccttaaaggtgtttccatatgttaccctgaaaaaaatggatggttccaagaaaaggaattacctttttttcccctcctatttttactggccattgttcgacctattgtggggacatttttatatattggaatctgggtttctttttttgacttttttt

SEQ ID NO: 25402 - DNA, 830 bp, Macaca Mulatta
  misc_feature (1)...(830): n = A,T,C or G
ggattctcacactatccatcactctggacaaaggatgatacaggtgttattagcaagcaagaggtactgaggtgatcaaacagttttagggtgaaagccattcccagtttgagtcttcatcctgtaagcccccaggggcagtccctactttattgaacttcatcctgttaaatggcgaacatgcctgtttaagggattgctggtcctatagtcaggagctaattgttcaagaagtgttgaacttcaaaaagacaagacagactacttgttgaaatccagcgtactctgtggctttcccctatttctcttaatacttagggaagaatctgataggaagaagcgcacaggggtgtgcacaaagaaaatgacatgaatctttatttttcactgccagcttcaaggaaaaaattttttctacaatttgcatgagggatttttttaattgtatgtactcatggttttaaaccaaaacgtactgtaccgtacagagaaaaggagcaaaaaaccaagtcttctgtttatcctgagactttcaacaatgttcccctcctgtgagccaaaggaggcaacctgcacaagcttgtaaatggttcgtctttaaaatgtacataagtggaacatttaataaaatgaggggaaatggatttataaacttgttttttttctaggtgacctttgtttaataggctttcacagactgggaaatgctcaagatgtgatgggcctggtggtacaggtgtgacatttgttaccacccatttctcccaccccaccccgcnnnnnnnnnnnnnnnnnnnncatcccccgcacactataatatagtgaactgg

SEQ ID NO: 25403 - DNA, 3476 bp, Macaca Mulatta
  misc_feature (1)...(3476): n = A,T,C or G
ctggcaggagggcacaaggagtctcgggagcggagcatgtcggagacgggcactgccgctgcccctggggnnnnnnnnnnnnnnnnnnnnnnnnnnnnnnnnnnnnnnnnnnnnnnnnnnnnnnnnnnnnnnnnnnnnnnnnnnnnnnnnnnnnnnnnnnnnnnnnnnnnnnnnnnnnnnnnnnnnnnnnnnnnnnnnnnnnnnnnnnnnnnnnnnnnnnnnnnnnnnnnnnnnnnnnnnnnnnnnnnnnnnnnnnnnnnnnnnnnnnnnnnnnnnnnnnnnnnnnnnnnnnnnnnnnnnnnnnnnnnnnnnnnnnnnnnnnnnnnnnnnnnnnnnnnnnnnnnnnnnnnnnnnnnnnnnnnnnnnnnnnnnnnnnnnnnnnnnnnnnnnnnnnnnnnnnnnnnnnnnnnnnnnnnnnnnnnnnnnnnnnnnnnnnnnnnnnnnnnnnnnnnnnnnnnnnnnnnnnnnnnnnnnnnnnnnnnnnnnnnnnnnnnnnnngctgatgatggcttcggcaccactgacattgatctcaagtgcaaggagcgggtgaccgacagcgagagtggggacagctctggggaggacccagagggcaacaagnnnnnnnnnnnnnnnnnnnnnnnnnnnnnnnnnnnnnnnnnnnnnnnnnnnnnnnnnnnnnnnnnnnnnnnnnnnnnnnnnnnnnnnnnnnnnnnnnnnnnnnnnnnnnnnnnnnnnnnnnnnnnnnnnnnnnnnnnnnnnnnnnnnnnnnnnnnnnnnnnnnnnnnnnnnnnnnnnnnnnnnnnnnnnnnnnnnnnnnnnnnnnnnnnnnnnnnnnnnnnnnnnnnnnnnnnnnnnnnnnnnnnnnnnnnnnnnnnnnnnnnnnnnnnnnnnnnnnnnnnnnnnnnnnnnnnnnnnnnnnnnnnnnnnnnnnnnnnnnnnnnnnnnnnnnnnnnnnnnnnnnnnnnnnnnnnnnnnnnnnnnnnnnnnnnnnnnnnnnnnnnnnnnnnnnnnnnnnnnnnnnnnnnnnnnnnnnnnnnnnnnnnnnnnnnnnnnnnnnnnnnnnnnnnnnnnnnnnnnnnnnnnnnnnnnnnnnnnnnnnnnnnnnnnnnnnnnnnnnnnnnnnnnnnnnnnnnnnnnnnnnnnnnnnnnnnnnnnnnnnnnnnnnnnnnnnnnnnnnnnnnnnnnnnnnnnnnnnnnnnnnnnnnnnnnnnnnnnnnnnnnnnnnnnnnnnnnnnnnnnnnnnnnnnnnnnnnnnnnnnnnnnnnnnnnnnnnnnnnnnnnnnnnnnnnnnnnnnnnnnnnnnnnnnnnnnnnnnnnnnnnnnnnnnnnnnnnnnnnnnnnnnnnnnnnnnnnnnnnnnnnnnnnnnnnnnnnnnnnnnnnnnnnnnnnnnnnnnnnnnnnnnnnnnnnnnnnnnnnnnnnnnnnnnnnnnnnnnnnnnnnnnnnnnnnnnnnnnnnnnnnnnnnnnnnnnnnnnnnnnnnnnnnnnnnnnnnnnnnnnnnnnnnnnnnnnnnnnnnnnnnnnnnnnnnnnnnnnnnnnnnnnnnnnnnnnnnnnnnnnnnnnnnnnnnnnnnnnnnnnnnnnnnnnnnnnnnnnnnnnnnnnnnnnnnnnnnnnnnnnnnnnnnnnnnnnnnnnnnnnnnnnnnnnnnnnnnnnnnnnnnnnnnnnnnnnnnnnnnnnnnnnnnnnnnnnnnnnnnnnnnnnnnnnnnnnnnnnnnnnnnnnnnnnnnnnnnnnnnnnnnnnnnnnnnnnnnnnnnnnnnnnnnnnnnnnnnnnnnnnnnnnnnnnnnnnnnnnnnnnnnnnnnnnnnnnnnnnnnnnnnnnnnnnnnnnnnnnnnnnnnnnnnnnnnnnnnnnnnnnnnnnnnnnnnnnnnnnnnnnnnnnnnnnnnnnnnnnnnnnnnnnnnnnnnnnnnnnnnnnnnnnnnnnnnnnnnnnnnnnnnnnnnnnnnnnnnnnnnnnnnnnnnnnnnnnnnnnnnnnnnnnnnnnnnnnnnnnnnnnnnnnnnnnnnnnnnnnnnnnnnnnnnnnnnnnnnnnnnnntcatccagctgaccccggtgcctgtgagcacacccagcggcctggtgccgcccctgagcccagccacactccctggacccacttcacagcctcagaaggtcctgctgccctcctccaccagncagaatcacctatgtgcagtcagcgggcgggcacgcgctgcccctgggtaccagccctgcatccagccaggctggaacagtcacctcgtacgggcccacgagctctgtagctctaggcttcacctcgctggggcccagtggccccgccttcgtgcagcccctgctctcagnctctcagcaggccaagccccactgctggctcccggtcaggtgggcgtgtcgcctgtgcccagtccccagctgccacctgcctgtgcagcccccggaggtcctgtcataacggcgttttactctggcagccctgcaccnnnnnnnnnnnnnnnnnnnnnnnnnnnnnnnnnnnnnnnnnnnnnnnnnnnnnnnnnnnnnnnnnnnnnnnnnnnnnnnnnnnnnnnnnnnnnnnnnnnnnnnnnnnnnnnnnnnnnnnnnnnnnnnnnnnnnnnnnnnnnnnnnnnnnnnnnnnnnnnnnnnnnnnnnnnnnnnnnnnnnnnnnnnnnnnnnnnnnnnnnnnnnnnnnnnnnnnnnnnnnnnnnnnnnnnnnnnnnnnnnnnnnnnnnnnnnnnnnnnnnnnnnnnnnnnnnnnnnnnnnnnnnnnnnnnnnnnnnnnnnnnnnnnnnnnnnnnnnnnnnnnnnnnnnnnnnnnnnnnnnnnnnnnnnnnnnnnnnnnnnnnnnnnnnnnnnnnnnnnnnnnnnnnnnnnnnnnnnnnnnnnnnnnnnnnnnnnnnnnnnnnnnnnnnnnnnnnnnnnnnnnnnnnnnnnnnnnnnnnnnnnnnnnnnnnnnnnnnnnnnnnnnnnnnggccagcaaattccccagctcatcttcagactggcgcgtccctgggcagggcctggagaatcgtggggagcctcccactcctcccagcccagccccagctccagccgtagcccctggtggcagcagcgagagcagcagtgggcgggcagccggggatacccccgagcgcaaggaggcggctggtactggcaagaaggtgaaggtgcggcccccgcccctgaagaagacctttgactctgtggacannnnnnnnnnnnnnnnnnnnnnnnnnnnnnnnnnnnnnnnnnnnnnnnnnnnnnnnnnnnnnnnnnnnnnnnnnnnnnnnnnnnnnnnnnnnnnnnnnnnnnnnnnnnnnnnnnnnnnnnnnnnnnnnnnnnnnnnnnnnnnnnnnnnnnnnnngacctggattcagcacccgaggaccctacctcgcccaagcgcaagatgagaagacgctccagctgcagctcggagcccaacacccccaagagtgccaagtgcgagggggacatcttcacctttgaccgtacagg

SEQ ID NO: 25404 - DNA, 782 bp, Macaca Mulatta
gggatcctgaagccagacaagactactattacagaaccacaccacatctggcccactctgactgatgaagagtggatcaaggtcgaggtgcagctcaaggatctgatcttggctgactacggcaagaaaaacaatgtgaatgtggcatcactgacccaatcggaaattcgagacatcatcctgggtatggagatctcggcaccgtcacagcagcggcagcagattgctgagatcgagaagcagaccaaggaacagtcgcagctcacggcaacacagactcgcactgtcaacaagcatggcgatgagatcatcacctccaccaccagcaactatgagacccagactttctcatccaagactgagtggagggtcagggccatctctgctgccaacctgcacctaaggaccaatcacatctatgtttcatctgacgacatcaaggagactggctacacctacatccttcccaagaatgtgcttaagaagttcatctgcatatctgaccttcgggcccaaattgcaggatacctgtatggggtgagcccaccagataacccccaggtgaaagagatacgctgcatcgtgatggtgccacagtggggcactcaccagaacgtgcacctgcctggccagctgccccagcatgagtacctcaggagatggaacccctaaggtgggatcacactcagccccatgagtcccccgcaattatccccccagggatgtcaccaacccatgcccaagatcatgggctgaacaacccatcttgggaatggccgaga

SEQ ID NO: 25405 - DNA, 509 bp, Macaca Mulatta
  misc_feature (1)...(509): n = A,T,C or G
gtgatcggtctactttgcacttaagttaattattatgaggaactgtgccccgactgagtgcgagaagaaggtaagctcactgggagtggacactgtatttattatgtcctgttgtgacctggtcagtcctggcaggtgcatggagacttggggactgttaattgatttgttggtatttgctttggatacagaattccctaagaatattatctcacttcatcatgacttcctttactcactctagaattttatgttggacactttgtagcttttagtggttagtagagggaaaccttttatgatttaaatactttcactctacttattagttaccatcactgcatgtatcagcacttgatgagtttaagatctggtatcttataagttagaaattatttctgtttactcatggtttctgctttggaaatgaaatttgctgtgggttgaaagttggcagatggcaccacagctatggagcaatanatttgttgtgggaatgatttggtcat

SEQ ID NO: 25406 - DNA, 254 bp, Macaca Mulatta
agattgcaagactggaggaagataaagaagaactacgtaaccagctgcttaatgttgatctcacaagagacagcaaacgagtggaacaacttgctcgagaaaaagtctatttgtgtcaaaaattaaaagggttagaggctgaagtagcggaattaagggctgaaaaggagaattctgacgctcaggtggaaaatgcccaaagaatacaggtgcggcagttggctgagatgcaggctacagtcagatccctggag

SEQ ID NO: 25407 - DNA, 4270 bp, Macaca Mulatta
  misc_feature (1)...(4270): n = A,T,C or G
atgaaggaagaggagggttttcctgaagatgaggcgactgaatcggaaaaaaactttaagtttggtaaaagagttggatgcctttccaaaggttcctgagagctatgtagagacttcagccagtggaggtacannnnnnnnnnnnnnnnnnnnnnnnnnnnnnnnnnnnnnnnnnnnnnnnnnnnnnnnnnnnnnnnnnnnnnnnnnnnnnnnnnnnnnnnnnnnnnnnnnnnnnnnnnnnnnnnnnnnnnnnnnnnnnnnnnnnnnnnnnnnnnnnnnnnnnnnnnnnnnnnnnnnnnnnnnnnnnnnnnnnnnnnnnnnnnnnnnnnnnnnnnnnnnnnnnnnnnnnnnnnnnnnnnnnnnnnnnnnnnnnnnnnnnnnnnnnnnnnnnnnnnnnnnnnnnnnnnnnnnnnnnnnnnnnnnnnnnnnnnnnnnnnnnnnnnnnnnnnnnnnnnnnnnnnnnnnnnnnnnnnnnnnnnnnnnnnnnnnnnnnnnnnnnnnnnnnnnnnnnnnnnnnnnnnnnnnnnnnnnnnnnnnnnnnnnnnnnnnnnnnnnnnnnnnnnnnnnnnnnnnnnnnnnnnnnnnnnnnnnnnnnnnnnnnnnnnnnnnnnnnnnnnnnnnnnnnnnnnnnnnnnnnnnnnnnnnnnnnnnnnnncttacaacttttctcatagaatagatcatttgtcttttggagagcttgttccagcaattattaatcctttagatggaactgaaaaaattgctatagatnnnnnnnnnnnnnnnnnnnnnnnnnnnnnnnnnnnnnnnnnnnnnnnnnnnnnnnnnnnnnnnnnnnnnnnnnnnnnnnnnnnnnnnnnnnnnnnnnnnnnnnnnnnnnnnnnnnnnnnnnnnnnnnnnnnnnnnnnnnnnnnnnnnnnnnnnnnnnnnnnnnnnnnnnnnnnnnnnnnnnnnnnnnnnnnnnnnnnnnnnnnnnnnnnnnnnnnnnnnnnnnnnnnnnnnnnnnnnnnnnnnnnnnnnnnnnnnnnnnnnnnnnnnnnnnnnnnnnnnnnnnnnnnnnnnnnnnnnnnnnnnnnnnnnnnnnnnnnnnnnnnnnnnnnnnnnnnnnnnnnnnngttccttttgaggatggccacacagacaaccacttactcttttagaaaataatacacattnnnnnnnnnnnnnnnnnnnnnnnnnnnnnnnnnnnnnnnnnnnnnnnnnnnnnnnnnnnnnnnnnnnnnnnnnnnnnnnnnnnnnnnnnnnnnnnnnnnnnnnnnnnnnnnnnnnnnnnnnnnnnnnnnnnnnnnnnnnnnnnnnnnnnnnnnnnnnnnnnnnnnnnnnnnnnnnnnnnnnnnnnnnnnnnnnnnnnnnnnnnnnnnnnnnnnnnnnnnnnnnnnnnnnnnnnnnnnnnnnnnnnnnnnnnnnnnnnnnnnnnnnnnnnnnnnnnnnnnnnnnnnnnnnnnnnnnnnnnnnnnnnnnnnnnnnnnnnnnnnnnnnnnnnnnnnnnnnnnnnnnnnnnnnnnnnnnnnnnnnnnnnnnnnnnnnnnnnnnnnnnnnnnnnnnnnnnnnnnnnnnnnnnnnnnnnnnnnnnnnnnnnnnnnnnnnnnnnnnnnnnnnnnnnnnnnnnnnnnnnnnnnnnnnnnnnnnnnnnnnnnnnnnnnnnnnnnnnnnnnnnnnnnnnnnnnnnnnnnnnnnnnnnnnnnnnnnnnnnnnnnnnnnnnnnnnnnnnnnnnnnnnnnnnnnnnnnnnnnnnnnnnnnnnnnnnnnnnnnnnnnnnnnnnnnnnnnnnnnnnnnnnnnnnnnnnnnnnnnnnnnnnnnnnnnnnnnnnnnnnnnnnnnnnnnnnnnnnnnnnnnnnnnnnnnnnnnnnnnnnnnnnnnnnnnnnnnnnnnnnnnnnnnnnnnnnnnnnnnnnnnnnnnnnnnnnnnnnnnnnnnnnnnnnnnnnnnnnnnnnnnnnnnnnnnnnnnnnnnnnnnnnnnnnnnnnnnnnnnnnnnnnnnnnnnnnnnnnnnnnnnnnnnnnnnnnnnnnnnnnnnnnnnnnnnnnnnnnnnnnnnnnnnnnnnnnnnnnnnnnnnnnnnnnnnnnnnnnnnnnnnnnnnnnnnnnnnnnnnnnnnnnnnnnnnnnnnnnnnnnnnnnnnnnnnnnnnnnnnnnnnnnnnnnnnnnnnnnnnnnnnnnnnnnnnnnnnnnnnnnnnnnnnnnnnnnnnnnnnnnnnnnnnnnnnnnnnnnnnnnnnnnnnnnnnnnnnnnnnnnnnnnnnnnnnnnnnnnnnnnnnnnnnnnnnnnnnnnnnnnnnnnnnnnnnnnnnnnnnnnnnnnnnnnnnnnnnnnnnnnnnnnnnnnnnnnnnnnnnnnnnnnnnnnnnnnnnnnnnnnnnnnnnnnnnnnnnnnnnnnnnnnnnnnnnnnnnnnnnnnnnnnnnnnnnnnnnnnnnnnnnnnnnnnnnnnnnnnnnnnnnnnnnnnnnnnnnnnnnnnnnnnnnnnnnnnnnnnnnnnnnnnnnnnnnnnnnnnnnnnnnnnnnnnnnnnnnnnnnnnnnnnnnnnnnnnnnnnnnnnnnnnnnnnnnnnnnnnnnnnnnnnnnnnnnnnnnnnnnnnnnnnnnnnnnnnnnnnnnnnnnnnnnnnnnnnnnnnnnnnnnnnnnnnnnnnnnnnnnnnnnnnnnnnnnnnnnnnnnnnnnnnnnnnnnnnnnnnnnnnnnnnnnnnnnnnnnnnnnnnnnnnnnnnnnnnnnnnnnnnnnnnnnnnnnnnnnnnnnnnnnnnnnnnnnnnnnnnnnnnnnnnnnnnnnnnnnnnnnnnnnnnnnnnnnnnnnnnnnnnnnnnnnnnnnnnnnnnnnnnnnnnnnnnnnnnnnnnnnnnnnnnnnnnnnnnnnnnnnnnnnnnnnnnnnnnnnnnnnnnnnnnnnnnnnnnnnnnnnnnnnnnnnnnnnnnnnnnnnnnnnnnnnnnnnnnnnnnnnnnnnnnnnnnnnnnnnnnnnnnnnnnnnnnnnnnnnnnnnnnnnnnnnnnnnnnnnnnnnnnnnnnnnnnnnnnnnnnnnnnnnnnnnnnnnnnnnnnnnnnnnnnnnnnnnnnnnnnnnnnnnnnnnnnnnnnnnnnnnnnnnnnnnnnnnnnnnnnnnnnnnnnnnnnnnnnnnnntatctcctatgaaaggaatttctttaaagcaaaattctgctttgccattgatttccataggctttaaggcttccatctgaaactcctcaaatagagtcagatttttggcagtggaagtattaaaattccaaccagtcctttggatgatgaagtttacctgcatattaggatttgttaggagtttttggcctcaccaagtgtttcttttctattgcagagagcactttactcacctacctattatgcaactttccctatgcctggaggtgcctccagaaaggataccctactttattacccaattcccctttttgttttagtattcatggcgtctatatgtttatattccagactacatatttaaaagtctgagacctcaaattatatgaaatggattttttaatactatgtttgcatacattgacctataaagaagataaatatttaggtgaataattccctgctgcagtatttgtacacttcagactacctcctaggaaaagcttaacttagttttacaaaattccnnnnnnnnnnnnnnnnnnnnnnnnnnnnnnnnnnnnnnnnnnnnnnnnnnnnnnnnnnnnnnnnnnnnnnnnnnnnnnnnnnnnnnnnnnnnnnnnnnnnnnnnnnnnnnnnnnnnnnnnnnnnnnnnnnnnnnnnnnnnnnnnnnnnnnnnnnnnnnnnnnnnnnnnnnnnnnnnnnnnnnnnnnnnnnnnnnnnnnnnnnnnnnnnnnnnnnnnnnnnnnnnnnnnnnnnnnnnnnnnnnnnnnnnnnnnnnnnnnnnnnnnnnnnnnnnagagatggggttttgcactgctgcccaggctgaagtgcagtggcacgatcataactcactgcatccccaaactcctgggttcaagcaatcctcctccctcaatctgctgagtaggtaggactacagccatgcaccaacaacctggctaactctttttcatttatatagatagtgttttgctgtgttgctcaggctggactccaactcccggaccaagtaatcttcccaccttagtctcctgcattgctgggattataggcatgagccactgcacctggcacccaagttacttctagttctcaagttagatgattaatatcacacttttctcacgttttatgatagcattgaattttt

SEQ ID NO: 25408 - DNA, 136 bp, Macaca Mulatta
gacgaactgctggcggcgggcgaggccggcaccttcgacgtggccgtggtggatgcggacaaggagaactgcgctgcctactacgagcgctgcctgcagatgctgcgacccggaggcatcctcaccgtcctcagag

SEQ ID NO: 25409 - DNA, 351 bp, Macaca Mulatta
  misc_feature (1)...(351): n = A,T,C or G
agacagaggagctgaaccgcgaggtggccaccaacagcgagctagtgcagagcggcaagagcgagatctcggagctccggcgcaccatgcaggccttggagatcgagctgcagtcccagctcagcatgngaaagcatccctggagggcagcctggcagagacagagaaccgctactgcgtgcagctgtcccagatccagggactcatcggcagcgtggaggagcagctggcccagcttcgctgcgagatggagcagcagaaccaggagtacaagatcctgctggacgtgaagacgcggctggagcaggagatcgccacctaccgccgcctgctggagggcgaggacgccca

SEQ ID NO: 25410 - DNA, 659 bp, Macaca Mulatta
tacgacagtcctgacacatctggacccgcagaatggcgaagctctgaaaaccacacaacatctccgagagccacccaatggggcgttcagcgctgtgggtgaggccagcatctgcgaggacgactggaactccggggagaggttcaggtgcaccgtgacccacacggaccttccctcgccgctgaagcagaccatctccaggcccaagggggtggccatgcacaggcccgatggctacttgctgccaccagaccgggaacagctgaacctgcgggagtcggccaccatcacctgcctggtgacgggcttctctcccgcggacatcttcgtgcagtggatgcagagggggcagcctttgtccccggagaagtatgtgaccagtgacccaatgcctgagccccaggccccgggccggtacttcgcccacagcatcctgaccgtgtctgaagaggactggaacacgggggagacctacacctgcgtcgtggcccatgaggccctgcccaaagggtcaccgagaggaccgtggacaaagtccaaccgggtaacccaccctgtacaacgtgtccctcgtcatgtccgacacagctggcacctgctactgaccctgctggactgccaacaagggctcagggcggacggacgccctgtgtgtgtga

SEQ ID NO: 25411 - DNA, 173 bp, Macaca Mulatta
  misc_feature (1)...(173): n = A,T,C or G
nagatggtgttatctgaaaaggttagtcagctgatggaatggactaacagaagacctgtaataagaatgaatggagacaagttccgtcgccttgtgaaagccccaccgagaaattactccaatgttgtcatgttcactgctctccaacttcatagacagtgagtggtttgcaa

SEQ ID NO: 25412 - DNA, 495 bp, Macaca Mulatta
  misc_feature (1)...(495): n = A,T,C or G
caatagcatgatgttcaccgacaggctgtaacagggaaaggtcgcacaatcttgtgggatgaggcccagtgaaattagaagctttctctacatcaataacagggaagctgaaaactaaatgacccaccatctcacaaaaggcactgagtactatggtctcataaagtgtttttaaaacattttgataacnnnnnnnnnnnnnnnnnnnngtaacctgtggattatgtgagtttttgcagtgatccagtgattctttccagcaggcccctgcttcccagttctatgagcaactactgctgggccaggccctggctctcgagggctgagtttcagtttaaggccagattaagggggaaaattcatccgaatagacctggacaaggaaaatttggtatctgtagcttttaagggcacatacatccataaccccatgcaattcttatctgaaaatttaaaatcataatttatagaaacgagttaaagtctgtggatttc

SEQ ID NO: 25413 - DNA, 625 bp, Macaca Mulatta
aggggaaaagcctttcaaatgtgaatttgatggctgtgacaggaagtttgccaatagcagtgatcggaagaaacattcccatgtccacaccagtgacaagccctactactgcaagattcgaggctgtgacaaatcctacactcacccaagctccctgaggaagcacatgaagattcactgcaagtccccaccaccttctccaggaccccttggttactcatcagtggggactccagtgggtgcccctttgtcccccgtgctggacccagccaggagtcgctccagcactctgtcccctcaggtgaccaacctcaatgagtggtacgtttgccaggccagtggggcccccagccacctccacaccccttccagcaacggaaccacctctgaatctgaagatgaggaaatttacgggaaccctgaagttgtgcggacgatacattagaatttatgattaataataataagtgaaataataagtcggagtctttggaccacatcctaacctgagacaatgccgagcctgagacaaacccgtgactcagacttgccaccgggtctaattagccctatttattcagtatgaaaccctatggtgtttgtacatttaattaatttaattaag

SEQ ID NO: 25414 - DNA, 8707 bp, Macaca Mulatta
  misc_feature (1)...(8707): n = A,T,C or G
atggcgagcgagaagccgggcccgggcccggtgctcgagcctcagcccgtggggctcattgccgnnnnnnnnnnnnnnnnnnnnnnnnnnnnnnnnnnnnnnnnnnnnnnnnnnnnnnnnnnnatgggggagctaaggggggcgtccggctccggctcggtgatgctccccgcggggatgattaacccttcggtgccgatccgcaacatccggatgaaattcgcagtgttgattggactcatacaggtcggagaggtcagcaacagggacatcgtggagacggtgctcaacctgnnnnnnnnnnnnnnnnnnnnnnnnnnnnnnnnnnnnnnnnnnnnnnnnnnnnnnnnnnnnnnnnnnnnnnnnnnnnnnnnnnnnnnnnnnnnnnnnnnnnnnnnnnnnnnnnnnnnnnnnnnnnnnnnnnnnnnnnnnnnnnnnnnnnnnnnnnnnnnnnnnnnnnnnnnnnnnnnnnnnnnnnnnnnnnnnnnnnnnnnnnnnnnnnnnnnnnnnnnnnnnnnnnnnnnnnnnnnnnnnnnnnnnnnnnnnnnnnnnnnnnnnnnnnnnnnnnnnnnnnnnnnnnnnnnnnnnnnnnnnnnnnnnnnnnnnnnnnnnnnnnnnnnnnnnnnnnnnnnnnnnnnnnnnnnnnnnnnnnnnnnnnnnnnnnnnnnnnnnnnnnnnnnnnnnnnnnnnnnnnnnnnnnnnnnnnnnnnnnnnnnnnnnnnggcaattgccttgcctcctattgcaaagtggccttatcagaatggcttcaccttaaacacttggtttcgtatggatccattaaataacattaatgttgacaaggataaaccttatctttattgnnnnnnnnnnnnnnnnnnnnnnnnnnnnnnnnnnnnnnnnnnnnnnnnnnnnnnnnnnnnnnnnnnnnnnnnnnnnnnnnnnnnnnnnnnnnnnnnnnnnnnnnnnnnnnnnnnnnnnnnnnnnnnnnnnnnnnnnnnnnnnnnnnnnnnnnnnnnnnnnnnnnnnnnnnnnnnnnnnnnnnnnnnnnnnnnnnnnnnnnnnnnnnnnnnnnnnnnnnnnnnnnnnnnnnnnnnnnnnnnnnnnnnnnnnnnnnnnnnnnnnnnnnnnnnnnnnnnnnnnnnnnnnnnnnnnnnnnnnnnnnnnnnnnnnnnnnnnnnnnnnnnnnnnnnnnnnnnnnnnnnnnnnnnnnnnnnnnnnnnnnnnnnnnnnnnnnnnnnnnnnnnnnnnnnnnnnnnnnnnnnnnnnnnnnnnnnnnnnnnnnnnnnnnnnnnnnnnnnnnnnnnnnnnnnnnnnnnnnnnnnnnnnnnnnnnnnnnnnnnnnnnnnnnnnnnnnnnnnnnnnnnnnnnnnnnnnnnnnnnnnnnnnnnnnnnnnnnnnnnnnnnnnnnnnnnnnnnnnnnnnnnnnnnnnnnnnnnnnnnnnnnnnnnnnnnnnnnnnnnnnnnnnnnnnnnnnnnnnnnnnnnnnnnnnnnnnnnnnnnnnnnnnnnnnnnnnnnnnnnnnnnnnnnnnnnnnnnnnnnnnnnnnnnnnnnnnnnnnnnnnnnnnnnnnnnnnnnnnnnnnnnnnnnnnnnnnnnnnnnnnnnnnnnnnnnnnnnnnnnnnnnnnnnnnnnnnnnnnnnnnnnnnnnnnnnnnnnnnnnnnnnnnnnnnnnnnnnnnnnnnnnnnnnnnnnnnnnnnnnnnnnnnnnnnnnnnnnnnnnnnnnnnnnnnnnnnnnnnnnnnnnnnnnnnnnnnnnnnnnnnnnnnnnnnnnnnnnnnnnnnnnnnnnnnnnnnnnnnnnnnnnnnnnnnnnnnnnnnnnnnnnnnnnnnnnnnnnnnnnnnnnnnaggttcaactttccctatacacatatttgtctgctgaatttattggaactgctaccatctacaccaccatacgcagagtaggaacagtgttacagctaatgcacaccttaaaatattactactgggttattaatcctgctgacagtagtggcattacacctaaaggattagnnnnnnnnnnnnnnnnnnnnnnnnnnnnnnnnnnnnnnnnnnnnnnnnnnnnnnnnnnnnnnnnnnnnnnnnnnnnnnnnnnnnnnnnnnnnnnnnnnnnnnnnnnnnnnnnnnnnnnnnnnnnnnnnnnnnnnnnnnnnnnnnnnnnnnnnnnnnnnnnnnnnnnnnnnnnnnnnnnnnnnnnnnnnnnnnnnnnnnnnnnnnnnnnnnnnnnnnnnnnnnnnnnnnnnnnnnnnnnnnnnnnnnnnnnnnnnnnnnnnnnnnnnnnnnnnnnnnnnnnnnnnnnnnnnnnnnnnnnnnnnnnnnnnnnnnnnnnnnnnnnnnnnnnnnnnnnnnnnnnnnnnnnnnnnnnnnnnnnnnnnnnnnnnnnnnnnnnnnnnnnnnnnnnnnnnnnnnnnnnnnnnnnnnnnnnnnnnnnnnnnnnnnnnnnnnnnnnnnnnnnnnnnnnnnnnnnnnnnnnnnnnnnnnnnnnnnnnnnnnnnnnnnnnnnnnnnnnnnnnnnnnnnnnnnnnnnnnnnnnnnnnnnnnnnnnnnnnnnnnnnnnnnnnnnnnnnnnnnnnnnnnnnnnnnnnnnnnnnnnnnnnnnnnnnnnnnnnnnnnnnnnnnnnnnnnnnnnnnnnnnnnnnnnnnnnnnnnnnnnnnnnnnaagatgcttattgcagtgttcagtgtggcaggattggatgttttctcttggctatatcaatcctaaaaattctgaggaacagaagattactgaaatggtctacaatatcttccggattcttttgtatcatgcaataaaatacgaatggggaggctggagagtctgggtggatacgctgtcaatagcccattccaaggtnnnnnnnnnnnnnnnnnnnnnnnnnnnnnnnnnnnnnnnnnnnnnnnnnnnnnnnnnnnnnnnnnnnnnnnnnnnnnnnnnnnnnnnnnnnnnnnnnnnnnnnnnnnnnnnnnnnnnnnnnnnnnnnnnnnnnnnnnnnnnnnnnnnnnnnnnnnnnnnnnnnnnnnnnnnnnnnnnnnnnnnnnnnnnnnnnnnnnnnnnnnnnnnnnnnnnnnnnnnnnnnnnnnnnnnnnnnnnnnnnnnnnnnnnnnnnnnnnnnnnnnnnnnnnnnnnnnnnnnnnnnnnnnnnnnnnnnnnnnnnnnnnnnnnnnnnnnnnnnnnnnnnnnnnnnnnnnnnnnnnnnnnnnnnnnnnnnnnnnnnnnnnnnnnnnnnnnnnnnnnnnnnnnnnnnnnnnnnnnnnnnnnnnnnnnnnnnnnnnnnnnnnnnnnnnnnnnnnnnnnnnnnnnnnnnnnnnnnnnnnnnnnnnnnnnnnnnnnnnnnnnnnnnnnnnnnnnnnnnnnnnnnnnnnnnnnnnnnnnnnnnnnnnnnnnnnnnnnnnnnnnnnnnnnnnnnnnnnnnnnnnnnnnnnnnnnnnnnnnnnnnnnnnnnnnnnnnnnnnnnnnnnnnnnnnnnnnnnnnnnnnnnnnnnnnnnnnnnnnnnnnnnnnnnnnnnnnnnnnnnnnnnnnnnnnnnnnnnnnnnnnnnnnnnnnnnnnnnnnnnnnnnnnnnnnnnnnnnnnnnnnnnnnnnnnnnnnnnnnnnnnnnnnnnnnnnnnnnnnnnnnnnnnnnnnnnnnnnnnnnnnnnnnnnnnnnnnnnnnnnnnnnnnnnnnnnnnnnnnnnnnnnnnnnnnnnnnnnnnnnnnnnnnnnnnnnnnnnnnnnnnnnnnnnnnnnnnnnnnnnnnnnnnnnnnnnnnnnnnnnnnnnnnnnnnnnnnnnnnnnnnnnnnnnnnnnnnnnnnnnnnnnnnnnnnnnnnnnnnnnnnnnnnnnnnnnnnnnnnnnnnnnnnnnnnnnnnnnnnnnnnnnnnnnnnnnnnnnnnnnnnnnnnnnnnnnnnnnnnnnnnnnnnnnnnnnnnnnnnnnnnnnnnnnnnnnnnnnnnnnnnnnnnnnnnnnnnnnnnnnnnnnnnnnnnnnnnnnnnnnnnnnnnnnnnnnnnnnnnnnnnnnnnnnnnnnnnnnnnnnnnnnnnnnnnnnnnnnnnnnnnnnnnnnnnnnnnnnnnnnnnnnnnnnnnnnnnnnnnnnnnnnnnnnnnnnnnnnnnnnnnnnnnnnnnnnnnnnnnnnnnnnnnnnnnnnnnnnnnnnnnnnnnnnnnnnnnnnnnnnnnnnnnnnnnnnnnnnnnnnnnnnnnnnnnnnnnnnnnnnnnnnnnnnnnnnnnnnnnnnnnnnnnnnnnnnnnnnnnnnnnnnnnnnnnnnnnnnnnnnnnnnnnnnnnnnnnnnnnnnnnnnnnnnnnnnnnnnnnnnnnnnnnnnnnnnnnnnnnnnnnnnnnnnnnnnnnnnnnnnnnnnnnnnnnnnnnnnnnnnnnnnnnnnnnnnnnnnnnnnnnnnnnnnnnnnnnnnnnnnnnnnnnnnnnnnnnnnnnnnnnnnnnnnnnnnnnnnnnnnnnnnnnnnnnnnnnnnnnnnnnnnnnnnnnnnnnnnnnnnnnnnnnnnnnnnnnnnnnnnnnnnnnnnnnnnnnnnnnnnnnnnnnnnnnnnnnnnnnnnnnnnnnnnnnnnnnnnnnnnnnnnnnnnnnnnnnnnnnnnnnnnnnnnnnnnnnnnnnaggatcctgatagacttcttcaggatgttgatatcaatcgccttcgtgctgttgtctttcgggatgtggnggatgatagcaaacgggcacagttcttagctctggctgttgtttacttcatttcggttctgatggtttccaagtatcgtgacatattagaaccccagagagagactacaagaactggaagccaaccaggtagaaacatcagacaagaaataaattcaccaacaagtacagnnnnnnnnnnnnnnnnnnnnnnnnnnnnnnnnnnnnnnnnnnnnnnnnnnnnnnnnnnnnnnnnnnnnnnnnnnnnnnnnnnnnnnnnnnnnnnnnnnnnnnnnnnnnnnnnnnnnnnnnnnnnnnnnnnnnnnnnnnnnnnnnnnnnnnnnnnnnnnnnnnnnnnnnnnnnnnnnnnnnnnnnnnnnnnnnnnnnaattggagaggagcaagtggctagcattctgaatggggcagaattagaaacaagtacaggccctgatgccatgagtgaactcttatccactttgtcatctgaagtgaagaaatcacaagagagcttaactgaaaatcccagtgaaacgttgaagcctgcaccatccatatctagcattagtcaaaccaaaggcatcaatgtcaaggaaatactgaaaagtcttgtggctgctccagttgaaattgcagaatgtggccctgaacctatcccatacccagatccagcattgaagagagaagcgcaagctattcttcctatgcagtttcattcctttgacaggnnnnnnnnnnnnnnnnnnnnnnnnnnnnnnnnnnnnnnnnnnnnnnnnnnnnnnnnnnnnnnnnnnnnnnnnnnnnnnnnnnnnnnnnnnnnnnnnnnnnnnnnnnnnnnnnnnnnnnnnnnnnnnnnnnnnnnnnnnnnnnnnnnnnnnnnnnnnnnnnnnnnnnnnnnnnnnnnnnnnnnnnnnnnnnnnnnnnnnnnnnnnnnnnnnnnnnnnnnnnnnnnnnnnnnnnnnnnnnnnnnnnnnnnnnnnnnnnnnnnnnnnnnnnnnnnnnnnnnnagcatcactgcaaaacttgaaagagctttagaaaaagttgctcctcttcttcgtgaaatttttgtagactttgccccattcctatctcgtacacttcttggcagtcatggacaagagctattgatagaaggnnnnnnnnnnnnnnnnnnnnnnnnnnnnnnnnnnnnnnnnnnnnnnnnnnnnnnnnnnnnnnnagattactgtgccatgctatgaaggaccatatagttcgtgttgcaaatgaagctgagtttattttgaacagacagagagccgaagatgtacataaacatgcagagtttgagnagtcacagtgtgcccaggtatgctgctgataagaagagaggaagaaaagatgtgtgaccatctgatcagtgctgcaaaaacatcgagaccatgtaacagcaaatcagctgaaacagaagattctcaatattctcacaaataaacatggtgcttggggagcagtttctcatagntagccaattgcatgatttctggcgtttggattactgggaagatgatcttcgtcgaaggagacgatttgttcgcaatgcatttggctccactcatgctgaggcattgctcaaagctgcaatagaatatggnnnnnnnnnnnnnnnnnnnnnnnnnnnnnnnnnnnnnnnnnnnnnnnnnnnnnnnnnnnnnnnnnnnnnnnnnnnnnnnnnnnnnnnnnnnnnnnnnnnnnnnnnnnnnnnnnnnnnnnnnnnnnnnnnnnnnnnnnnnnnnnnnnnnnnnnnnnnnnnnnnnnnnnnnnnnnnnnnnnnnnnnnnnnnnnnnnnnnnnnnnnnnnnnnnnnnnnnnnnnnnnnnnnnnnnnnnnnnnnnnnnnnnnnnnnnnnnnnnnnnnnnnnnnnnnnnnnnnnnngttcttgcatacactgagggacttcacggaaaatggannnnnnnnnnnnnnnnnnnnnnnnnnnnnnnnnnnnnnnnnnnnnnnnnnnnnnnnnnnnnnnnnnnnnnnnnnnnnnnnncctcagttatgtttaatttccctgatcaagcaacagtaaaaaaagttgtctatagcttgcctcgggttggagtagggaccagctatggtttgccacaagccaggnnnnnnnnnnnnnnnnnnnnnnnnnnnnnnnnnnnnnnnnnnnnnnnnnnnnnnnnnnnnnnnnnnnnnnnnnnnnnnnnnnnnnnnnnnnnnnnnnnnnnnnnnnnnnnnnnnnnnnnnnnnnnnnnnnnnnnnnnnnnnnnnnnnnnnnnnnnnnnnnnnnnnnnnnnnnnnnnnnnnnnnnnnnnnnnnnnnnnnnnnnnnnnnnnnnnnnnnnnnnnnnnnnnnnnnnnnnnnnnnnnnnnnnnnnnnnnnnnnnnnnnnnnnnnnnnnnnnnnnnnnnnnnnnnnnnnnnnnnnnnnnnnnnnnnnnnnnnnnnnnnnnnnnnnnnnnnnnnnnnnnnnnnnnnnnnnnnnnnnnnnnnnnnnngaacctttcacaaccttcttcctcaatgcaaatgatggaaaatttgatcatccagatcgaaccttctcgtccgttgcaaggtcttggagaactagtcagagagatacttctgatgtaaaggnaggaactaattccagagttctactacctaccagagatgtttgtcaacagtaatggatataatcttggagtcagagaagatgaagtagtggtaaatgatgtagatcttcccccttgggcaaaaaaacctgaagactttgtgcggatcaacaggatggnnnnnnnnnnnnnnnnnnnnnnnnnnnnnnnnnnnnnnnnnnnnnnnnnnnnnnnnnnnnnnnnnnnnnnnnnnnnnnnnnnnnnnnnnnnnnnnnnnnnnnnnnnnnnnnnnnnnnnnnnnnnnnnnnnnnnnnnnnnnnnnnnnnnnnnnnnnnnnnnnnnnnaggccatggaggcacagatacagaactttggacagacgccatctcagttgcttattgagccacatccgcctcggagctctgccatgcacctgnnnnnnnnnnnnnnnnnnnnnnnnnnnnnnnnnnnnnnnnnnnnnnnnnnnnnnnnnnnnnnnnnnnnnnnnnnnnnnnnnnnnnnnnnnnnnnnnnnnnnnnnnnnnnnnnnnnnnnnnnnnnnnnnnnnnnnnnnnnnnnnnnnnnnnnnnnnnnnnnnnnnnnnnnnnnnnnnnnnnnnnnnnnnnnnnnnnnnnnnnnnnnnnnnnnnnnnnnnnnnnnnnnnnnnnnnnnnnnnnnnnnnnnnnnnnnnnnnnnnnnnnnnnnnnnnnnnnnnnnnnnnnnnnnnnnnnnnnnnnnnnnnnnnnnnnnnnnnnnnnnnnnnnnnnnnncattgttttgtggtccagcagataatcgctatattcttatctgtggattctgggataagagcttcagagtttattctacagaaacaggncagggaaattgactcagattgtatttggccattgggatgtggtcacatgcttggccaggtctgagtcatacattggtggagactgctacatcgtgtccggatctcgagatgccaccctgctgctctggtactggagtgggcggcaccatatcataggagacaaccctaacagcagtgangtgactatcctgcaccaagagccgtcctcacaggccatgaccatgaggttgtctgttgttctgtctgtgcagaacttgggcttgttatcagcggtgctaaagnnnnnnnnnnnnnnnnnnnnnnnnnnnnnnnnnnnnnnnnnnnnnnnnnnnnnnnnnnnnnnnnnnnnnnnnnnnnnnnnnnnnnnnnnnnnnnnnnnnnnnnnnnnnnnnnnnnnnnnnnnnnnnnnnnnnnnnnnnnnnnnnnnnnnnnnnnnnnnnnnnnnnnnnnnnnnnnnnnnnnnnnnnnnnnnnnnnnggccattctcctgagcagtgatggccagaacctggtcaccggaggggacaatggggtagtagaggtctggcaggcctgtgacttcaagcaactgtacatttaccctggatgtgatgctggcattagagcaatggacttgtcccatgaccagagg

SEQ ID NO: 25415 - DNA, 788 bp, Macaca Mulatta
  misc_feature (1)...(788): n = A,T,C or G
gggaagacaaagagaaaagagaaggcgcgaatcatgaatgaggaagatcctgagaaacagcgcaggctggaggaagctgcattgaggcgtgagcaaaagaagttggaaaagaagcaaatgaaaatgaaacaaatcaaagtgaaagccatgtaaagccatcccagagatttgagttctgatgccacctgtaagctctgaattcataggaaacatgaaaaacgctagtccatttctcaaccttaaatttcagacagttttgggcaactgagaaatccttatttcatcatctactctgtttggggtttggagttttacagaggttgtagataaccttgaaagggctctgtttcaagaatttgttttccagataatcacattattttgattattttataaaaggaatgatctatgaaatgtgtgtttttaagtattttaaaaattataatacgaatcatcagtgcttttagtacttaagcgtttgaagaaataccatgaaatttataggtagataaccagattgttgctttttgtttaaccaagcagttgaaatggctataaagactgactctaaaacaagattctgcaaataatgattggaattgcacaataaacattgcctgaaggtttcttggatgtctacattaaacttgagaaaaagnnnnnnnnnnnnnnnnnnnnnnnnnnnnnnnnnnnnnnnnnnnntttttgggccggcctggggcccccttgtggggttcccagaggcctccctaaagaacttttgaaccccatttggtttgggggacccg

SEQ ID NO: 25416 - DNA, 737 bp, Macaca Mulatta
gggagagtggataataacttcccctcttttttccacttctcctttcctactcccaaccaagagctgggatgtttgtgtctaagttctttgggggctatgtgcctgagatggtgctcacccctgatgatcagcgcctgctggcccatgtcaccctggagctccagcactatcaccagctgcttgagaaggttcggatccgggatgccttgcgcagtatcctcaccatatctcgacatggcaaccaatacattcaggtgaatgagccctggaagcggattaaaggcagtgaggctgacaggcaacgggcaggcacagtgactggcttggcagtgaatatagctgccttgctctctgtcatgcttcagccttacatgcccacggttagtgccacaatccaggcccagctgcagctcccacctccagcctgcagtatcctgctaacaaacttcctgtgtaccttaccagcaggacaccagattggcacagtcagtcccttgttccaaaaattggaaaatgaccacattgaaagtttaaggcagcgctttggaggggggccaggtgagaaaagctaaaagctgtgccctcgctccacaacagccacagcatcccttcctttatttcccctaagtagtcctcacccctcactctttccttctttttggccctgcctgctttcctcaattaagtttttcctttcccggtcttagcctaaaaaagaaccttccaacttaaagggc

SEQ ID NO: 25417 - DNA, 110 bp, Macaca Mulatta
agatataaaaccagctaatgtgttcattacagccactggggtggtaaaacttggagatcttgggcttggccggtttttcagctcaaaaaccacagctgcacattctttag

SEQ ID NO: 25418 - DNA, 378 bp, Macaca Mulatta
  misc_feature (1)...(378): n = A,T,C or G
agcttaatggaccagacaaataggatgatggctgcccccacacaataaatggtgacataggagacatccacatcccaattctgacgagacctcatnnnnnnnnnnnnnnnnnnnggtgaaaccagaatatgtgaactgagtggacaccagaggctgccactggaacgtcttctcaggccgtgagctgtgctgcgctgactggtagggctgtttacgttcagggccaccccgtcacatatacaaaggagctgcctgcctgcctgtttgctgtgttgaactcttcactctgctgaagctcttagtggaaaaagctttcttctgtgaccctcttgaactgaacagactgactggaatcccagaccgagatgctttctgtgc

SEQ ID NO: 25419 - DNA, 170 bp, Macaca Mulatta
agcgccagagagcaaagagctccattgctggtggcaagacttatgttccgtgtttgcaacgaatgataagctggaagtcctgactttgaccaacagtgctttggggcctccctttttgaaggctcttgctgccgcactgaagcaccctcagtgtaaactgcaaaagctac

SEQ ID NO: 25420 - DNA, 665 bp, Macaca Mulatta
  misc_feature (1)...(665): n = A,T,C or G
cgtgctgggaagtggagtgatgtcctcctctccagtgctcctctgggctcttgagtcgctgcttgaattgccccatagacgtttgcttggagagtccacgtgttatttgacggaggtaggtttcaacccagagtgttaacgtcaagcatgctactttagtcactcacagatgacttttctttaataaaatcccttttccnnnnnnnnnnnnnnnnnnnnnnnnnnnnnnnnnnnnnnnnnnnnnnnnnnnnnnnnnnnnnnnnnnnnnnnnnnnnnnnnnnnnnnnnnnnnnnnnnnnnnnnnnnnnnnnnnnnnnnnnnnnnnnnnnnnnnnnnnnnnnnnnnnnnnnnnnnnnnnnnnnnnnnnnnnnnnnnnnnnnnnnnnnnnnnnnnnnnnnnnnnnnnnnnnnnnnnnnnnnnnnnnnnnnnnnnnnnnnnnnnnnnnnnnnnnnnnnnnnnnnnnnnnnnnnnnnnnnnnnnnnnnnnnnnnnnnnnnnnnnnnnnnnnnnnnnnnnnnnnnnnnnnnnnnnnnnnnnnnnnnnnnnnnnnnnnnnnnnnnnnnnnnnnnnnnnnnnnnnnnnnnnnnnnnnnnnnnnnnnnnnnnnnnnnnnnnnnnnnnnnnnnnnnnnnnnnnnnnnnnnnnnnnnnnnnnnnnnnnnnnnnnnn

SEQ ID NO: 25421 - DNA, 1104 bp, Macaca Mulatta
  misc_feature (1)...(1104): n = A,T,C or G
atgatgtagaaataaataaaattatatccacaactgcatcaaagacagaaacaccaatagtgtctaagtctctgagttcttctttggatgacactgaagttaagaaggttatggaagaatgtaagaggctgcaaggtgaagttcagaggctacgggaggagaacaagcagttcaaggnnnnnnnnnnnnnnnnnnnnnnnnnnnnnnnnnnnnnnnnnnnnnnnnnnnnnnnnnnnnnnnnnnnnnnnnnnnnnnnnnnnnnnnnnnnnnnnnnnnnnnnnnnnnnnnnnnnnnnnnnnnnnnnnnnnnnnnnnnnnnnnnnnnnnnnnnnnnnnnnnnnnnnnnnnnnnnnnnnnnnnnnnnnnnnnnnnnnnnnnnnnnnnnnnnnnnnnnnnnnnnnnnnnnnnnnnnnnnnnnnnnnnnnnnnnnnnnnnnnnnnnnnnnnnnnnnnnnnnnnnnnnnnnnnnnnnnnnnnnnnnnnnnnnnnnnnnnnnnnnnnnnnnnnnnnnnnnnnnnnnnnnnnnnnnnnnnnnnnnnnnnnnnnnnnnnnnnnnnnnnnnnnnnnnnnnnnnnnnnnnnnnnnnnnnnnnnnnnnnnnnnnnnnnnnnnnnnnnnnnnnnnnnnnnnnnnnnnnnnnnnnnnnnnnnnnnnnnnnnnnnnnnnnnnnnnnnnnnnnnnnnnnnnnnnnnnnnnnnnnnnnnnnnnnnnnnnntggggaactggagcccagcgtggtggggagtgaggtcatctccacacagtagtccccacgtggcccactcccggcccaggctgctttccatgtcttcagttctgtccaagccatcagctccttgggactgatgaacagagtcagaagcccaaaggaattgcactgtggcagcatcagacgtactcgtcataagtgagaggcgtgtgttgactgattgacccagcgctttggaaataaatggcagtgctttgttctcttaaagggaccaagctaaatttttattggttcatgtagtgaagttgaactgttattcagagatgtttaatgcatatttaacttatttaatgtatttcatctcatgttttcttattgtcacaagagtacagttaatg

SEQ ID NO: 25422 - DNA, 1357 bp, Macaca Mulatta
  misc_feature (1)...(1357): n = A,T,C or G
gagccaaagatgtttgtcttgctctatgtcacaagttttgccatttgtgccagtggacaaccccggggtaatcagttgaaaggagagaactactcccccaggtatatctgcagcattcctggcttgcctggacctccagggtcccctggagcaaatggttcccctggtccccatggtcgcatcggccttccaggaagagatggtagagacggcaggaaaggagagaaaggtgaaaagggaactgcaggtnnnnnnnnnnnnnnnnnnnnnnnnnnnnnnnnnnnnnnnnnnnnnnnnnnnnnnnnnnnnnnnnnnnnnnnnnnnnnnnnnnnnnnnnnnnnnnnnnnnnnnnnnnnnnnnnnnnnnnnnnnnnnnnnnnnnnnnnnnnnnnnnnnnnnnnnnnnnnnnnnnnnnnnnnnnnnnnnnnnnnnnnnnnnnnnnnnnnnnnnnnnnnnnnnnnnnnnnnnnnnnnnnnnnnnnnnnnnnnnnnnnnnnnnnnnnnnnnnnnnnnnnnnnnnnnnnnnnnnnnnnnnnnnnnnnnnnnnnnnnnnnnnnnnnnnnnnnnnnnnnnnnnnnnnnnnnnnnnnnnnnnnnnnnnnnnnnnnnnnnnnnnnnnnnnnnnnnnnnnnnnnnnnnnnnnnnnnnnnnnnnnnnnnnnnnnnnnnnnnnttcgatgccaacacaggaaaccatgatgtggcttcggggtctacagtcatctatctgcagccagaagatgaagtctggctggagatcttcttcacagaccagaatggcctcttctcagacccaggttgggcagacagcttattctccgggttcctcttatacgttgacacggattatctagattccatatcagaagatgacgaattgtgatcaggaccaagatccctgtggtagacactctgattgaatctggggttccagaaggtggaacaagtaggaatgggatccaaagagactcccactcagattctaaagcctttaaagacaattccagcagaatttatcaaaacaagatgaaacacagaaaaattgaaaccacaacaaaatgaattctattaaagaatagccccagatataaattcttttgaaagcaatgttcataaatatttaagcaaattaaagacaatattaacaaattttctattaaatgccctgagtgacaaaaccagttggcaataatattgcctcattaaatcttcaaaaatatattttagtctgttatttaagagaaacataacataacatcccaaaatctttgacaattctcgaaaggctatatagtaagtcaaaaaccaaaggtaagagataataactatttttcaagcaagctacagagaaatgagaaatg

SEQ ID NO: 25423 - DNA, 826 bp, Macaca Mulatta
cctgagtgtgggaggccagataaaggcaggtacctgagatgtggggaccaggtaagagcaggtacccgacatgtagggggccacgtaggagtgagtacctgagtatggcttcttcccaagaagtcccaagccccgggggagtcccatggaccacccagggagaacctggaggatgactgttgatcctctctttcctgctgctggtcacgcactcccaaatgctactgttttagcaaagactcctgtggttccaggctcttgggagaatgagcagtgaggcaggacacgggcatccctgtctctccctgttgctacagatgctgcctatgaagcccctaatttgcagggtatttgtcctgtcgctagtagctagattggtttgcttttacaatgtgcaaagggaaacaatgccattccttaatgtttctctgaagttccagattttccagctgctccacttcaacgtgatgttcagtctcccgtttagttgactcatttcctatgtacaattgttttttctcccacagaagatggaagaatgaggctcacctgatgctcgttgccatgggacacctcagagagagtggagggaaaatgtgtgagaaataaattctcctaaatacttggattcccggctctgctgtgtttattatcatggtccattcctcttccatgaagctgtatttagattcttgctgctctattgtaaatattaaataagggatgtgaaagtggaggatctttgctccaagtagaacacatggaaattcaaaccatggccaggtaaataactagcttccacaaatatttaaaaataaagacccta

SEQ ID NO: 25424 - DNA, 735 bp, Macaca Mulatta
aaaacgggcaattcactgccacctgcaccacgaacaataatcccaactcttgtgtcaacatcaaaaagatattcaccgatgtttaatatatgatacaagtgacatgctgtgctccgtattgtgtggaacatgcccccttggtctgcctatgcccttgttttatacatttccagaccattcatcaaggaaaggacctgaagaagtggaaagcacacttcattctccctctccctactgcttcatactgaaacaggtgcctgttttgcaagtgggctgcattctctcagctctccttttcccccttaccctctctctcttaacattgtaaacaacaaacttacattaaactgcatttctagtacacgccctattttaaaaagagcagtacatcctgggaggaaatgaaactaaacagttagaataactgtttaacctcagaattttaaaggcagttgtttctttcctaagtacatcaattcgcagtaaatgatgcttcagtttgatggacctttcaatgttatttcctgaatatgaatttcggttgcctaccctgtagatatgtggatgaagagtctaactagataatgacttgtaaacccaccgtgagttatttggtttttgactgaaattcctatttgaatcccccttcccggaatttaagggtctctacaactttgaataaagggaaggcccaagatgtctgaatctgactaattagttattccttcgggctgc

SEQ ID NO: 25425 - DNA, 150 bp, Macaca Mulatta
tttctcatctccatggcggtaggtgctgacagcttcagaagggtactaacagggccaagagaaaagggcccgtgagatgctcagctacgatgctcttacaagatgaaaaggacatggggttcagatctgcacttcatcatctttcactaa

SEQ ID NO: 25426 - DNA, 161 bp, Macaca Mulatta
atgaatcctagacacttctgtgagaaagcagggattgcatagttatgtacacggtcaattaaattttaacattaaagatgatttagatttcagttcgcctctgtggatctgtatcagttccaaaaatgtagaaagcacgggcatagaaaagtacatttttc

SEQ ID NO: 25427 - DNA, 767 bp, Macaca Mulatta
ggaccataagtataattttaagaatgaaaatgtttacagtattttcagttttattataaaaatgcacatacaacaaagattgtcattaagtcatttcttggctctgcttgcattcagcacttgttcttgagcagctttctttgcttttaccatctcgacaagttcctaggaagggagaaaggaagttgtcagaatttaaaaacagacattttaatctagtgtttggtataaagaattcaaacaactaagacagtactaagtataccgatttcactgcctgccagggcctagaaagtttctaaggttgctcatttattcctaataatattggccccataactactggtgttgaaataagcactatattattaactacttaatagacataaaatgtgagctatatataacccacgttaaatttaaaatacaacaatctataaactcttaagtctgcaaccttatatcgtttcatgcagtccttctttgtcctgccaggcactgcttctgctattttttcccatctttcaggtgtatttactgggtatgttttcaaagcttgttccaaaagcttctgttcttctgttgtccaaggggtgaagtccgtatatggacctgtttaagaaaaatttttatttgaaaactgtcttgttcagaacatgttcccagacatgtcttgtggtccacaagtgtccgctaagtgcccatttcagtctggggatgtgtcatttttgaaaataaacttgtagagatgaagagatacattatat

SEQ ID NO: 25428 - DNA, 464 bp, Macaca Mulatta
acttgtagtttatttaaaccccatgtcatgaggaggtactagttccaatctacaaactccttaatttgctctaatagataggtatggtttaatctttccattgtgtcttttcatttaattttcctgaagcttgcaggatagattgaaatattataggtttgtttggagtaaccaaacagtgtgctaattaagaaaaagtcagagaacctagaaaacatccagtggattacggaatttcttccccagattcactcctcacttttacagttttcccacaatcctctacttcagtgagatgctgtgtttcgtgattaaacaaaaatatagagctgtgcgatttgattttggcttccacaaccaacatctgaatccattccaaatgaaattttagatataacaaaggcttgtcctaatcatactgaaatattggtgcacacccctctgcactggatttaactttttta

SEQ ID NO: 25429 - DNA, 402 bp, Macaca Mulatta
  misc_feature (1)...(402): n = A,T,C or G
taaggtggaatacctttgagaaaagcattagtttgtaatcatagcctacgacaaggaaactgtgctgactagttctagttagctntaagataaggataggttaggttttcaatttaatgataaaacacactgctttcttaactctgttactacctatttagtgtttgttttcctcttactgtgaaagtagcatgctgattatagggatatataaaaaagatcaaaagcactcaattctgttgactaacgatatcctcaacactttggtgtataccatatattttttaaataggcagattacattgtaaataaaaccctacctcttactgtcttaacatattttatggtttgttaataagttagcatttattgagtatataggattgtatatatatgttagtc

SEQ ID NO: 25430 - DNA, 294 bp, Macaca Mulatta
  misc_feature (1)...(294): n = A,T,C or G
ggcggaggcgacaggatcgaggggccttggtaggtgggcaagtcgggaaacccagaaagaagcgtgacccggaagcggaagcgggtgcccgtcccagctccggnnnnnnnnnnnnnnnnnnnnnnnnnnnnnnnnnnnnnnnnnnnnnnnnnnnnnnnnnnnnnnnnnnnnnnnnnnnnnnnnnnnnnnnnnnnnnnnnnnnnnnnnnnnnnnnnncgcgagcgacagaaactagagacccaggagaagaaaatcattgcagacattaagaagatggccaagcaaggccagatg

SEQ ID NO: 25431 - DNA, 874 bp, Macaca Mulatta
ggggattccagcggcggacagcacccgggccgagatgtctccctcagtggccttagccgtgctggcgctactctctctttctggcctggaggctatccagcgtactccaaagattcaggtttactcacgccatccaccagagaatggaaagccaaatttcctgaattgctatgtgtctggatttcatccatctgatattgaagttgacttactgaagaatggagagaaaatgggaaaagtggagcattcagacttgtctttcagcaaagactggtctttctatctcttgtactacactgaattcacccccaatgaaaaagatgagtatgcctgccgtgtgaaccatgtgactttgtcagggcccaggacagttaagtgggatcgagacatgtaagcagcatcatggaggtttgaagatgccgcatttggattggatgaattccaaattctgcttccttgctttttaatattgatatgcttatacagtttatgcgaaaaatgcagagttataataatgttaacacaggcgtgatcttctttataattctactttgagtgctatctccacgttttgaggtatctggggcagctagcttttaggagggctggccaactttaaggtgggggaggaaagaaattctctcttgtccaaaagtggaccagtctgtgggcggaaacgtgagccctctttcaattcgtcttggccgctctcaaaccttgtatcaacaaaggttattgcgctatattaaactgtaacgcttcccagtttaccattacgcggtgcccttccgaagaattcgtggagggaaaaaacctctcgacatatacatatttcggagtggcgggggttcctgcgcaaaacgttttgtttata

SEQ ID NO: 25432 - DNA, 590 bp, Macaca Mulatta
aaatccaggctgcggattttgtttagaagagtgtttctacaaagccccagtgttagaactggtcatgggtttttaagcggccgagtcgttggcccttaagcacgttatggatggcttccatgtaaatcagggcttaggtgacttcccgccgacctttaggggtgagcgtcacgcgtcagagggcggttcgtgcgtgtgcagggcctgctaagtcgcaggaaatgggaggacgccgctacctgcaagcccgaaagcgctgaatgcagccctagtgtggcgcgttgtagtcttactgggtactattttaattcattgctgacgtcctgagtgagaggtgaccaagctcagacgctgagagtaaggcggctgggcgaaactcgcggcaccctgccccttccggtagccagctgcgtaaagttgcctacgccgagcgggtggcgtcctgctcggccacctggcggcgggcgtggagttggcaggcaggcagtggaggtcacgccggcatggaaagccagatctccacctgcgggtcgccaagttgccgggagtcctccgctccgggcagtgtcattcctatcacaaatgacccg

SEQ ID NO: 25433 - DNA, 514 bp, Macaca Mulatta
  misc_feature (1)...(514): n = A,T,C or G
ccnnnnnnnnnnnnnnnnnnnngacaaggtattttttttttctggagtcgatgttcgggcccacaaaaaaaatctatatttttatattggggggagggagtagaaaagcaagcccctatactgggccctattcagtggcagcttcttgttccataggattaaggaagactttgaggaaataaaagttgtttggaaaaatccaggtgtagttgctttgtatgttgtgatgggtagaagggatgaagtgaagtgtgaaggcccctcataccctccatcttgcctcagactatgtcctggaaccctggggcggagaaagcgccactttcattcctgcttcttgggattgttgacggccacgtagtgatagagaacaacaagcaagaagagcgacacgcccagcatgttggcgaagatggcgagctgcacgtcggtgatcatcctgaccagtccggctcggctccgacgccgccagcgaacaacccccaggtaggagacctggaccggaacttccccc

SEQ ID NO: 25434 - DNA, 143 bp, Macaca Mulatta
aggagaaggaggacccactgagccacttccacatggataccctgctgatgaccacacataacctgctctttggcggcaccgagacggtgggcaccacgctgcgccacgccttcctggcactcatgaagtacccgaaagttcaa

SEQ ID NO: 25435 - DNA, 193 bp, Macaca Mulatta
atgtcttatggttggcctacaaaccatcgtcattttatcatgaatttattttttatgtcagcttcaagatactatggttctcagagcaatagcatcttatggacaaggaggagcaggaagaatcaggataataattcttggggttggagtgggcagttccaggccatggacaagccagtaatagcccaaagtt

SEQ ID NO: 25436 - DNA, 407 bp, Macaca Mulatta
cctcaagacactgataaccgacagcacagcgaggcccggaaacttccctcggagggactgttggctctcgcaggtgcggggccgctaggatcaataaatggcctgagaaacatgcctggcgtgttttctggggcggggccccaaggctcctcgcgaggacagcgcatcccgcccagttttaagggcggttcgaaagtccagccagtagagaggccttccggccccacccccaggccgcggttgcaggcggagctggaggcgggtggggtttgggaataacagggggcgggctaccattggcagagggcgcagttcccttgaggtccttgccgggattggttgttgtcggggctcctgggaggcgggtccggaacggcagtgggaggatctgggtccgggggcgcggg

SEQ ID NO: 25437 - DNA, 495 bp, Macaca Mulatta
cccaggccactaattcagggccctgggtgcagattggggcttgccacttcattgatgggtaaagctggggtcgctctccaccaccctgggctcagtccacctgatcctgtcacactcactgatcccactctgtgccaaaccccgcccgcgctggctctcactgcagtgaggagtccctccaggtcctttgcagtctcctaggtggaagcaaaactgaacatcaaggtgggaaggtgggaaggtagcagtggccattctggagcagggccagcaccagacccctggcttggggcctaatcagggtttctcgttagaactctggctacatgtggagaagcagggcccagcaacctcaccagtctatggcccagggaggtaggggtacctaaacaaccagtttatcagatcatatctcgaatgttgatctaagactgtggcaggggaaaagcaagagaaaggggaaaggaagcgaagtcaggtagtgacagcagaacc

SEQ ID NO: 25438 - DNA, 669 bp, Macaca Mulatta
tccaccatggcctggactcctctcttcctcctgctcttctctcactgcacaggttccctctcccagcctgtgctgactcagccggcctccctctcagcatctcctggagcatcagccagtctcacatgcaccttcagcggtggcatcaatgttggtgactacactatacagtggtaccaacagaagccagggagtcctccccggtatcttctgaagtacaaatcagactcagataagcaccagggctctggagtccccagccgcttctctggatccaaagatgcttcagcgaacacagggattttacgcatctctgggctccagtctgaggatgaggctgactattactgtgccattgggcacagcagcgcttatgtgttattcggtggagggacccggctgaccgtcctaggtcagcccaaggcttccccctcggtcactctgttcccgccctcctctgaggagcttcaagccaacaaggccacactagtgtgtctgatcagtgacttctacccgggagccgtggaagtggcctggaaggcagatggcagcgctgtcaacgcgggtgtggagaccaccaaaccctccaaacagagcaacaacaagtacgcggcagcagctacctgagcctgacgtccgaccagtggaagtcccacaagagctacagct

SEQ ID NO: 25439 - DNA, 230 bp, Macaca Mulatta
gggtagcggaccaacatgcggtggcccggagctgggtttgtcgcaaaacttacgtgaccccgaggagaccctttgagaaaatctcgtctcgaccaagagctgaagctgatcggcgagtatgggctccggaacaaacgtgaggtctggagggtcaaatttaccctggccaagatccgcaaggccgcccgggaactgctgacgcttgatgagaaggacccacggcgtctgtt

SEQ ID NO: 25440 - DNA, 902 bp, Macaca Mulatta
gatgagccaccttcctataggtctctcctccttccatgcccccactcctcacccaaacttttcacactggggagaagtttctgacaggaacacctaacttctttgtcttctctcttctgtgtttcagggaacagcggatgaaagagcacccctcattcgaacctaaacattgcctttgcttggtgaagaaaccatgtgagctgtcctgacctggaccatgatgtggggaaaccctccacctcctcgcaggcttgttgcctgttgaaagaagggaaaagacacggcgctggcaagtgataggaacattctggccagaggttaaagagcaggctgacatggctggccattaagctttataaaatcatgtgggctctgaaattgtttttttatgtgtctagcaagtatttaataaacccatgtatagtaattttgttgttgttgggtgctggtagctccagaattttgtgaccactgttgtgggtaaaatgtctctgcatcacttgttaatgctacttggtctaactttattcagtatgcttcattcaccgaactttgtgctcaaaatgcgtatataccattttatgttgtattccatcatttcacttgcaaaacagaagtaaataagagttcgggacccagggtaaaatggtagcttcatccagtatatcattcaaatgcatctgatttctaaaatattacatattacattttatgttgatcttcagttcataattcctccaggaaaactcagtcttccaactacaataaaatactgggtagaatcaaataggaaaggggttgggtggggcagtacccatgagttgatagtgataagcttctaaggatttttaacttgtacttttgtgaacgaagagaatgcataaataatgtcggtgaggata

SEQ ID NO: 25441 - DNA, 576 bp, Macaca Mulatta
aaatgagcaaagtcaaaagtcaggtgctaggaattacacctctgaactggacagaagccagtggagaccaacggtcctgatgccaatcacgagtacgtacaagcagccagcatatggactacaaagacattcgacatgctggactcgctgttaagtgcccaaggaatgaacatgtaataattgttaggtcaatttttcccttttacttattttaatttaaaaattgttagaatggaaaaattccttctgatctagcagtggtaacccctgctgttgctgccactgcttcaatatttgtaagtgctgctttattcttcattctgaaaagaagagattatagtaaacaagtctttatctccacatatgatagtgttataaatactgtaaaagcatggaaggtgcaaaactcagtatttctacaattgcagctaagaacattaggatgaatggctggctgcttctaggactataagatgcctcaagcattcattatttatgatttgaatactgtagctatttacagtagttgcttggcttttgaatgagtgtaaattgtttacttaaagtgtatttata

SEQ ID NO: 25442 - DNA, 1169 bp, Macaca Mulatta
  misc_feature (1)...(1169): n = A,T,C or G
gatttactactgggaggcagacagccagaacgacacggagaaaatgaaggtcctgttcctccccgagcccgtggtgaggctgaagaacctgaccagccataccgagtacctggtcagcatatcagccttcaacgccgctggagatgggcccaggagtgacccccggcaggggcgcacccaccaggcngcccctggggcccccagctttctggcgttctcagaaataacctccaccacgctcaacgtctcctggggtgagcctgcggcggccaatggcatcctgcagggctatcgggtggtgtacgagcccttggcccctgtgcaaggnnnnnnnnnnnnnnnnnnnnnnnnnnnnnnnnnnnnnnnnnnnnnnnnnnnnnnnnnnnnnnnnnnnnnnnnnnnnnnnnnnnnnnnnnnnnnnnnnnnnnnnnnnnnnnnnnnnnnnnnnnnnnnnnnnnnnnnnnnnnnnnnnnnnnnnnnnnnnnnnnnntccccaggctcgcctagagatgtcctggtcaccaagtccgcctctgaactgacactgcagtggactgagggacactctggtgacacacccaccacaggctacgtcatcgaggcccggccctcagnnnnnnnnnnnnnnnnnnnnnnnnnnnnnnnnnnnnnnnnnnnnnnnnnnnnnnnnnnnnnnnnnnnnnnnnnnnnnnnnnnnnnnnnnnnnnnnnnnnnnnnnnnnnnnnnnnnnnnnnnnnnnnnnnnnnnnnnnnnnnnnnnnnnnnnnnnnnnnnnnnnnnnnnnnnnnnnnnnnnnnnnnnnnnnnnnnnnnnnnnnnnnnnnnnnnnnnnnnnnnnnnnnnnnnnnnnnnnnnnnnnnnnnnnnnnnnnnnnnnnnnnnnnnnnnnnnnnnnnnnnnnnnnnnnnnnnnnnnnnnnnnnnnnnnnnnnnnnnnnnnnnnnnnnnnnnnnnnnnnnnnnnnnnnnnnnnnnnnnnnnnnnnnnnnnnnnnnnnnnnnnnnnnnnnnnnnnnnnnnnnnnnnnnnnnnnnnnnnnnccaggtccccaccccggccgagccccggcggtctgcactactcagacgaggacatctgcaacaagtacaacggcgccgtgctgaccgagagcgtgagcctcaaggagaagtcagcggacgcgtcagaatccgagg

SEQ ID NO: 25443 - DNA, 752 bp, Macaca Mulatta
ggagagttttacgaggtggactgttgacactccatcagtgagaacacacctgctctacaaaatcttaaacttattgagacaccaggcagctttccaattccctgcaaacatgggggaatgccctgatcaatcctaaaggtgtgacatactctactttctagggcagttatttcttattatatattaactagtggctattatatttgcttctgcccacaggtagagaagatgctaaataattgtgccaacacaggtgtttatagtctgtgtgacagttacttttcttatagcatgtactcaattaatacttgttatatgaatgaagaacgacttgcctcagttggcattctggggtgtctacctgggtgcagcatttcagggctgggtttccctgagcagagttgtctttgtagcaggtggatggactctgttctcagacaggcttataaagagcactaccagctctattagccccactcaccctctgcagttgttataagggttcaggtgctttctgttggaatgaggagaacagaacagtcatagactatttaaaaatatatatttactaaaatgtatttgtttttaattcccaaagcttacaaccatcttttcatctagtctgtgaggtatttagtatacagcagtgatttttcctctttcctttttttataaagtgaagaagttcaactatccagaagagtcccattctaacttaaaaaatgtaatgggctttttggttgggatttgca

SEQ ID NO: 25444 - DNA, 788 bp, Macaca Mulatta
  misc_feature (1)...(788): n = A,T,C or G
ggatnnnnnnnnnnnnnnnnnnnntccccggggggtgggggggttcttgtttggccaattggggggaaggggaattgcccttcccccttggttggggatccccccccagcccctttcggtctggcaggaagggggcagcctgcaacccccgagggcaggtgtggggctgccagatgctccaggcagggggccagaaggggctcacaaaggcttgccctccagggagatgacagcactgccccccaacttctctgccagggtgcagcggtccttgacttcctcgtagcagtttgcttgcaattcatgcttgatccctgtcagcttcttcttgatggcatccttggaactggcatagatcattttgctcttaaggggcgcacactcaggggcccagaagataaacaccaggtcctccttcttgctctccttggtctcataggttgcatcatagagggcgtagcggcagtccttgtctggcagcatcttgacaaaggtggcataggggtcgtcgacagtctggcccacatcgcccaccaagatctccttgccctcctccaggatgatgttcttcttgtcctcactcaggcagaagagcaccgccttcttgcgcttcttcacctcctctggcgttgaagacttacgcaccttcatgtcgttgaacaccttgatgacaccatcagagacagccacaccggaggccatgtttccggaaacgaaaaggagcgggcaccgagagccgcagtagacaagagcgctgcagacgctgccgggacccgactgaacgcccc

SEQ ID NO: 25445 - DNA, 410 bp, Macaca Mulatta
  misc_feature (1)...(410): n = A,T,C or G
aaactggtcgtacagctgaaggagagttttggtggaagctcagaaattgttgaccagctggaggtggannnnnnnnnnnnnnnnnnnnnnnnnnnnnnnnnnnnnnnnnnnnnnnnnnnnnnnnnnnnnnnnnnnnnnnnnnnnnnnnnnnnnnnnnnnnnnnnnnnnnnnnnnnnnnnnnnnnnnnnnnnnnnnnnnnnnnnnnnnnnnnnnnnnnnnnnnnnnnagggagctgtgatcatggtggtgtggtgaacatcagcaaaccgtctgtggttcagctcaactggagagggttttcttatcagtatggtgcttggggtagggattactctccccagcatccagacaaagggctgaaatgggtggcaccattgaatacagatgggagactgttggagtattacaga

SEQ ID NO: 25446 - DNA, 285 bp, Macaca Mulatta
ggtattcatttgcaattgtgggcatcaatataactgacctggcatataatctactgatcagtggagctctaaaaacccatttctacaatatcgccccagaagcacgaacattgtctcactttcagcaaacattctgctatttgatgcacgaatttcataagttttggattgaagaggaccccatggacataatggaatttaatcgtgtgagggagaaattccgcaagaggatcataaaacagctgcagaatccagacatggcggtagcccacatttgctgcctcg

SEQ ID NO: 25447 - DNA, 1282 bp, Macaca Mulatta
  misc_feature (1)...(1282): n = A,T,C or G
gtacctgggccagctggacgacagtgagtttgagagagccctgcaggagctgcagctgaccaggagcatctggaccatcgacctggcctacctgatgcaccactttggtgtgaggcaccgcttctgtacccagaccctgggcgtcgacaagggctacaagaaccagnnnnnnnnnnnnnnnnnnnnnnnnnnnnnnnnnnnnnnnnnnnnnnnnnnnnnnnnnnnnnnnnnnnnnnnnnnnnnnnnnnnnnnnnnnnnnnnnnnnnnnnnnnnnnnnnnnnnnnnnnnnnnnnnnnnnnnnnnnnnnnnnnnnnnnnnnnnnnnnnnnnggtgctgcactgtgacctgtgttccagccctgtcaagtactgctgcttcgagccccagtggccaccgctgcttctgccgcactcccgactaccagggccacttcatcgtcctgcgcggctacaaccgggccactggctgcatcttttacaacaacccagcctatgctgaccnnnnnnnnnnnnnnnnnnnnnnnnnnnnnnnnnnnnnnnnnnnnnnnnnnnnnnnnnnnnnnnnnnnnnnnnnnnnnnnnnnnnnnnnnnnnnnnnnnnnnnnnnnnnnnnnnnnnnnnnnnnnnnnnnnnnnnnnnnnnnnnnnnnnnnnnnnnnnnnnnnnnnnnnnnnnnnnnnnnnnnnnnnnnnnnnnnnnnnnnnnnnnnnnnnnnnnnnnnnnnnnnnnnnnnnnnnnnnnnnnnnnnnnnnnnnnnnnnnnnnnnnnnnnnnnnnnnnnnnnnnnnnnnnnnnnnnnnnnnnnnnnnnnnnnnnnnnnnnnnnnnnnnnnnnnnngaccccaagcctgactccagctgtgcccacgggaagtccagtcccaacagtgcccttgttgcctttgagccagacccagagcaagggtctccacacagaccgcagggctgagtctggagagagaagtcccttgactaatgccacttgtcaggacagtatgagagtgtctggagacagcatagttgaccccagtcgcccagaactgaggacccctccaggcccctctcttctggaagtgctgcatatgcccccatgccccgtggttgacgacaccaccgtctcctgcctacccatgggccaaagtttctgtggctcgttacagggtgtctggcccctgccacccagcatagacacacttcacagctgccctgccgtgcagtgccctggcccctggagacgcttaagccacccacagccctccaggtcctccagatcagatggagggctct

SEQ ID NO: 25448 - DNA, 266 bp, Macaca Mulatta
  misc_feature (1)...(266): n = A,T,C or G
ggaaacaccaggaatcaagctatagcttcccactacaagtcaataaagtaanatgatctcctccgctttgcatggaggggtgtaaggaaagcctattctatctgtgcctgggagaactgtgcctattttcaatcttttaggggaaatttcaactcaaaatttctaagtgtgaaaagtttactggtgtcacataaacattagcagtgagaccaaataatgaaacattgctttataccttagtgctttccagttcactgttacctcta

SEQ ID NO: 25449 - DNA, 2011 bp, Macaca Mulatta
  misc_feature (1)...(2011): n = A,T,C or G
gatgaacctcatcgctggctgtttctatgatgggatcctgctatatgctgaagtcctgaacgagacaatacaggaaggaggcacccgggaggatggacttcgaattgtggagaagatgcagggacgaagatnnnnnnnnnnnnnnnnnnnnnnnnnnnnnnnnnnnnnnnnnnnnnnnnnnnnnnnnnnnnnnnnnnnnnnnnnnnnnnnnnnnnnnnnnnnnnnnnnnnnnnnnnnnnnnnnnnnnnnnnnnnnnnnnnnnnnnnnnnnnnnnnnnnnnnnnnnnnnnnnnnnnnnnnnnnnnnnnnnnnnnnnnnnnnnnnnnnnnnnnnnnnnnnnnnnnnnnnnnnnnnnnnnnnnnnnnnnnnnnnnnnnnnnnnnnnnnnnnnnnnnnnnnnnnnnnnnnnnnnnnnnnnnnnnnnnnnnnnnnnnnnnnnnnnnnnnnnnnaaagctgatgctggagaaggagctggctagcatgttgtggcgcattcgctgggaagaactgcagtttggcaactcagagcgttatcacaaaggtgcaggcagtcgcctcacactgtcgctgngcggggatccagttacggctcgctcatgacagcccatgggaaataccagatctttgccaacaccggtcacttcaaggnnnnnnnnnnnnnnnnnnnnnnnnnnnnnnnnnnnnnnnnnnnnnnnnnnnnnnnnnnnnnnnnnnnnnnnnnnnnnnnnnnnnnnnnnnnnnnnnnnnnnnnnnnnnnnnnnnnnnnnnnnnnnnnnnnnnnnnnnnnnnnnnnnnnnnnnnnnnnnnnnnnnnnnnnnnnnnnnnnnnnnnnnnnnnnnnnnnnnnnnnnnnnnnnnnnnnnnnnnnnnnnnnnnnnnnnnnnnnnnnnnnnnnnnnnnnagggcatggcctttctccacaacagcattatttcatcgcatgggagtctcaagtcctccaactgtgtggtggatagtcgttttgtgctcaaaatcacagactatggcctggccagcttccgatcaactgctgaacctgatgacagccatgccctctatgccnnnnnnnnnnnnnnnnnnnnnnnnnnnnnnnnnnnnnnnnnnnnnnnnnnnnnnnnnnnnnnnnnnnnnnnnnnnnnnnnnnnnnnnnnnnnnnnnnnnnnnnnnnnnnnnnnnnnnnnnnnnnnnnnnnnnnnnnnnnnnnnnnnnnnnnnnnnnnnnnnnnnnnnnnnnnnnnnnnnnnnnnnnnnnnnnnnnnnnnnnnnnnnnnnnnnnnnnnnnnnnnnnnnnnnnnnnnnnnnnnnnnnnnnnnnnnnnnnnnnnnnnnnnnnnnnnnnnnnnnnnnnnnnnnnnnnnnnnnnnnnnnnnnnnnnnnnnnnnnnnnnnnnnnnnnnnnnnnnnnnnnnnnnnnnnnnnnnnnnnnnnnnnnnnnnnnnnnnnnnnnnnnnnnnnnnnnnnnnnnnnnnnnnnnnnnnnnnnnnnnnnnnnnnnnnnnnnnnnnnnnnnnnnnnnnnnnnnnnnnnnnnnnnnnnnnnnnnnnnnnnnnnnnnnnnnnnnnnnnnnnnnnnnnnnnnnnnnnnnnnnnnnnnnnnnnnnnnnnnnnnnnnnnnnnnnnnnnnnnnnnnnnnnnnngtcagcagagagcacccccttgcaggtnaggtagtgacacttcttaatgacctgtatacctgctttgatgccataattgacaactttgatgtctacaaggtgnaggtggagacgattggggatgcttacatggtggtatctggcctcccaggccgaaatggtcaacggcatgcaccagaaattgctcgtatggccctagcattactagatgcagtttcttcctttcgcatccgccaccgaccccatgaccagctgaggctacgcataggggtccatactggtaaggctgagtctcactccagccctaatctccacctttcccagactctcccaacctgtttcttctcatagggccagtctgtgctggggttgttggcctga

SEQ ID NO: 25450 - DNA, 642 bp, Macaca Mulatta
  misc_feature (1)...(642): n = A,T,C or G
gctctactcatgtgccatcggcggttaacaatgcattcatcagttatgcttcaccagtttacgacgtatgtacatcgtcaacaaggagatctgctctcgtcttgtctgtaaggaacacgaagctatgaaagatgaactttgccgtcagatggctggtctgccccctaggagactccgtcgctccaattacttccgacttcctccctgtgaaaatgtggatttgcagagacctaatggtctgtgatcatcgaaaaagaggaaagaagaaaaaatatgtgggtgagaggaaggaggatctccttcttctccaaccattgacagctaacccttagacagtatttcttaaaccaatccttttgcaatgtccagcttttacccccactgtctaatttttcacccaaactgataacatttatctcattttttagcacttaaaatacaaagtctatatgattgnnnnnnnnnnnnnnnnnnnnnnnnnnnnnnnnnnnnnnnnnnnnnnnnnnnnnnnnnnnnnnnnnnnnnnnnnnnnnnnnnnnnncnnnnnnnnnnnnnnnnnnnnnnnnnnnnnnnnnnnnnnnnnnnnnnnnnnnnnnnnnnnnnnnnnnnnnnnnnnnnnnnnnnnnnnnnnnnnnnnnnnnn

SEQ ID NO: 25451 - DNA, 720 bp, Macaca Mulatta
  misc_feature (1)...(720): n = A,T,C or G
aagatgagatggtcgccttttgagactttcgtaatgcagtgacttaagctgcaggagtgggtggagaggtttgttttatagtcttgaacaaggtttctgctgacttctgtgtctgtctggtttctttacagttcctcagcactttgtttgcccccttaaactttgtcatggagaaagtggagagcatcctcccatccagtctgtggcaccagctaacacggatctgagagaagccccgtcctccagtcacctcacccgctgctgccactgtctcctccgtgccaactccttgtggaccgcaagaaagcatgactttgaaaaagggaagccattccgagattttaaaatgttcatggactattccatattaaaagctgtttttgttgtacaaaattcattgatgttcagttctattttattttgccttcagaaaagaagaaggaagtcaaaaataaaacttttgtgtattgcagcaatcatttgtatcctcctgtgtcttccaaccctaaaatggttgatgtcccaaataaacctttgggtttaccttgagtttcctgngaacctgaatctgctgagtgccacatcatggtttctctgctgatggagcacatctcagccggccctgaagaacccttataggcagaggcttggaacatggaatctcttgngnntcacagtaccatcattgtcaaccccaaactgtccttctcggccaaatgn

SEQ ID NO: 25452 - DNA, 128 bp, Macaca Mulatta
gagcttgtggaaacacttccgtgctgtaagcctttgtttatttttattggtattccctgcttatatggcatatatgatttgccagtttttccacatggatttttggcttcttatcatttttccagcag

SEQ ID NO: 25453 - DNA, 586 bp, Macaca Mulatta
gtgctactgtacctatctaaagtattgtttaaaaagtatttttatacactgctaatctaaaattgtatttcagaatgtgcctgttatgacatagtagcaaatgtaaagaattctctttcccaccacttgtttataaacctcatagttgatatttttagtgttcctactgttaaaataccttctccttgggcttcgctgatactggtctttaatattctgataggtgaatttttctaatggaatgaacccatgcatatatagtatttatatgaatattttagcagtgtaatatgttgaattctagttttctgcagtaccatgtattatgttaaagtattttttaaagcttacatgtgaagatacgtgtctgtcgcagatgtccttaaagactgcataaaacaatatgtgcctggtgtggatcttaccaaagtactaggcatgaattatagggattgcaaatcccatggatcttaatattgaggtgttagtaaccgaggtctctggtagtaccccttagtagaggaagaggctgctgcccttgggagcttgtgatacgctccagtgtggtaccaggccataaagtgac

SEQ ID NO: 25454 - DNA, 465 bp, Macaca Mulatta
  misc_feature (1)...(465): n = A,T,C or G
aggtgcagacacacaagccttacttggtgaccttcgacctcacagaccctggggccgtagttgcagcagcagctgagatcctgcagtgctttggctatgtggacatacttgtcaacaatgctgggatcagctaccgtggtaccatcatggacaccacagtggatgtggacaagagggtcatggagacaaactactttggcccagttgctctaacaaaagnnnnnnnnnnnnnnnnnnnnnnnnnnnnnnnnnnnnnnnnnnnnnnnnnnnnnnnnnnnnnnnnnnnnnnnnnnnnnnnnnnnnnnnnnnnnnnngcagcctccaaacatgcaacccaggctttctttgactgtctgcgcgccgaaatggaacagtatgaaattgaggtgaccgtcatcagccccggctacatccacaccaacctctctgtcaatgccatcaccgcggatggatctaggtatggag

SEQ ID NO: 25455 - DNA, 3346 bp, Macaca Mulatta
  misc_feature (1)...(3346): n = A,T,C or G
atgctgcgtgggacaatgacggcgtggagaggaacaaggcctgaggtcacactggcttgcctcctcttagccacagcaggctgctttgctgacttgnnnnnnnnnnnnnnnnnnnnnnnnnnnnnnnnnnnnnnnnnnnnnnnnnnnnnnnnnnnnnnnnnnnnnnnnnnnnnnnnnnnnnnnnnnnnnnnnnnnnnnnnnnnnnnnnnnnnnnnnnnnnnnnnnnnnnnnnnnnnnnnnnnnnnnnnnnnnnnnnnnnnnnnnnnnnnnnnnnnnnnnnnnnnnnnnnnnnnnnnnnnnnnnnnnnnnnnnnnnnnnnnnnnnnnnnnnnnnnnnnnnnnnnnnnnnnnnnnnnnnnnnnnnnnnnnnnnnnnnnnnnnnnnnnnnnnnnnnnnnnnnnnnnnnnnnnnnnnnnnnnnnnnnnnnnnnnnnnnnnnnnnnnnnnnnnnnnnnnnnnnnnnnnnnnnnnnnnnnnnnnnnnnnnnnnnnnnnnnnnnnnnnnnnnnnnnnnnnnnnnnnnnnnnnnnnnnnnnnnnnnnnnnnnnnnnnnnnnnnnnnnnnnnnnnnnnnnnnnnnnnnnnnnnnnnnnnnnnnnnnnnnnnnnnnnnnnnnnnnnnnnnnnnnnnnnnnnnnnnnnnnnnnnnnnnnnnnnnnnnnnnnnnnnnnnnnnnnnnnnnnnnnnnnnnnnnnnnnnnnnnnnnnnnnnnnnnnnnnnnnnnnnnnnnnnnnnnnnnnnnnnnnnnnnnnnnnnnnnnnnnnnnnnnnnnnnnnnnnnnnnnnnnnnnnnnnnnnnnnnnnnnnnnnnnnnnnnnnnnnnnnnnnnnnnnnnnnnnnnnnnnnnnnnnnnnnnnnnnnnnnnnnnnnnnnnnnnnnnnnnnnnnnnnnnnnnnnnnnnnnnnnnnnnnnnnnnnnnnnnnnnnnnnnnnnnnnnnnnnnnnnnnnnnnnnnnnnnnnnnnnnnnnnnnnnnnnnnnnnnnnnnnnnnnnnnnnnnnnnnnnnnnnnnnnnnnnnnnnnnnnnnnnnnnnnnnnnnnnnnnnnnnnnnnnnnnnnnnnnnnnnnnnnnnnnnnnnnnnnnnnnnnnnnnnnnnnnnnnnnnnnnnnnnnnnnnnnnnnnnnnnnnnnnnnnnnnnnnnnnnnnnnnnnnnnnnnnnnnnnnnnnnnnnnnnnnnnnnnnnnnnnnnnnnnnnnnnnnnnnnnnnnnnnnnnnnnnnnnnnnnnnnnnnnnnnnnnnnnnnnnnnnnnnnnnnnnnnnnnnnnnnnnnnnnnnnnnnnnnnnnnnnnnnnnnnnnnnnnnnnnnnnnnnnnnnnnnnnnnnnnnnnnnnnnnnnnnnnnnnnnnnnnnnnnnnnnnnnnnnnnnnnnnnnnnnnnnnnnnnnnnnnnnnnnnnnnnnnnnnnnnnnnnnnnnnnnnnnnnnnnnnnnnnnnnnnnnnnnnnnnnnnnnnnnnnnnnnnnnnnnnnnnnnnnnnnnnnnnnnnnnnnnnnnnnnnnnnnnnnnnnnnnnnnnnnnnnnnnnnnnnnnnnnnnnnnnnnnnnnnnnnnnnnnnnnnnnnnnnnnnnnnnnnnnnnnnnnnnnnnnnnnnnnnnnnnnnnnnnnnnnnnnnnnnnnnnnnnnnnnnnnnnnnnnnnnnnnnnnnnnnnnnnnnnnnnnnnnnnnnnnnnnnnnnnnnnnnnnnnnnnnnnnnnnnnnnnnnnnnnnnnggacggcggcccaaacctgagatcatggccagcaaggagcagcagatccagagagacgaccctggagccagtccccagagcagcagccagcccgaccacggccgcctctcccccagaagctcccgacatttccaccatctccacggcctccgagacctcagtgtacgtgacctggattccccgtgggaatggtgggttcccgatccagtccttccgtgtggagtacaagaagctaaagaaagtgggagactggattctggccaccagcgccatcccaccgtcgcggctgtccgtggagatcacaggcctagagaaaggnaggcacctcctacaagtttcgagtccgggctctgaacatgctaggggagagcgagcccagcgccccctctcggccctacgtggtgtcgggctacagcggccgcgtgtacgagaggcccgtggcaggtccctacatcaccttcacggacgcggtcaatgagaccaccatcatgnnnnnnnnnnnnnnnnnnnnnnnnnnnnnnnnnnnnnnnnnnnnnnnnnnnnnnnnnnnnnnnnnnnnnnnnnnnnnnnnnnnnnnnnnnnnnnnnnnnnnnnnnnnnnnnnnnnnaggggacaggtactggcactccatcagccacctgcagccagagacctcctatgacattaagatgcagtgcttcaatgaaggaggggagagcgagttcagcaacgtgatgatctgtgagaccaaannnnnnnnnnnnnnnnnnnnnnnnnnnnnnnnnnnnnnnnnnnnnnnnnnnnnnnnnnnnnnnnnnnnnnnnnnnnnnnnnnnnnnnnnnnnnnnnnnnnnnnnnnnnnnnnnnnnnnnnnnnnnnnnnnnnnnnnnnnnnnnnnnnnnnnnnnnnnnnnnnnnnnnnnnnnnnnnnnnnnnnnnnnnnnnnnnnnnnnnnnnnnnnnnnnnnnnnnnnnnnaacatacaacagacctgggttttcctcgaagtgcccttccaccttcctcctgcccatatactatggtgccattgggaggactcccaggccaccagaccagcggacagcgctacctcagtggcatcagtggacgggcctgtgctaatgggatccacgtgaataggggctgccccgcggctgcagtgggctacccgggcatgaagccgcagcagcactgcccaggcgagcttcagcannnnnnnnnnnnnnnnnnnnnnnnnnnnnnnnnnnnnnnnnnnnnnnnnnnnnnnnnnnnnnnnnnnnnnnnnnnnnnnnnnnnnnnnnnnnnnnnnnnnnnnnnnnnnnnnnnnnnnnnnnnnnnnnnnnnnnnnnnnnnnnnnnnnnnnnnnnnnnnnnnnnnnnnnnnnnnnnnnnnnnnnnnnnnnnnnnnnnnnnnnnnnnnnnnnnnnnnnnnnnnnnnnnnnnnnnnnnnnnnnnnnnnnnnnnnnnnnnnnnnnnnnntcagggcccccatgctgcttgggccttgtaccagttgaagaggtggacagtcctgactcctgccaagtgggtggaggagactggtgtccccagcaccccacaggggcctacgtaggacaggaacctggaatgcagctctccccggggccaccggtgtgtgtgtcttttgaaacaccacttcccacaatttag

SEQ ID NO: 25456 - DNA, 421 bp, Macaca Mulatta
tttgcatgtaagagaatgtgccctcttcacactccaggaagacggtaatctgtgacatcttttcttcaagcctgccatcaaggtgacatttctgaagacccaactggcatgagctggggtaacttcctgccactattttcatcttggacaacttccttaacttatattctttatagaggattccccaaaatgtgctcctcatttttggcctctcatgttccaaacctcattgaataaaagcagtgaaaaccttgatcacttaagccttctgttgcacaacgtgtacacagtgaacaggatttcttctccggccaagaagattctacctctaatgatccaggtaattgacgtccatagaagatgagctggaaatgtaagaaactattcattagattctgaaaaggattttaactaaaaggca

SEQ ID NO: 25457 - DNA, 803 bp, Macaca Mulatta
tcttaattttgcagtggtttgagttgccttggcctttataagcttcccaggggatcctgacatagaacctccttgctggtagggaaacacctgcttcctgtttctcttaatcagcatgtttgatggagttatttggaaaacggttgcttatactgagatccagttgtattcagcttgccttctactgaccattacataagtgattcatttaggactagaactagatcttaatagtggcagagttcaccctggttccaaaagaacggcccagctccccttcagaagtgggttgatactgccactcagtggtcagcttcaggaacttcagggtttctcccccaaagccaagaataggcaggacaattaagagaggggtagcccactaagatctaatttccccccaggatgctcatcagctctttttggtctgtttcttcctaggacacaagggtcttctaaggctcagcatccttccaggggctttgcagaacatggtaaacagcagcacgggagagaagaggaaaaaggtagtggtggcattcggaagacccgggaaacagagcggctccggcggcagctgctggaggtgttttggggtcaggatcacaaggtggacttcatcctgcagcgggagccatactgccgggacattaaccaactgtctgaggccctgctcagtcttaacttttgagcctcacctgcttgagtggttgccgccccgtcagctccagccgcctccagctcagccctttctgtgagagtccctctgctgctcacactctgatccagaggcaccctgagtt

SEQ ID NO: 25458 - DNA, 631 bp, Macaca Mulatta
actcctgtcctcttgttgttccctcagacggcttggatgagcagaactcacattacttgatggaacatcgaatgaacagttcagagaaagtagatcggcaccgtctggagactcgggtctgccagcagagtcgtctgcaatctctcaggtacctcgctcgaggtctcagaggggcagccagatcggccgggagcccattgggttgttgggggtacgttgaaaggtgtttcgtcattgtgttttgtcgttttgtcgttggaccgttggaactgtcatttgtccatcaggcgatgtccatgaacacagtcctgggctctgccttgggctctggggccaaaggataatgagacttgtggcctctgccctcaaggagcctctgggtcggaggaggatgaagggacttgaacccagcctcagctgccgcgttttgtctgttcgggttcacaaaagcattgcctcatctcagtgatccgcagataggtgagctttagagctgggaagacaagacttcagaaacctaagtggtggagcctcctatggagtggtgccgccgaccccacttgcactgcgtgggcccctctccagggcatcactctgtgttggaatctggtctgaatgactcagcacaggt

SEQ ID NO: 25459 - DNA, 379 bp, Macaca Mulatta
  misc_feature (1)...(379): n = A,T,C or G
cttctacctggccgagatcacgctggccttgggccatctccactcccagggcatcatctaccgggacctcaagcccgagaacatcatgctcagcagccagggnnnnnnnnnnnnnnnnnnnnnnnnnnnnnnnnnnnnnnnnnnnnnnnnnnnnnnnnnnnnnnnnnnnnnnnnnnnnnnnnnnnnnnnnnnnnnnnnnnnnnnnnnnnnnnnnnnnnnnnnnnnnnnnnnnnnnnnnnnnnnnnnnnnnnnnnnnnnnnnnnnnnnnnnnnnnnnnnnnnnnnnnnnagaaccggaagaaaaccatggataagatcatcaagggcaagctggcgctgcccccctacctcaccccagatgcccgggaccttgtcaaaaa

SEQ ID NO: 25460 - DNA, 1511 bp, Macaca Mulatta
  misc_feature (1)...(1511): n = A,T,C or G
tattctggtggtgatcacttttgctttttataagaaggccaggtctatgacagacgtctatctcctgaacatggccattgcagacatcctctttgttcttactctcccattctgggcagtgagtcacgccaccggtgcgtgggttttcagcaatgccatgtgcaagttgatgaaaggcatctatgccatcaactttaactgcgggatgctgctcctgacttgcattagcatggaccggtacatcgccatcgtacaggcaacgaagtcgttccggctccgatacagaacgctgctgcgcagcaaagtcatctgccttattgtgtggggagtgtcagtcgtcatctccagctcaacttttatcttcaaccagaaatacaacatccaaggcagcgatgtctgtgagcccaagtaccagaccgtctcggagcccatcaagtggaagctgctgatgttggggcttgagctactctttggtttctttatccctttgatgttcatgatattttgttacatgttcattgtcaaaaccttggtgcaagctcagaattctaaaaggcacaaagccatccgtgtaatcatagccgtggtgcttgtgtttctggcttgtcagattcctcacaacatggtcctgcttgtgacagctgcaaatttgggtaacatgaaccgatcctgccacagcgaaaagctacttggctatacgaaaactgtcacagaagtcctagctttcctgcactgctgcctgaaccctgtgctctatgcttttattgggcagaagttcagaaactactttctgaagatcatgaaggacctgtggtgtgtgagaaggaagtacaagtcctcgggcttctcctgtgcggggaggtactcagaaaacatttcccggcagaccaggagaccgcannnnnnnnnnnnnnnnnnnnnnnnnnnnnnnnnnnnnnnnnnnnnnnnnnnnnnnnnnnnnnnnnnnnnnnnnnnnnnnnnnnnnnnnnnnnnnnnnnnnnnnnnnnnnnnnnnnnnnnnnnnnnnnnnnnnnnnnnnnnnnnnnnnnnnnnnnnnnnnnnnnnnnnnnnnnnnnnnnnnnnnnnnnnnnnnnnnnnnnnnnnnnnnnnnnnnnnnnnnnnnnnnnnnnnnnnnnnnnnnnnnnnnnnnnnnnnnnnnnnnnnnnnnnnnnnnnnnnnnnnnnnnnnnnnnnnnnnnnnnnnnnnnnnnnnnnnnnnnnnnnnnnnnnnnnnnnnnnnnnnnnnnnnnnnnnnnnnnnnnnnnnnnnnnnnnnnnnnnnnnnnnnnnnnnnnnnnnnnnnnnnnnnnnnnnnnnnnnnnnnnnnnnnnnnnnnnnnnnnnnnnnnnnnncacatcgctcgttttaggcaaatgtttaaacgttttatctatcagactgtttactgttgctggttataagcggcaggattggccggctggtgttttatcatttccctttgatccgggcaacaatctgaccttgtaaaatggaggcggaaagacaagctcaag

SEQ ID NO: 25461 - DNA, 487 bp, Macaca Mulatta
tagaccctgatccaagactttgccgcttgcataagcttttactgtttttatatcaggaaatcatacaggaccaagaaccgctggggtcctggccagccaaggcaggcccaggatggggctccggggccatggaggcgaaggcacagtggcaggcgagggacatggtggtcacaggtacacgggctgctcctggcctgtgaggaggcggtatgtggcggctggcatcgtcttgatatgtacctggggagtggaggcagaatggggttcagggcaggcctgggcttgccagggacgtgggggcgcccctggccaccacccaccacctgcacacctcgccgtaggcctcggtgagcagctcgatgatgcgggcgtgtggcgtggccaccacgctctgcccattgatctcaatgatgcggtggcccacacggatgcccccgcgctcggcgatgccgccgcggagaaggctgcagatctgggggaggaaagc

SEQ ID NO: 25462 - DNA, 845 bp, Macaca Mulatta
  misc_feature (1)...(845): n = A,T,C or G
ggggttggcgtgatagtttccgagtaagaccttaaggacacagccaaatcttaagtactgtgtgaccactcctgttattatcacagtcatacttggttgtaatatgtgatggttaacctgtagcttataaatttacttcttattcttnttacntncgnnntttannctcagtcnnatttcttttnnnnnnnnnnnnnnnnnnnnnngaaatttggggaaaaataccctgggttttttttcaaaaggnnnnagggaaaacagcgacggggggggggcacaaccaagaagccgcaaaacacacacaaaacccccaacaaacaccacaacacaaaccaaaccgagagacaaaaaatacaagaaatcccacgccggacgagaccccctaaagatccaaaccaacccgcactccctaaactcctcaacgccacaacatcataaataaatcaaaatacactaaaccaaaaacccaattacacaatactcacaaataataacccccataaccgaccgatggcccaagcgcatggatagcataaaaacacagataaacaatgaatacataataaataaagcaccataaacctacaaattaaaaagataacacccaaataaaagaactagtacaccaaaaaaatagctaaaaaaacaaaaatcaacaacaactacacatgcatacacacataacgatatacttaccaaagaccaacctcagcggcacgcttcacaaattgcataacaggccttcccccgaataataacctcaattcaaaataagagtaatactgagcaaacaataccatgttagaaatacaaacctcgaaacaaaatactctaccaatattata

SEQ ID NO: 25463 - DNA, 154 bp, Macaca Mulatta
cacatatgtgatcaagctgttcgaccgcagcgtggacttggcccagttcagcgagaacacgccactgtacccgatctgccgtgcctggatgcgaaacagcccctctgtgcgcgagcgcgaatgctctcccagctcacccctgcccccgctgcct

SEQ ID NO: 25464 - DNA, 318 bp, Macaca Mulatta
  misc_feature (1)...(318): n = A,T,C or G
tggtatgttacttatggtcatgaactgatttggaagaacagggagcctctagtgaaaatctggcatgaaataaggactaatggccccaaaaaaggaggtggctctaagtaaaactggggttggacagtagtgatgcatctggtccatgacgcctgagagccccagagcaccggccccagagtgatcacggctatgctcccgcctggaagatgccagcatctggcctcccagtgttttcagctgnnnnnnnnnnnnnngtctttttagaaagtgaatgatgataaagttgtgaaataaaggtttctatctagtttgtaa

SEQ ID NO: 25465 - DNA, 856 bp, Macaca Mulatta
  misc_feature (1)...(856): n = A,T,C or G
ggattttagaataaaattataaagtaaaattattctctgtactgcttttttctccagtttttagagaccctaacctttgaaatgaaattccagtgatttcttttttccctagaaagattacctcagttagagaagtatttcccagctgactagtgtttgtgagccacagacactgtcttcagaattgattctctcataatgtcttagtatagaaatgtttatttattatgatacatgcaaatgattgtcttgagttaaatggtcgtgtctgtgctattaattgagaatgcaaatgtgattatcttttgaaggctgtattactgcataaattcaccccacccttgggtcatttagtccctgtgattggtgacagaaggtgtggctactgaaataaatgacctattctctctcttccannnnnnnnnnnnnnnnnnnnnnnnnnnnnnnnngtggtcggcccgcctcgggccctccaagaaaccttttctaaaaccatttcgtatgtggccgcggcgggcccccattaaggtaaagtggaacaatgggcccataagcttggttttccctaagaaatatcccggggtcaaggaaactaagtgccttgggaattcctccnnnnnnnnnnnnnnnnnnnnnncggggaggggaacccgaaaccgctttcttgaaaccaaattccccaaaagggaaacttcccgaaaaggcccatttaactgggattccaatccaacaaggggatcccaaaccctaacctcgnaaaatcaaaattaacgccccacccccaaagcaactacaaccgacaaaacaggtgtggaaattccatttaaacaattccggcgcgaaagagagaaacccn

SEQ ID NO: 25466 - DNA, 5480 bp, Macaca Mulatta
  misc_feature (1)...(5480): n = A,T,C or G
cagtgtgccgtccgcctggccaagaccgtgggctatgtgagtgcagggacagtggaatacctctacagccaggacggcagcttccacttcttggagctgaatcctcgtttgcaggtggaacagccatgcacggaaatgannnnnnnnnnnnnnnnnnnnnnnnnnnnnnnnagatcgccatgggcgtgccactgcaccggctgaaggatatccggcttctgtacggagagtcgccatggggagtgactcccatttctttcgaaaccccgtcaaaccctcccctcgcccgaggtcacgtcattgccgccagaatcaccagtgaaaacccagatgaggcaagttatgcggtcccctgtnnnnnnnnnnnnnnnnnnnnnnnnnnnnnnnnnnnnnnnnnnnnnnnnnnnnnnnnnnnnnnnnnnnnnnnnnnnnnnnnnnnnnnnnnnnnnnnnnnnnnnnnnnnnnnnnnnnnnnnnnnnnnnnnnnnnnnnnnnnnnnnnnnnnnnnnnnnnnnnnnnnaacatggtggtggctttgaaggaactgtccatccgaggtgactttaggaccaccgtggaatacctcattaacctcctggagaccgagagcttccagaacaatgacatcgacaccgggtggttggactacctcattgctgagaaagtgcaggtggaganaggcggagaaaccggatatcatgcttggggtggtatgcggggccttgaacgtggcggatgcgatgttcagaacgtgcatgacagatttcttacactnnnnnnnnnnnnnnnnnnnnnnnnnnnnnnnnnnnnnnnnnnnnnnnnnnnnnnnnnnnnnnnnnnnnnnnnnnnnnnnnnnnnnnnnnnnnnnnnnnnnnnnnnnnnnnnnnnnnnnnnnnnnnnnnnnnnnnnnnnnnnnnnnnnnnnnnnnnnnnnnnnnnnnnnnnnnnnnnnnnnnnnnnnnnnnnnnnnnnnnnnnnnnnnnnnnnnnnnnnnnnnnnnnnnnnnnnnnagttaccgaattaccatcggcaataagacatgtgtgtttgagaaggagaatgatcctacggtcctgagatccccctcggctgggaagctgacacagtacacagtggaggacgggggccacgttgaggctgggagcagctacgctgagatggaggtgannnnnnnnnnnnnnnnnnnnnnnnnnnnnnnnnnnnnnnnnnnnnnnnnnnnnnnnnnnnnnnnnnnnnnnnnnnnnnnnnnnnnnnnnnnnnnnnnnnnnnnnnnnnnnnnnnnnnnnnnnnnnnnnnnnnnnnnnnnnnnnnnnnnnnnnnnnnnnnnnnnnnnnnnnnnnnnnnnnnnnnnnnnnnnnnnnnnnnnnnnnnnnnnnnnnnnnnnnnnnnnnnnnnnnnnnnnnnnnnnnnnnnnnnnnnnnnnnnnnnnnnnnnnnnnnnnnnnnnnnnnnnnnnnnnnnnnnnnnnnnnnnnnnnnnnnnnnnnnnnnnnnnnnnnnnnnnnnnnnnnnnnnnnnnnnnnnnnnnnnnnnnnnnnnnnnnnnnnnnnnnnnnnnnnnnnnnnnnnnnnnnnnnnnnnnnnnnnnnnnnnnnnnnnnnnnnnnnnnnnnnnnnnnnnnnnnnnnnnnnnnnnnnnnnnnnnnnnnnnnnnnnnnnnnnnnnnnnnnnnnnnnnnnnnnnnnnnnnnnnnnnnnnnnnnnnnnnnnnnnnnnnnnnnnnnnnnnnnnnnnnnnnnnnnnnnnnnnnnnnnnnnnnnnnnnnnnnnnnnnnnnnnnnnnnnnnnnnnnnnnnnnnnnnnnnnnnnnnnnnnnnnnnnnnnnnnnnnnnnnnnnnnnnnnnnnnnnnnnnnnnnnnnnnnnnnnnnnnnnnnnnnnnnnnnnnnnnnnnnnnnnnnnnnnnnnnnnnnnnnnnnnnnnnnnnnnnnnnnnnnnnnnnnnnnnnnnnnnnnnnnnnnnnnnnnnnnnnnnnnnnnnnnnnnnnnnnnnnnnnnnnnnnnnnnnnnnnnnnnnnnnnnnnnnnnnnnnnnnnnnnnnnnnnnnnnnnnnnnnnnnnnnnnnnnnnnnnnnnnnnnnnnnnnnnnnnnnnnnnnnnnnnnnnnnnnnnnnnnnnnnnnnnnnnnnnnnnnnnnnnnnnnnnnnnnnnnnnnnnnnnnnnnnnnnnnnnnnnnnnnnnnnnnnnnnnnnnnnnnnnnnnnnnnnnnnnnnnnnnnnnnnnnnnnnnnnnnnnnnnnnnnnnnnnnnnnnnnnnnnnnnnnnnnnnnnnnnnnnnnnnnnnnnnnnnnnnnnnnnnnnnnnnnnnnnnnnnnnnnnnnnnnnnnnnnnnnnnnnnnnnnnnnnnnnnnnnnnnnnnnnnnnnnnnnnnnnnnnnnnnnnnnnnnnnnnnnnnnnnnnnnnnnnnnnnnnnnnnnnnnnnnnnnnnnnnnnnnnnnnnnnnnnnnnnnnnnnnnnnnnnnnnnnnnnnnnnnnnnnnnnnnnnnnnnnnnnnnnnnnnnnnnnnnnnnnnnnnnnnnnnnnnnnnnnnnnnnnnnnnnnnnnnnnnnnnnnnnnnnnnnnnnnnnnnnnnnnnnnnnnnnnnnnnnnnnnnnnnnnnnnnnnnnnnnnnnnnnnnnnnnnnnnnnnnnnnnnnnnnnnnnnnnnnnnnnnnnnnnnnnnnnnnnnnnnnnnnnnnnnnnnnnnnnnnnnnnnnnnnnnnnnnnnnnnnnnnnnnnnnnnnnnnnnnnnnnnnnnnnnnnnnnnnnnnnnnnnnnnnnnnnnnnnnnnnnnnnnnnnnnnnnnnnnnnnnnnnnnnnnnnnnnnnnnnnnnnnnnnnnnnnnnnnnnnnnnnnnnnnnnnnnnnnnnnnnnnnnnnnnnnnnnnnnnnnnnnnnnnnnnnnnnnnnnnnnnnnnnnnnnnnnnnnnnnnnnnnnnnnnnnnnnnnnnnnnnnnnnnnnnnnnnnnnnnnnnnnnnnnnnnnnnnnnnnnnnnnnnnnnnnnnnnnnnnnnnnnnnnnnnnnnnnnnnnnnnnnnnnnnnnnnnnnnnnnnnnnnnnnnnnnnnnnnnnnnnnnnnnnnnnnnnnnnnnnnnnnnnnnnnnnnnnnnnnnnnnnnnnnnnnnnnnnnnnnnnnnnnnnnnnnnnnnnnnnnnnnnnnnnnnaggaagcctccttcgagtacctgcagaacgagggtgagcggctgctcctggaggccatggacgagctggaggtggcgttcaacaacaccagcgtgcgcaccgactgcaaccacatcttcctcaacttcgtgcccactgtcatcatggacccctnnnnnnnnnnnnnnnnnnnnnnnnnnnnnnnnnnnnnnnnnnnnnnnnnnnnnnnnnnnnnnnnnnnnnnnnnnnnnnnnnnnnnnnnnnnnnnnnnnnnnnnnnnnnnnnnnnnnnnnnnnnnnnnnnnnnnnnnnnnnnnnnnnnnnnnnnnnnnnnnnnnnnnnnnnnnnnnnnnnnnnnnnnnnnnnnnnnnnnnnnnnnnnnnnnnnnnnnnnnnnnnnnnnnnnnnnnnnnnnnnnnnnnnnnnnnnnnnnnnnnnnnnnnnnnnnnnnnnnnnnnnnnnnnnnnnnnnnnnnnnnnnnnnnnnnnnnnnnnnnnnnnnnnnnnnnnnnnnnnnnnnnnnnnnnnnnnnnnnnnnnnnnnnnnnnnnnnnnnnnnnnnnnnnnnnnnnnnnnnnnnnnnnnnnnnnnnnnnnnnnnnnnnnnnnnnnnnnnnnnnnnnnnnnnnnnnnnnnnnnnnnnnnnnnnnnnnnnnnnnnnnnnnnnnnnnnnnnnnnnnnnnnnnnnnnnnnnnnnnnnnnnnnnnnnnnnnnnnnnnnnnnnnnnnnnnnnnnnnnnnnnnnnnnnnnnnnnnnnnnnnnnnnnnnnnnnnnnnnnnnnnnnnnnnnnnnnnnnnnnnnnnnnnnnnnnnnnnnnnnnnnnnnnnnnnnnnnnnnnnnnnnnnnnnnnnnnnnnnnnnnnnnnnnnnnnnnnnnnnnnnnnnnnnnnnnnnnnnnnnnnnnnnnnnnnnnnnnnnnnnnnnnnnnnnnnnnnnnnnnnnnnnnnnnnnnnnnnnnnnnnnnnnnnnnnnnnnnnnnnnnnnnnnnnnnnnnnnnnnnnnnnnnnnnnnnnnnnnnnnnnnnnnnnnnnnnnnnnnnnnnnnnnnnnnnnnnnnnnnnnnnnnnnnnnnnnnnnnnnnnnnnnnnnnnnnnnnnnnnnnnnnnnnnnnnnnnnnnnnnnnnnnnnnnnnnnnnnnnnnnnnnnnnnnnnnnnnnnnggtgacctgccgagcccttgggatcggggcctacttggtgaggctgggccagcgagtgatccaggtggagaactctcacatcatcctcacgggagcaagtgctctcaacaaggnnnnnnnnnnnnnnnnnnnnnnnnnnnnnnnnnnnnnnnnnnnnnnnnnnnnnnnnnnnnnnnnnnnnnnnnnnnnnnnnnnnnnnnnnnnnnnnnnnnnnnnnnnnnnnnnnnnnnnnnnnnnnnnnnnnnnnnnnnnnnnnnnnnnnnnnnnnnnnnnnnnnnnnnnnnnnnnnnnnnnnnnnnnnnnnnnnnnnnnnnnnnnnnnnnnnnnnnnnnnnnnnnnnnnnnnnnnnnnnnnnnnnnnnnnnnnnnnnnnnnnnnnnnnnnnnnnnnnnnnnnnnnnnnnnnnnnnnnnnnnnnnnnnnnnnnnnnnnnnnnnnnnnnnnnnnnnnnnnnnnnnnnnnnnnnnnnnnnnnnnnnnnnnnnnnnnnnnnnnnnnnnnnnnnnnnnnnnnnnnnnnnnnnnnnnnnnnnnnnnnnnnnnnnnnnnnnnnnnnnnnnnnnnnnnnnnnngataattcagcaggcagggcaggtgtggttcccagactcagcctacaaaaccgcccaggccatcaaggacttcaaccgggagaagttgcccctgatgatctttgccaactggagggggttctccggtggcatgaaagnnnnnnnnnnnnnnnnnnnnnnnnnnnnnnnnnnnnnnnnnnnnnnnnnnnnnnnnnnnnnnnnnnnnnnnnnnnnnnnnnnnnnnnnnnnnnnnnnnnnnnnnnnnnnnnnnnnnnnnnnnnnnnnnnnnnnnnnnnnnnnnnnnnnnnnnnnnnnnnnnnnnnnnnnnnnnnnnnnnnnnnnnnnnnnnnnnnnnnnnnnnnnnnnnnnnnnnnnnnnnnnnnnnnnnnnnnnnnnnnnnnnnnnnnnnnnnnnnnnnnnnnnnnnnnnnnnnnnnnnnnnnnnnnnnnnnnnnnnnnnnnnnnnnnnnnnnnnnnnnnnnnnnnnnnnnnnnnnnnnnnnnnnnnnnnnnnnnnnnnnnnnnnnnnnnnnnnnnnnnnnnnnnnnnnnnnnnnnnnnnnnnnnnnnnnnnnnnnnnnnnnnnnnnnnnnnnnnnnnnnnnnnnnacatcctggagtggaagaccgcgcgcaccttcctgtattggcgtctgcgccgcctcctcctgtaggacc

SEQ ID NO: 25467 - DNA, 117 bp, Macaca Mulatta
caattatggctgtgttcctctgcttgaagacagtgaaacaaggaagaataatttgactgttgatcagccacataataaagtgatttcaggaatagcaaaggaaaaactaccaaaggt

SEQ ID NO: 25468 - DNA, 469 bp, Macaca Mulatta
  misc_feature (1)...(469): n = A,T,C or G
ggaaccagtatattcaccgtctatgaggccgcctcgcaggaaggttgggtgttcctcatgtacagagcaattgacagctttccccgttggcgttcctacttctatttcatcactctcattttcttcctcgcttggcttgtgaagnnnnnnnnnnnnnnnnnnnnnnnnnnnnnnnnnnnnnnnnnnnnnnnnnnnnnnnnnnnnnnnnnnnnnnnnnnnnnnnnnnnnnnnnnnnnnnnnnnnnnnnnnnnnnnnnnnnnnnnnnnnnnnnnnnnnnnnnnnnnnnnnnnnnnnnnnnnnnnnnnnnnnnnnnnnnnnnnnnnnnnnnnnnnnagaaaatgatgcgatcatcggttttccacatgttcatcctgagcatggtgaccgtcgacgtgatcgtggcagctagcaactactacaaaggagagaacttcaggaggcagtacgacgagttctacctggcggaggt

SEQ ID NO: 25469 - DNA, 397 bp, Macaca Mulatta
  misc_feature (1)...(397): n = A,T,C or G
nnnnnnnnnnnnnnnnnnnnnnnnnnnnnnnnngtccaggttcataatttattgtacaaattgaattatcacatgatgagttgggattagcttctccaggcatgggaacttaacagatgaggttaagaactctagacagtttaaaatccatttatgttgctttcacagctggagtttttttggaccttaacttgaaatataagacaatcaaagcaatgcttccatatgtggccagtacacaattccttctacctgtgagagtgtaagagttgaaatattttttaataccagtgaactggtattgcgcatcactttctggacctgccatgatttcaatctgccaaagccaaaaattccgcagctggtgtccttcaacaaaagtaatcacctctctccc

SEQ ID NO: 25470 - DNA, 114 bp, Macaca Mulatta
aggcacagcccaggcctgatggggaggtgatgcccacgctggacatggccttgttcgactggaccgattatgaagacttaaaacctgatggttggccctctgcaaagaagaaag

SEQ ID NO: 25471 - DNA, 1356 bp, Macaca Mulatta
tggactatcaagtgtcaagtccaacctatgacatcccttattatacatcggaaccctgccaaaaaatcaatgtgaaacaaatcgcagcccgcctcctgcctccgctctactcactggtgttcatctttggttttgtgggcaacatactggtcgtcctcatcctgataaactgcaaaaggctgaaaagcatgactgacatctacctgctcaacctggccatctctgacctgcttttccttcttactgtccccttctgggctcactatgctgctgcccagtgggactttggaaatacaatgtgtcaactcttgacagggctctattttataggcttcttctctggaatcttcttcatcatcctcctgacaatcgataggtacctggctatcgtccatgctgtgtttgctttaaaagccaggacagtcacctttggggtggtgacaagtgtgatcacttgggtggtggctgtgtttgcctctctcccaggaatcatctttaccagatctcagagagaaggtcttcattacacctgcagctctcattttccatacagtcagtatcaattctggaagaattttcagacattaaagatggtcatcttggggctggtcctgccgctgcttgtcatggtcatctgctactcgggaatcctgaaaactctgcttcggtgtcgaaacgagaagaagaggcacagggctgtgaggcttatcttcaccatcatgattgtttattttctcttctgggctccctacaacattgtccttctcctgaacaccttccaggaattctttggcctgaataattgcagtagctctaacaggttggaccaagccatgcaggtgacagagactcttgggatgacacactgctgcatcaaccccatcatctatgccttcgtcggggagaagttcagaaactacctcttagtcttcttccaaaagcacattgccaaacgcttctgcaaatgctgttccattttccagcaagaggctcccgagcgagcaagttcagtttacacccgatccactggggagcaggaaatatctgtgggcttgtgacccggactcaagtgtgccggtgacccagtcagagttgtgcacatgacttggtgttgatacacagcctgggctgggggtggggtgggagaggtcttttttaaaaggaagttactgttacagaaggtctaagattcatccatttatttggcatctatttaaagcagatttgatcttttaagcccatcaattatagaaagccaaatcaaaatatgttgatgaaaaatagcaacctttttatctctccttcacatgcatcaagttattgacaaactctcccttctctccaaaagttccttat

SEQ ID NO: 25472 - DNA, 221 bp, Macaca Mulatta
gatggcggcggccgtagcggctccactcgccgctaggggtgaggaggcggcagccacaacctccgtgcccgggtctccgggtctgccagggagccgcagtgcagagcgtgccctagaggaggccgtggccaccgggaccctgaacctgtctaaccggcgcttgaagcacttcccccggggcgcggcccgtagctacgacctgtcagacatcacccaggctg

SEQ ID NO: 25473 - DNA, 359 bp, Macaca Mulatta
gtagaagatgacggtgaaatgttccacacactggatgatggccacacaagatttacagatctaatacaactggtggagttctatcaactcaataagggcgttcttccttgcaagttgaaacattattgtgctaggattgctctctagctaaaccagaagtgacttattaaactattgaagaaaaaggactcaagaaaaataataaaagaccataaataagggtgaaaatgttaccatgtgaaaagaatgtattttacctgcaagttacaaaaaaaatagtttgtgcattgcaaataagcaaagacttggattgactttacattcatcatttaaaattcattagttaaaattaaacctta

SEQ ID NO: 25474 - DNA, 2151 bp, Macaca Mulatta
  misc_feature (1)...(2151): n = A,T,C or G
acaggagaacccaaaggatggctgctgacatgcaaaggaagagaagcagtgaatgccctgatggcacattgactccttctgatggacacagtgtggagagagctgagagccccacaccaggactggcccagggaatggagccannnnnnnnnnnnnnnnnnnnnnnnnnnnnnnnnnnnnnnnnnnnnnnnnnnnnnnnnnnnnnnnnnnnnnnnnnnnnnnnnnnnnnnnnnnnnnnnnnnnnnnnnnnnnnnnnnnnnnnnnnnnnnnnnnnnnnnnnnnnnnnnnnnnnnnnnnnnnnnnnnnnnnnnnnnnnnnnnnnnnnnnnnnnnnnnnnnnnnnnnnnnnnnnnnnnnnnnnnnnnnnnnnnnnnnnnnnnnnnnnnnnnnnnnnnnnnnnnnnnnnnnnnnnnnnnnnnnnnnnnnnnnnnnnnnnnnnnnnnnnnnnnnnnnnnnnnnnnnnnnnnnnnnnnnnnnnnnnnnnnnnnnnnnnnnnnnnnnnnnnnnnnnnnnnnnnnnnnnnnnnnnnnnnnnnnnnnnnnnnnnnnnnnnnnnnnnnnnnnnnnnnnnnnnnnnnnnnnnnnnnnnnnnnnnnnnnnnnnnnnnnnnnnnnnnnnnnnnnnnnnnnnnnnnnnnnnnnnnnnnnnnnnnnnnnnnnnnnnnnnnnnnnnnnnnnnnnnnacctagagcctgacaccgacctctgcctgctgtttgtctccactgaccgtgaggacttctctgcagtctctgactgccgccgccgcttccaggagcgccttcgcaagcgtggagcccacctggccctgcgagaggcgctgcgcacaccctactacagcgttgcccaagtgggcatccctgacctgcgtcacttcctctataagtcaaagagctcgggactcttcaccaggtgagggaggcccttgagggcactgctgtagggggacagggacatgtggagttgggaggctgtttgctcctgagctctgagatgtagccatgaagctgcccccatctttggaagcagaccagtgtgctgggtataaaaactctggcaccagagactcacactctccatcaccctatgagcatacccctctctactttattacccagaaggcctggaaatgcccagtatacccagggaaggaaactggaacagaggtctctcaggtcccttgtcctagagcaactctactttaggcgtcagtttggtccagctcaggaagcagagccctcctgggctcaatcccccagcagaggggatgggaagatatggccnnnnnnnnnnnnnnnnnnnnnnnnnnnnnnnnnnnnnnnnnnnnnnnnnnnnnnnnnnnnnnnnnnnnnnnnnnnnnnnnnnnnnnnnnnnnnnnnnnnnnnnnnnnnnnnnnnnnnnnnnnnnnnnnnnnnnnnnnnnnnnnnnnnnnnnnnnnnnnnnnnnnnnnnnnnnnnnnnnnnnnnnnnnnnnnnnnnnnnnnnnnnnnnnnnnnnnnnnnnnnnnnnnnnnnnnnnnnnnnnnnnnnnnnnnnnnnnnnnnnnnnnnnnnnnnnnnnnnnnnnnnnnnnnnnnnnnnnnnnnnnnnnnnnnnnnnnnnnnnnnnnnnnnnnnnnnnnnnnnnnnnnnnnnnnnnnnnnnnnnnnnnnnnnnnnnnnnnnnnnnnnnnnnnnnnnnnnnnnnnnnnnnnnnnnnnnnnnnnnnnnnnnnnnnnnnnnnnnnnnnnnnnnnnnnnnnnnnnnnnnnnnnnnnnnnnnnnnnnnnnnnnnnnnnnnnnnnnnnnnnnnnnnnnnnnnnnnnnnnnnnnnnnnnnnnnnnnnnnnnnnnnnnnnnnnnnnnnnnnnnnnnnnnnnnnnnnnnnnnnnnnnnnnnnnnnnnnnnnnnnnnnnnnnnnnnnnnnnnnnnnnnnnnnnnnnnnnnnnnnnnnnnnnnnnnnnnnnnnnnnnnnnnnnnnnnnnnnnnnnnnnnnnnnnnnnngaagaccgcctcttcattctcacgcccctcacctattgatgggaatgtgtgcaggctcggccttcccaggcacactgggtgtgggaagccgtaggagcctccagatgggggctggcctctcttgcccagccagcaggcagggactgtgggttggtgagtgcattaaagtgctttgggg

SEQ ID NO: 25475 - DNA, 290 bp, Macaca Mulatta
gcgtcccccgtagtccggccggcctcggcaccgcgtgtcgtggggggcccgggcccgcggctgcagggtcggggcagcggcgaggccgagggccgggaagccactgcctggcctggcaatgtgaacgtgcaagtctatcccctaacccagaaagccccaggcgcagtctatacgggcggccccgctcctgcttatgttttagttttcagggacggggtatcgctctgccgcccgggctggagtgcagtggtgtgatcacggctcactgcagcctcgacctcccgggctga

SEQ ID NO: 25476 - DNA, 1185 bp, Macaca Mulatta
  misc_feature (1)...(1185): n = A,T,C or G
tggcggagctaggagctggtggcgacggccacaggggcggcgacggcgcagtnnnnnnnnnnnnnnnnnnnnnnnnnnnnnnnnnnnnnnnnnnnnnnnnnnnnnnnnnnnnnnnnnnnnnnnnnnnnnnnnnnnnnnnnnnnnnnnnnnnnnnnnnnnnnnnnnnnnnnnnnnnnnnnnnnnnnnnnnnnnnnnnnnnnnnnnnnnnnnnnnnnnnnnnnnnnnnnnnnnnnnnnnnnnnnnnnnnnnnnnnnnnnnnnnnnnnnnnnnnnnnnnnnnnnnnnnnnnnnnnnnnnnnnnnnnnnnnnnnnnnnnnnnnnnnnnnnnnnnnnnnnnnnnnnnnnnnnnnnnnnnnnnnnnnnnnnnnnnnnnnnnnnnnnnnnnnnnnnnnnnnnnnnnnnnnnnnnnnnnnnnnnnnnnnnnnnnnnnnnnnnnnnnnnnnnnnnnnnnnnnnnnnnnnnnnnnnnnnnnnnnnnagccccatcatcatgccctacaaagctgcacactctagaaattcgatggatcgaccaaaactctttgtaacaccacctgagggctcttctcgcaggaggaccattcatggcatagcnnnnnnnnnnnnnnnnnnnnnnnnnnnnngtacccttcctcacatctggcacccgaagggctatatctccatctaatcccaaagcaagaccgccagctccctcccgactttggnnnnnnnnnnnnnnnnnnnnnnnnnnnnnnnnnnnnnnnnnnnnnnnnnnnnnnnnnnnnnnnnnnnnnnnnnnnnnnnnnnnnnnnnnnnnnnnnnnnnnnnnnnnnnnnnnnnnnnnnnnnnnnnnnnnnnnnnnnnnnnnnnnnnnnnnnnnnnnnnnnnnnnnnnnnnnnnnnnnnnnnnnnnnnnnnnnnnnnnnnnnnnnnnnnnnnnnnnnnnnnnnnnnnnnnnnnnnnnnnnnnnnnnnnnnnnnnnnnnnnnnnnnnnnnnnnnnnnnnnnnnnnnnnnnnnnnnnnnnnnnnnnnnnnnnnnnnnnnnnnnnnnnnnnnnnnnnnnnnnnnnnnnnnnnnnnnnnnnnnnnnnnnnnnnnnnnnnnnnnnnnnnnnnnnnnnnnnnnnnnnnnnnnnnntaagacttctgcaggtaccaccaacccagaggaggccacaaggctgctagctgagaagaggcggctggcc

SEQ ID NO: 25477 - DNA, 1171 bp, Macaca Mulatta
  misc_feature (1)...(1171): n = A,T,C or G
ngcagccaggcgccccagcctccacccacgcctgccgagatgctgccgccacgatcggtgccatcggagcgggcccctggggtgccggagcccgaggagctgtgggaggcagagatggagcggctgcgctgctccggggcgcccgtgcgcgggctgccctatgccatgatggacaagcgcctcatctgnnnnnnnnnnnnnnnnnnnnnnnnnnnnnnnnnnnnnnnnnnnnnnnnnnnnnnnnnnnnnnnnnnnnnnnnnnnnnnnnnnnnnnnnnnnnnnnnnnnnnnnnnnnnnnnnnnnnnnnnnnnnnnnnnnnnnnnnnnnnnnnnnnnnnnnnnnnnnnnnnnnnnnnnnnnnnnnnnnnnnnnnnnnnnnnnnnnnnnnnnnnnnnnnnnnnnnnnnnnnnnnnnnnnnnnnnnnnnnnnnnnnnnnnnnnnnnnnnnnnnnnnnnnnnnnnnnnnnnnnnnnnnnnnnnnnnnnnnnnnnnnnnnnnnnnnnnnnnnnnnnnnnnnnnnnnnnnnnnnnnnnnnnnnnnnnnnnnnnnnnnnnnnnnnnnnnnnnnnnnnnnnnnnnnnnnnnnnnnnnnnnnnnnnnnnnnnnnnnnnnnnnnnnnnnnnnnnnnnnnnnnnnnnnnnnnnnnnnnnnnnnnnnnnnnnnnnnnnnnnnnnnnnnnnnnnnnnnnnnnnnnnnnnnnnnnnnnnnnnnnnnnnnnnnnnnnnnnnnnnnnnnnnnnnnnnnnnnnnnnnnnnnnnnnnnnnnnnnnnnnnnnnnnnnnnnnnnnnnnnnnnnnnnnnnnnnnnnnnnnnnnnnnnnnnnnnnnnnnnnnnnnnnnnnnnnnnnnnnnnnnnnnnnnnnnnnnnnnnnnnnnnnnnnnnnnnnnnnnnnnnnnnnncagacgcgggcccagaggccctgccacctgctctcctacctgcgggtcaacatactcatccgtctcctggtggttggggccatcagcgccatcttctgggctaccaagtactcacaggacaacaaggaggnaggagtccctgtttctgctgctccagtacctgccccctggggtcatcgccctggtcaacttcctgggtcccctgctgttcacattcctggtccagctggagaactaccctcccaacacggaagtcaacctcaccctgatgtggtg

SEQ ID NO: 25478 - DNA, 701 bp, Macaca Mulatta
  misc_feature (1)...(701): n = A,T,C or G
agcgtggggtatattacatttaaaagtaagaaagtgaacatctttgagtgaagaccttcccaaggttacacagaggggaagtgggcagacaggtagacctgagcacatttctctgggctccagtgtcaggtgtctcccctctactgtcctcagggaagagggtccaagtgcatcagtaagtatggtgaaaggtgagagagacagtgatcttggatggagagaaatagggcaaagctgtaaaggttatcaatttttgttatcactaggagtgaaaactggacactgaagaagccaaaacctgtttccaagaaactgaagagtgtattcagagcaccagatctcagtaggatgttgcaagttcacaaagagctgacagatgtccagtgctactggggtaagatatggggttttcaaatcacctcctttcagaattgtggttactattagaacccataatctgagtctcatgtgttcctccccaaacatgcttataccctgtagttcttaaacgtcctactaacctctatcagcacaagttccatttgatatcgacacaagttccactttcaatatgtctcttctcaatgccataagacacacctatcccatattcttcacttgactctgtaattttttctacagtggacgtgatgctgaatccaaacagtnacatttcgaatgttgctgtttctgtggatcag

SEQ ID NO: 25479 - DNA, 109 bp, Macaca Mulatta
gatgtgtagcactttgtagtttaggtatttggatttgtgaagaactagtccatgagtctcatcatcctcaaattaaggaagctctgaatgtgatttgtgtttccttaaa

SEQ ID NO: 25480 - DNA, 309 bp, Macaca Mulatta
  misc_feature (1)...(309): n = A,T,C or G
cctggaactatatcagcaacatgtctatctcacttgctgctcaaatccccaccatctatttcttcactgacttgccctccaacatcatctctctctactcntgaatcttccctttccatcccacctgtcccctactaagatttctgctttctttatgtcctgctacagggaaaatcacatattagcatttggggaattttctaaaactcagagctgaccatagtcaaaatagttccctagatccccaacccacaagaataatttgaagcttctcaatgtgacattctaagtcagagatggtcaaccagt

SEQ ID NO: 25481 - DNA, 178 bp, Macaca Mulatta
aaagggggaataacagacggtgtcatctgtggatcaccagacacctggaagggaaaggacctccttaggattcctcatgagctgtacctgccctgccctcttgctgctcctgatccagagtcctcgcagcctcagcggcccggctctacccacggtgtggtcctgaggccttctgaga

SEQ ID NO: 25482 - DNA, 150 bp, Macaca Mulatta
acacatccctgaccctgcattgcctctgcagcagttgttgaaaggaagaaaggtggggctgtggataaactcttagtccagtgtcaggcccagaggaagaagattccataaagaaaaggaccctaaatcatttatatctcattgttatta

SEQ ID NO: 25483 - DNA, 558 bp, Macaca Mulatta
agagacgggtcatctgtcgctgaggcgcaacctccagggaactcgaggcctgccagggtctgtccagatcacaaggggcaggagagtctgtgagagagtgacactgaagttgtccccttcctccactctcctattccgttctcatgtttacatttccctacgctcttccagtttctcttcttccctacagttcctctcatatctccccatttggagacagcgagacactgggaagttgtaaaaataaaaagttatttttgcagttttctttcacgcatttatagtgctctggataagaccatttatttttgctaaattacccaactttcagtatttgctgtgttatcatctgtatttacttattttgaatcgtgcttaaatcaaatgtaccttcggcacctgcaagtttgccttttctttccaggacgaaaatccccacattgctctccctggggaggctgagaattataccagtgctgtcagaaatgtaatcatgctgtcattttagagccacagagtatttgtaaaataaaaaccttcccaacggagcaattggga

SEQ ID NO: 25484 - DNA, 1241 bp, Macaca Mulatta
  misc_feature (1)...(1241): n = A,T,C or G
tccaacacctgatctttgcccttgctctctaatgaggtaatctggctagacagcaagcagatccgacaggaggaaatgaagaagctgtccctgctaaatggaggcctccaagaggnaggaggagctgtccacttccttgaagaggagtgtctacattgaaagtcggataggtaccagcaccagctttgacagtggcattgctgggctctcttctatcagtcaatgtaccagcagtagccagctggatgngaaacaagtcaccgatgggcacagccagacactgccccagtacctgtcccggcagacattcgcttctccgtctgggtctcgttctttgagatctacaacgaactgctttatgacctattagaaccacctagccaacagcgcaagaggcagactttgcggctctgcgaggatnnnnnnnnnnnnnnnnnnnnnnnnnnnnnnnnnnnnnnnnnnnnnnnnnnnnnnnnnnnnnnnnnnnnnnnnnnnnnnnnnnnnnnnnnnnnnnnnnnnnnnnnnnnnnnnnnnnnnnnnnnnnnnnnnnnnnnnnnnnnnnnnnnnnnnnnnnnnnnnnnnnnnnnnnnnnnnnnnnnnnnnnnnnnnnnnnnnnnnnnnnnnnnnnnnnnnnnnnnnnnnnnnnnnnnnnnnnnnnnnnnnnnnnnnnnnnnnnnnnnnnnnnnnnnnnnnnnnnnnnnnnnnnnnnnnnnnnnnnnnnnnnnnnnnnnnnnnnnnnnnnnnnnnnnnnnnnnnnnnnnnnnnnnnnnnnnnnnnnnnnnnnnnnnnnnnnnnnnnnnnnnnnnnnnnnnnnnnnnnnnnnnnnnnnnnnnnnnnnnnnnnnnnnnnnnnnnnnnnnnnnnnnnnnnnnnnnnnnnnnnnnnnnnnnnnnnnnnnnnnnnnnnnnnnnnnnnnnnnnnnnnnnnnnnnnnnnnnnnnnnnnnnnnnnnnnnnnnnnnnnnnnnnnnnnnnnnnnnnnnnnnnnnnnnnnnnnnnnnnnnnnnnnnnnnnnnnnnnnnnnnnnnnnnnnnnnnnnnnnnnnnnnnnnnnnnnnnnnnnnnnnnnnnnnnnnnnnnnnnnnnnnnnnnnnnnnnngaaanaggagctcctgcaagtagtggaagccatgaagacactgcttttgaaggaacgacaggaaaagctgcagctggagatgcatctccgagatgaaatttgcaatgagatggtagaacagatgcaacagcgggaacagtggtgca

SEQ ID NO: 25485 - DNA, 769 bp, Macaca Mulatta
  misc_feature (1)...(769): n = A,T,C or G
tcattcctgggttttgtgcagtatacattttcccacgaaatggttgtaaagatttaagttattttaatttattgtggatcagaaacctagaagaaactggtcagaatctgtaaattacttagtttatatccactttgagcaggtatcaaatgatttagaatccttaaaattgccttctaattattttaagttatgtggaaaaagtaaggctggggaagttgtgattaatagttttcaaagggtcattttttaaaatcctctgggcattttctttcagctgtcagtttttgctttatttaaagcatatttaagttattttaatgtggtttaggggcaaaatgtgcagatacttcatttttgtaagattgtaatagatgctgtttatactaaacctgttgtatctatacagtatatattaaaagaaagcttgtactgtaccttatttgatgatatttattttctctgccaagctgtatagtaaaaggaaagtaagtcacatctggtcattggcatttttattgtcattctgtnaagacaaaagagtacccatataagaagctccacgcagtgcaaatcgacatctggtangctgctcgccccccagcagcagctagagtctggtactcttcgcgncatcctggnttttcnnttcttttgattttcctttgcctgagtcttctctgaaatatatgcaaagagttgtgggtcttcatcaacattcntctgnatactcacagaagcttctaagtgtgagatgnaaagctggcga

SEQ ID NO: 25486 - DNA, 551 bp, Macaca Mulatta
  misc_feature (1)...(551): n = A,T,C or G
ccaggatgcatctctgatattcagtgaagacaaccagaacagtctgctagagcagtaccatctgggtctggatcaaaaatgcagaaaatacatggttggacagctcatctggaattttgccgatttcatgactaaccagtnccaaggatgaaggaaaaactggacctcattatggatttacttttgggatacaatgattattccagaggaaggtacaaagtctgagaagcttaaggtatttcagtgtgttttatattactcacttgcaaaaagcaggctcatcaaacacaggtgagtttcaacgcatcttgaatatggcagcatttaaagtcttcagaccgggcatggtgactcatccccataatcccagcgctttgggaggccaaggtgggaggatccctgaggccaggagtttgagaccagcctgttaagcagagcaagaccccatctctacaaaaaataagcacattagctgtgtgtggtggtgtgttcctgtagttccagctgcttaggaggctgaggcaggcagatcgcctgagcacaggagttgg

SEQ ID NO: 25487 - DNA, 191 bp, Macaca Mulatta
  misc_feature (1)...(191): n = A,T,C or G
naggtcatccagctgtatgactcgggtggtctttgtggctacgactacgaaggctcccctgtgtacttctgcatcatcgggtccctcgaccccaagggtctcctgctgtcggcctccaagcaggatttgatccggaagcgcatcaaggtctgtgagctgcttttgcatgagtgtgagctgcagactcagaa

SEQ ID NO: 25488 - DNA, 112 bp, Macaca Mulatta
ggaaacgctgtcccaactgtgatgggcctctgaagctcatcccttgccgaggtcacgggggcttcccggtcaccaacttctggaggcatgacggacgctttatatttttcca

SEQ ID NO: 25489 - DNA, 721 bp, Macaca Mulatta
  misc_feature (1)...(721): n = A,T,C or G
ggggtgggatatacctgtcttgtagctatctgagaccacgcttctgtcttgtctgtctcgagaagcaggtggaaacatgagcattcagtttctcggtacagtgtacaaggtgaatatcttaaccaaactcgccgcagaattgaacaaatttatgctggaaaaagtgaccgaggacacaagcagtgttctgcgttccccaatgcccggagtggtggtggccgtctctgtcaagcctggagacacggtagcagaaggtcaagaaatttgtgtgattgaagccatgaaaatgcagaatagtatgacagctgggaaaactggcacggtgaaatctgtgcactgtcaagctggagacacagttggagaagcggatctgctcgtggagctggaatgaaggatttataacctttcagtcatcacccaatttaattagccatttgtgtgatgctttgacacaattgattcaagcattttacaggaacacccctgtgcagctacgtttacgtcgtcatttattccagagtcaagaccaatattctgccaaaaaatcaccaatggaaattttcactgatataaatacttgtacatatgatttgtacttctgtgagatttcctagtatgaaaattaaatcaatcaaactggnnnnnnnnnnnnnnnnnnnnnnnnnnnnnnnnnnntgtcggcccgcctcgggcccctcgaaaaagctttttcttgaaccat

SEQ ID NO: 25490 - DNA, 205 bp, Macaca Mulatta
actctgcagtatcaccaaaaagttcgctgcatagaaaatcaagaagtaaggactatgatgtatatagtgataatgatacctgcggtcaggaatcagaagataatttgccaaagagcttcaacagtacatacaagccagagaaatggcaaatgctgcacaacctgaagaatctacaaagaaagaaggagtaaaagataccccacag

SEQ ID NO: 25491 - DNA, 682 bp, Macaca Mulatta
  misc_feature (1)...(682): n = A,T,C or G
cnnnnnnnnnnnnnnnnnnncagacttcatgactcctttaagtactgtaagagaaaatgctcttggaataaaaacctctaagatgcatgacaaaataagctgtcctcgacagataaaatcttcacctactttggtcaccaagggaggttcaaattagctgggtattagaaaagtttccatcagtaggaaagggaaagcatcctctagaaatagatgagttctagtggtgaggatatcaattgaaaggacatacatgggatgaaggcataaataaggtagagtcattgtggggatggcttatagaggaagagatgtctgtgaatttatcttcaaataattttctcataaatcttaacagatctcaaaaccaggagctatccaagtggtgcagtgataagcgtagtgccccaagtacatttttcttttcattggtattcacataactagatacagtaataaatgtaattagtaaatagtgaagtccattgtgaaaagggccatgtttcatttatttttattttgcgagcttttaacatgtttaatagtagtaggcagtcaatcattgttgaactaaataactcatttcaattcttaacagactggattatggacagaacttggaaatattgagaataatttcttaaagccacttcatataggacttaatatgtcaaaagcacat

SEQ ID NO: 25492 - DNA, 6690 bp, Macaca Mulatta
  misc_feature (1)...(6690): n = A,T,C or G
aaacagtggtcctgatcaacccttttgatgaagcagtcagcactgaggtnnnnnnnnnnnnnnnnnnnnnnnnnnnnnnnnnnnnnnnnnnnnnnnnnnnnnnnnnnnnnnnnnnnnnnnnnnnnnnnnnnnnnnnnnnnnnnnnnnnnnnnnnnnnnnnnnnnnnnnnnnnnnnnnnnnnnnnnnagatcggggagttactaagcaccacccatcctgctaacaaagccagcttaaccctgttctgtcctgaagaaggggactggaagaactccaatcttgacagacacaatctccaagatttcatcaatattaaactcaattcagcttctatcttgccagaaatggaaggactttctgagtttactgagtatctctcagaatcagttgaagtcccatctccctttgacatcctggaacctcccacatcgggtggatttctgaagctctccaagccctgctgttatatttttccaggagggaggggagattctgccttgtttgcagtgaatggtttcaatatgctcatcaatggcggatcggagagaaaatcctgcttctggaagctcatccgacactagaccgagtgnnnnnnnnnnnnnnnnnnnnnnnnnnnnnnnnnnnnnnnnnnnnnnnnnnnnnnnnnnnnnnnnnnnnnnnnnnnnnnnnnnnnnnnnnnnnnnnnnnnnnnnnnnnnnnnnnnnnnnnnnnnnnnnnnnnnnnnnnnnnnnnnnnnnnnnnnnnnnnnnnnnnnnnnnnnnnnnnnnnnnnnnnnnnnnnnnnnnnnnnnnnnnnnnnnnnnnnnnnnnnnnnnnnnnnnnnnnnnnnnnnnnnnnnnnnnnnnnnnnnnnnnnnnnnnnnnnnnnnnnnnnnnnnnnnnnnnnnnnnnnnnnnnnnnnnnnnnnnnnnnnnnnnnnnnnnnnnnnnnnnnnnnnnnnnnnnnnnnnnnnnnnnnnnnnnnnnnnnnnnnnnnnnnnnnnnnnnnnnnnnnnnnnnnnnnnnnnnnnnnnnnnnnnnnnnnnnnnnnnnnnnnnnnnnnnnnnnnnnnnnnnnnnnnnnnnnnnnnnnnnnnnnnnnnnnnnnnnnnnnnnnnnnnnnnnnnnnnnnnnnnnnnnnnnnnnnnnnnnnnnnnnnnnnnnnnnnnnnnnnnnnnnnnnnnnnnnnnnnnnnnnnnnnnnnnnnnnnnnnnnnnnnnnnnnnnnnnnnnnnnnnnnnnnnnnnnnnnnnnnnnnnnnnnnnnnnnnnnnnnnnnnnnnnnnnnnnnnnnnnnnnnnnnnnnnnnnnnnnnnnnnnnnnnnnnnnnnnnnnnnnnnnnnnnnnnnnnnnnnnnnnnnnnnnnnnnnnnnnnnnnnnnnnnnnnnnnnnnnnnnnnnnnnnnnnnnnnnnnnnnnnnnnnnnnnnnnnnnnnnnnnnnnnnnnnnnnnnnnnnnnnnnnnnnnnnnnnnnnnnnnnnnnnnnnnnnnnnnnnnnnnnnnnnnnnnnnnnnnnnnnnnnnnnnnnnnnnnnnnnnnnnnnnnnnnnnnnnnnnnnnnnnnnnnnnnnnnnnnnnnnnnnnnnnnnnnnnnnnnnnnnnnnnnnnnnnnnnnnnnnnnnnnnnnnnnnnnnnnnnnnnnnnnnnnnnnnnnnnnnnnnnnnnnnnnnnnnnnnnnnnnnnnnnnnnnnnnnnnnnnnnnnnnnnnnnnnnnnnnnnnnnnnnnnnnnnnnnnnnnnnnnnnnnnnnnnnnnnnnnnnnnnnnnnnnnnnnnnnnnnnnnnnnnnnnnnnnnnnnnnnnnnnnnnnnnnnnnnnnnnnnnnnnnnnnnnnnnnnnnnnnnnnnnnnnnnnnnnnnnnnnnnnnnnnnnnnnnnnnnnnnnnnnnnnnnnnnnnnnnnnnnnnnnnnnnnnnnnnnnnnnnnnnnnnnnnnnnnnnnnnnnnnnnnnnnnnnnnnnnnnnnnnnnnnnnnnnnnnnnnnnnnnnnnnnnnnnnnnnnnnnnnnnnnnnnnnnnnnnnnnnnnnnnnnnnnnnnnnnnnnnnnnnnnnnnnnnnnnnnnnnnnnnnnnnnnnnnnnnnnnnnnnnnnnnnnnnnnnnnnnnnnnnnnnnnnnnnnnnnnnnnnnnnnnnnnnnnnnnnnnnnnnnnnnnnnnnnnnnnnnnnnnnnnnnnnnnnnnnnnnnnnnnnnnnnnnnnnnnnnnnnnnnnnnnnnnnnnnnnnnnnnnnnnnnnnnnnnnnnnnnnnnnnnnnnnnnnnnnnnnnnnnnnnnnnnnnnnnnnnnnnnnnnnnnnnnnnnnnnnnnnnnnnnnnnnnnnnnnnnnnnnnnnnnnnnnnnnnnnnnnnnnnnnnnnnnnnnnnnnnnnnnnnnnnnnnnnnnnnnnnnnnnnnnnnnnnnnnnnnnnnnnnnnnnnnnnnnnnnnnnnnnnnnnnnnnnnnnnnnnnnnnnnnnnnnnnnnnnnnnnnnnnnnnnnnnnnnnnnnnnnnnnnnnnnnnnnnnnnnnnnnnnnnnnnnnnnnnnnnnnnnnnnnnnnnnnnnnnnnnnnnnnnnnnnnnnnnnnnnnnnnnnnnnnnnnnnnnnnnnnnnnnnnnnnnnnnnnnnnnnnnnnnnnnnnnnnnnnnnnnnnnnnnnnnnnnnnnnnnnnnnnnnnnnnnnnnnnnnnnnnnnnnnnnnnnnnnnnnnnnnnnnnnnnnnnnnnnnnnnnnnnnnnnnnnnnnnnnnnnnnnnnnnnnnnnnnnnnnnnnnnnnnnnnnnnnnnnnnnnnnnnnnnnnnnnnnnnnnnnnnnnnnnnnnnnnnnnnnnnnnnnnnnnnnnnnnnnnnnnnnnnnnnnnnnnnnnnnnnnnnnnnnnnnnnnnnnnnnnnnnnnnnnnnnnnnnnnnnnnnnnnnnnnnnnnnnnnnnnnnnnnnnnnnnnnnnnnnnnnnnnnnnnnnnnnnnnnnnnnnnnnnnnnnnnnnnnnnnnnnnnnnnnnnnnnnnnnnnnnnnnnnnnnnnnnnnnnnnnnnnnnnnnnnnnnnnnnnnnnnnnnnnnnnnnnnnnnnnnnnnnnnnnnnnnnnnnnnnnnnnnnnnnnnnnnnnnnnnnnnnnnnnnnnnnnnnnnnnnnnnnnnnnnnnnnnnnnnnnnnnnnnnnnnnnnnnnnnnnnnnnnnnnnnnnnnnnnnnnnnnnnnnnnnnnnnnnnnnnnnnnnnnnnnnnnnnnnnnnnnnnnnnnnnnnnnnnnnnnnnnnnnnnnnnnnnnnnnnnnnnnnnnnnnnnnnnnnnnnnnnnnnnnnnnnnnnnnnnnnnnnnnnnnnnnnnnnnnnnnnnnnnnnnnnnnnnnnnnnnnnnnnnnnnnnnnnnnnnnnnnnnnnnnnnnnnnnnnnnnnnnnnnnnnnnnnnnnnnnnnnnnnnnnnnnnnnnnnnnnnnnnnnnnnnnnnnnnnnnnnnnnnnnnnnnnnnnnnnnnnnnnnnnnnnnnnnnnnnnnnnnnnnnnnnnnnnnnnnnnnnnnnnnnnnnnnnnnnnnnnnnnnnnnnnnnnnnnnnnnnnnnnnnnnnnnnnnnnnnnnnnnnnnnnnnnnnnnnnnnnnnnnnnnnnnnnnnnnnnnnnnnnnnnnnnnnnnnnnnnnnnnnnnnnnnnnnnnnnnnnnnnnnnnnnnnnnnnnnnnnnnnnnnnnnnnnnnnnnnnnnnnnnnnnnnnnnnnnnnnnnnnnnnnnnnnnnnnnnnnnnnnnnnnnnnnnnnnnnnnnnnnnnnnnnnnnnnnnnnnnnnnnnnnnnnnnnnnnnnnnnnnnnnnnnnnnnnnnnnnnnnnnnnnnnnnnnnnnnnnnnnnnnnnnnnnnnnnnnnnnnnnnnnnnnnnnnnnnnnnnnnnnnnnnnnnnnnnnnnnnnnnnnnnnnnnnnnnnnnnnnnnnnnnnnnnnnnnnnnnnnnnnnnnnnnnnnnnnnnnnnnnnnnnnnnnnnnnnnnnnnnnnnnnnnnnnnnnnnnnnnnnnnnnnnnnnnnnnnnnnnnnnnnnnnnnnnnnnnnnnnnnnnnnnnnnnnnnnnnnnnnnnnnnnnnnnnnnnnnnnnnnnnnnnnnnnnnnnnnnnnnnnnnnnnnnnnnnnnnnnnnnnnnnnnnnnnnnnnnnnnnnnnnnnnnnnnnnnnnnnnnnnnnnnnnnnnnnnnnnnnnnnnnnnnnnnnnnnnnnnnnnnnnnnnnnnnnnnnnnnnnnnnnnnnnnnnnnnnnnnnnnnnnnnnnnnnnnnnnnnnnnnnnnnnnnnnnnnnnnnnnnnnnnnnnnnnnnnnnnnnnnnnnnnnnnnnnnnnnnnnnnnnnnnnnnnnnnnnnnnnnnnnnnnnnnnnnnnnnnnnnnnnnnnnnnnnnnnnnnnnnnnnnnnnnnnnnnnnnnnnnnnnnnnnnnnnnnnnnnnnnnnnnnnnnnnnnnnnnnnnnnnnnnnnnnnnnnnnnnnnnnnnnnnnnnnnnnnnnnnnnnnnnnnnnnnnnnnnnnnnnnnnnnnnnnnnnnnnnnnnnnnnnnnnnnnnnnnnnnnnnnnnnnnnnnnnnnnnnnnnnnnnnnnnnnnnnnnnnnnnnnnnnnnnnnnnnnnnnnnnnnnnnnnnnnnnnnnnnnnnnnnnnnnnnnnnnnnnnnnnnnnnnnnnnnnnnnnnnnnnnnnnnnnnnnnnnnnnnnnnnnnnnnnnnnnnnnnnnnnnnnnnnnnnnnnnnnnnnnnnnnnnnnnnnnnnnnnnnnnnnnnnnnnnnnnnnnnnnnnnnnnnnnnnnnnnnnnnnnnnnnnnnnnnnnnnnnnnnnnnnnnnnnnnnnnnnnnnnnnnnnnnnnnnnnnnnnnnnnnnnnnnnnnnnnnnnnnnnnnnnnnnnnnnnnnnnnnnnnnnnnnnnnnnnnnnnnnnnnnnnnnnnnnnnnnnnnnnnnnnnnnnnnnnnnnnnnnnnnnnnnnnnnnnnnnnnnnnnnnnnnnnnnnnnnnnnnnnnnnnnnnnnnnnnnnnnnnnnnnnnnnnnnnnnnnnnnnnnnnnnnnnnnnnnnnnnnnnnnnnnnnnnnnnnnnnnnnnnnnnnnnnnnnnnnnnnnnnnnnnnnnnnnnnnnnnnnnnnnnnnnnnnnnnnnnnnnnnnnnnnnnnnnnnnnnnnnnnnnnnnnnnnnnnnnnnnnnnnnnnnnnnnnnnnnnnnnnnnnnnnnnnnnnnnnnnnnnnnnnnnnnnnnnnnnnnnnnnnnnnnnnnnnnnnnnnnnnnnnnnnnnnnnnnnnnnnnnnnnnnnnnnnnnnnnnnnnnnnnnnnnnnnnnnnnnnnnnnnnnnnnnnnnnnnnnnnnnnnnnnnnnnnnnnnnnnnnnnnnnnnnnnnnnnnnnnnnnnnnnnnnnnnnnnnnnnnnnnnnnnnnnnnnnnnnnnnnnnnnnnnnnnnnnnnnnnnnnnnnnnnnnnnnnnnnnnnnnnnnnnnnnnnnnnnnnnnnnnnnnnnnnnnnnnnnnnnnnnnnnnnnnnnnnnnnnnnnnnnnnnnnnnnnnnnnnnnnnnnnnnnnnnnnnnnnnnnnnnnnnnnnnnnnnnnnnnnnnnnnnnnnnnnnnnnnnnnnnnnnnnnnnnnnnnnnnnnnnnnnnnnnnnnnnnnnnnnnnnnnnnnnnnnnnnnnnnnnnnnnnnnnnnnnnnnnnnnnnnnnnnnnnnnnnnnnnnnnnnnnnnnnnnnnnnnnnnnnnnnnnnnnnnnnnnnnnnnnnnnnnnnnnnnnnnnnnnnnnnnnnnnnnnnnnnnnnnnnnnnnnnnnnnnnnnnnnnnnnnnnnnnnnnnnnnnnnnnnnnnnnnnnnnnnnnnnnnnnnnnnnnnnnnnnnnnnnnnnnnnnnnnnnnnnnnnnnnnnnnnnnnnnnnnnnnnnnnnnnnnnnnnnnnnnnnnnnnnnnnnnnnnnnnnnnnnnnnnnnnnnnnnnnnnnnnnnnnnnnnnnnnnnnnnnnnnnnnnnnnnnnnnnnnnnnnnnnnnnnnnnnnnnnnnnnnnnnnnnnnnnnnnnnnnnnnnnnnnnnnnnnnnnnnnnnnnnnnnnnnnnnnnnnnnnnnnnnnnnnnnnnnnnnnnnnnnnnnnnnncagtgaagagcccactgaagaatctgaaaagcccctcactcaatcagggggagccccaccgcctccaggaggaaagcaacagggccgacagtgtgatgaaacccctcccacctcagtcagcgagtcggccccatcccagaccgactctgatgttcccccggagactgaagagtgcccctccatcacggctgatgccaatatcgactctgaagacgagtcggaaaccatccccacagataaaactgtcacgtacaaacacatagacccacctccagctcccgtgcaagaccgcagcccttcgccacgccatcctgatgtgtccatggtggacccagaggccttggcccttgagcagaacctgggcaaagctctaaagaaagatctgaaagagaagaccaaaaccaaaaagccaggtacaaagaccaagtcatcttcacctgtcaaaaagagtgatgggaagtctaagcccttggcagcttcaccaaaaccagcgggcttgaaagaatcctcagataaggtgtccagggtggcttctcctaagaagaaagaatctgtggaaaaggcagcaaaacccaccaccactcctgaggtcaaagctgcacgtggggaagagaaggacaaggagaccaagaatgctgccaatgcctctgcatccaagtcggccaagaccgccactgcagg

SEQ ID NO: 25493 - DNA, 284 bp, Macaca Mulatta
ggtatgtcattgatggtgccactgctctttggtgtgcagctggagcaggacattttgaagttgttaaacttctagtcagccatggagccaacgtgaatcataccacagtaactaattcaacccccctgcgggcagcatgctttgatggcagactggacattgtgaaatacttggttgaaaataatgccaacatcagcattgccaacaaatatgacaacacctgcctaatgattgcagcatataagggacacactgatgtggtcagatacattttagaacaacgt

SEQ ID NO: 25494 - DNA, 780 bp, Macaca Mulatta
  misc_feature (1)...(780): n = A,T,C or G
ggggagggctganggcanggcagatcacaaaagttcaggagatcgagaccattcctggccaagatggtgaaactctgtctctactaaaaatagaaaaattagctgcatgtggtggtgcgnnnnnnnnnnnnnnnnnnnnnnnnnnnnnnnnnnnagaagacnnnnnnnnnnnnnnnnnnnnnnnnnnnnnnnnnnnnnnnnnnnnnnnnnnnnnnnnnnnnnnnnnnnnnnnnnnnnnnnngccatttattgattgttgtttcctacatatcttggatgacaggcagcaatgagcttgtgcagcagccctggcagaggcttcagcagttagaggaggacaggttcctcagaatctcttatttcccccgtgctacctggactccagtagcaaagcagcagcaccaggcctgcttctagatcttggttttcagtgctggattcatgcgagacccacctccagttttatcaccagctgcttcaagctccatttttagaacaaccacccaagcatccctggcatgatctgcagtctgaaaagttgatccttcggccaaagcactggagatctctgtccattttctctagaccactggatgtccatttcattagtggtacataaactgaagattcccaggcatcatccagaaataggctgctgcagagggtgaactgtgtcctcccaagactctctgacagagctgatccctctaaagtgataaagacacaggcagagcagtcagtcagtacacactgctttcactgcaccagcaatttcctccc

SEQ ID NO: 25495 - DNA, 223 bp, Macaca Mulatta
cagcgcgagtgtatctctatccacgtggggcaggcaggtgtccagatcggcaatgcctgctgggaactgtactgccttgaacatggaattcagcccgatggtcagatgccaagtgataaaaccattggtggcggggacgactccttcaacacgttcttcagtgagactggggctggcaagcacgtgcccagagcagtgtttgtggacctggagcccactgtgg

SEQ ID NO: 25496 - DNA, 748 bp, Macaca Mulatta
  misc_feature (1)...(748): n = A,T,C or G
aagattcagaggcgccactgcccagcctgcaggttgcagaagtgcttagatgctggcatgaggaaagacannnnnnnnnnnnnnnnnnnnnnnnnnnnnnnnnnnnnnnnnnnnnnnnnnnnnnnnnnnnnnnnnnnnnnnnnnnnnnnnnnnnnnnnnnnnnnnnnnnnnnnnnnnnnnnnnnnnnnnnnnnnnnnnnnnnnnnnnnnnnnnnnnnnnnnnnnnnnnnnnnnnnnnnncctccagctcatctgttcatccatcaccagcccttgcccaccctggtcttgagcagcctctggtcacacacttcgcagacgtcaacactttcatggtacagcaagtcatcaagtttaccaaggacctgcctgtcttccgnnnnnnnnnnnnnnnnnnnnnnnnnnnnnnnnnnnnnnnnnnnnnnnnnnnnnnnnnnnnnnnnnnnnnnnnnnnnnnnnnnnnnnnnnnnnnnnnnnnnnnnnnnnnnnnnnnnnnnnnnnnnnnnnnnnnnnnnnnnnnnnnnnnnnnnnnnnnnnnnnnnnnnnnnnnnnnnnnnnnnnnnnnnnnnnnnnnnnnnnnnnnnnnnnnnnnnnnnnnnnnnnnnnnnnnnnnnnnnnnnnnnnnnnnnnnnnnnnnnnnnaccgacctggagttacccagagacatgagattgatcagctgcaagaggagatggcactgactctgcaaagctacatcaagggccagcagcaaaggccccgggatcggt

SEQ ID NO: 25497 - DNA, 741 bp, Macaca Mulatta
  misc_feature (1)...(741): n = A,T,C or G
atcataaggcctatggatnttctgccccaaaagaccagcaagtggtcacagcagtagagtaccaannnnnnnnnnnnnnnnnnnnnnnnnnnnnnnnnnnnnnnnnnnnnnnnnnnnnnnnnnnnnnnnnnnnnnnnnnnnnnnnnnnnnnnnnnnnnnnnnnnnnnnnnnnnnnnnnnnnnnnnnnnnnnnnnnnnnnnnnnnnnnnnnnnnnnnnnnnnnnnnnnnnnnnnnnnnnnnnnnnnnnnnnnnnnnnnnnnnnnnnnnnnnnnnnnnnnnnnnnnnnnnnnnnnnnnnnnnnnnnnnnnnnnnnnnnnnnnnnnnnnnnnnnnnnnnnnnnnnnnnnnnnnnnnnnnnnnnnnnnnnnnnnnnnnnnnnnnnnnnnnnnnnnnnnnnnnnnnnnnnnnnnnnnnnnnnnnnnnnnnnnnnnnnnnnnnnnnnnnnnnnnnnnnnnnnnnnnnnnnnnnnnnnnnnnnnnnnnnnnnnnnnnnnnnnnnnnnnnnnnnnnnnnnnnnnnnnnnnnnnnnnnnnnnnnnnnnnnnnnnnnnnnnnnnnnnnnnnnnnnnnnnnnnnnnnnnnnnnnnnnnnnnnnnnnnnnnnnnnnnnnnnnnnnnnnnnnnnnnnnnngatgatctcaacataagtggcatcatagcagccgtagtagttgtggccttagtgatctccgtttgtggccttggtgtgtgctatgctcagaggaaaggctacttttcaagtaag

SEQ ID NO: 25498 - DNA, 915 bp, Macaca Mulatta
  misc_feature (1)...(915): n = A,T,C or G
gggggctcttcgggtaaagatggcggagcgcgggtacagcttttcgctgactacattcagcccgtctggtaaacttgtccagattgaatatgctttggctgctgtagctggaggagccccgtcagtgggaattaaagctgcaaatggtgtggtattagcaactgagaaaaaacagaaatccattctgtatgatgagcgaagtgtacacaaagtggaaccaattaccaagcatataggtttggtgtacagtggcatgggccccgattacagagtgcttgtgcacagagctcgaaagctagctcaacagtactatcttgtgtaccaagaacccattcctacagctcagctagtacagagagtagcttctgtgatgcaagaatatactcagtcaggtggtgttcgtccatttggagtttctttacttatttgtggttggaatgagggacgaccatatttatttcagtcagatccatctggagcttactttgcctggaaagctacagcaatgggaaagaactatgtgaatgggaaaactttccttgagaaaaggtataatgaagatctggaacttgaagatgccattcatacagccatcttaaccctaaaggaaagctttgaagggcaaatgacagaggataacatagaagttggaatctgcaatgaagctggatttagaagacttactccaactgaagttaaggattacttgggctgccatagcataactgtgaattgactgacaaaatcctaattttagtgttatctttatacttaaacatgtttaaagtatgttcggttttgcagactttttgcatacttatttctacatggtttaaatcgactgttttaaaatgacacttataaatcctaataaactgttaacccnnnnnnnnnnnnnnnnnncgaggggggccg

SEQ ID NO: 25499 - DNA, 492 bp, Macaca Mulatta
taggatatgtgatggcgtccagtttggagctgggataaggttcctgtagccgacacccctacaggagaagctctgggaccagggcagcagcaaggcgcccatgccacgcactgtctctcgaggaaacacggctcagcgattctttgactgcagaccctgtgggaaaccctgtcaataaacgttaaagacacactttgaggcagcatggatgtggtttgctttcacccaccagtatggcccacgtgacctttccccaggaccacccgtgttctcacacacacctgcccagtgtctgcgagtctctgtgtttggctcccatgtaccatatgtgatgtgttcagagccaggcagcagcagggagcttggccccagaggaaactagaccctgctgttacggggagggcgcactcccctcagtgcaccagctggtgtcagaagaggcccacggcatcaaaggcttggagccacagtgctcgagccatttgaatgtgt

SEQ ID NO: 25500 - DNA, 7041 bp, Macaca Mulatta
  misc_feature (1)...(7041): n = A,T,C or G
gctgtaaggaggcaaaagttgcttgaacagagcatccagtctgcccaggagatcgaaaaatccttacacttaattcaggagtccctcacattcattgacaagcagttgacagcttatattgcagacaaggtggacgcagctcaaatgcctcaggaagcccaggcaanaaaaatccaattctgatttgacaagtcatgagatcagtttagaagaaatgaagaaacataaccaggggaaggaggctgcccaaagagtcctgtctcagattgatgttgcacagnacagaaaaaattgcaagatgtctccatgaagtttcgattatttcagaagccagccaattttgagcagcgtctacaagaaagtaagatgattttagatgaagtgaagatgcacttgcctgcgttggaaaccaagagtgtggaacaggaagtagtacagtcacagttaaatcattgtgtgnnnnnnnnnnnnnnnnnnnnnnnnnnnnnnnnnnnnnnnnnnnnnnnnnnnnnnnnnnnnnnnnnnnnnnnnnnnnnnnnnnnnnnnnnnnnnnnnnnnnnnnnnnnnnnnnnnnnnnnnnnnnnnnnnnnnnnnnnnnnnnnnnnnnnnnnnnnnnnnnnnnnnnnnnnnnnnnnnnnnnnnnnnnnnnnnnnnnnnnnnnnnnnnnnnnnnnnnnnnnnnnnnnnnnnnnnnnnnnnnnnnnnnnnnnnnnnnnnnnnnnnnnnnnnnnnnnnnnnnnnnnnnnnnnnnnnnnnnnnnnnnnnnnnnnnnnnnnnnnnnnnnnnnnnnnnnnnnnnnnnnnnnnnnnnnnnnnnnnnnnnnnnnnnnnnnnnnnnnnnnnnnnnnnnnnnnnnnnnnnnnnnnnnnnnnnnnnnnnnnnnnnnnnnnnnnnnnnnnnnnnnnnnnnnnnnnnnnnnnnnnnnnnnnnnnnnnnnnnnnnnnnnnnnnnnnnnnnnnnnnnnnnnnnnnnnnnnnnnnnnnnnnnnnnnnnnnnnnnnnnnnnnnnnnnnnnnnnnnnnnnnnnnnnnnnnnnnnnnnnnnnnnnnnnnnnnnnnnnnnnnnnnnnnnnnnnnnnnnnnnnnnnnnnnnnnnnnnnnnnnnnnnnnnnnnnnnnnnnnnnnnnnnnnnnnnnnnnnnnnnnnnnnnnnnnnnnnnnnnnnnnnnnnnnnnnnnnnnnnnnnnnnnnnnnnnnnnnnnnnnnnnnnnnnnnnnnnnnnnnnnnnnnnnnnnnnnnnnnnnnnnnnnnnnnnnnnnnnnnnnnnnnaggcctccattcctttgaaggaattggagcagtttaactcagatatacaaaaattgcttgaaccactggaggctgaaattcagcagggggtgaatctgaaagaggaagacttcaataaagatatgngaatgaagacaatgagggtactgtaaaagaattgttgcaaagaggagacaacttacaacaaagaatcacagatgagagaaagcgagaggaaataaagataaaacagcagctgttacagacaaaacataatgctctcaaggnaggatttgaggtctcaaagaagaaaaaaggctctagaaatttctcatcagtggtatcaatacaagaggcaggctgatgatctcctgaaatgcttggatgacattgaaaaaaaattagccagcctacctgaacccagagatgaaaggaaaataaaggnnnnnnnnnnnnnnnnnnnnnnnnnnnnnnnnnnnnnnnnnnnnnnnnnnnnnnnnnnnnnnnnnnnnnnnnnnnnnnnnnnnnnnnnnnnnnnnnnnnnnnnnnnnnnnnnnnnnnnnnnnnnnnnnnnnnnnnnnnnnnnnnnnnnnnnnnnnnnnnnnnnnnnnnnnnnnnnnnnnnnncacactgtccgtgaagaaacgatgatggtgatgactgaagacatgcctttggaaatttcttatgtgccttctacttacctgactgaaatcactcatgtctcacaagccctatcagaagtggaacaacttctcaatgctcctgacctctgtgctaaggactttgaagatctctttaagcaagaggagtctctgaagnnnnnnnnnnnnnnnnnnnnnnnnnnnnnnnnnnnnnnnnnnnnnnnnnnnnnnnnnnnnnnnnnnnnnnnnnnnnnnnnnnnnnnnnnnnnnnnnnnnnnnnnnnnnnnnnnnnnnnnnnnnnnnnnnnnnnnnnnnnnnnnnnnnnnnnnnnnnnnnnnnnnnnnnnnnnggcgatttgacagatctgttgagaaatggcggcgttttcattatgatataaagatatttaatcagtggctaacagaagctgaacagttcctcagaaagacgcaaattcctgagaattgggaacatgctaaatacaaatggtatcttaaggnaggaactccaggatggcatcgggcagcggcaaactgttgtcagaacgttgaatgcaactggggaagaaataattcagcaatcctcaaaaacagatgccagtattctacaggaaaaattggggagcctgaatctgcggtggcaggaggtctgcaaacagctgtcagaaagaaaaaagaggnnnnnnnnnnnnnnnnnnnnnnnnnnnnnnnnnnnnnnnnnnnnnnnnnnnnnnnnnnnnnnnnaggctagaagaacaaaagaatatcttgtcagaatttcaaagagatttaaatgaatttgttttatggttggaggaagcagataacattgctagtatcccgcttgaacctggaatgagcagcaactaaaaagaaagcttgagcaagtcaagnagttactggtggaagagttgcccctgcgccagggaattctaaaacaattaaatgaaactggaggacctgtgcttgtaagtgctcccataagcccagaagagcaagataaacttgaaaataagctcaagcggacaaatctccagtggataaaggttnaggtttccagagctttacctgagaaacaaggagaaattgaagctcaaataaaagaccttgggcagcttgaaaaaaagcttgaagaccttgaatatcagttaaatcatctgctcctgtggctgtctcctattaagaatcagttggaaatttataaccaaccaaaccaagaaggaccatttgacattaaggnaggaaactgaaatcgcagttcaagctaaacaaccggatgtggaagggattttgtctaaagggcagcatttttacaaggaaaaaccagccactcagccagtgaagnnnnnnnnnnnnnnnnnnnnnnnnnnnnnnnnnnnnnnnnnnnnnnnnnnnnnnnnnnnnnnnnnnnnnnnnnnnnnnnnnnnnnnnnnnnnnnnnnnnnnnnnnnnnnctcctagtcagactgttactctggtgacacaacctgtggttactaaggaaactgccatctccaaactagaaatgccatcttccttgatgttggaggtacctgctctggcagatttcaaccgggcttggacagaacttaccgaatggctttctctgcttggtcgagttataaaatcacagagggtgatggtgggtgaccttgaggatatcaacgagatgatcatcaagcagaaggnnnnnnnnnnnnnnnnnnnnnnnnnnnnnnnnnnnttggaagaactcattactgtgctgcccaaaattttgaaaaacaagaccagcaatcaagaggctagaacaatcattacggatcgaannnnnnnnnnnnnnnnnnnnnnnnnnnnnnnnnnnnnnnnnnnnnnnnnnnnnnnnnnnnnnnnnnnnnnnnnnnnnnnnnnnnnnnnnnnnnnnnnnnnnnnnnnnnnnnnnnnnnnnnnnnnnnnnnnnnnnnnnnnnnnnnnnnnnnnnnnnnnnnnnnnnnnnnnnnnnnnnnnnnnnnnnnnnnnnnnnnnnnnnnnnnnnnnnnnnnnnnnnnnnnnnnnnnnnnnnnnnnnnnnnnnnnnnnnnnnnnnnnnnnnnnnnnnnnnnnnnnnnnnnnnnnnnnnnnnnnnnnnnnnnnnnnnnnnnnnnnnnnnnnnnnnnnnnnnnnnnnnnnnnnnnnnnnnnnnnnnnnnnnnnnnnnnnnnnnnnnnnnnnnnnnnnnnnnnnnnnnnnnnnnnnnnnnnnnnnnnnnnnnnnnnnnnnnnnnnnnnnnnnnnnnnnnnnnnnnnnnnnnnnnnnnnnnnnnnnnnnnnnnnnnnnnnnnnnnnnnnnnnnnnnnnnnnnnnnnnnnnnnnnnnnnnnnnnnnnnnnnnnnnnnnnnnnnnnnnnnnngacctccaaggtgaaattgaagctcacacagatgtttatcacaacctggatgaaaacagccaaaaagtcctgagatccctggaaggttctgatgatgcagtcctgttacaaagacgtttggataacatgaacttcaagtggagtgaacttcggaaaaagtctctcaacattaggtnnnnnnnnnnnnnnnnnnnnnnnnnnnnnnnnnnnnnnnnnnnnnnnnnnnnnnnnnnnnnnnnnnnnnnnnnnnnnnnnnnnnnnnnnnnnnnnnnnnnnnnnnnnnnnnnnnnnnnnnnnnnnnnnnnnnnnnnnnnnnnnnnnnnnnnnnnnnnnnnnnnnnnnnnnnnnnnnnnnnnnnnnnnnnnnnnnnnnnnnnnnnnnnnnnnnnnnnnnnnnnnnnnnnnnnnnnnnnnnnnnnnnnnnnnnnnnnnnnnnnnnnnnnnnnnnnnagagctgcctcctgaggagcgagcccagaatgtcactaggcttctacgaaagcaggctgaggaggtcaatactgagtgggaaaaattgaacctgcattccactgactggcagagaaaaatagatgagaccctcgaaagactccaggaacttcaagaggccacggatgagctggacctcaagctgcgccaagctgaggtgatcaagggatcctggcagccagtgggcgatctcctcatcgactctctccaagatcacctcgagaaagtcaaggnnnnnnnnnnnnnnnnnnnnnnnnnnnnnnnnnnnnnnnnnnnnnnnnnnnnnnnnnnnnnnnnnnnnnnnnnnnnnnnnnnnnnnnnnnnnnnnnnnnnnnnnnnnnnnnnnnnnnnnnnnnnnnnnnnnnnnnnnnnnnnnnnnnnnnnnnnnnnnnnnnnnnnnnnnnnnnnnnnnnnnnnnnnnnnnnnnnnnnnnnnnnnnnnnnnnnnnnnnnnnnnnnnntctgtccagggtccctgggagagagccatctcaccaaacaaagtgccctactatatcaannnnnnnnnnnnnnnnnnnnnnnnnnnnnnnnnnnnnnnnnnnnnnnnnnnnnnnnnnnnagctgacctgaataatgtcaggttctcagcttataggactgccatgaaactccgaagactgcagaaggctctttgctnnnnnnnnnnnnnnnnnnnnnnnnnnnnnnnnnnnnnnnnnnnnnnnnnnnnnnnnnnnnnnnnnnnnnnnnnnnnnnnnnnnnnnnnnnnnnnnnnnnnnnnnnnnnnnnnnnnnnnnnnnnnnnnnnnnnnnnnnnnnnnnnnnnnnnnnnnnnnnnnnnnnnnnnnnnnnnnnnnnnnnnnnnnnnnnnnnnnnnnnnnnnnnnnnnnnnnnnnnnnnnnnnnnnnnnnnnnnnnnnnnnnnnnnnnnnnnnnnnnnnnnnnnnnnnnnnnnnnnnnnnnnnnnnnnnnnnnnnnnnnnnnnnnnnnnnnnnnnnnnnnnnnnnnnnnnnnnnnnnnnnnnnnnnnnnnnnnnnnnnnnnnnnnnnnnnnnnnnnnnnnnnnnnnnnnnnnnnnnnnnnnnnnnnnnnnnnnnnnnnnnnnnnnnnnnnnnnnnnnnnnnnnngctaataataagccagagattgaagcggccctcttcctagactggatgagactggaaccccagtccatggtgtggctgcccgtcctgcacagagtggctgctgcagaaactgccaagcatcaggccaaatgtaacatctgcaaggagtgtccaatcattggattcaggtannnnnnnnnnnnnnnnnnnnnnnnnnnnnnnnnnnnnnnnnnnnnnnnnnnnnnnnnnnnnnnnnnnnnnnnnnnnnnnnnnnnnnnnnnnnnnnnnnnnnnnnnnnngactacatcaggagaagatgttcgagactttgccaaggtactaaaaaacaaatttcgaaccaaaaggtattttgcgaagcatccccgaatgggctacctgccagtgcagactgtcttagagggggacaacatggaaacntcccgttactctgatcaacttctggccggtagattctgcgnnnnnnnnnnnnnnnnnnnnnnnnnnnnnnnnnnnnnnnnnnnnnnnnnnnnnnnnnnnnnncaggctagcagaaatggaaaacagcaatggatcttatctaaatgatagcatctctcctaatgagagcatnnnnnnnnnnnnnnnnnnnnnnnnnnnnnnnnnnnnnnnnnnnnnnnnnnnnnnnnnnnnnnnnnnnnnnnnnnnnnnnnnnnnnnnnnnnnnnnnnnnnnnnnnnnnnnnnnnnnnnnnnnnnnnnnnnnnnnnnnnnnnnnnnnnnnnnnnnnnnaggaatctgcaagcagaatatgaccgtctaaagcagcagcacgaacataaaggcctgtccccactgccgtcccctcctgaaatgatgcccacctctccccagagtccccgggatgctgagctcattgctgaggccaagctactccgtcaacacaaaggccgcctggaagccaggatgcaaatcctggaagaccacaataaacagctggagtcacagttacataggctaaggcagctgctggagcaannnnnnnnnnnnnnnnnnnnnnnnnnnnnnnnnnnnnnnnnnnnnnnnnnnnnnnnnnnnnnnnnnnnnnnnnnnnnnnnnnnnnnnnnnnnnnnnnnnnnnnnnnnnnnnnnnnnnnnnnnnnnnnnnnnnnnnnnnnnnagtcctccccagaacacaagcacagggttggaagaggtgatggagcaactcaacaactcctcccctagt

SEQ ID NO: 25501 - DNA, 624 bp, Macaca Mulatta
gaggatcacctgccttcttaaccagctcaccctccctctttgaagatcccccatgactgcaatgcggcgtgaggctgggactgcgagcactgacgccaccttcctgctgatgtgggactgggccctggacacacccctcagcccctctgtcctccttgtttggcctcatgggacggaggggctggaggagaggcggagctgtgccccagctgttccagcagcttgtccggtgtcagctggctctcagagtgctgacccctcgtcactgtggggattattctctctgcgggcagatgaggtgcaggaaaataggcttgggaatgttaaatatgatgggtaaattaaaagttttacaacattctacctaatatttttcttttaatgtgctctttctgttctattttattatggtgtcagaaagctaaaacggctagcaaaaatttttttagaaaaagaaaaattggtttaatgtgggaaagtacttaaattggtattatattttacatcttcaagtatagtgcataaataatattttgaatgtaactgttttcgtggatttcaattagacatgcatataataaactaagtatgtggcttattccatgtaattatttttgtaatatt

SEQ ID NO: 25502 - DNA, 679 bp, Macaca Mulatta
ttctatcatgatgcagagaagacggaacggagtgaagccatgtatgcctacggcagcagaaagagatgaaatcttgagagcaatgggaaagatgccctattgaatgtttgcattaaaagtatttatataacttagaagcagatgaatatttctaataaatgatcgctgtaatatttaagactgtacacccctcacccagacagaccttaagttcttcaagtggagacagtgaagtcaccccgtgtcctttttgcttgctgtcagtgccatgccgatggtatgttgctgctggctgtgctgtggcatgagtttgcatgattttctcgaggcatggagttaggtaaggctacgtgagaaatcgaacttttccactgagttttgaaagaagagtatgatgtgaacaagtaaagactgaatggggctgagatgaaggcaatgtttccaagtaaagtaaatgctatgagcaagagtgtgaggcaagggaagctggaaccacattcagagagtatcctgtagcttgttccacctaaaatctcaggtgggtggagcagtggtgggagaagactggaaaggtaagttgaaggtaaggaatgtgtggtgggcctcagatcccaggctcattcctcaaatcagttcttacttccctcacttatctttgtttaaataaggttagtacatt

SEQ ID NO: 25503 - DNA, 770 bp, Macaca Mulatta
gtgatgtcgactctttgcccaccgccatctccagctgttgccaagacagagattgctttaagtggtgaatcacctttattagcagctacttttgcttactgggacaatattcttggtcctagagtaaggcacatttgggctccaaagacagaacaggtacttctcagtgacggagaaataacttttcttgccaaccacactctaaatggagaaatccttcgaaatgcagagagtggtgctatagatgtaaagttttttgtcttgtctgaaaagggagtgattattgtttcattaatctttgatggaaactggaatggggatcgcagcacatacggactatcaattatacttccacagacagaacttagtttctacctcccacttcatagagtgtgtgttgatagattaacacatataatccggaaaggaagaatatggatgcataaggaaagacaagaaaatgtccagaagattatcttagaaggcacagagagaatggaagatcagggtcagagtattattccaatgcttactggagaagtgattcctgtaatggaactgctttcatctatgaaatcacacagtgttcctgaagaaatagatatagctgatacagtactcaatgatgatgatattggtgacaggtgtcatgaaagctttcttcttcaatggcatcaggtcacacttggcaacctgtggctgttcccgtgtaataagtagcaatgccagcaagttaataagatagtcgaacttatgccttttctgactgc

SEQ ID NO: 25504 - DNA, 807 bp, Macaca Mulatta
atgcatttcctcaagcaggccttaaaggttggtgtctcagcatcccactcttatccagccgatgtgacatctgttttctttctaatcctggttccgcctttgagctgtgaaataccctgccacatgaatatgcaaataacctgaggtctcctgagataaatatagatatattggcaccctgagagcatcacaaaacaaccacatccctcctctaaagaagcccctgggagcacagctcatcaccatggactggacctggaggctcctctttgtggtggcagcagctacaggtaaggggcttcctagtcccaaagctgaggaagggatcccggtttagttaaagaggattttattcactcctgtgtcctctccacaggtgcccagtcccaggtccagctggtgcagtccggggctgaggtgaagaagcctggggcctcagtgaaggtttcctgcaaggcttctggattcaccttcggcagctatgctatcagctgggtgcgacaggcccctggacaagggcttgagtggatgggagtgatcatccctcttgttggtataacaaactacgcagagaagttccagggcagagtcacgattaccgcggacacgtccacaagcacagcctacatggagctgagcagcctgagatctgaggacacggccgtgtattactgtgcgagaggcacagtgtgaaaacccacatcctgagagtgtcagaaaccctgagggagaaggcagctgtgcggggctgaggagatgacaggggttattaagtttaagattgtttacaaaatcggttatatattc

SEQ ID NO: 25505 - DNA, 1220 bp, Macaca Mulatta
  misc_feature (1)...(1220): n = A,T,C or G
agcaaacggatgtttcagaagacagcgatgatgatgtggatgaagatgaggtttttggtttcatcagccttttaaatttaactgaaagaaagnnnnnnnnnnnnnnnnnnnnnnnnnnnnnnnnnnnnnnnnnnnnnnnnnnnnnnnnnnnnnnnnnnnnnnnnnnnnnnnnnnnnnnnnnnnnnnnnnnnnnnnnnnnnnnnnnnnnnnnnnnnnnnnnnnnnnnnnnnnnnnnnnnnnnnnnnnnnnnnnnnnnnnnnnnnnnnnnnnnnnnnnnnnnnnnnnnnnnnnnnnnnnnnnnnnnnnnnnnnnnnnnnnnnnnnnnnnnnnnnnnnnnnnnnnnnnnnnnnnnnnnnnnnnnnnnnnnnnnnnnnnnnnnnnnnnnnnnnnnnnnnnnnnnnnnnnnnnnnnnnnnnnnnnnnnnnnnnnnnnnnnnnnnnnnnnnnnnnnnnnnnnnnnnnnnnnnnnnnnnnnnnnnnnnnnnnnnnnnnnnnnnnnnnnnnnnnnnnnnnnnnnnnnnnnnnnnnnnnnnnnnnnnnnnnnnnnnnnnnnnnnnnnnnnnnnnnnnnnnnnnnnnnnnnnnnnnnnnnnnnnnnnnnnnnnnnnnnnncacacatcattatttcgggaaaaacacctctagtgacaaatttccttcatctgcactgattacttcattaaaagaaacctagtatgttttcatacatctgatgtataaatttgctgaactttgagttagttttcttatattaagataatttttcatattaagaaaagtttctttttctaactgattaaaatacctcactatcatttcaaaaggttaaatgaattgatcaccatctctgctattttatcctcaaaatataatttcaaatggatcccatttaaatctatacctagtgcagatttgcaaaaaaagaaaaggaatagtgattaaggagtacctgttaccatggcagcaattgttagcacttcatctacacagtcaaattcacaggatgctaagatagactttgagagttgtggatcaagaggaaactctgacatgatgattccaaattcagaaagatttccatcattatccagtgctgccagataatctaagtcttccaatgcctgcatcanactttctggtgctaggaaaggaaaaaataataatttaagagtctcatatggccaagatggagaaacaggtactggattttccctcctgcatg

SEQ ID NO: 25506 - DNA, 1646 bp, Macaca Mulatta
  misc_feature (1)...(1646): n = A,T,C or G
tcctgggttctggccatgaagcccacctcaggcccagaggaggcccggcggccggcctccgacatccgcgtgtttgccagcaactgctcgatgcatgggctgggccacgtcttcgggccaggcagcctgagcctgcgccgggggatgtgggcagcagccgtggtcnnnnnnnnnnnnnnnnnnnnnnnnnnnnnnnnnnnnnnnnnnnnnnnnnnnnnnnnnnnnnnnnnnnnnnnnnnnnnnnnnnnnnnnnnnnnnnnnnnnnnnnnnnnnnnnnnnnnnnnnnnnnnnnnnnnnnnnnnnnnnnnnnnnnnnnnnnnnnnnnnnnnnnnnnnnnnnnnnnnnnnnnnnnnnnnnnnnnnnnnnnnnnnnnnnnnnnnnnnnnnnnnnnnnnnnnnnnnnnnnnnnnnnnnnnnnnnnnnnnnnnnnnnnnnnnnnnnnnnnnnnnnnnnnnnnnnnnnnnnnnnnnnnnnnnnnnnnnnnnnnnnnnnnnnnnnnnnnnnnnnnnnnnnnnnnnnnnnnnnnnnnnnnnnnnnnnnnnnnnnnnnnnnnnnnnnnnnnnnnnnnnnnnnnnnnnnnnnnnnnnnnnnnnnnnnnnnnnnnnnnnnnnnnnnnnnnnnnnnnnnnnnnnnnnnnnnnnnnnnnnnnnnnnnnnnnnnnnnnnnnnnnnnnnnnnnnnnnnnnnnnnnnnnnnnnnnnnnnnnnnnnnnnnnnnnnnnnnnnnnnnnnnnnnnnnnnnnnnnnnnnnnnnnnnnnnnnnnnnnnnnnnnnnnnnnnnnnnnnnnnnnnnnnnnnnnnnnnnnnnnnnnnnnnnnnnnnnnnnnnnnnnnnnnnnnnnnnnnnnnnnnnnnnnnnnnnnnnnnnnnnnnnnnnnnnnnnnnnnnnnnnnnnnnnnnnnnnnnnnnnnnnnnnnnnnnnnnnnnnnnnnnnnnnnnnnnnnnnnnnnnnnnnnnnnnnnnnnnnnnnnnnnnnnnnnnnnnnnnnnnnnnnnnnnnnnnnnnnnnnnnnnnnnnnnnnnnnnnnnnnnnnnnnnnnnnnnnnnnnnnnnnnnnnnnnnnnnnnnnnnnnnnnnnnnnnnnnnnnnnnnnnnnnnnnnnnnnnnnnnnnnnnnnnnnnnnnnnnnnnnnnnnnnnnnnnnnnnnnnnnnnnnnnnnnnnnnnnnnnnnnnnnnnnnnnnnnnnnnnnnnnnnnnnnnnnnnnnnnnnnnnnnnnnnnnnnnnnnnnnnnnnnnnnnnnnnnnnnnnnnnnnnnnnnnnnnnnnnnnnnnnnnnnnnnnnnnnnnnnnnnnnnnnnnnnnnnnnnnnnnnnnnnnnnnnnnnnnnnnnnnnnnnnnnnnnnnnnnnnnnnnnnnnnnnnnnnnnnnnnnnnnnnnnnnnnnnnnnnnnnnnnnnnnnnnnnnnnnnnnnnnnnnnnnnnnnnnnnnnnnnnnnnnnnnnnnnnnnnnnnnnnnnnnnnnnnnnnnnnnnnnnnnngacctcccacccctccttgtgctgtcaccaagactctctccgcctcccaccgcacctgctaccttgtcacacggctctaggcctgctgtctgtgtcctcagagccgcaccctgacatcctggacatgcctagcctgcacgtagcttttccatcttcaccccaaataaagtccta

SEQ ID NO: 25507 - DNA, 100 bp, Macaca Mulatta
gaggttcctggaattaagtctgccaggagcctctctggagtgcggactgctggtttttgctgtatcattagtgctggggcttaagaaaaaggtctgggcc

SEQ ID NO: 25508 - DNA, 448 bp, Macaca Mulatta
ggggtgggcagggtaggctccatgatctctccccgaggcctgggtcacactgtcgtgtcctgtggtgacaggtacaagatgacctgtgaatacacatggcccaaccacctgctgggctccgacaaggcagctgtgagcgctctcctggagcagcacggactgcagggggacgtggcctttggccacagcaagctgttcatccgctcaccccggacactggtcacactggagcagagccgagcccgcctcatccccatcattgtgctactattgcagaaggtgaggtgggcagggcaggcagacatccactatgggggtggggaaagcttgtgtcccaggggctacaaacacacttgtaagtttcacaggcgtctctgcttgatggagacaggccagagagtgtttaataaatgcttagggccaggtttggggctaagggttagggcct

SEQ ID NO: 25509 - DNA, 164 bp, Macaca Mulatta
gagatgaacaccacgatggcagagagcagcctgctggacttgctccccaaggaggagaaactgaggaactacttccgctacctgggctcactcaccacaccgacctgcgatgagaaggtcgtctggactgtgttccaggagcctattcagcttcacagagaaca

SEQ ID NO: 25510 - DNA, 555 bp, Macaca Mulatta
gtatgtttatactggaaggtgaagacactacagagaatgtacaatatctctttgagacatcaagcctctttcagattagtgttctccgtgatgcatgtgccaagttcttggaggagcaacttgatccttgtaattgcttaggaatccagcgctttgctgatacccattcactcaaaacactcttcacaaagtgcaaaaattttgcattacagacttttgaggatgtatcccagcatgaagaatttcttgagcttgacaaagatgaacttattgattatatttgtagcgatgaacttgttattggtaaagaggagatggtttttgaagccgtcatgcgttgggtctatcgtgccgttgatctgagaagaccactgttacatgagctcctgacacatgtgagactccctctgttgcatcccaactactttgttcaaacagttgaagtggaccaattgatccagaattctcctgagtgttatcagttgttgcatgaagcacggcggtaccacatacttgggaatgaaatgatgtccccaaggactaggccacgcaggt

SEQ ID NO: 25511 - DNA, 86 bp, Macaca Mulatta
aggatgaagctgctcaggtgcatggagtcaaggacccagtgccagcatcgacccagagtgtgcttgccgatgggacagattctgca

SEQ ID NO: 25512 - DNA, 956 bp, Macaca Mulatta
  misc_feature (1)...(956): n = A,T,C or G
ggacaagggaaatgtgactttctaattaggcattttaagttagtcacagtcttgaatgtataaatagcactaagactctcaggtcaggtaccttggtggtcagctactagttcttccagccctcattgaggttaacaagataaagacaaatccatttctttggccaaattcaagctttggctttgtgactttcccacagagactggaatgcgtcagcctgagaccactggcctattttctcagctgccatcttgaggacctttaatactcaaattcccagctccccactgaggtgttttgatgcttgccttttgacctccccatcccctttagtccctgcttactgctttgacgttcacatcctcaatgtctcggtctttcttgccgagaaagcacagtagtctgggactgggggcatttttcttctcagactgaaaataatctccttgggtcttaaaggaaaattactaacgacttgaaactccactgaacattgagcctttaagcttccctaaactacagaaactttttgtggggcttttaaaataggctttgggggggggtgtttttcctcttttccaaaatgtatttttcctaggatccacctcattatttccatgaaaaagaccaaaaccatcttttggggcttagctgagtaggcaatttttcttttacaaaacataatccaatagccaagagcccccaaaagaggatttaaatgtttaagagcncacgataataggggataagaaaaagtcaaaacaggtgctctgaacacttttctctgatgtgcgacacgnnnnnnnnnnnnnnnnnnnnnnnnncaagaggggcaaaccacgaatggttgtggttaaacccacggcagacaaagaacaccgggggttatttagtggagaaattattatattgtggtaaaatttttggcggaccaacggttgttagcgagaaagggg

SEQ ID NO: 25513 - DNA, 216 bp, Macaca Mulatta
agccagccattaaaatcactgcgcaagttgttacatctctcttcggcctcgaatcacccggcttcttcagacccccgcttccagcccttaacagctcaacaaaccaaaaattccttctcagaaattcggattcaccccctgagccaggcctctggcgggagcagcaacatccggcaggagcccgcaccgaagggcaggccaacgctccagctgcca

SEQ ID NO: 25514 - DNA, 128 bp, Macaca Mulatta
tgatgagagaggtatggtgcgattaactgaatcatttaatcaagtggggacccgtctgtctgtgccttcccgggaagggtcttagtttaccactgcagaggggaggaatttggcagtcatgtggggtg

SEQ ID NO: 25515 - DNA, 1118 bp, Macaca Mulatta
  misc_feature (1)...(1118): n = A,T,C or G
gggggattatataccaggggcgaaaaaaaaagatcatttggtagaaactagggaaatctgaatacagtgtggactttagttaatataaatgagaaaatggtttcatttgctctaaagggatcttagaatatcttactttgcatagttgcatgagcactggctaggagatgataagctctggcatttaggcctctctgccatttagtagcaatatagtcattaagcgaagcattactctggactttattgtcctgtttctatcaaattggactaataaaaactgatattatacattcatcgcagtattgttaggagatttaaatgaactagtggatgtaaaatactttagaaagcatatataaagtactacatacaatgaggtggctttcatttagtggctcaattctgagaacctcaaatttaaaagggttcagggcattcagaaaacaacaagttgtctcccttccgtattcctacggaagaattttgggaaaattttcttgaaaacttaaataaccctttatttaaagcttacgataaaagccaaatgttgaacggcgatatactatggttttcacaacactggagtctaagaatttaacctccaatatnnnnnnnnnnnnnnnnnnnnnaccttttttttgcgctacttctcgcaaaaatataaatcgtcccgaatcctcctcaaaaattaacttatttaatagccccctagtgaaaaaagggatacctctatacactttcaaacaagagcttaaaccccaatacaatacttaagaatgagtgggggagccctcaaaaagaagaaaaccatttttatttctttaaaaaaggacctcaaatatttgttaaaatttatcaaaaaagttcgcccactactaatatgtaaagaacaaagcacatacttgtttcatatataaaacgggtgatattaataggattgggcccttaatttctctagatatcatggaatcgtttanaacccggcgcatatataataacctcaaacatctatatgtggggngacttgcgggacgaaatctgtgttgggcatgcatcgttcgtggctttttaaagtgggcggatttttttatgtttctttccagatgtgtctatcc

SEQ ID NO: 25516 - DNA, 192 bp, Macaca Mulatta
actagatttagaactcaaagaccacgagggcagcacggctctgtggctcgcagtgcagcatatcacggtgtcttctgaccagtctgtgaaccccttcgaagatgtccccgtggtaaatgggacttcatttgatgagaacagctttgcagccagactcatccagcgcggcagccacacggacgcacctgacac

SEQ ID NO: 25517 - DNA, 544 bp, Macaca Mulatta
atattaaatgtatttcctgtagggggcgatatactaaatgtattttagacttcctgtagggggcgataaaataaaatgctaaacaactgggtatatatgcataaaaactatccattcaaatccaaaaatttaataatcattgagtcttttattaatgaatttgaatactagaaagaaacagggcttgcatcgataaatggaagaatgtttttatttgttttaaggagctttgccccttaaaaaaacatgcaattgcataaatctaacagagttgctaaaagttgtttggtttcttttgatgaaggaaagaccaaactaaattatttaaatataaaagtcatgacttgtatataaagggggtttttggaccagcatcaccagggaacatgtcttattttctctaaatttgagcaatgatggtgcaatttaaggaagtgatggcattgaagaaagaaagacaagcataatgaaagttctctaggcacaaaaatgaatggtatgtgcatgaaaatacaaaaagttagcgatgtttaagccatggcat

SEQ ID NO: 25518 - DNA, 560 bp, Macaca Mulatta
  misc_feature (1)...(560): n = A,T,C or G
gatccatggtctgtggatcccaatgttctgactggagacggggagccagcgagacctggggctccagggtctgcccaaggaggttgctcatgggggcagacctctagagcaggatttgaggccaggccaaagagnnnnnnnnnnnnnnnnnnnnnnnnnnnnnnnnnnnnnnnnnnnnnnnnnnnnnnnnnnnnnnnnnnnnnnnnnnnnnnnnnnnnnnnnnnnnnnnnnnnnnnnnnnnnnnnnnnnnnnnnnnnnnnnnnnnnnnnnnnnnnnnnnnnnnnnnnnnnnnnnnnnnnnnnnnnnnnnnnnnnnnnnnnnnnnnnnnnnnnnnnnnnnnnnnnnnnnnnnnnnnnnnnnnnnnnnnnnnnnnnnnnnnnnnnnnnnnnnnnnnnnnnnnnnnnnnnnnnnnnnnnnnnnnnnnnnnnnnnnnnngagcctgggcccttctgccatgtgcagctctgtgcctgtgaccggaagctcgtctactgcctcaagagaaacctatggagctacaacccgcagtaccaatattttcccaacatcctctgctccta

SEQ ID NO: 25519 - DNA, 225 bp, Macaca Mulatta
ctagttgtcactgctaatcatggagaagttctacttttgaccagcaattgactaaatgcccccatatgccccttctaccagatagtggtagagagaaataaagtgggaaaactcttggaaaacttactcagaaatctggcaagagagctgttgagaatccccagtcatctgtatccattgaagtctaacttgtaagataagtaaataaatagcaccaggaaaact

SEQ ID NO: 25520 - DNA, 2945 bp, Macaca Mulatta
  misc_feature (1)...(2945): n = A,T,C or G
gtcacagagaaaaacatcagcataggagactcaactcttcagcaacttgcagtccctcgagagaaaatgttgccttacaactgggattaagcccttcaaagaattcttcnnnnnnnnnnnnnnnnnnnnnnnnnnnnnnnnnnnnnnnnnnnnnnnnnnnnnnnnnnnnnnnnnnnnnnnnnnnnnnnnnnnnnnnnnnnnnnnnnnnnnnnnnnnnnnnnnnnnnnnnnnnnnnnnnnnnnnnnnnnnnnnnnnnnnnnnnnnnnnnnnnnnnnnnnnnnnnnnnnnnnnnnnnnnnnnnnnnnnnnnnnnnnnnnnnnnnnnnnnnnnnnnnnnnnnnnnnnnnnnnnnnnnnnnnnnnnnnnnnnnnnnnnnnnnnnnnnnnnnnnnnnnnnnnnnnnnnnnnnnnnnnnnnnnnnnnnnnnnnnnnnnnnnnnnnnnnnnnnnnnnnnnnnnnnnnnnnnnnnnnnnnnnnnnnnnnnnnnnnnnnnnnnnnnnnnnnnnnnnnnnnnnnnnnnnnnnnnnnnnnnnnnnnnnnnnnnnnnnnnnnnnnnnnnnnnnnnnnnnnnnnnnnnnnnnnnnnnnnnnnnnnnnnnnnnnnnnnnnnnnnnnnnnnnnnnnnnnnnnnnnnnnnnnnnnnnnnnnnnnnnnnnnnnnnnnnnnnnnnnnnnnnnnnnnnnnnnnnnnnnnnnnnnnnnnnnnnnnnnnnnnnnnnnnnnnnnnnnnnnnnnnnnnnnnnnnnnnnnnnnnnnnnnnnnnnnnnnnnnnnnnnnnnnnnnngaccaaagttagctcctggaatgactgaaataagtggggacagttctgcaattccacaagctaattgtgactcggaagaggatacaaccaccctgtgtttgcagtcacggaggcagaagcagcgtcagatatctggagacagccatacccatgttagcagacagggagcttggaaagtccacacacagattgattacatacactgcctcgtgcctgatttgcttcaaattacagggaatccctgttactggggagtgatggaccgttatgaagcagaagcccttctcgaagggaaacctgaaggcacgtttttgctcagggactctgcgcaagaggactacctcttctctgtgagcttccgccgctacaacagatccctgcatgcccgaattgagcagtggaatcacaactttagtttcgatgcccatgacccctgtgtatttcactcctccactgtaacaggacttttagaacattataaagatcccagttcgtgcatgttttttgaaccattgcttactatatcactaaataggacttttccttttagcctgcagtatatctgtcgcgcggtaatctgcaggtgcactacgtatgatggaattgatgggctccctctaccctcaatgttacaggattttttaaaagagtatcattataaacaaaaagttagagttcgctggttagaacgagaaccagtcaaggcaaaatgaactttccggtccccaaagggtgttaactaggtccgattgcatgtgcatcagacagtacacctacagcaaacacacgtagcagtgttaggttttatcatacagtatgtaagcttagtgttagtatctgtcagatgcgacctgctgttatttattcaaataaatatggtgcctattggaacaacagaggatagagctacaggtgttcagtaagactacaaaaacactttgatgatttctctaacagtttggtttttaatggctgtagtatttgagtgaggcaactctgggacatttgttatgaagaattctacttcttactgaagaacaaattattaatattggatgagtatttcaatagtgtgactaatgtttgaaattattttttctaagagattttctataatcttccaaaagtagtgatatttgtagtcactataaatcaagttttggaagtcaaaaaaataataataaaagactgccttcattttaggaaaaaaagcagttttctggccacaagggcatagtgcaattcatttaggtgttgatgtagtttataatcagatgccttttctcttctgcaaaagatactgttaagtaaaccagattttctaaatagtcattcttaaaatttcagacttacaaagctcgtagtagaattttattgnnnnnnnnnnnnnnnnnnnnnnnnnnnnnnnnnnnnnnnnnnnnnnnnnnnnnnnnnnnnnnnnnnnnnnnnnnnnnnnnnnnnnnnnnnnnnnnnntttttaatgagtgctttaacttaaaacaggcatttgaaacatctgctgcaatgtagtcttgcatgtgattttttaaagttgatgtgcagtctaattgtttcataattttttgatcttttcctatatccagaatgattttgtgaaccacgaagtatatgagactaaaaaatgcccaaacaagtcagataataatagctacaatggttgctgatgttgagattattgttgaactgtaattaataatttggatggcagtatttatctcttttttgtacactcccatagctgaattgcttaagtataatttatagaatttcagtgcagttaattcttaatggaaaatcagaaacctaaattgcagatttaaaaagtactgtacaaccattatatctgtaaataccttagcacttttttatcacttagaataatatgtactactatgtgagtgagctcttttggaagttatatcaagttctagtgtttgtttcttagtaactgaactgaatttccagttctgtcctagacattttgcactaaagtagccaaatacattcttgtgcctttttgttatggtgctccataccactggtgagcgctccatagtttccttacctgctgctacagaatgttattttacatccctatggctatcgccaaggctacaaaaaagaaaagctatatttgtatgcaa

SEQ ID NO: 25521 - DNA, 2255 bp, Macaca Mulatta
  misc_feature (1)...(2255): n = A,T,C or G
cgaggacccggcagaagcgccagggcagaatcaccgctaggacagtgggcgttgacggcctccggggaacgcggccgtgggctgggtctcgcgggctgcccgctgcgcatgctccgctaggaannnnnnnnnnnnnnnnnnnnnnnnnnnnnnnnnnnnnnnnnggcgcggcgccacgtcgggggcgggcccggcgagcgcgggaaggctctgcggagcggccggcagtcctcagccttctcgcgtcatggccctatcggttccctgctactcacccaggtaccgaaagccgcccgaggtnnnnnnnncgacagaaaagggcccggagccgtggagctgccgcctccccgccccgtgagctgccggagccggcggcccgccgagccgccctggcggcggggttgcaccttcgccctttccctgccgcggggggcagaggcggtggcggcggcccggccgctgcccagaggaaccctttcgcccgcctggacaaccgaccgcgggtcgccgcggagctccccgacgggccggcccgcgagcagccggaggcgccgggcccgtttttagattctaatcaagaaaatgatttgctatggcaagagaagttccctgaaagaacaactgttactgaattaccccagacttcacatgtatcgttctccgagtctgatattccatcctcagaaaaaactgagttacctgtggactggagtattaaaacccgactccttttcatctcttctcaaccctttacctgggcagatcatttgaaagcacaggaagaggctcaaggtcttgtccagcattgtagggcaacagaagttactttgcctaaaagtatacaggatcccaaactctccactgagctccgttgtgccttctagcagagccttatctattggctccagcctgctttgtcttggctaccactggaccctcgtattggagctgatagaaaaatggctggaaagacaagtccttggtcaaatgatgcaaccctgcagcatgttttaatgagtgactgatccgtgagctttacttctctatataatttgctgaagacaaaacttagcccctatttctacgtttgtacctatcagtttactgtcctgttcagaggagcaggattagctggaagtgacttcatcacaggtctcatatctcctacaactcgaggtttaagagaagctatgagaaatgaaggtattgaattttctctgcctttaataaaagaaagtggccataagaaggagacagcatctggaacaagcttgggatatgaggannnnnnnnnnnnnnnnnnnnnnnnnnnnnnnnnnnnnnnnnnnnnnnnnnnnnnnnnnnnnnnnnnnnnnnnnnnnnnnnnnnnnnnnnnnnnnnnnnnnnnnnnnnnnnnnnnnnnnnnnnnnnnnnnnnnnnnnnnnnnnnnnnnnnnnnnnnnnnnnnnnnnnnnnnnnnnnnnnnnnnnnnnnnnnnnnnnnnnnnnnnnnnnnnnnnnnnnnnnnnnnnnnnnnnnnnnnnnnnnnnnnnnnnnnnnnnnnnnnnnnnnnnnnnnnnnnnnnnnnnnnnnnnnnnnnnnnnnnnnnnngcacgaagtgtgtatgtgaagacacaagctctttctggatacagagaccagtttagtttggagattacaggtcctatcatgcctcattctctgcattcactgaccatgctgctcaaatcttcacagagtgggtctttctctgcagtactacatccacacgagccaactgctgtatttaacatctgcctgccagtggacaaagtacttgatatggaggttgttcataaggagcttactaactgtggtttgcaccctaacactttggagcaacttagtcaaataccattacttgggaaatcagctttacggaatgtggtgctgagagactacatttataattggagatcctgaacaccaaagtaagcctaaaaggaatctttgaggaaaaaagccttctagcaaggaaattcaagattcctgaagttgaaggaatatactgacatgtttataaacataacttttattacagtagcatctaaggttttaaatcagtgttttctgcttttactattttcagattagatttttagatataaagatgaaaaactcagataactcaaatgagctatctgtatccctacaacctaattgtatattgagtagaaagtgaattaatatgtttccttgcaaatgggaaatcacataacggttacctcatggcattgtg

SEQ ID NO: 25522 - DNA, 138 bp, Macaca Mulatta
  misc_feature (1)...(138): n = A,T,C or G
ggacaaaaagatcatggagattctggccacagctgggaatgttgtcaccctgaccatcatccccagtgtgatctacgagcacatggtcaaaaagtngttgtctccagtcctgctccaccacaccatggaccactccat

SEQ ID NO: 25523 - DNA, 565 bp, Macaca Mulatta
agtgataaaacatgatccagatgtgcaaacaaaacaagataaggtccaaaactctgttttggctcaaggtcccggcgctattgtttattctgcgaatacctgaaaggtacagcgcacttactcttaaagagactgctggaagctttggaagaccaccaacagaagaaaggggaaatgaacacatcagggtcccccctgaaaactcagactgtatccgagcagatgttaacgatgatgattacaaggatgataaaatacaccatcaagaaacaggaaggaaaaacgagaaagagaaagttggtaggaagggcaagcatctgttggctattgatcagaaacgtggagagcatgttgtctgtggcagcacacgtaataatgagtcagagatctctttggatttagaaggctttccaaatcctacagccaaagagtgtgagggacttgctactttagataacaagggtgatcttgatggagaaattttagaaggcactgaggacctagaaggctctctaaaccactataccccctcagtacaggaccagatttcagaaatgattccctt

SEQ ID NO: 25524 - DNA, 2394 bp, Macaca Mulatta
  misc_feature (1)...(2394): n = A,T,C or G
gctttgctccgcctcgtgatagagctgttagaaagagtcaaaattgttgaagctcttagtacagttcctcagatgtactgcttagctgttgttgaggttgtaagaagaaaaatgttcataaaacactacagggagnagtgggctggtgctttagtcaaagatggaaagagattatatgaagcagaaaaatcaaaaagggaatcctttgggaaattatttagtaagtnggaagtcttttttaagaaatcgtctgtttaggggactggactcctggcccccttccttttgtnnnnnnnnnnnnnnnnnnnnnnnnnnnnnnnnnnnnnnnnnnnnnnnnnnnnnnnnnnnnnnnnnnnnnnnnnnnnnnnnnnnnnnnnnnnnnnnnnnnnnnnnnnnnnnnnnnnnnnnnnnnnnnnnnnnnnnnnnnnnnnnnnnnnnnnnnnnnnnnnnnnnnnnnnnnnnnnnnnnnnnnnnnnnnnnnnnnnnnnnnnnnnnnnnnnnnnnnnnnnnnnnnnnnnnnnnnnnnnnnnnnnnnnnnnnnnnnnnnnnnnnnnnnnnnnnnnnnnnnnnnnnnnnnnnnnnnnnnnnnnnnnnnnnnnnnnnnnnnnnnnnnnnnnnnnnnnnnnnnnnnnnnnnnnnnnnnnnnnnnnnnnnnnnnnnnnnnnnnnnnnnnnnnnnnnnnnnnnnnnnnnnnnnnnnnnnnnnnnnnnnnnnnnnnnnnnnnnnnnnnnnnnnnnnnnnnnnnnnnnnnnnnnnnnnnnnnnnnnnnnnnnnnnnnnnnnnnnnnnnnnnnnnnnnnnnnnnnnnnnnnnnnnnnnnnnnnnnnnnnnnnnnnnnnnnnnnnnnnnnnnnnnnnnnnnnnnnnnnnnnnnnnnnnnnnnnnnnnnnnnnnnnnnnnnnnnnnnnnnnnnnnnnnnnnnnnnnnnnnnnnnnnnnnnnnnnnnnnnnnnnnnnnnnnnnnnnnnnnnnnnnnnnnnnnnnnnnnnnnnnnnnnnnnnnnnnnnnnnnnnnnnnnnnnnnnnnnnnnnnnnnnnnnnnnnnnnnnnnnnnnnnnnnnnnnnnnnnnnnnnnnnnnnnnnnnnnnnnnnnnnnnnnnnnnnnnnnnnnnnnnnnnnnnnnnnnnnnnnnnnnnnnnnnnnnnnnnnnnnnnnnnnnnnnnnnnnnnnnnnnnnnnnnnnnnnnnnnnnnnnnnnnnnnnnnnnnnnnnnnnnnnnnnnnnnnnnnnnnnnnnnnnnnnnnnnnnnnnnnnnnnnnnnnnnnnnnnnnnnnnnnnnnnnnnnnnnnnnnnnnnnnnnnnnnnnnnnnnnnnnnnnnnnnnnnnnnnnnnnnnnnnnnnnnnnnnnnnnnnnnnnnnnnnnnnnnnnnnnnnnnnnnnnnnnnnnnnnnnnnnnnnnnnnnnnnnnnnnnnnnnnnnnnnnnnnnnnnnnnnnnnnnnnnnnnnnnnnnnnnnnnnnnnnnnnnnnnnnnnnnnnnnnnnnnnnnnnnnnnnnnnnnnnnnnnnnnnnnnnnnnnnnnnnnnnnnnnnnnnnnnnnnnnnnnnnnnnnnnnnnnnnnnnnnnnnnnnnnnnnnnnnnnnnnnnnnnnnnnnnnnnnnnnnnnnnnnnnnnnnnnnnnnnnnnnnnnnnnnnnnnnnnnnnnnnnnnnnnnnnnnnnnnnnnnnnnnnnggaaaaccaacaaataattaatcaaatacaggaatctcatgctgcagttatccaggaaaaagaacaacagttacaggaattaaaactcaaggtttctgatttgtcagacatgagatgcaagttagaggttgaacttgcattgaaggaagcagaaactgatgaaataaaaattttgctggaagaaagcagagcccagcagaaggagaccttgaaatctcttcttgaacaggagacagaaaatttgagaacagaaattagtaaactcaaccaaaagattcaggataataatgaaaattatcaggtgggcttagcagagctaagaactttaatgacaattgaaaaagatcagtgtatttctgagttgattagtagacatgaagaagaatctagtatacttaaagctgaattaaacaaagtaacatctttgcatcaccaagcatttgaaatagaaaacaccctgaaagaacaaataattgaactgcagagtaaattgaactcagaattgagtgctcttgaaaaacagaaagatgaaaaaatcacccaacaagaagagaaatatgaagctattatccagaaccttgagaaagacaaacaaaaattggtcatcagccaggaacaagacagagaacagttaattcagaagcttaattgtgaaaaagatgaagctattcagactgccctaaaagaatttatattggagagagaagttggaagaaacagttattagaa

SEQ ID NO: 25525 - DNA, 3007 bp, Macaca Mulatta
  misc_feature (1)...(3007): n = A,T,C or G
gagcgattcacgtcccggaagcggccgtggcggtggcggcgtaggcggaggagattttcggacttgcgacttccgaacggccctggcaggaggagcggcgttcggccggggcgggcctgaggaaacgctctggggcccagtggctctccccctgctcctgcccgaacctgccgtctctcttacggagccagtggccgggtaggatgcagacttcagaacgtgaggggagtgggccggagctgagccccagcgtgatgcccgaggctcccctggagtctccaccttttcctaccaagtccccagcgtttgaccttttcaacttggttctctcctacaagaggctggagatctacctggaacccttgaaggatgcaggtgatggtgttcgatacttgctcaggtnnnnnnnnnnnnnnnnnnnnnnnnnnnnnnnnnnnnnnnnnnnnnnnnnnnnnnnnnnnnnnnnnnnnnnnnnnnnnnnnnnnnnnnnnnnnnnnnnnnnnnnnnnnnnnnnnnnnnnnnnnnnnnnnnnnnnnnnnnnnnnnnnnnnnnnnnnnnnnnnnnnnnnnnnnnnnnnnnnnnnnnnnnnnnnnnnnnnnnnnnnnnnnnnnnnnnnnnnnnnnnnnnnnnnnnnnnnnnnnnnnnnnnnnnnnnnnnnnnnnnnnnnnnnnnnnnnnnnnnnnnnnnnnnnnnnnnnnnnnnnnnnnnnnnnnnnnnnnnnnnnnnnnnnnnnnnnnnnnnnnnnnnnnnnnnngttctatggggctcttctgggcacggtctgcatgctgtatttgctgccactctgctgggtcctcacccttttaaacagcaccctctttctggggaatgtggagttcttccgannnnnnnnnnnnnnnnnnnnnnnnnnnnnnnnnnnnnnnnnnnnnnnnnnnnnnnnnnnnnnnnnnnnnnnnnnnnnnnnnnnnnnnnnnnnnnnnnnnnnnnnnnnnnnnnnnnnnnnnnnnnnnnnnnnnnnnnnnggacctcacaccgggcagcgtggaggaggctgaggaggctgagccagatgaggagtttaaagatgcgattgaggnnnnnnnnnnnnnnnnnnnnnnnnnnnnnnnnnnnnnnnnnnnnnnnnnnnnnnnnnnnnnnnnnnnnnnnnnnnnnnnnnnnnnnnnnnnnnnnnnnnnnnnnnnnnnnnnnnnnnnnnnnnnnnnnnnnnnnnnnnnnnnnnnnnnnnnnnnnnnnnnnnnnnnnnnnnnnnnnnnnnnnnnnnnnnncggagctgcagtaactgtggaaacagcttctgctctcgatgctgctccttcaaggtccccaggtcctccatgggggccacagncagcccctgaagcccagagggagactgtgtttgtgtgtgcctcgtgtaaccagaccttgagcaagtgagaagagaggccagggtccaaccaggcacccatccttggggccagcagtaggcgccccactctccccaccccggccccctgtggtgtgtgctgggcaaatgtggcctgaatgctaggtaggcttccccttccttcctcgctctctccagctggattctggagctgttctccacccctgagagtggctggcaatggctgctctcaatcccttggggagaggagcccctggagggcctggcatgttgccctgctctgcctgggactgaatgagtggactcagggctgggcaggcagtagccaccagagggcagcagtgaactaggtcaggtctgactggggtctgatgaccagcgtcagtgtggctatgcctgagaattccagacctgaggttgggaaaagaggtttttctcctgtagggtactggccaggccctcagcctcagagagcctgcagaagggcttgggagtgccacaccccatctctgctgattgaatgtccttccaggcaccaggatctcatcatttcccccatcagagggtgtggccaggcctaacaagaccaggggtgcttctagaaacagggtttaagttcccagattcccccagaggagaatgtgtataggaggggttggctgagtccttcagcattaagtggaggaaagcatggggaagccccaacagctggacagacctcagcctcccctcgaagacgcctcaattcacagactcagcccacacgatgccctagtgtccccagctgcgctggagcagctggatcacagggcactcggatcacaacttctgcaccctctgcccagagtctggggcagtcctccactggcccagcgctccagcttcctttccctgcctcttgccccatggagtgggaggccaggtgagtggagcagaggtcctgaagcccttgacccctgggggcctgggaagtgtaggatctttctggactgggtcctggatcccggggctattccctggaggacagtcttagttatgggataaggtcccttgggggtctccatttcctttccaacaatttcatgttcactactggactcttacgggctcagtatctctccgttagccatgagctggctcaggcatcccttcccttccctggagctgctttgcctttctaaagtatttatttatttattgcatggttcctgggaacatgtagcataaggaatgggatgaggaggaattgggaggcggtctcctacctagagctcttccctggaatcatggactgcctgggacccaggacctatgagggggccgagaggtttctacactcggggagcaggggtgcagagaggcaggttggggagacaagggacccatccgaggcccnnnnnnnnnnnnnncaagcagtttagctgcgactctacagccaggggcctgcccaggccagtggaggagccagagctctggggagcctggcacgctttggtatcgtatcgcctctgtgtcctgttaggagagttcagtaccccgtgctttctttacactggagaggaactaaaaggatctctgtgtctatggagaattgtcaataaaaaggcctcaagcttc

SEQ ID NO: 25526 - DNA, 909 bp, Macaca Mulatta
tccagtgtatgaactgtgtcctctccctgggactctccccccctcagacctggaatagtacccatttttctgaccacagctcccacttccttctgctctccctctctttgcagaattcttcattgatgggctggggaccctactcgtggggtcatgcccagaagtgattataggtcaccagtctcggtctccagtggtggactcagagctggctgccctagagaagacctacaatacataccggtccaacaccctcgcccaggtccagttcaagctggctctccactacttcaagaaccatctccaatgtgccacataaaggtgtgagggcataggagaaacactagactggctggttatggtatctatagcaggccaccaaaaactggactcctgataggtgaacattgtagcaaaccagctggtgagtagggcaaagggaaatggctcagttactgaagtaccaatcagaggtgaagggtcgttagaaatgaaccagtcactgaccagggcagtggagactgtattaatagcaatgatttgtacaatgccctgctttttatgaatcatttacatggacagtatctcatatcatctcatctgatctcacacagaagactacatttgttggtgtcctcagtcaaaagaacagctgcctggtccttgatagttgtttggtggagattctgtcacagtcagaagcattggctccagcatcactgtcgtccctacatttgtattgggttctatcttgtagactcaaaaatgtgaacaatctagggtccttgccttgaggaggtttgcagcctggttcagttcagtctaatcacagaatcaggcagccagggtcagaggatcagagaagggaaggcatcatcaggtcccaggcagcagaggaagtctccgtgg

SEQ ID NO: 25527 - DNA, 814 bp, Macaca Mulatta
acatcagactattcatactggcaagaaactctatgaatgtaaggaatgtgggaaggcttttaatcaaggctcaactcttatacgacatcagagaattcataccggtgagaaaccctatgaatgtaaaatatgtggaaaggcctttagagtgagctcacaactcaagcaacatcagagaattcacactggagagaaaccctaccaatgtaaggtatgtggtagggccttccaacgggtctcacatcttactgtacattacagaattcatacaggtgaaaagccatatgaatgtaaggaatgtgggaaggcttttagtcattgctcacaattgattcatcatcaggttattcacactgagaaaaagccttatgaatataaggaatgtgagaggaccttgagtcatgattcaactaccgttcaacctcagagaatgcataatagagaaacacatgtgaatataataaatgtagaaaagccttccatcagcacttaccccttactaatcatcagagaatttatgttggcaagcaaccatatgagtggaagtaatggggaaagcccattagcttaggctaatcatgacttaactccttccccttcgagaaagacttgaagaatgtaatgccagtgacaatgccttcattcagaggtcatcctttatcctaagtctgaaaattcttatcaaagaaaattttatggatgtaaattgttcagaccatgattgtcaaagaagcagggaaaggttggaagaaattttatatgtaacacattccagaatcacattttctaaccacagtatagtgattttatcaag

SEQ ID NO: 25528 - DNA, 234 bp, Macaca Mulatta
  misc_feature (1)...(234): n = A,T,C or G
ccatggacggggtgcccaggattgatcactaccggcacacagccgagcagctgggcgggaagttgtcccgccctgccctggcggagctccatgacgagcaggaaaaggnaggaaccttttgaggatggctttgcaaatggggaagaaagtactccaaccagagatgctgtggtcacatatactgcggaaagtaaaggagtcgtgaagtttggctggatcaagggtgtattagta

SEQ ID NO: 25529 - DNA, 651 bp, Macaca Mulatta
gggggttccccgagttcggagcccaggagcccccgcggctgccgcgcaggtgccctcggcctgggtcgagatggagctgcctgctgtgaacctgaaggtgattctcctaggtcactggctgctgacaacctggggctgcattgtattctcgggctcctatgcctgggccaacttcactgtcctggccttgggtgtgtgggctgtggctcagcgggactccatcgacgccataagcatgtttctgggtggcttgctggccaccatcttcctggacatcgtgcacatcagcatcttctacccacgggccagcctcacggacacaggccgctttggcgcgggcatggccatcctcagcttgctgctcaagccgctctcgtgctgcttcgtctaccacatgtaccgggagcgcgggggtgagctcctggtccacactggtttccttggaccttctcaggaccgtggtgcctaccagacgattgactcagcacaggcacccgcagatccctttgcagtcccagagggcaggggtcaagatgcccgaaggtactgaaaccagccatcctgtgctcggccccgccccgggcttccttggcctgggaggtctttctagggtgctcctggcctcctctcttggactagattgtagggtcc

SEQ ID NO: 25530 - DNA, 119 bp, Macaca Mulatta
gttctagacctggaaggcctcctaagaggactcaaagtgtcacctccccagagaactctcacatcatgccacattctgtccctggtctcatgtctcctgggataattccaccaacaggt

SEQ ID NO: 25531 - DNA, 1336 bp, Macaca Mulatta
  misc_feature (1)...(1336): n = A,T,C or G
naaacaaacacaggctcatccacttctcagtctttttaggtctattgcttgtgggaattctggaggtcctgttcgggctcagtcagatagtcattggtttacttggctgtctgtgtggagtctctaagcgaagaagtcaaattgtgtagtttaatgggaataaaatggaagtatcagtagtttgaataatttgagaagtacacttgttttccaagtcatctttgagatgatttaaaaaatcaacctttcacataggaagcacgttgnnnnnnnnnnnnnnnnnnnnnnnnnnnnnnnnnnnnnnnnnnnnnnnnnnnnnnnnnnnnnnnnnnnnnnnnnnnnnnnnnnnnnnnnnnnnnnnnnnnnnnnnnnnnnnnnnnnnnnnnnnnnnnnnnnnnnnnnnnnnnnnnnnnnnnnnnnnnnnnnnnnnnnnnnnnnnnnnnnnnnnnnnnnnnnnnnnnnnnnnnnnnnnnnnnnnnnnnnnnnnnnnnnnnnnnnnnnnnnnnnnnnnnnnnnnnnnnnnnnnnnnnnnnnnnnaggtgattctctcgcctcagcctccctagtagctgggactacaggcacgtgccactatgccaaactaatttttgtatttttagtagagatggggtgttgccatgttgcccaggctggtctcgaactcctggactcaagtgatctgcctgcctcagcctcctaaagtgctgtgattacaggcgtgagccatcgcacccaaagtacaggacctttttattgtatttctttaaagaataaatatataacctgaatgtaatcaagtctttagatctaattctcagcttgcagggaacactaggacaaatccaaaaagcgggtcagtaggcacagaatggccnnnnnnnnnnnnnnnnnnnnnnnnnnnnnnnnnnnnnnnnnnnnnnnnnnnnnnnnnnnnnnnnnnnnnnnnnnnnnnnnnnnnnnnnnnnnnnnnnnnnnnnnnnnnnnnnnnnnnnnnnnnnnnnnnnnnnnnnnnattattgttacttttggtaggtctgatactggttttatagtataaaggctgagtatcccttatccaaaatgattaagatcagaatgtcttttggcgttcaaatttttttggagtttggaattttgcctataataatgagacatcttggggatgggatgcaagtctaaccacaaaattcatttatgtctcatacatactttacacacctggcctgaaggtaatttcacacaatattttaaataactttgtgcatgaaacaaaattttgactgcatttttacttcaactcatcacaagaggtcagggtggaattttccacttgtgg

SEQ ID NO: 25532 - DNA, 889 bp, Macaca Mulatta
gggtctctgtatcaaactctgaaacttactatttgctggaagaggaggaggaatttggacattccagagaaggagcaaaagcagaggaaatagtacgacattcatggtgacaacaatgattattctttctgctatatctggcctgtttctgagtgtgcacacaggcctggttattctattgatttttgagtgaccagggcccctgttctgacccttctccacctagaaccgccgctggcactggagcagtgggtccctggtctcctacaaatcctgggacattggagccccaagcagtgctaatgctggctactgtgcaagcctgacttcatgctcaggtgagaggcagacaatctatccatctgttgttatttccctcccgtttttctctggggatgaacatgggaactgggatagaggaaaggtgagctttttatctggaaaataaaggaatatttcctcttgttttttgttctgagtcctagatcgaggaggggctaccctccttctgatcctctctgtctgactcttctcattattctataggattcaagaaatggaaggatgaatcttgtgagaagaagttctcctttgtttgcaagttcaaaaactagaggcagctgaaaaatggatgtctagaaccactcctgcaattactacaaagtcaaaaattaaactagactatttctccaactccattcagaccatctccttcctaatgagtttgcattgctgatcttcagtacctttacccgtcccagtctgtagagccctgaaaaataaaaacaaacatatttttctccattgttctgtcttctgcatttgctctttctacagcccatgcttgggtggttggggtgggaatgattgtcacactccagagcttgcc

SEQ ID NO: 25533 - DNA, 176 bp, Macaca Mulatta
  misc_feature (1)...(176): n = A,T,C or G
ccggccaaggcttttcctgaagtccgacacccacttcancgntccagctctcgctggtgggaagacactaatgggaaccaggtgagagggaagagcttcaaccccatggggcctgcactgccaccaggcccacctgacccgcctgtgctccgagtacccagagaacaagcggcatc

SEQ ID NO: 25534 - DNA, 1714 bp, Macaca Mulatta
  misc_feature (1)...(1714): n = A,T,C or G
atggcagtggatgggacactagtgtacatcaaggtcgctcttctgctgctctggcttggggtgtttttgtccatttctggctactgtcaggctgggccctccnnnnnnnnnnnnnnnnnnnnnnnnnnnnnnnnnnnnnnnnnnnnnnnnnnnnnnnnnnnnnnnnnnnnnnnnnnnnnnnnnnnnnnnnnnnnnnnnnnnnnnnnnnnnnnnnnnnnnnnnnnnnnnnnnnnnnnnnnnnnnnnnnnnnnnnnnnnnnnnnnnnnnnnnnnnnnnnnnnnnnnnnnnnnnnnnnnnnnnnnnnnnnnnnnnnnnnnnnnnnnnnnnnnnnnnnnnnnnnnnnnnnnnnnnnnnnnnnnnnnnnnnnnnnnnnnnnnnnnnnnnnnnnnnnnnnnnnnnnnnnnnnnnnnnnnnnnnnnnnnnnnnnnnnnnnnnnnnnnnnnnnnnnnnnnnnnnnnnnnnnnnnnnnnnnnnnnnnnnnnnnnnnnnnnnnnnnnnnnnnnnnnnnnnnnnnnnnnnnnnnnnnnnnnnnnnnnnnnnnnnnnnnnnnnnnnnnnnnnnnnnnnnnnnnnnnnnnnnnnnnnnnnnnnnnnnnnnnnnnnnnnnnnnnnnnnnnnnnnnnnnnnnnnnnnnnnnnnnnnnnnnnnnnnnnnnnnnnnnnnnnnnnnnnnnnnnnnnnnnnnnnnnnnnnnnnnnnnnnnnnnnnnnnnnnnnnnnnnnnnnnnnnnnnnnnnnnnnnnnnnnnnnnnnnnnnnnnnnnnnnnnnnnnnnnnnnnnnnnnnnnnnnnnnngggtatgcagcatgatgagaattctgtttttgttgggaaagaggttgtatcatgtgtactttangagtgccagcagagaaaatcaccaattgcagtatggtgattttatgagaccaccttaaaccagggatcatgtctgcatatcncttcaagatgaggggaaatttttatgctaaagcgctgtgggaatggtgtggtgaaagagaagagcagtgtgactgtggatctgtacagcagtgtgaacaagatgcctgttgtctgttgaactgcactctgcctggggctgcctgtgctttcgggctttgttgcaaagactgcaagttcatgccatcaggggaactctgtagacaagaggtcaatgaatgtgaccttccagaaaggtgcaatggaatatcctatcagtgtccagcagatagatatgtgcaggaccgtatcccctgtagtgatagtgcctactgctatcaaaagagatgtaataaccacgaccagcattgcagggaggtttttggtaaagatgcaaaaagtgcatctcagaattgctataaagaaatcaactctcagggaaaccgttttggtcactgtggtataaatggcgcaacatacctaaaatgtcatatctctgatgtcttttgtgggagagttcaatgtgagaatgtgagagacattcctcttctccaagatcattttactttgcagcacactcgtatcaatggcatcacctgctggggtattgactatcatttaaggatgaacatacctgacattggtgacatgaagatggtactgtgtgtggcccaggaaagatctgcatccacaagaagtgtgtcagtctgtctgtcttgtcacacttctgccttcctgagacctgcaatatgaaggggatctgcaataacgaacatcactgccactgtggctatgggtgg

SEQ ID NO: 25535 - DNA, 742 bp, Macaca Mulatta
aagttttgctcttgttgcccaggctggagtacaatggcgcaatcttggctcactgtaacctccacctcctgggttcgagcaattctcctgcctcaacctcctgagtaactgggattacaggcatgcaccaccacgcccagctaattttgtatttttagtagacatggagtttcaccatgtgggccagactggtcttaaactcctaacctcaggtgatccgggcacctcagcctcccaaagtgctgggattacaggcgtgagccactgcgcctgcctaagattctaatttcaagatatcatcagacagcagggggacagtggagtcaaacctgccaactctaccccctcccgtacactccccaccaacgccctctcagctgcagctacccagggcaaaggctctgcaggtgcagactcctagacagccctggacaattcagaaagagcccctgaggggagaagcctagtcctgtagtcaggggctttctgaattcccagagctccacggctcagccaaggaccagaaaagcctctgacacagccagaaggccctgcctcggtttactgaggctgccccggctatggggctgaggaaggggagagggcatacctgagtctgggcgcccattcccagaggccacgcagaagccgaaagtgccccccggggagcgctgcagctgcagctggctcgtgccgtccgggaacacctccaccaggcggcccacggtgcgagccaggctgg

SEQ ID NO: 25536 - DNA, 207 bp, Macaca Mulatta
atgacgcgctctggtgtagggtcaccaagccagtgcccgcagggggactcttgagcgtgctcctcacagccgagccccgcagcacccccggccaccctgtgaagaaggagccagcagagcccacgtgcccagcccccgcacacgacctccagctcctgccccagcaggccgggatggcctccatccttgccaccgcagtgatcaaca

SEQ ID NO: 25537 - DNA, 148 bp, Macaca Mulatta
aggaatgtttttgtggaagttctgtaactgtaccagaaattgaaggagtcctttggttgaaggatgatggcaagaagtcctggaaaaagcgttattttctgttgcgagcatctggtatctactatgtccccaaaggaaaagcaaaggt

SEQ ID NO: 25538 - DNA, 442 bp, Macaca Mulatta
  misc_feature (1)...(442): n = A,T,C or G
gggaccttctttcccctcacaggcttcgctagtgatggacccatacgtgattcagatgagcagcaaaggcaacctcccctcaattctggatgtgcatgtcaacgttggtgggagaagctctgtgccgggaaaaatgaaaggcaggaataccaggtggtccgtgaggccctcagacatggccaacaaaactttcaaccccatccgagccattgtggacaacatgaaggtgaaaccaaatccaaacaaaaccatgatttctctgtccattggnnnnnnnnnnnnnnnnnnnnnnnnnnnnnnnnnnnnnnnnnnnnnnnnnnnnnnnnnnnnnnnnnnnnnnnnnnnnnnnnnnnnnnnnnnnnnnnnnnnnnnngcttcctgtctagtcgggaggagattgcttcttattaccactgtcccgaggcacccctagaagctaagg

SEQ ID NO: 25539 - DNA, 426 bp, Macaca Mulatta
ggcctcccccgggagggcagcccttccgacagcgatgacaaatgccaatgagcccctcgtgggtggcctaggatggtgctagccatgcctgtcatcccagaatgtgcatctctcattccttctgccttgggaaggcaggaggcagctacagccggaggctgaaccccagccccctccagacctggggtgccagcttctcccagtttatcctacctggaatctgacccactgcccacctacagcaacttttccaggggcaggaagatcagccctgccctggcagggtcacttgacccctgctccccctttgaggggaaaggggtagaactaagatgggtttataactggaacctccaatgaccagatgtatatagagatttacaaagatttttatattaatttaataaaacaaattcttaaatagaa

SEQ ID NO: 25540 - DNA, 2173 bp, Macaca Mulatta
  misc_feature (1)...(2173): n = A,T,C or G
gacctagcgtgtgcttagctctggacaagacatggatgtaggcagacgtgcttcctgcctgctgcgcttagtgcactagtgctaaggacagacacgcagggcttgggaaaggcatgaagatgcatggagtccaggagagagaggataagaaaagcaagcattttgtgctgggttgaattgcgctgtcgttttcagaggcattgcgtgatccacggttgcgctcccgcgaagagcgagtctgcagaaggnnnnnnagcggcggcggcgagcgcggctcaggttgatttagaacacgggtgacagtggcctggcgcgagcccactgctgacgacagcggctcagcccgcgcggtttccatggagacgagccggagccgcggcggcggcggggctgtcagcgagcgcggcggagctggagggtccgcgggggtctgcaggaggaaggcggaggccggggccgggacnnnnnnnnnnnnnnnnnnnnnnnnnnnnnnnnnnnnnnnnnnnnnnnnnnnnnnnnnnnnnnnnnnnnnnnnnnnnnnnnnnnnnnnnnnnnnnnnnnnnnnnnnnnnnnnnnnnnnnnnnnnnnnnnnnnnnnnnnnnnnnnnnnnnnnnnnnnnnnnnnnnnnnnnnnnnnnnnnnnnnnnnnnnnnnnnnnnnnnnnnnnnnnnnnnnnnnnnnnnnnnnnnnnnnnnnnnnnnnnnnnnnnnnnnnnnnnnnnnnnnnnnnnnnnnnnnnnnnnnnnnnnnnnnnnnnnnnnnnnnnnnnnnnnnnnnnnnnnnnnnnnnnnnnnnnnnnnnnnnnnnnnnnnnnnnnnnnnnnnnnnnnnnnnnnnnnnnnnnnnnnnnnnnnnnnnnnnnnnnnnnnnnnnnnnnnnnnnnnnnnnnnnnnnnnnnnnnnnnnnnnnnnnnnnnnnnnnnnnnnnnnnnnngggctgcggggtgctgttcagcggcatgcgcntggcaccnggaaagacaagcgggccaaggcggaggccgcggaggggcgcgcggccgggggcggcctgatcctgcccggctcgctcaccgccagcctggagtgcgtcaaggaggagacgcccagagccgcgcgcgagccggaggagcccggccaggacgccccgcgagacccagcaggnnnnnnnnnnnnnnnnnnnnnnnnnnnnnnnnnnnnnnnnnnnnnnnnnnnnnnnnnnnnnnnnnnnnnnnnnnnnnnnnnnnnnnnnnnnnnnnnnnnnnnnnnnnnnnnnnnnnnnnnnnnnnnnnnnnnnnnnnnnnnnnnnnnnnnnnnnnnnnnnnnnnnnnnnnnnnnnnnnnnnnnnnnnnnnnnnnnnnnnnnnnnnnnnnnnnnnnnnnnnnnnnnnnnnnnnnnnnnnnnnnnnnnnnnnnnnnnnnnnnnnnnnnnnnnnnnnnnnnnnnnnnnnncaggtgtgtggaagcggtcacggacgcgtcctcggtcaagcgcaggaggctcaaccggattcccatcgagccccatccgaaggaggagcccaagcacccggagaaggagcagcaggaaggcgtccccaacagcgacgagggctactgggactccaccacgccaggcccagaggaagacagcgccagcagcgggaagaaggcgggcatcccccgggatagctacagtggggacgcgctctacgatctctatgccgacccggacggaagtccagcaacccttcctggggggaaggacaacgaggagacgtcctgcctgtcccggttaaagcccgtatctccaggcaccatcacttgtccgctgcgaaccccaggcagcttgttgaaggactctaagatccctattagcatcaagcatctgaccaaccttccatctagccatcccgtggtgcaccagcaaccctccaggagtgagatgcccagaacaaaaatcccggtttccaaagtgctggtccgcagagtcagcaaccggggcttggctgggaccaccatcagggcaacggcctgccacgacagtgccaaaaagttgtgaggtcttccaggccaaagtggatgggccacatgtcaaggaatacaacttttccctggaaacactgcagttagttttgcttttcctaaagaaagtcttttaggacaccacccgtccccgcctgctccagagcatggaccgaggaggtgtctgtgccctga

SEQ ID NO: 25541 - DNA, 2179 bp, Macaca Mulatta
  misc_feature (1)...(2179): n = A,T,C or G
taggagtcgacagtgcttcagccacagagggaacaaaaccttctctgtgccagggaagaatggggttagaaaatgaaagtcttcttgcaagatatacccatggacggataatacagcctcctttgggcagggtgtgtggaagtccacaggctgtagggagcagcagagctcctttggctagtggctctgaaagggtagagcagttagtgggaaagcctgttttggatatggaaccaagacaggaaatggaaaaagagtctacctgtgttgtaatgaaacccggcacagagattaagcctcctgtggaggtggacattggactaacccaagccgaggagccagatgagactaagaatacagagccccaaatgggcttggtgatagaacctccccaatgccagtttgcccaacaacctgaagagagaaaggaggctggaaacattgaatcaggagtggaacctccagatcgcatcagacccatatactctgggaaattttttgatcgaacaccttgctggccaagtgtaagnnnnnnnnnnnnnnnnnnnnnnnnnnnnnnnnnnnnnnnnnnnnnnnnnnnnnnnnnnnnnnnnnnnnnnnnnnnnnnnnnnnnnnnnnnnnnnnnnnnnnnnnnnnnnnnnnnnnnnnnnnnnnnnnnnnnnnnnnnnnnnnnnnnnnnnnnnnnnnnnnnnnnnnnnnnnnnnnnnnnnnnnnnnnnnnnnnnnnnnnnnnnnnnnnnnnnnnnnnnnnnnnnnnnnnnnnnnnnnnnnnnnnnnnnnnnnnnnnnnnnnnnnnnnnnnnnnnnnnnnnnnnnnnnnnnnnnnnnnnnnnnnnnnnnnnnnnnnnnnnnnnnnnnnnnnnnnnnnnnnnnnnnnnnnnnnnnnnnnnnnnnnnnnnnnnnnnnnnnnnnnnnnnnnnnnnnnnnnnnnnnnnnnnnnnnnnnnnnnnnnnnnnnnnnnnnnnnnnnnnnnnnnnnnnnnnnnnnnnnnnnnnnnnnnnnnnnnnnnnnnnnnnnnnnnnnnnnnnnnnnnnnnnnnnnnnnnnnnnnnnnnnnnnnnnnnnnnnnnnnnnnnnnnnnnnnnnnnnnnnnnnnnnnnnnnnnnnnnnnnnnnnnnnnnnnnnnnnnnnnnnnnnnnnnnnnnnnnnnnnnnnnnnnnnnnnnnnnnnnnnnnnnnnnnnnnnnnnnnnnnnnnnnnnnnnnnnnnnnnnnnnnnnnnnnnnnnnnnnnnnnnnnnnnnnnncagaaacaatgactgttcccccagactacacatttggagcttgtctccgtcctgaggagtatggtaannnnnnnnnnnnnnnnnnnnnnnnnnnnnnnnnnnnnnnnnnnnnnnnnnnnnnnnnnnnnnnnnnnnnnnnnnnnnnnnnnnnnnnnnnnnnnnnnnnnnnnnnnnnnnnnnnnnnnnnnnnnnnnnnnnnnnnnnnnnnnnnnnnnnnnnnnnaagggagatgggatgatagataaagccgagctgcaggaagcttgtgaccaggccaacttgagtttagatgacaagctcctggaccagctatttgactactgtgatgtggataatgatggcttcattaactatctggaatttgcaaattttcttaactggaaagacaaaatgcttcttaaagagtatgaagagagggtcattattaaaggtnnnnnnnnnnnnnnnnnnnnnnnnnnnnnnnnnnnnnnnnnnnnnnnnnnnnnnnnnnnnnnnnnnnnnnnnnnnnnnnnnnnnnnnnnnnnnnnnnnnnnnnnnnnnnnnnnnnnnnnnnnnnnnnnnnnnnnnnnnnnnnnnnnnnnnnnnnnnnnnnnnnnnnnnnnnnnnnnnnnnnnnnnnnnnnnnnnnnnnnnnnnnnnnnnnnnnnnnnnnnnnnnnnnnnnnnnnnnnnnnnnnnnnnnnnnnnnnnnnnnnnnnnnnnnnnnnnnnnnnnnnnnnnnnnnnnnnnnnnnnnnnnnnnnnnnnnnnnnnnnnnnnnnnnnnnnnnnnnnnnnnnnnnnnnnnnnnnnnnnnnnnnnnnnnnnnnnnnnnnnnnnnnnnnnnnagattgcagagatattgtgtaacattggtgtcaagctttctgatgaagaatttgaaaatgtatggaatcttgcatcaaaaaagcatcacagaggagaagtttgtgttgagaacat

SEQ ID NO: 25542 - DNA, 797 bp, Macaca Mulatta
  misc_feature (1)...(797): n = A,T,C or G
ggcatgtatttgtagtagctgcatttgtcattaacaagagacataatcctccggttattctcagtatcattatatactagtcaatctgattcactaatacacagatgaacaaccaaaatatacctaaaaggcatagtctctaggagttttattaatagtaaaggtaaaatctctcagtttcccacctttagaaagaggtcatctcactagaataggatatcatgcatactgagctagaccagaagagtctggacaaaataaacacaacctttataatcaacttgagtactggtgttagctgagaactctgtaagtccctttaaaagttatttatcttttggttcaagattaagaagcataatgacaagaaaaaaagcaggcagaatttatgaataagtgttgtttattattctgttaaaacaataatttgttaatttcttataaggccctgggctataattactggtataaatataactaagtattggggtagctttcatttcttccattaattacatgtgtaaaatgaaaacactactataatgttaatttcctggttttgaaaatcatattatggttatgtacattgttaacattaaggaaagctggcagaaaggtgtgcatgaaattctatacattttttgaaactttttctataatttctaaaaagtttaaaagtttaaattttaaaagtttaaccagttagatttaaagaattactttttcacccatttctttcccctcccaagaatttnnnnnnnnnnnnnnnnnnnnnnngcccagttaaaagattccta

SEQ ID NO: 25543 - DNA, 982 bp, Macaca Mulatta
  misc_feature (1)...(982): n = A,T,C or G
ggcttttgaaatggccctgctgtgtcggtttccctgtggccttgtgaactgtatacatctcacatgttgggaaacgccactgggaagtcactaggaggcagtaaaatttttgctgagcctctgctgtataccaggggctaactcaccatgcacattctaggaactgggccctgctcatgaggagccttagtggagattccaggtgaatatttattaaaaagtcaacaatagaactgaaaatggaaataaactgcttgataagataaagttatattattaatagttacttgaaaaaagtaaataaagtaaataaaaaaccttgttcggccgcccttggccctcaaaaaaccttttttaaacaatttcttttggccccgcgggccccaataaggtaaattgaaacatggttcataagctgttctcccaagacaaaatccctgggtcaatgaactaaaggctttggaattcctcccccaaataaaaaaaactccccggggggcaaacccagagcgttttctgaaaaaaattccaaaaatgggaatttccggaagggccttttaccggggaatctattcaaagtggggaaatccaatatggaaaacttcaaataatccaaaattaaatgccccccgcccactggaccaatttcatatacacagtaacgggtaagggaaaattccttataaaatccatttcctgaccaaaacttggcaaagccaccatttcaataaaatatggcaattagaattaaaaatcctagaaatgcccctcttgcgcgtgctattaaacgtactcctttgtttacccctataggnnnnnnnnnnnnnnnnnnnggacccccccgtgagagtcaaaacacagaggggtggagtaagaagaaatatttgtgtccaataaaaatgggaggacacatgatgtttacaatctacaaagactcggggggggaaaaaatctatacccccgcatgggggattattgagcc

SEQ ID NO: 25544 - DNA, 334 bp, Macaca Mulatta
ttactgggaaaatctacctctgacaagaggagatcactttagatattactgaaatgaagaaagcttacaattagtgaacatgaaaggaaaataaaaattcctcacagccatctttttacaattgtactgtgttttataccagtcattagttattggagtttatgttgtagatctcagcttccaaatcagctaatcacactagaatttgttttctctttagagtaacttcacattgtcttttgaagctaaatatattattctgtcaaacaacagaaaagaagaattaactttttgtcccatcagtctagtaggttatacaggcactggaattaaa

SEQ ID NO: 25545 - DNA, 631 bp, Macaca Mulatta
gtacagtggccgaggggaaaggtgatgtgatcctgattggcacaactcggaactttgtcctgcagggcactctgtcaggggacttcacacccattactcagggtcacactgatgagctctggggactggccatccatgcctcaaaacctcagttcttgacctgtgggcatgacaagcatgccactctctgggacgctgtgggtcaccgtcccgtctgggacaaaataatagaggatccagctcagtcttctggttttcatccttcagggtctgtggttgcagtcggaacactcactgggaggtggtttgtgtttgacacagaaacaaaagacttggtcaccgttcacacagatggaaatgaacagctctctgtaatgcgatactcaccagatgggaatttcttagccataggctcgcatgacaactgcatctatatatatggtgtcagtgacaacgggaggaagtacacgcgagtgggcaagtgctcgggtcattccagcttcattactcacctggactggtctgtaaactcgcaattcctcgtgtcaaattccggagactacgaaatcctctactgggttccctctgcctgtaagcaagtcgtaagtgtggaaactacgagagacattga

SEQ ID NO: 25546 - DNA, 105 bp, Macaca Mulatta
caatccaggagctgaatggcaaactcttccacaagcgaaaactgttcgtgaatccaagcagaaggccccccaagaggacccctgatgtgatacagcagccccggg

SEQ ID NO: 25547 - DNA, 1012 bp, Macaca Mulatta
  misc_feature (1)...(1012): n = A,T,C or G
gaatctgttccaggtggaaagtgtgaactgtatctgtgtggactggaaaggtggctcccgaactggatacacacaagcgtcacagaacatcaggattgtgggagcagaagtagcgtattttgttgaagttctnnnnnnnnnnnnnnnnnnnnnnnnnnnnnnnnnnnnnnnnnnnnnnnnnnnnnnnnnnnnnnnnnnnnnnnnnnnnnnnnnnnnnnnnnnnnnnnnnnnnnnnnnnnnnnnnnnnnnnnnnnnnnnnnnnnnnnnnnnnnnnnnnnnnnnnnnnnnnnnnnnnnnnnnnnnnnnnnnnnnnnnnnnnnnnnnnnnnnnnnnnnnnnnnnnnnnnnnnnnnnnnnnnnnnnnnnnnnnnnnnnnnnnnnnnnnnnnnnnnnnnnnnnnnnnnnnnnnnnnnnnnnnnnnnnnnnnnnnnnnnnnnnnnnnnnnnnnnnnnnnnnnnnnnnnnnnnnnnnnnnnnnnnnnnnnnnnnnnnnnnnnnnnnnnnnnnnnnnnnnnnnnnnnnnnnnnnnnnnnnnnnnnnnnnnnnnnnnnnnnnnnnnnnnnnnnnnnnnnnnnnnnnnnnnnnnnnnnnnnnnnnnnnnnnnnnnnnnnnnnnnnnnnnnnnnnnnnnnnnnnnnnnnnnnnnnnnnnnnnnnnnnnnnnnnnnnnnnnnnnnnnnnnnnnnnnnnnnnnnnnnnnnnnnnnnnnnnnnnnnnnnnnnnnnnnnnnnnnnnnnnnnnnnnnnnnnnnnnnnnnnnnnnnnnnnnnnnnnnnnnnnnnnnnnnnnnnnnnnnnnnnnnnnnnnnnnnnnnnnnnnnnnnnnnnnnnnnnnnnnnnnnnnnnnnnnnngggcactctcagaccagataatactcattccaatgaatttgactcagatgtggatgttggggacttgcagaaggttaaatttatttggtataacaacgtgatcgacctaaatttacccagattgggagcatccaagattatagtggagacaaatgatggaaaacag

SEQ ID NO: 25548 - DNA, 920 bp, Macaca Mulatta
  misc_feature (1)...(920): n = A,T,C or G
ggctgcaaagcgtgggctagcatctgtgaggaatttctttttgtgattgaggaggaaaaacatatggagaaaccctattgtctgaatgctgcctctctccctaatttataggttgaaacctactccccagtatgaggcccttagaaggtggtggtctttgggacgtgattaggtcatgagggagccctcatgaatgggattagtgcccttataaaagataccccagagagacccttaccccttgtgccgtgggaggacacagtgagaaccaggaagtggggcctctgcagacaccaaatctgccagtgccttgatcttggactttccagcctccagaactgtgagcaataaatttctgtagtttacaagccacctagtgcaagatattttgatacagcggtccaaatggatgaagacaaggaacgatccttgagctgaaaggaaaagggacaatcgctctacagttgggaagacacaatgatagctctaggaaacattgtgcactcaatggtcctcaactgatgggagaaaggattcagttcgaggaattcattaggagagcctaagcctcctgctcggactaaggagtgacctgagacctcannnnnnnnnnnnnnnnnnnnnnnnnnnnnnnnnnnnnnnnnnnnnnnnnnnnnnnnnnnnnnnnnnnnnnnnnnnnnnnnnnnnnnnnnnnnnnnnnnnnnnnnnnnnnnnnnnnanggaaaaacacacacaggggaaacaaaaacacgcagaggaagaaaacagacaaagaggaggaggaaaaacaaacgacagagggggacgaaaggaggaggaagaacanaagaggaagacgggagcaagaagacacgaggananaagagggaaggagagagagacgaaacacaccaagaggggagaggacggagggacgagng

SEQ ID NO: 25549 - DNA, 1882 bp, Macaca Mulatta
  misc_feature (1)...(1882): n = A,T,C or G
catcggaggagccgtcccgctcgggacaaggccagcatggacaaagctagagctggggcaagcaaggagccttcctgtcctcgaggccgtgggaagagaagcacgcccagggggccactcctgagagcctctctgtccaccaggcctctgcagaggggtcaccatggctctggcccgaggcagccagcagctgggggccctggtgtggggcgcctgcctgtgcgtgatggtgcacgggcagcaggcgcagcccgggcagggctcggaccccgggcgctggcggcagctgatccagtgggagaacaacgggcaggtgtacagcttgctcaactcgggttcagagtacgtgccggccgggcctcagcgctccgagagtagctcccgggtgctgctggccggcgcgccccaggcccagcagcgacgcagccacgggagccccaggcgtcggcaggcgccgtccctgcccctgccggggcgcgtgggctcggacaccgtgcgcggccaggcgcggcacccatttggcttcggccaggtgcccgacaactggcgcgaggtggccgtcggggacagcacgggcatggcccgggcccgcacctccgtctcccagcaacggcacgggggctccgcctcctcggtctcggcttcggccttcgccagcgcctaccgccagccgccctcctatccgcagcagttcccctacccgcaggcgcccttcgtcagccnnnnnnnnnnnnnnnnnnnnnnnnnnnnnnnnnnnnnnnnnnnnnnnnnnnnnnnnnnnnnnnnnnnnnnnnnnnnnnnnnnnnnnnnnnnnnnnnnnnnnnnnnnnnnnnnnnnnnnnnnnnnnnnnnnnnnnnnnnnnnnnnnnnnnnnnnnnnnnnnnnnnnnnnnnnnnnnnnnnnnnnnnnnnnnnnnnnnnnnnnnnnnnnnnnnnnnnnnnnnnnnnnnnnnnnnnnnnnnnnnnnnnnnnnnnnnnnnnnnnnnnnnnnnnnnnnnnnnnnnnnnnnnnnnnnnnnnnnnnnnnnnnnnnnnnnnnnnnnnnnnnnnnnnnnnnnnnnnnnnnnnnnnnnnnnnnnnnnnnnnnnnnnnnnnnnnnnnnnnnnnnnnnnnnnnnnnnnnnnnnnnnnnnnnnnnnnnnnnnnnnnnnnnnnnnnnnnnnnnnnnnnnnnnnnnnnnnnnnnnnnnnnnnnnnnnnnnnnnnnnnnnnnnnnnnnnnnnnnnnnnnnnnnnnnnnnnnnnnnnnnnnnnnnnnnnnnnnnnnnnnnnnnnnnnnnnnnnnnnnnnnnnnnnnnnnnnnnnnnnnnnnnnnnnnnnnnnnnnnnnnnnnnnnnnnnnnnnnnnnnnnnnnnnnnnnnnnnnnnnnnnnnnnnnnnnnnnnnnnnnnnnnnnnnnnnnnnnnnnnnnnnnnnnnnnnnnnnnnnnnnnnnnnnnnnnnnnnnnnnnnnnnnnnnnnnnnnnnnnnnnnnnnnnnnnnnnnnnnnnnnnnnnnnnnnnnnnnnnnnnnnnnnnnnnnnnnnnnnnnnnnnnnnnnnnnnnnnnnnnnnnnnnnnnnnnnnnnnnnnnnnnnnnnnnnnnnnnnnnnnnnnnnnnnnnnnnnnnnnnnnnnnnnnnnnnnnnnnnnnnnnnnnnnnnnnnnnnnnnnnnnnnnnnnnnnnnnnnnnnnnnnnnnnnnnnnnnnnnnnnnnnnnnnnnnnnnnnnnnnnnnnnnnnnnnnnnnnnnnnnnnnnnnnnnnnnnnnnnnnnnnnnnnnnnnnnnnnnnnnnnnnnnnnnnnaacccaaagtatatgttttagagtctgacttcaccaacaacgtggtgagatgcaacattcactacacaggtcgctacgtttctacaacaaactgcaaaattgtccagta

SEQ ID NO: 25550 - DNA, 663 bp, Macaca Mulatta
  misc_feature (1)...(663): n = A,T,C or G
ggggtctgtggcggggcaggcgaggcggtcgcttcgagcgcgctagtcagctccctgaagggagtgacagcggttgggtgcccgcggccacttttgccttcccggggagatgtcctttgcttctcagatgtaaatgcactttaagtttgttattcaacagtgaaaatgagtcatacagaggttaaattaaaaataccttttggaaataaattactagatgctgtttgtttggtacctaacaagagcttaacatatggaataattcttacacatggagcatcaggagatatgaatcttcctcatttgatgtcactggcatcccatcttgcatcccatgggtttttctgcctgagatttacctgtaaaggccttaatattgtacatagaattaaggcatataaatcagttttgaattacctaaagacatcaggagaatacaaacttgcaggtgtttttcttggaggtcgttcaatgggctcaagagcagctgcttctgntatgtgtcacattgagccagatgatggtgatgattttgtcggggtctcatttgtatttctaccactgcacatccaagcacagcataactcgagatgagactcttcgttaaagagctgtatgttgtgcagctcacaatgaatggtgaaagactgttgaaagtgccaa

SEQ ID NO: 25551 - DNA, 221 bp, Macaca Mulatta
  misc_feature (1)...(221): n = A,T,C or G
gagcaacacctaccaggccatcctctccacagacgggagcaggtcctatgccctgtttctctaccagagcggtgggatgcagtgggacgtggcccagcgctcaggcaacctcgtgctcatgggcttctnagtggagacggctatttcgaaaacagcccactgatgtcccagccagtgtgggagaagtatcgccctgatagattcctgaattccagctcagg

SEQ ID NO: 25552 - DNA, 797 bp, Macaca Mulatta
  misc_feature (1)...(797): n = A,T,C or G
gggctcttttcccggctggaaccatggagggtgcggaagagaagaagaaggttcctgctgtgccagaaacccttaagaaaaagcgaaggaatttcgcagagctgaagataaagcgcctgagaaagaagtttgcccaaaagatgcttcgaaaggcaaggaggaagcttatctatganaaagcgaagcactatcacaaggaatataggcagatgtacagaactgaaattcgaatggcgaggatggcaagaaaagctggcaacttctatgtacctgcctaaccccaatttggcgtttgtcatccggatcagaggtatccaagggcgtggagcccaaagggctccaaaagggatttgcaccttttttgcccccttcctccaaattcttccaagggggaccctttttgaaaaaccccaaacaggggcttccaaaattaaactgccctagggaatttttaaaaaccccctttttttgtnnnnnnnnnnnnnnnnnnnnnnnattccgaaaaagcccccgaaaaaagagggcgctattttcctcccaaccgcggggggtttttttggggccaaaatccctttataaaaaannnnnnnnnnnnnnnnnnnnnnnnnnnnnnnnnnnnnnnnnnnnnnnnnnnnncccccccactccccctcnnnnnnnnnnnnnnnnnnnnncnnnnnnnnnnnnnnnncggcggggggagagannnnnnnnnnnnnnnnnnagaaagaaaacattccttttcggggggtggggaaaaacaacactcccctctctacgngaggggggggaggaaa

SEQ ID NO: 25553 - DNA, 155 bp, Macaca Mulatta
aggttggttcattccagctctttgttgaaggctacaaagatgcagactattggctgcggcgttttgaagcagaacctcttcctgagaacactaaccggcaactactgctgcagtttgagcggttggtggtgctggattacatcatccgcaacact

SEQ ID NO: 25554 - DNA, 622 bp, Macaca Mulatta
ttctcctaatgctatccctccctaaccccccacccccaacaggccctggtgtgtgaggtgccctccctgtgtacatatgtactcattgttcgactcccacttacgagtgagaacatgcggtgtttgattttctgttctagtgtaagtttgctgagaatgatggtttaggtataatttaatcccactcctgatacaatgccaaacaagctatagttgttctaattatcttaaatcaagactctgaaattcaagtcaccaggatgttgaataaataaagcttcaatcatacccattattgtctttccttagccttatttgtccacccctccctggggactaagggttgtattaaaaatttcatggagaggattctcagatcttcaactcacactggctgaaatgattaattgtccaagccacatactgctctgatgacggatggtttagttgcctccatgccaagatcactagggtatatgggcctacatccaaccttggagcccagaggtgcaggggatgacctcaggaattgtaccaagccaccattctccacgttctgtaacctcccagaggttcttcaagcaccacttattccaaggtcctggccaaagttccatgactt

SEQ ID NO: 25555 - DNA, 83 bp, Macaca Mulatta
agctgctggtccatcggaggatcccagtgtgaatttcctgaagaacgtgggggagagcgtggcagccgcccttagccctctgg

SEQ ID NO: 25556 - DNA, 2119 bp, Macaca Mulatta
  misc_feature (1)...(2119): n = A,T,C or G
ctccctgaccacgccttcccggcagcggccggtgccccagccctcctccgcctctctggatgagtacaccctgatgcgggccaccttctccggaagcgcaggccgcctctgcccgtcctgccccgcgtcctctcccaaggtggcctaccacccctacccagaggactacggagatatcgagatcggctcccacaggagctccagcagcaacctgggtgcagacgacggctacatgcccatgacgcctggcgcggccctcgcgggcagtgggagcggcagctgcaggagcgacgactacatgcccatgagccctgccagcgtgtccgcccccaagcagatcttgcagcccagggccgccgccgctgccgccgccaccgtgccccctgcggggcctgcggggccagcgcccacctctgcggcgggcaggacattcccggcgagcgggggcggttacaaggccagctcgccggccgagagctctcccgaggacagcgggtacatgcgcatgtggtgcggctccaagctgtccatggagcacgcggacggcaagctgctgctcaacggggactacctcaacgtgtcccccagcgacgcggtcaccacgggcaccccgcccgacttcttctccgcagccctgcacgccggcggggagccgctcaggggcgttcctggctgctgctacagctccttgccccgctcctacannnnnnnnnnnnnnnnnnnnnnnnnnnnnnnnnnnnnnnnnnnnnnnnnnnnnnnnnnnnnnnnnnnnnnnnnnnnnnnnnnnnnnnnnnnnnnnnnnnnnnnnnnnnnnnnnnnnnnnnnnnnnnnnnnnnnnnnnnnnnnnnnnnnnnnnnnnnnnnnnnnnnnnnnnnnnnnnnnnnnnnnnnnnnnnnnnnnnnnnnnnnnnnnnnnnnnnnnnnnnnnnnnnnnnnnnnnnnnnnnnnnnnnnnnnnnnnnnnnnnnnnnnnnnnnnnnnnnnnnnnnnnnnnnnnnnnnnnnnnnnnnnnnnnnnnnnnnnnnnnnnnnnnnnnnnnnnnnnnnnnnnnnnnnnnnnnnnnnnnnnnnnnnnnnnnnnnnnnnnnnnnnnnnnnnnnnnnnnnnnnnnnnnnnnnnnnnnnnnnnnnnnnnnnnnnnnnnnnnnnnnnnnnnnnnnnnnnnnnnnnnnnnnnnnnnnnnnnnnnnnnnnnnnnnnnnnnnnnnnnnnnnnnnnnnnnnnnnnnnnnnnnnnnnnnnnnnnnnnnnnnnnnnnnnnnnnnnnnnnnnnnnnnnnnnnnnnnnnnnnnnnnnnnnnnnnnnnnnnnnnnnnnnnnnnnnnnnnnnnnnnnnnnnnnnnnnnnnnnnnnnnnnnnnnnnnnnnnnnnnnnnnnnnnnnnnnnnnnnnnnnnnnnnnnnnnnnnnnnnnnnnnnnnnnnnnnnnnnnnnnnnnnnnnnnnnnnnnnnnnnnnnnnnnnnnnnnnnnnnnnnnnnnnnnnnnnnnnnnnnnnnnnnnnnnnnnnnnnnnnnnnnnnnnnnnnnnnnnnnnnnnnnnnnnnnnnnnnnnnnnnnnnnnnnnnnnnnnnnnnnnnnnnnnnnnnnnnnnnnnnnnnnnnnnnnnnnnnnnnnnnnnnnnnnnnnnnnnnnnnnnnnnnnnnnnnnnnnnnnnnnnnnnnnnnnnnnnnnnnnnnnnnnnnnnnnnnnnnnnnnnnnnnnnnnnnnnnnnnnnnnnnnnnnnnnnnnnnnnnnnnnnnnnnnnnnnnnnnnnnnnnnnnnnnnnnnnnnnnnnnnnnnnnnnnnnnnnnnnnnnnnnnnnnnnnnnnnnnnnnnnnnnnnnnnnnnnnnnnnnnnnnnnnnnnnnnnnnnnnnnnnnnnnnnnnnnnnnnnnnnnnnnncgcccacctcccccagacagttgcagccggcgccccccttggcaccgcagggccggccttggaccccgggtcagcccgggggcttggtcggttgtcctgggagcggtggatcaccaatgcgcagagagacctctgccggcttccagaatggtctcaactacatcgccatcgacgtgagggaggagcccgggctgccaccccagccgcagccgcagccgcagtcgccgcttcctcagccgggagacaag

SEQ ID NO: 25557 - DNA, 802 bp, Macaca Mulatta
  misc_feature (1)...(802): n = A,T,C or G
aggaaaatttggagctcaagaagttattgatgagcaatggcaacaaagagggtgcgtctgggcagccaggctcaccgaagatggaaggggcaggcaagaaggcggtggctggacagcagcaggnnnnnnnnnnnnnnnnnnnnnnnnnnnnnnnnnnnnnnnnnnnnnnnnnnnnnnnnnnnnnnnnnnnnnnnnnnnnnnnnnnnnnnnnnnnnnnnnnnnnnnnnnnnnnnnnnnnnnnnnnnnnnnnnnnnnnnnnnnnnnnnnnnnnnnnnnnnnnnnnnnnnnnnnnnnnnnnnnnnnnnnnnnnnnnnnnnnnnnnnnnnnnnnnnnnnnnnnnnnnnnnnnnnnnnnnnnnnnnnnnnnnnnnnnnnnnnnnnnnnnnnnnnnnnnnnnnnnnnnnnnnnnnnnnnnnnnnnnnnnnnnnnnnnnnnnnnnnnnnnnnnnnnnnnnnnnnnnnnnnnnnnnnnnnnnnnnnnnnnnnnnnnnnnnnnnnnnnnnnnnnnnnnnnnnnnnnnnnnnnnnnnnnnnnnnnnnnnnnnnnnnnnnnnnnnnnnnnnnnnnnnnnnnnnnnnnnnnnnnnnnnnnnnnnnnnnnnnnnnnnnnnnnnnnnnnnnnnnnnnnnnnnnnnnnnnnnnnnnnnnnnnnnnnnnnnnnnnnnnnnnnnnnnnnnncaggtgaagatcttcgatgaggacttccagagagagcgcagtgatcgtgagcgcatgaatgaggagaaggaagagctgaagaagcaagtggagaagctgcaggcccaggtcaccctgtcgaacgccca

SEQ ID NO: 25558 - DNA, 2453 bp, Macaca Mulatta
  misc_feature (1)...(2453): n = A,T,C or G
tccatatagaaatgtaatgacagctttgcagtttccgaaaataatggaattccttccagttcttctgcctcgacactttaaatggctcatagagtcaggttctaaagagatgttgaaagagatagaagagattttaggtacacatccgtggaaacttggatttagtaaannnnnnnnnnnnnnnnnnnnnnnnnnngatgtgaggcaagttggatagcattttatcagtgcgagtctcttctccagctgatgactgatttggagaagaatgcattaataatgtattccaaactgaagcagatatgtagagaacttggacacacatatgttgaagtgaatgacttaactttgacattgtcagatcatatgtcatttcatgctgcttcggagtctctgaagtttttgaaggatattggtgtggtgacgtatgagaaggcctgtgtcttcctttacgacctttaccaggctgaaagagccatcgccttttcaatttgtgacctgatgcagaggcctccttggcgtttatgtgttgatgtcaaaaaggtgcttgcttctattcacaccacaaaacctgagaattcaagtgatgatgcattgaatgagagcaaacctgatgaagcaagattagaaaatcctgtggatgttgtggacacacaggacagtggtgaccatatttggactaatggtgaaaatgaaattaatgcagaaataagtgaagttcaggtggatcaggaccaggttgaagttccactggatcgggatcaggtggctgctttggagatgatttgctccaatcctgtgacagtcataagtgggaaaggtggatgtgggaagaccacaatcgttagccgtctttttaagcatatagagcagttggaagaaagagaagtaannnnnnnnnnnnnnnnnnnnnnnnnnnnnnnnnnnnnnncagaagaatggaatacctttactgagcaaagtcaactagaagcgggcaaggctatagaagttttgctcacagcacctacagggaaagcagctggcttactaagacagaaaactggtcttcatgcctacacactgtgtcaggnnnnnnnnnnnnnnnnnnnnnnnnnnnnnnnnnnnnnnnnnnnnnnnnnnnnnnnnnnnnnnnnnnnnnnnnnnnnnnnnnnnnnnnnnnnnnnnnnnnnnnnnnnnnnnnnnnnnnnnnnnnnnnnnnnnnnnnnnnnnnnnnnnnnnnnnnnnnnnnnnnnnnnnnnnnnnnnnnnnnnnnnnnnnnnnnnnnnnnnnnnnnnnnnnnnnnnnnnnnnnnnnnnnnnnnnnnnnnnnnnnnnnnnnnnnnnnnnnnnnnnnnnnnnnnnnnnnnnnnnnnnnnnnnnnnnnnnnnnnnnnnnnnnnnnnnnncaagaatctcaagacgccagtttccaaaatttgatgcagaactaaatatctctgataatccaacattacccatctcaattcaagataagacatttatttttgtcagactcccagaggaggatgccagttctcagtcatctaaaactaatcatcactcttgnnnnnnnnnnnnnnnnnnnnnnnnnnnnnnnnnnnnnnnnnnnnnnnnnnnnnnnnnnnnnnnnnnnnnnnnnnnnnnnnnnnnnnnnnnnnnnnnnnnnnnnnnnnnnnnnnnnnnnnnnnnnnnnnnnnnnnnnnnnnnnnnnnnnnnnnnnnnnnnnnnnnnnnnnnnnnnnnnnnnnnnnnnnnnnnnnnnnnnnnnnnnnnnnnnnnnnnnnnnnnnnnnnnnnnnnnnnnnnnnnnnnnnnnnnnnnnnnnnnnnnnnnnnnnnnnnnnnnnnnnnnnnnnnnnnnnnnnnnnnnnnnnnnnnnnnnnnnnnnnnnnnnnnnnnnnnnnnnnnnnnnnnnnnnnnnnnnnnnnnnnnnnnnnnnnnnnnnnnnnnnnnnnnnnnnnnnnnnnnnnnnnnnnnnnnnnnnnnnnnnnnnnnnnnnnnnnnnnnnnnnnnnnnnnnnnnnnnnnnnnnnnnnnnnnnnnnnnnnnnnnnnnnnnnnnnnnnnnnnnnnnnnnnnnnaggggtccgaggagcaaacggttgtctatgtggtggggaaggcgggccgccagcactggcagcatgtctacaccgccgtgaccaggggccgctgccgagtgtacgtgattgcagaggagtctcagctccgaaatgccattatgaaaaacagttttcctagaaaaactcgtttgaaacatttcttgcaaagtaagctgtcctctagcggtgcacctccagcagattttcagaccccacggaagagctctggagacagtggaggacccagcacaccgtcagcatctccactccctgtagtcacagaccacgccatgacaaatgatgtcacctggagcgaggcctcttcgcctgatgagaggacactcacctttgctgaaagatggcaattatcttcacc

SEQ ID NO: 25559 - DNA, 187 bp, Macaca Mulatta
  misc_feature (1)...(187): n = A,T,C or G
cgcaaggcactcagcaggcgaaagagcgcgctcggacctcctccttcccgcagccaccgagagtgcggagcgaccagcgtgcactcggaggaaccagaggaacccagcaccccgcgggactgtcagtcgcanaaattcaacatgaaaatcctcgtggccttggcagtcttttttctcgtctccactc

SEQ ID NO: 25560 - DNA, 613 bp, Macaca Mulatta
  misc_feature (1)...(613): n = A,T,C or G
gggggggcaaccgtcttagagaccagcatctctggctgcaacatgaatgtgatctatccactggcggtccccaaggggcgcaggctctgctgtgaggtgtgcgaagccccagctgagcgggtgtgcgcggcctgcacagtcacttattactgtggggtggtacatcagaaagctgactgggacagcatccatgagaaaatatgtcagctcttgattccactgcgcacttctatgcccttctacaattcagaggaagaacggcagcatggcctgcagcagctgcagcagcggcagaagtatttgattgaattctgctacaccgtagcccagaaatacctctttgaagggaaacatgaagatgctgtaccagcagctttgcattcccttcgcttccgcgtgaacctgtacggcctgagctctgtagagcttgtgcctgcttacctgctgttggccgaggccagccttggtctgggccgaatcgttcaggctgaagaatatctattccaagcccagtggacagtcctcaaatcaactgactgtagtaatgccacccactctttactgcatcggaacctgggacttctctatatagctaagaanaactatgaagaac

SEQ ID NO: 25561 - DNA, 1040 bp, Macaca Mulatta
  misc_feature (1)...(1040): n = A,T,C or G
ggttcaccacatcagccaccactcttgcctctgagcacagggtgctctcctcttgagctcagcttctgcttttgcagccaagcattcttgctgctgctgcctgcctgcccacctgcctgggcttgcagcccgccactttactttctccagccctgataccagctgaaagtctccctgcagctgctagttcctgtccaggaccatgtgtgtggatgctgcttggnnnnnnnnnnnnnnnnnnnnnnnnnnnnnnnnnnnnnnnnnnnnnnnnnnnnnnnnnnnnnnnnnnnnnnnnnnnnnnnnnnnnnnnnnnnnnnnnnnnnnnnnnnnnnnnnnnnnnnnnnnnnnnnnnnnnnnnnnnnnnnnnnnnnnnnnnnnnnnnnnnnnnnnnnnnnnnnnnnnnnnnnnnnnnnnnnnnnnnnnnnnnnnnnnnnnnnnnnnnnnnnnnnnnnnnnnnnnnnnnnnnnnnnnnnnnnnnnnnnnnnnnnnnnnnnnnnnnnnnnnnnnnnnnnnnnnnnnnnnnnnnnnnnnnnnnnnnnnnnnnnnnnnnnnnnnnnnnnnnnnnnnnnnnnnnnnnnnnnnnnnnnnnnnnnnnnnnnnnnnnnnnnnnnnnnnnnnnnnnnnnnnnnnnnnnnnnnnnnnnnnnnnnnnnnnnnnnnnnnnnnnnnnnnnnnnnnnnnnnnnnnnnnnnnnnnnnnnnnnnnnnnnnnnnnnnnnnnnnnnnnnnnnnnnnnnnnnnnnnnnnnnnnnnnnnnnnnnnnnnnnnnnnnnnnnnnnnnnnnnnnnnnnnnnnnnnnnnnnnnnnnnnnnnnnnnnnnnnnctctcccattgcctcgtggccctgaaccgctacctgctcatcacccgggcgcccgccacctaccaggcgctgtaccagaggcgccacacggcgggcatgctggcgctgtcctgggcgctcgccctgggcctcgtgctgctgctcccgccctgggcaccgcggcccggaaccacgccaccgcgcgtccactacccggcgctgctggccgccgcggctctg

SEQ ID NO: 25562 - DNA, 474 bp, Macaca Mulatta
  misc_feature (1)...(474): n = A,T,C or G
atttagtggttgaaggactgcgatgtgcagttttgccaaaagatctttgccacaaatttctgcagctggcagaatctaatacagtgagaggaatagaaacctgtggaatactctgtggaaaactnnnnnnnnnnnnnnnnnnnnnnnnnnnnnnnnnnnnnnnnnnnnnnnnnnnnnnnnnnnnnnnnnnnnnnnnnnnnnnnnnnnnnnnnnnnnnnnnnnnnnnnnnnnnnnnnnnnnnnnnnnnnnnnnnnnnnnnnnnnnnnnnnnnnnnnnnnnnnnnnnnnnnnnnnnnnnnnnnnnnnnnnnnnnnnnnnnnnnnnnnnnnnnnnnnnnnnnnnnnnnnnnnnnnnnnnnnnnnnnnnnnnnnnnnnnactggcatcttcaggctcaccaatgctggcatgcttgaggtttctgcttgtaaaaaaaagggctttcatccacacaccaaggagcccaggctgttcagt

SEQ ID NO: 25563 - DNA, 879 bp, Macaca Mulatta
ggatgatggtggccatcggttagtccatggcactggccatagcagcaggtcagagtgtggtttccgtagcaacacttctcatgaccatctgttttgtgtttatgatgattttttcgggtctgttggtcaatctcacaaccattgcatcttggctgtcatggcttcagtacttcagcattccacgatatggatttacggctttgcagcataatgaatttttgggacaaaacttctgcccaggactcagtgcaacagtaaacagtacttgtaactatgcaacatgtactggtgaagaatatttgacaaagcagggcatcgatctctcaccctggggcttgtggaagaatcacgtggccttggcttgtatgattgttattttcctcacaattgcctacctgaaattgttatttcttaaaaaatattcttaaatttccccttaattcagtatgatttatcctcacataagaaagaagcaccttgattgaagtattcaatcaagtttttcagttgttttctgttcccttgctgtcacactgttgcacaatagcagttgttttaaagagatacatttttagaaatcacaacaaatggaattaaacatgaaagaatccaagatatcatgtatcgcatatcagttcatctcctcagacagtaaccatggggaaagacatctagtctaacttattaacctaaacaaggcgaattgactcctggaaatccgtttctggctttgtttctcatcttaaatgatcgtagttataccttcacctaatattatgaggggaatgcatacttatcgccccgcttttgcttcgacttccatccatcttgcaagactgttcggaaaccggtgacatctccacatcaaaacatcctgga

SEQ ID NO: 25564 - DNA, 318 bp, Macaca Mulatta
cacagagcagggacaatgggatcagtttatcgggtggttttgagcaaactgtgtcgctttacacacggagagtgaaggggggaccctcgggcgcacagccgtgtgctggggctcccctcgtggtgtcttccttgagcacctgcggtgtgctttgccccaggttacccacgagtaatcgtaaaccgagccgtcagtggtgcaggagacacggccgtggctcagcacggggggagccggccagccacactgagggctgtgctgatctggaaatggtttcagaacaggagatgcagttcacgtggccttgagagacaggcg

SEQ ID NO: 25565 - DNA, 406 bp, Macaca Mulatta
ctttacatgaattttaaattttctttcctagctcaatgtcaattgctgcaagcttagtgagtgaagatacaaagaccaagtttttgaacaaaatgggccagttgacaacatcaggtgccatgttggccaatgtgtttcagagaaagaagtagaagcaggaaggaagcccccagtaaacactaagatggacctcaagccgactggttccttgtacttgaagtacttgccttttttatttcctcagttttatgttcttgcattataattttatcctaacctccaaagatatttgcactgcttttaattactgctgtatatttgttgattttggagttacaactgtggtgatagaaaattgagttgatggtctgtaccaagtcccttgtctatgttcttgtctttcaga

SEQ ID NO: 25566 - DNA, 486 bp, Macaca Mulatta
  misc_feature (1)...(486): n = A,T,C or G
aggcagggctcttgagtcttgaaagtgttcctgacttctccctgtcttccttacagggtttctcaataccacctttctcctcatgggctgtgctcgtgaacataaccagcttttagcggattttcatcatattgggagcatcaaagtgaccgaggtcctcaacatcttagaaaagtctcagattgttggtgcagcatcctccaggcaaggtcctgcttggggtgtcctcttaggcctcctgtttgccttcagggactgaccatctagctgcacccgacaagcacccagactctttcacataacaaataaaatagcagagttccctttctgcgttgtcctgtggtccatgagagtgcaaaggtgaggaaggtgtgaggaaggccaagcatgtccagngaggtggggacccaggaaaaagagcctggcaaagtgacagtgtcctgcccagcagctaggggagctgaaatattccttttctccttccct

SEQ ID NO: 25567 - DNA, 494 bp, Macaca Mulatta
caggcccggaggcctttgggccaaaggcagccccgccggtccttctttgaatccttcatccggaccctcatcatcacatgtgtggccctgactgtggtcctgtcctcggtctccatttgtgacgggcactggcttctggctgaggaccgcgtcttcgggctctggcacttctgcatcaccaccaatctgagtgcacccatgtgcttcagagacctgggccaggcccacgtgcccgggttggctgtgggcatgggcctggtgcgcagcgtgggcgccttggccgtggtggccgccatttttggcctggagctcctcatggtgtcccaggtgtgcgaggacaaacactcacggcgcaagtgggtcctgggttccatcctcctcctggtctctttcgtcctctcctccgggggactcctgggttttgtgatcctccacgggaaccaagtcacactcatcggcttcaccctgatgttaaggggcgaattcactgcctc

SEQ ID NO: 25568 - DNA, 344 bp, Macaca Mulatta
gccagagccataggaactgggggctccctggacagtgatatgccaggcctggacctttaggcctgcaccccaggacccttagatcccactctttctacagacttctgtgatcacagccccctgcgggcaggggggctctccctccaccaactctcaaggctcctcagcctaagactatggctcatgagaaacactcaggcctgacctaggcttgggagtcaaactgctcatattgagcatattgttaagtgggtaaagccaagtaaaggtactgggtgtttttgcgaccacttgtgaatgggtgtatggagaattgaacagggtgtatgcatgaaggctcctgt

SEQ ID NO: 25569 - DNA, 652 bp, Macaca Mulatta
gttgacctgaggaactccagccacgaagaagccatcacagccctgaggcagaccccccagaaggtgcggctggtggtgtatagagatgaggcacactaccgggatgaggagaacttggagatgttccctgtggatctgcagaagaaagctggccggggcctgggcctgagcattgttgggaaacggtaaagacatgctgtgcgagtcgggacctgcctttttcatccagagctctgatgcctgtgaatgctgaaagagaaagcctaatgtacagtagtgatgggatttctaaaactgagatatttatgaacatttgacaacatgggtcatatttctgagcaaggtcttaccaaaaaaattgtcatatcaatatagaattccaagcccaatcaacccagactgtcatattctgtacagagtaagaacagctagcaaggttctttcactcggaattactaagatctgagttttgcagaggttaattaaagcagccatacccaagaaatacctggtatcaagaatgagatttatccaatgttgggtcaagaacattgctctcggcatggaaattaacatggaacattgctttgtgtcatgctgataatttcatactatgttgaaactagttgagtagacatagttaagagataaa

SEQ ID NO: 25570 - DNA, 7227 bp, Macaca Mulatta
  misc_feature (1)...(7227): n = A,T,C or G
gtccccttaggctacctggttctccacgtccaggctatcggcgctgatgctggtgacaatgcccgcctagaataccgccttgctggggtgggacctgacttccccttcaccatcaacaatggcacaggctggatctctgtagctgctgaactagaccgggaggaagttgatttctacagctttggggtagaagctcgagaccatggcattccagcactcactgcctcggccagcgtcagcgtgactgtcctggatgtcaacgacaacaatccaacctttacccaacccgagtacacagtgcggctcaatgaggatgcagctgtgggcactagcgtggtgacggtgtcagctgtggaccgtgatgctcatagtgtgatcacctaccaaatcaccagtggcaatacccgaaaccgcttctccatcaccagccaaagtggtggtgggctggtatcccttgccctgccactggactacaaacttgagcggcagtatgtgttggctgttaccgcctccgatggcacgcggcaggacacggcacagattgtggtgaatgtcaccgatgccaacacccatcgtcctgtcttccagagctcccactatacagtgaatgttaatgaggactggccggcaggcaccacagtggtgctgatcagcgccacggatgaggacacaggtgagaacgcccgcatcacctacttcatggaggacagcatcccccagttccgcatcgatgcagacacgggctgtcaccacccaggctgagctggactacgaagaccaagtgnnnnnnnnnnnnnnnnnnnnnnnnnnnnnnnnnnnnnnnnnnnnnnnnnnnnnnnnnnnnnnnnnnnnnnnnnnnnnnnnnnnnnnnnnnnnnnnnnnnnnnnnnnnnnnnnnnnnnnnnnnnnnnnnnnnnnnnnnnnnnnnnnnnnnnnnnnnnnnnnnnnnnnnnnnnnnnnnnnnnnnnnnnnnnnnnnnnnnnnnnnnnnnnnnnnnnnnnnnnnnnnnnnnnnnnnnnnnnnnnnnnnnnnnnnnnnnnnnnnnnnnnnnnnnnnnnnnnnnnnnnnnnnnnnnnnnnnnnnnnnnnnnnnnnnnnnnnnnnnnnnnnnnnnnnnnnnnnnnnnnnnnnnnnnnnnnnnnnnnnnnnnnnnnnnnnnnnnnnnnnnnnnnnnnnnnnnnnnnnnnnnnnnnnnnnnnnnnnnnnnnnnnnnnnnnnnnnnnnnnnnnnnnnnnnnnnnnnnnnnnnnnnnnnnnnnnnnnnnnnnnnnnnnnnnnnnnnnnnnnnnnnnnnnnnnnnnnnnnnnnnnnnnnnnnnnnnnnnnnnnnnnnnnnnnnnnnnnnnnnnnnnnnnnnnnnnnnnnnnnnnnnnnnnnnnnnnnnnnnnnnnnnnnnnnnnnnnnnnnnnnnnnnnnnnnnnnnnnnnnnnnnnnnnnnnnnnnnnnnnnnnnnnnnnnnnnnnnnnnnnnnnnnnnnnnnnnnnnnnnnnnnnnnnnnnnnnnnnnnnnnnnnnnnnnnnnnnnnnnnnnnnnnnnnnnnnnnnnnnnnnnnnnnnnnnnnnnnnnnnnnnnnnnnnnnnnnnnnnnnnnnnnnnnnnnnnnnnnnnnnnnnnnnnnnnnnnnnnnnnnnnnnnnnnnnnnnnnnnnnnnnnnnnnnnnnnnnnnnnnnnnnnnnnnnnnnnnnnnnnnnnnnnnnnnnnnnnnnnnnnnnnnnnnnnnnnnnnnnnnnnnnnnnnnnnnnnnnnnnnnnnnnnnnnnnnnnnnnnnnnnnnnnnnnnnnnnnnnnnnnnnnnnnnnnnnnnnnnnnnnnnnnnnnnnnnnnnnnnnnnnnnnnnnnnnnnnnnnnnnnnnnnnnnnnnnnnnnnnnnnnnnnnnnnnnnnnnnnnnnnnnnnnnnnnnnnnnnnnnnnnnnnnnnnnnnnnnnnnnnnnnnnnnnnnnnnnnnnnnnnnnnnnnnnnnnnnnnnnnnnnnnnnnnnnnnnnnnnnnnnnnnnnnnnnnnnnnnnnnnnnnnnnnnnnnnnnnnnnnnnnnnnnnnnnnnnnnnnnnnnnnnnnnnnnnnnnnnnnnnnnnnnnnnnnnnnnnnnnnnnnnnnnnnnnnnnnnnnnnnnnnnnnnnnnnnnnnnnnnnnnnnnnnnnnnnnnnnnnnnnnnnnnnnnnnnnnnnnnnnnnnnnnnnnnnnnnnnnnnnnnnnnnnnnnnnnnnnnnnnnnnnnnnnnnnnnnnnnnnnnnnnnnnnnnnnnnnnnnnnnnnnnnnnnnnnnnnnnnnnnnnnnnnnnnnnnnnnnnnnnnnnnnnnnnnnnnnnnnnnnnnnnnnnnnnnnnnnnnnnnnnnnnnnnnnnnnnnnnnnnnnnnnnnnnnnnnnnnnnnnnnnnnnnnnnnnnnnnnnnnnnnnnnnnnnnnnnnnnnnnnnnnnnnnnnnnnnnnnnnnnnnnnnnnnnnnnnnnnnnnnnnnnnnnnnnnnnnnnnnnnnnnnnnnnnnnnnnnnnnnnnnnnnnnnnnnnnnnnnnnnnnnnnnnnnnnnnnnnnnnnnnnnnnnnnnnnnnnnnnnnnnnnnnnnnnnnnnnnnnnnnnnnnnnnnnnnnnnnnnnnnnnnnnnnnnnnnnnnnnnnnnnnnnnnnnnnnnnnnnnnnnnnnnnnnnnnnnnnnnnnnnnnnnnnnnnnnnnnnnnnnnnnnnnnnnnnnnnnnnnnnnnnnnnnnnnnnnnnnnnnnnnnnnnnnnnnnnnnnnnnnnnnnnnnnnnnnnnnnnnnnnnnnnnnnnnnnnnnnnnnnnnnnnnnnnnnnnnnnnnnnnnnnnnnnnnnnnnnnnnnnnnnnnnnnnnnnnnnnnnnnnnnnnnnnnnnnnnnnnnnnnnnnnnnnnnnnnnnnnnnnnnnnnnnnnnnnnnnnnnnnnnnnnnnnnnnnnnnnnnnnnnnnnnnnnnnnnnnnnnnnnnnnnnnnnnnnnnnnnnnnnnnnnnnnnnnnnnnnnnnnnnnnnnnnnnnnnnnnnnnnnnnnnnnnnnnnnnnnnnnnnnnnnnnnnnnnnnnnnnnnnnnnnnnnnnnnnnnnnnnnnnnnnnnnnnnnnnnnnnnnnnnnnnnnnnnnnnnnnnnnnnnnnnnnnnnnnnnnnnnnnnnnnnnnnnnnnnnnnnnnnnnnnnnnnnnnnnnnnnnnnnnnnnnnnnnnnnnnnnnnnnnnnnnnnnnnnnnnnnnnnnnnnnnnnnnnnnnnnnnnnnnnnnnnnnnccagtggggcgcgttcagctgcgagtgccccctgggcttcgggggcaagagctgcgcccagnnnnnnnnnnnnnnnnnnnnnnnnnnnnnnnnnnnnnnnnnnnnnnnnnnnnnnnnnnnnnnnnnnnnnnnnnnnnnnnnnnnnnnnnnnnnnnnnnnnnnnnnnnnnnnnnnnnnnnnnnnnnnnnnnnnnnnnnnnnnnnnnnnnnnnnnnnnnnnnnnnnnnnnnnnnnnnnnnnnnnnnnnnnnnnnnnnnnnnnnnnnnnnnnnnnnnnnnnnnnnnnnnnnnnnnnnnnnnnnnnnnnnnnnnnnnnnnnnnnnnnnnnnnnnnnnnnnnnnnnnnnnnnnnnnnnnnnnnnnnnnnnnnnnnnnnnnnnnnnnnnnnnnnnnnnnnnnnnnnnnnnnnnnnnnnnnnnnnnnnnnnnnnnnnnnnnnnnnnnnnnnnnnnnnnnnnnnnnnnnnnnnnnnnnnnnnnnnnnnnnnnnnnnnnnnnnnnnnnnnnnnnnnnnnnnnnnnnnnnnnnnnnnnnnnnnnnnnnnnnnnnnnnnnnnnnnnnnnnnnnnnnnnnnnnnnnnnnnnnnnnnnnnnnnnnnnnnnnnnnnnnnnnnnnnnnnnnnnnnnnnnnnnnnnnnnnnnnnnnnnnnnnnnnnnnnnnnnnnnnnnnnnnnnnnnnnnnnnnnnnnnnnnnnnnnnnnnnnnnnnnnnnnnnnnnnnnnnnnnnnnnnnnnnnnnnnnnnnnnnnnnnnnnnnnnnnnnnnnnnnnnnnnnnnnnnnnnnnnnnnnnnnnnnnnnnnnnnnnnnnnnnnnnnnnnnnnnnnnnnnnnnnnnnnnnnnnnnnnnnnnnnnnnnnnnnnnnnnnnnnnnnnnnnnnnnnnnnnnnnnnnnnnnnnnnnnnnnnnnnnnnnnnnnnnnnnnnnnnnnnnnnnnnnnnnnnnnnnnnnnnnnnnnnnnnnnnnnnnnnnnnnnnnnnnnnnnnnnnnnnnnnnnnnnnnnnnnnnnnnnnnnnnnnnnnnnnnnnnnnnnnnnnnnnnnnnnnnnnnnnnnnnnnnnnnnnnnnnnnnnnnnnnnnnnnnnnnnnnnnnnnnnnnnnnnnnnnnnnnnnnnnnnnnnnnnnnnnnnnnnnnnnnnnnnnnnnnnnnnnnnnnnnnnnnnnnnnnnnnnnnnnnnnnnnnnnnnnnnnnnnnnnnnnnnnnnnnnnnnnnnnnnnnnnnnnnnnnnnnnnnnnnnnnnnnnnnnnnnnnnnnnnnnnnnnnnnnnnnnnnnnnnnnnnnnnnnnnnnnnnnnnnnnnnnnnnnnnnnnnnnnnnnnnnnnnnnnnnnnnnnnnnnnnnnnnnnnnnnnnnnnnnnnnnnnnnnnnnnnnnnnnnnnnnnnnnnnnnnnnnnnnnnnnnnnnnnnnnnnnnnnnnnnnnnnnnnnnnnnnnnnnnnnnnnnnnnnnnnnnnnnnnnnnnnnnnnnnnnnnnnnnnnnnnnnnnnnnnnnnnnnnnnnnnnnnnnnnnnnnnnnnnnnnnnnnnnnnnnnnnnnnnnnnnnnnnnnnnnnnnnnnnnnnnnnnnnnnnnnnnnnnnnnnnnnnnnnnnnnnnnnnnnnnnnnnnnnnnnnnnnnnnnnnnnnnnnnnnnnnnnnnnnnnnnnnnnnnnnnnnnnnnnnnnnnnnnnnnnnnnnnnnnnnnnnnnnnnnnnnnnnnnnnnnnnnnnnnnnnnnnnnnnnnnnnnnnnnnnnnnnnnnnnnnnnnnnnnnnnnnnnnnnnnnnnnnnnnnnnnnnnnnnnnnnnnnnnnnnnnnnnnnnnnnnnnnnnnnnnnnnnnnnnnnnnnnnnnnnnnnnnnnnnnnnnnnnnnnnnnnnnnnnnnnnnnnnnnnnnnnnnnnnnnnnnnnnnnnnnnnnnnnnnnnnnnnnnnnnnnnnnnnnnnnnnnnnnnnnnnnnnnnnnnnnnnnnnnnnnnnnnnnnnnnnnnnnnnnnnnnnnnnnnnnnnnnnnnnnnnnnnnnnnnnnnnnnnnnnnnnnnnnnnnnnnnnnnnnnnnnnnnnnnnnnnnnnnnnnnnnnnnnnnnnnnnnnnnnnnnnnnnnnnnnnnnnnnnnnnnnnnnnnnnnnnnnnnnnnnnnnnnnnnnnnnnnnnnnnnnnnnnnnnnnnnnnnnnnnnnnnnnnnnnnnnnnnnnnnnnnnnnnnnnnnnnnnnnnnnnnnnnnnnnnnnnnnnnnnnnnnnnnnnnnnnnnnnnnnnnnnnnnnnnnnnnnnnnnnnnnnnnnnnnnnnnnnnnnnnnnnnnnnnnnnnnnnnnnnnnnnnnnnnnnnnnnnnnnnnnnnnnnnnnnnnnnnnnnnnnnnnnnnnnnnnnnnnnnnnnnnnnnnnnnnnnnnnnnnnnnnnnnnnnnnnnnnnnnnnnnnnnnnnnnnnnnnnnnnnnnnnnnnnnnnnnnnnnnnnnnnnnnnnnnnnnnnnnnnnnnnnnnnnnnnnnnnnnnnnnnnnnnnnnnnnnnnnnnnnnnnnnnnnnnnnnnnnnnnnnnnnnnnnnnnnnnnnnnnnnnnnnnnnnnnnnnnnnnnnnnnnnnnnnnnnnnnnnnnnnnnnnnnnnnnnnnnnnnnnnnnnnnnnnnnnnnnnnnnnnnnnnnnnnnnnnnnnnnnnnnnnnnnnnnnnnnnnnnnnnnnnnnnnnnnnnnnnnnnnnnnnnnnnnnnnnnnnnnnnnnnnnnnnnnnnnnnnnnnnnnnnnnnnnnnnnnnnnnnnnnnnnnnnnnnnnnnnnnnnnnnnnnnnnnnnnnnnnnnnnnnnnnnnnnnnnnnnnnnnnnnnnnnnnnnnnnnnnnnnnnnnnnnnnnnnnnnnnnnnnnnnnnnnnnnnnnnnnnnnnnnnnnnnnnnnnnnnnnnnnnnnnnnnnnnnnnnnnnnnnnnnnnnnnnnnnnnnnnnnnnnnnnnnnnnnnnnnnnnnnnnnnnnnnnnnnnnnnnnnnnnnnnnnnnnnnnnnnnnnnnnnnnnnnnnnnnnnnnnnnnnnnnnnnnnnnnnnnnnnnnnnnnnnnnnnnnnnnnnnnnnnnnnnnnnnnnnnnnnnnnnnnnnnnnnnnnnnnnnnnnnnnnnnnnnnnnnnnnnnnnnnnnnnnnnnnnnnnnnnnnnnnnnnnnnnnnnnnnnnnnnnnnnnnnnnnnnnnnnnnnnnnnnnnnnnnnnnnnnnnnnnnnnnnnnnnnnnnnnnnnnnnnnnnnnnnnnnnnnnnnnnnnnnnnnnnnnnnnnnnnnnnnnnnnnnnnnnnnnnnnnnnnnnnnnnnnnnnnnnnnnnnnnnnnnnnnnnnnnnnnnnnnnnnnnnnnnnnnnnnnnnnnnnnnnnnnnnnnnnnnnnnnnnnnnnnnnnnnnnnnnnnnnnnnnnnnnnnnnnnnnnnnnnnatcctgacacagactccgacagtgacctgtccttagaagatgaccagagtggctcctatgcctctacccactcatcagacagtnnnnnnnnnnnnnnnnnnnnnnnnnnnnnnnnnccttccctggagagcagggctgggatagcctgctggggcctggagccgagagactgcccctgcacagtacccccaagggtgggngatgggggcccagggcctgggaaggccccctggccaggagactttgggaccacagcaaaggagagtagtggcaatggggcccctgaggagcggctgcgggagaatggagatgccctgtctcgagaggggtccctgggcccccttccaggctcttctgcccagcctcacaaaggnaggcatccttaagaagaagtgtctgcccaccatcagcgagaagagcagcctcctgcggctccccctggagcaatgcactgggtcttcccggggctcctctgccagtgagggcagccggggcggcccccctccccgcccaccgccccggcagagcctccaggagcagctgaacggggtcatgcccatcgccatgagcatcaaggcaggcacggtggatgaggactcatcaggctccganatttctcttctttaacttcctgcattaa

SEQ ID NO: 25571 - DNA, 491 bp, Macaca Mulatta
gtgttcatggacccaagctcccctgacagccatgacgagggtatgtgtgggcctggcaggaaagggcagttgccaaggaggagtcatatctgatccttcccatttctcaagactatcaggctcagcctcctgggactgggggaagcaggtgtgctgagctcccacatggtggtgggaggggccctgggactacagccggaagctgccttcttggacctttccaggtcagacctggtggaagggagttcagagctgggggaatccggagagagtagatttggcatctggagaatggagaagaaaacacttgagactcataaggaggagttagtggtggggcagacagtgatttattggggtcttttgaagaggactagggacctctgggctctggaatcactcctcaggggccatctgaggagtggcagtgtgttcccatgtgacagtgacctggtcagagagaggacaggagccgctcagtgtcgcagtct

SEQ ID NO: 25572 - DNA, 801 bp, Macaca Mulatta
  misc_feature (1)...(801): n = A,T,C or G
gggcaccacgtcacatccacgcgctctcaaaggccggaagaatctgaccgacctacgccactggaaacatacccacctcagcctcaagaaccagactgtgcagagggcattgcgccccaatctttagtccttgctgaatcatttctctaatattttacctcatttgtgttccacctctagattacttcagtttttttttcctttaaaattggttactgccactcaaatgtatttacagagaaaatttggccagactcagtggtgcatgccaannnnnnnnnnnnnnnnnnnnctgaggcgggagcatagcttaagcccaggaattcaagaccaacctggacaacatagcaagaccccatctcttaaaaaagatggtcaagaccatcacaagatnnnnnnnnnnnnnnnnnnnnnnnnnnnnnnnnnnnnnnnnnnnnnnnnnnnnnnnnnnnnnnnnnnnnnnnnnnnnnnnnnnnnnnnnnnnnnnnnnnnnnnnnnnnnnnnnnnnnnnnnnnnnnnnnnnnnnnnnnnnnnnnnnnnnnnnnnnnnnnnnnnnnnnnnnnnnnnnnnnnnnnnnnnnnnnnnnnnnnnnnnnnnnnnnnnnnnnnnnnnnnnnnnnnnnnnnnnnnnnnnnnnnnnnnnnnnnnnnnnnnnnnnnnnnnnnnnnnnnnnnnnnnnnnnnnnnnnnnnnnnnnnnnnnnnnnnnnnnnnnnnnnnnnnnnnnnnnnnnnnnnnnnnnnnnnnnnnnnnnnnnnnnnnnnnnnnnnnnnnnnnnnnnnnnnnnnnnnnnnnnnnngnaag

SEQ ID NO: 25573 - DNA, 791 bp, Macaca Mulatta
gggagcgcagagcggtttggtcgttcgttgggcttgtgtccgttcttagctcggcgattgcggctgttcctcgggcagcggaagcggcgcggcggtcggagaagtggcctaaaacttcggcgttgggtgaaagaaaatggcccgaaccaagcagactgctcgtaaatccaccggtgggaaagcgccccgcaaacagctggccacaaaagccgccaggaaaagcgctccctctaccggcggggtgaagaagcctcatcgttacaggcccgggaccgtggcgcttcgagagattcgccgttatcagaagtcgaccgagctgctcattcggaagctgcccttccagaggtgggtgagggagatcgctcaggatttcaaaaccgacctgaggtttcagagcgcggccattggtgcgctgcaggaggctagtgaagcgtaccttggtgggtctgttcccaaaatactcatcgtgtgtgccctcccccgctaagagagtccaccttcgtgcccacaaacctcccctctggctcggcgggaatacggagacaaacaccgttaaatgaaagggaacttcttttatagccggtttttgtaggagagttccgggtacgtaccctccggatctcaatataacgggctttcttctggcggggcaaaaggagtttccacaagcgtgtgccagttggcgttcatggcgcccttgtcccaccgttttctcttccgggggggtgggtgcctgtggtcgtcaacatgtctcacaaaaaaacgccgcatagggaggcgcagccaatgca

SEQ ID NO: 25574 - DNA, 904 bp, Macaca Mulatta
  misc_feature (1)...(904): n = A,T,C or G
gggagggtggcgaacaccaggcatttccaggggctatatttcactgtttgttgttgctttgttctgttatattgttggttgttcatagtttttgttgaagctctagcttaagaagaaactttttttaaaaagactgtttggggattctttttccttattatatactgattctacagaatagaaactacttcattttaattgtatattattcaagcacctttgttgaagctcaaaaaaaaaatgcctctttaaactttagcaattataggagtatttatgtaactatctatgcttcaaaaaacaaaagtatttgtgtgcatgtgtatataatatatatacacatatatatttatacacatacaatttatgttttcctgttgaatgtatttttgagattttaaccagaacaaaggcagataaacaggcattccatatcaatgctttgatcacttacaaatttgtttgaataacacaaaatctcattctacctgcagtttaattggaaagatgtgtgtgagnnnnnnnnnnnnnnnnnnnnnncacgcacgccttgagcagtcagcattgcacctgctatggagaagggtattcctttattaaaatcttcctcatttggatttgctttcagtttgttttcaatttgctcactggccagagacactgatggcagttcttatctgcatcactaatcagcttctnnnnnnnnnnnnnnnnnnnnaaacaatagtttgaaacaactactggaatattgtccacaataagctggaaatttggttgtagtatgcctcaaatataactgactgtatactatagtgttaactttttcaaacagccccttaccactttttatactattaacccattttgtggcattgagttttccttttaaaaaatgctttgttgg

SEQ ID NO: 25575 - DNA, 758 bp, Macaca Mulatta
cccgactaccgccagcacttatacatcccaggcagcaatgccacactgaccaatgccccttgcaagcgggatggcaaggccccagcaggtggcaatggcaacaagaagaagtcgggcaagaaggagaagaagtctcatggaggccaggccaagagccacagggcagcctccccccaaccagcccagcttctccttacctgtacccaggcctcagagtttcagggctcacccccagaatactggtaggggccaaggccatgctccccttgggaaacagaaacaagtgcccagtcaacacccatccccttaccccccgggggttgaatatgcaaagggagttctgctgggaacccccatccaatcaattgctgtacccatgggggtagtggggttagtgtagacaccaagaaccatttgccacacccatttagttatagctgaactcctccatcttccaaatcaatcaggcccatccatcccatgcctccctcctccccacccaactccaacagttcctctctcctgagtaagttggttggggtgttgaagtaccaggtaacctacaagactcctagttctgaagagctggaagggtatcatgacctcttggcctctcctttgattctcaatcttcccccaaagcatggtttggtgccagccccttcacctccttccagagcctgagatcaatgctcaagttttggaggacatggtcaccatccccatggtactgatgcttgctggatttaaggagggca

SEQ ID NO: 25576 - DNA, 2629 bp, Macaca Mulatta
  misc_feature (1)...(2629): n = A,T,C or G
cagggagggctccctgaggtgggcgacaggctgctcagcgtcgatggaatcccgctgcacggggccagccatgccaccgccctggccaccctgcggcagtgcagccacgaggcactctttcaggtggagtatgatgtggccacccctnnnnnnnnnnnnnnnnnnnnnnnnnnnnnnnnnnnnnnnnnnnnnnnnnnnnnnnnnnnnnnnnnnnnnnnnnnnnnnnnnnnnnnnnnnnnnnnnnnnnnnnnnnnnnnnnnnnnnnnnnnnnnnnnnnnnnnnnnnnnnnnnnnnnnnnnnnnnnnnnnnnnnnnnnnnnnnnnnnnnnnnnnnnnnnnnnnnnnnnnnnnnnnnnnnnnnnnnnnnnnnnnnnnnnnnnnnnnnnnnnnnnnnnnnnnnnnnnnnnnnnnnnnnnnnnnnnnnnnnnnnnnnnnnnnnnnnnnnnnnnnnnnnnnnnnnnnnnnnnnnnnnnnnnnnnnnnnnnnnnnnnnnnnnnnnnnnnnnnnnnnnnnnnnnnnnnnnnnnnnnnnnnnnnnnnnnnnnnnnnnnnnnnnnnnnnnnnnnnnnnnnnnnnnnnnnnnnnnnnnnnnnnnnnnnnnnnnnnnnnnnnnnnnnnnnnnnnnnnnnnnnnnnnnnnnnnnnnnnnnnnnnnnnnnnnnnnnnnnnnnnnnnnnnnnnnnnnnnnnnnnnnnnnnnnnnnnnnnnnnnnnnnnnnnnnnnnnnnnnnnnnnnnnnnnnnnnnnnnnnnnnnncctccagcatagtggggccgggcgggcagattgtgcacacggagaccacggaggtcgtgctctgcggagaccccctcagcggctttggcctccagctccagggcggcatcttcgccacggagaccctgtcctccccacccctcgtgtgcttcatcgagcctgacagcccggctgagaggtgnnnnnnnnnnnnnnnnnnnnnnnnnnnnnnnnnnnnnnnnnnnnnnnnnnnnnnnnnnnnnnnnnnnnnnnnnnnnnnnnnnnnnnnnnnnnnnnnnnnnnnnnnnnnnnnnnnnnnnnnnnnnnnnnnnnnnnnnnnnnnnnnnnnnnnnnnnnnnnnnnnnnnnnnnnnnnnnnnnnnnnnnnnnnnnnnnnnnnnnnnnnnnnnnnnnnnnnnnnnnnnnnnnnnnnnnnnnnnnnnnnnnnnnnnnnnnnnnnnnnnnnnnnnnnnnnnnnnnnnnnnnnnnnnnnnnnnnnnnnnnnnnnnnnnnnnnnnnnnnnnnnnnnnnnnnnnnnnnnnnnnnnnnnnnnnnnnnnnnnnnnnnnnnnnnnnnnnnnnnnnnnnnnnnnnnnnnnnnnnnnnnnnnnnnnnnnnnnnnnnnnnnnnnnnnnnnnnnnnnnnnnnnnnnnnnnnnnnnnnnnnnnnnnnnnnnnnnnnnnnnnnnnnnnnnnnnnnnnnnnnnnnnnnnnnnnnnnnnnnnnnnnnnnnnnnnnnnnnnnnnnnnnnnnnnnnnnnnnnnnnnnnnnnnnnnnnnnnnnnnnnnnnnnnnnnnnnnnnnnnnnnnnnnnnnnnnnnnnnnnnnnnnnnnnnnnnnnnnnnnnnnnnnnnnnnnnnnnnnnnnnnnnnnnnnnnnnnnnnnnnnnnnnnnnnnnnnnnnnnnnnnnnnnnnnnnnnnnnnnnnnnnnnnnnnnnnnnnnnnnnnnnnnnnnnnnnnnnnnnnnnnnnnnnnnnnnnnnnnnnnnnnnnnnnnnnnnnnnnnnnnnnnnnnnnnnnnnnnnnnnnnnnnnnnnnnnnnnnnnnnnnnnnnnnnnnnnnnnnnnnnnnnnnnnnnnnnnnnnnnnnnnnnnnnnnnnnnnnnnnnnnnnnnnnnnnnnnnnnnnnnnnnnnnnnnnnnnnnnnnnnnnnnnnnnnnnnnnnnnnnnnnnnnnnnnnnnnnnnnnnnnnnnnnnnnnnnnnnnnnnnnnnnnnnnnnnnnnnnnnnnnnnnnnnnnnnnnnnnnnnnnnnnnnnnnnnnnnnnnnnnnnnnnnnnnnnnnnnnnnnnnnnnnnnnnnnnnnnnnnnnnnnnnnnnnnnnnnnnnnnnnnnnnnnnnnnnnnnnnnnnnnnnnnnnnnnnnnnnnnnnnnnnnnnnnnnnnnnnnnnaggcatccatcatgacaggcactgtgcagagggcggccctcgagggcagacctggccaccggccttggcagaggggacgggaggtacgagcctctcctgcagagatggaggagctgctactgcctacacccttggagatgcacaaggnnnnnnnnnnnnnnnnnnnnnnnnnnnnnnnnnnnnnnnnnnnnnnnnnnnnnnnnnnnnnnnnnnnnnnnnnnnnnnnnnnnnnnnnnnnnnnnnnnnnnnnnnnnnnnnnnnnnnnnnnnnnnnnnnnnnnnnnnnnnnnnnnnnnnnncacgtccgtacacgggacttcgactgctgcctggcggtgccgcttctggctgaggcgggtgatgtcctggagctggtcatcagccgcaacccgctggcacacagcagccgggccccccgagcgccaggccccagcagtccccggatgctctgaagtcagcatgtgggccgaactcctaagggaccacccaggcagatcctggatcccagacacgtag

SEQ ID NO: 25577 - DNA, 5989 bp, Macaca Mulatta
  misc_feature (1)...(5989): n = A,T,C or G
gtgttatttttaagcttccttctaacagaagctggcacagaggctatgactctgagaatgtctttcttcctcctgtcataaaatataccatccgcatgagtctcaagaccgcacagaccacaagaagcctaagaaccaagatttgggccccagggccacacaattctccatcacacaaccagatctatggcagggcttttatttatttacaggatagtattgaaagagcaatcattgaattgcaaactggaaggaactcccaggaaatagcagtccaggttcaagcaattccttatccctgcttcatgaaagacannnnnnnnnnnnnnnnnnnnnnnnnnnnnnnnnnnnnnnnnnnnnnnnnnnnnnnnnnnnnnnnnnnnnnnnnnnnnnnnnnnnnnnnnnnnnnnnnnnnnnnnnnnnnnnnnnnnnnnnnnnnnnnnnnnnnnnnnnnnnnnnnnnnnnnnnnnnnnnnnnnnnnnnnnnnnnnnnnnnnnnnnnnnnnnnnnnnnnnnnnnnnnnnnnnnnnnnnnnnnnnnnnnnnnnnnnnnnnnnnnnnnnnnnnnnnnnnnnnnnnnnnnnnnnnnnnnnnnnnnnnnnnnnnnnnnnnnnnnnnnnnnnnnnnnnnnnnnnnnnnnnnnnnnnnnnnnnnnnnnnnnnnnnnnnnnnnnnnnnnnnnnnnnnnnnnnnnnnnnnnnnnnnnnnnnnnnnnnnnnnnnnnnnnnnnnnnnnnnnnnnnnnnnnnnnnnnnnnnnnnnnnnnnnnnnnnnnnnnnnnnnnnnnnnnnnnnnnnnnnnnnnnnnnnnnnnnnnnnnnnnnnnnnnnnnnnnnnnnnnnnnnnnnnnnnnnnnnnnnnnnnnnnnnnnnnnnnnnnnnnnnnnnnnnnnnnnnnnnnnnnnnnnnnnnnnnnnnnnnnnnnnnnnnnnnnnnnnnnnnnnnnnnnnnnnnnnnnnnnnnnnnnccagggacatatggtatggcagctccctggtattttccaatccttccttcttattggaaggagcgatttgggtgtgcagaggtgaagcctgagaagagcaatggcctcatgtttactaacatcatgatgcagaacaccaacccatctgccagnnnnnnnnnnnnnnnnnnnnnnnnnnnnnnnnnnnnnnnnnnnnnnnnnnnnnnnnnnnnnnnnnnnnnnnnnnnnnnnnnnnnnnnnnnnnnnnnnnnnnnnnnnnnnnnnnnnnnnnnnnnnnnnnnnnnnnnnnnnnnnnnnnnnnnnnnnnnnnnnnnnnnnnnnnnnnnnnnnnnnnnnnttccatgttaaccgggctgtttggggcctcagcaggcaccatttttgtatatggaaaagatatcaaaacagacctacacacggtacggaagaacatgggagtctgtatgcagcacgacgtcttgttcagttacctcactactaaggagcaccttctcctatatggttccatcaaagttcctcactggactaaaaagcagctccatgaggaagtaaaaaggcnnnnnnnnnnnnnnnnnnnnnnnnnnnnnnnnnnnnnnnnnnnnnnnnnnnnnnnnnnnnnnnnnnnnnnnnnnnnnnnnnnnnnnnnnnnnnnnnnnnnnnnnnnnnnnnnnnnnnnnnnnnnnnnnnnnnnnnnnnnnnnnnnnnnnnnnnnnnnnnnnnnnnnnnnnnnnnnnnnnnnnnnnnnnnnnnnnnnccagaacaatcattctgtcgacgcaccacctggatgaggctgaagtgctgagtgaccgcatcgcattcctggagcagggtgggcttcggtgctgtgggtccccattttacctcaaggaagcctttggcgatgggtatcacctgacgctcaccaagaagaannnnnnnnnnnnnnnnnnnnnnnnnnnnnnnnnnnnnnnnnnnnnnnnnnnnnnnnnnnnnnnnnnnnnnnnnnnnnnnnnnnnnnnnnnnnnnnnnnnnnnnnnnnnnnnnnnnnnnnnnnnnnnnnnnnnnnnnnnnnnnnnnnnnnnnnnnnnnnnnnnnnnnnnnnnnnnnnnnnnnnnnnnnnnnnnnnnnnnnnnnnnnnnnnnnnnnnnnnnnnnnnnnnnnnnnnnnnnnnnnnnnnnnnnnnnnnnnnnnnnnnnnnnnnnnnnnnnnnnnnnnnnnnnnnnnnnnnnnnnnnnnnnnnnnnnnnnnnnnnnnnnnnnnnnnnnnnnnnnnnnnnnnnnnnnnnnnnnnnnnnnnnnnnnnnnnnnnnnnnnnnnnnnngacaaaattctgacaaggggagagaggctggatggctttgggctgttgctgaagaagatcatgaatatactcatcaagaggttccaccacacccgcaggaattagaaaggtctcattgctcaggttatcctcnnnnnnnnnnnnnnnnnnnnnnnnnnnnnnnnnnnnnnnnnnnnnnnnnnnnnnnnnnnnnnnnnnnnnnnnnnnnnnnnnnnnnnnnnnnnnnnnnnnnnnnnnnnnnnnnnnnnnnnnnnnnnnnnnnnnnnnnnnnnnnnnnnnnnnnnnnnnnnnnnnnnnnnnnnnnnnnnnnnnnnnnnnnnnnnnnnnnnnnnnnnnnnnnnnnnnnnnnnnnnnnnnnnnnnnnnnnnnnnnnnnnnnnnnnnnnnnnnnnnnnnnnnnnnnnnnnnnnnnnnnnnnnnnnnnnnnnnnnnnnnnnnnnnnnnnnnnnnnnnnnnnnnnnnnnnnnnnnnnnnnnnnnnnnnnnnnnnnnnnnnnnnnnnnnnnnnnnnnnnnnnnnnnnnnnnnnnnnnnnnnnnnnnnnnnnnnnnnnnnnnnnnnnnnnnnnnnnnnnnnnnnnnnnnnnnnnnnnnnnnnnnnnnnnnnnnnnnnnnnnnnnnnnnnnnnnnnnnnnnnnnnnnnnnnnnnnnnnnnnnnnnnnnnnnnnnnnnnnnnnnnnnnnnnnnnnnnnnnnnnnnnnnnnnnnnnnnnnnnnnnnnnnnnnnnnnnnnnnnnnnnnnnnnnnnnnnnnnnnnnnngcatcatcatgtatagtcatccttatccaggagtgcaagaccaagaacaagccacnnnnnnnnnnnnnnnnnnnnnnnnnnnnnnnnnnnnnnnnnnnnnnnnnnnnnnnnnnnnnnnnnnnnnnnnnnnnnnnnnnnnnnnnnnnnnnnnnnnnnnnnnnnnnnnnnnnnnnnnnnnnnnnnnnnnnnnnnnnnnnnnnnnnnnnnnnnnnnnnnnnnnnnnnnnnnnnnnnnnnnnnnnnnnnnnnnnnnnnnnnnnnnnnnnnnnnnnnnnnnnnnnnnnnnnnnnnnnnnnnnnnnnnnnnnnnnnnnnnnnnnnnnnnnnnnnnnnnnnnnnnnnnnnnnnnnnnnnnnnnnnnnnnnnnnnnnnnnnnnnnnnnnnnnnnnnnnnnnnnnnnnnnnnnnnnnnnnnnnnnnnnnnnnnnnnnnnnnnnnnnnnnnnnnnnnnnnnnnnnnnnnnnnnnnnnnnnnnnnnnnnnnnnnnnnnnnnnnnnnnnnnnnnnnnnnnnnnnnnnnnnnnnnnnnnnnnnnnnnnnnnnnnnnnnnnnnnnnnnnnnnnnnnnnnnnnnnnnnnnnnnnnnnnnnnnnnnnnnnnnnnnnnnnnnnnnnnnnnnnnnnnnnnnnnnnnnnnnnnnnnnnnnnnnnnnnnnnnnnnnnnnnnnnnnnnnnnnnnnnnnnnnnnnnnnnnnnnnnnnnnnnnnnnnnnnnnnnnnnnnnnnnnnnnnnnnnnnnnnnnnnnnnnnnnnnnnnnnnnnnnnnnnnnnnnnnnnnnnnnnnnnnnnnnnnnnnnnnnnnnnnnnnnnnnnnnnnnnnnnnnnnnnnnnnnnnnnnnnnnnnnnnnnnnnnnnnnnnnnnnnnnnnnnnnnnnnnnnnnnnnnnnnnnnnnnnnnnnnnnnnnnnnnnnnnnnnnnnnnnnnnnnnnnnnnnnnnnnnnnnnnnnnnnnnnnnnnnnnnnnnnnnnnnnnnnnnnnnnnnnnnnnnnnnnnnnnnnnnnnnnnnnnnnnnnnnnnnnnnnnnnnnnnnnnnnnnnnnnnnnnnnnnnnnnnnnnnnnnnnnnnnnnnnnnnnnnnnnnnnnnnnnnnnnnnnnnnnnnnnnnnnnnnnnnnnnnnnnnnnnnnnnnnnnnnnnnnnnnnnnnnnnnnnnnnnnnnnnnnnnnnnnnnnnnnnnnnnnnnnnnnnnnnnnnnnnnnnnnnnnnnnnnnnnnnnnnnnnnnnnnnnnnnnnnnnnnnnnnnnnnnnnnnnnnnnnnnnnnnnnnnnnnnnnnnnnnnnnnnnnnnnnnnnnnnnnnnnnnnnnnnnnnnnnnnnnnnnnnnnnnnnnnnnnnnnnnnnnnnnnnnnnnnnnnnnnnnnnnnnnnnnnnnnnnnnnnnnnnnnnnnnnnnnnnnnnnnnnnnnnnnnnnnnnnnnnnnnnnnnnnnnnnnnnnnnnnnnnnnnnnnnnnnnnnnnnnnnnnnnnnnnnnnnnnnnnnnnnnnnnnnnnnnnnnnnnnnnnnnnnnnnnnnnnnnnnnnnnnnnnnnnnnnnnnnnnnnnnnnnnnnnnnnnnnnnnnnnnnnnnnnnnnnnnnnnnnnnnnnnnnnnnnnnnnnnnnnnnnnnnnnnnnnnnnnnnnnnnnnnnnnnnnnnnnnnnnnnnnnnnnnnnnnnnnnnnnnnnnnnnnnnnnnnnnnnnnnnnnnnnnnnnnnnnnnnnnnnnnnnnnnnnnnnnnnnnnnnnnnnnnnnnnnnnnnnnnnnnnnnnnnnnnnnnnnnnnnnnnnnnnnnnnnnnnnnnnnnnnnnnnnnnnnnnnnnnnnnnnnnnnnnnnnnnnnnnnnnnnnnnnnnnnnnnnnnnnnnnnnnnnnnnnnnnnnnnnnnnnnnnnnnnnnnnnnnnnnnnnnnnnnnnnnnnnnnnnnnnnnnnnnnnnnnnnnnnnnnnnnnnnnnnnnnnnnnnnnnnnnnnnnnnnnnnnnnnnnnnnnnnnnnnnnnnnnnnnnnnnnnnnnnnnnnnnnnnnnnnnnnnnnnnnnnnnnnnnnnnnnnnnnnnnnnnnnnnnnnnnnnnnnnnnnnnnnnnnnnnnnnnnnnnnnnnnnnnnnnnnnnnnnnnnnnnnnnnnnnnnnnnnnnnnnnnnnnnnnnnnnnnnnnnnnnnnnnnnnnnnnnnnnnnnnnnnnnnnnnnnnnnnnnnnnnnnnnnnnnnnnnnnnnnnnnnnnnnnnnnnnnnnnnnnnnnnnnnnnnnnnnnnnnnnnnnnnnnnnnnnnnnnnnnnnnnnnnnnnnnnnnnnnnnnngagaagaaaagtcagatggtttgtggcaggtgccaccgggcaagtaaacaacataatttgtttccagaaaacaacagaatgaacatcatcatgaatacatgaatctgctgtgatgtgtaaactgctaagggccaaatgaacatttgcagagcagtgggcacaatgtttacaatgtatgtgtatgtcactttcggtacctgtgaatgcatggggacgtgctgaacccgaaaaagtgcctttccataaggatgcgatagagagggcaatttaccctggtggtaaatggaacctagattcactcctgccatgccttgccagtagtaagctgcagggtggaacaagaagtcacttgctctgggaggaagggaggggggaatggctgtgtcagctgggtagatacaaaccctgaaaagagaatccatgcgctgctggcaggcaacattttttaaagctctttcagaaaccctcatatttggggtttctcttcaggaaacattcctgtggagggaaaatgaatatgaagataatttccagctaattatctgggtgatctagaatcgtgtatatggctataggatagacttcttaataatggcaagtgacatggccctggggaaaggtgctttaggtaccnnnnnnnnnnnnnnnnnnnnnntctatacaagtttgtcagctttggcatgactgtgtttcaaaaaccaataaactc

SEQ ID NO: 25578 - DNA, 1447 bp, Macaca Mulatta
  misc_feature (1)...(1447): n = A,T,C or G
ctgaagatacctcgggcagttcctgttctcaaaatggatgcaccatcttcaagtaccactctagcccaatacgacaacgaatcaatgaaaaactatggcttccagccaccatcttcaagtaccactgtagcccaatatgacagcaactcaaagaaaatctatggctcccagccaaacttcaacatgcagtatattccaaaagaagactaccctgactgggggcaagaaagaaaactgaaaagnnnnnnnnnnnnnnnnnnnnnnnnnnnnnnnnnnnnnnnnnnnnnnnnnnnnnnnnnnnnnnnnnnnnnnnnnnnnnnnnnnnnnnnnnnnnnnnnnnnnnnnnnnnnnnnnnnnnnnnnnnnnnnnnnnnnnnnnnnnnnnnnnnnnnnnnnnnnnnnnnnnnnnnnnnnnnnnnnnnnnnnnnnnnnnnnnnnnnnnnnnnnnnnnnnnnnnnnnnnnnnnnnnnnnnnnnnnnnnnnnnnnnnnnnnnnnnnnnnnnnnnnnnnnnnnnnnnnnnnnnnnnnnnnnnnnnnnnnnnnnnnnnnnnnnnnnnnnnnnnnnnnnnnnnnnnnnnnnnnnnnnnnnnnnnnnnnnnnnnnnnnnnnnnnnnnnnnnnnnnnnnnnnnnnnnnnnnnnnnnnnnnnnnnnnnnnnnnnnnnnnnnnnnnnnnnnnnnnnnnnnnnnnnnnnnnnnnnnnnnnnnnnnnnnnnnnnnnnnnnnnnnnnnnnnnnnnnnnnnnnnnnnnnnnnnnnnnnnnnnnnnnnnnnnnnnnnnnnnnnnnnnnnnnnnnnnnnnnnnnnnnnnnnnnnnnnnnnnnnnnnnnnnnnnnnnnnnnnnnnnnnnnnnnnnnnnnnnnnnnnnnnnnnnnnnnnnnnnnnnnnnnnnnnnnnnnnnnnnnnnnnnnnnnnnnnnnnnnnnnnnnnnnnnnnnnnnnnnnnnnnnnnnnnnnnnnnnnnnnnnnnnnnnnnnnnnnnnnnnnnnnnnnnnnnnnnnnnnnnnnnnnnnnnnnnnnnnnnnnnnnnnnnnnnnnnnnnnnnnnnnnnnnnnnnnnnnnnnnnnnnnnnnnnnnnnnnnnnnnnnnnnnnnnnnnnnnnnnnnnnnnnnnnnnnnnnnnnnnnnnnnnnnnnnnnnnnnnnnnnnnnnnnnnnnnnnnnnnnnnnnnnnnnnnnnnnnnnnnnnnnnnnnnnnnnnnnnnnnnnnnnnnnnnnnnnnnnnnnnnnnnnnnnnnnnnnnnnnnnnnnnnnnnnnnnnnnnnnnnnnnnnnnnnnnnnnnnnnnnnnnggatcctgatgtgggaggtgttcagcctggggaagcagccctatgacttatatgacaactcccaggtggttctgaaggtctcccagggccacaggctctaccggccccacctggcatcggacaccatctaccagatcatgtacagctgctggcacgaggcaan

SEQ ID NO: 25579 - DNA, 729 bp, Macaca Mulatta
gctcctgaaaatgagagggaaaaggaaggtgtaaatctgttggtaataaagtctccaaccacagcactgtcatgggaatgtttttgttacaattttggttttcaaggatatagtaaacaaaacagtcacttgaattgtcaaaagaacggcagttttacaaagtgaaaagcatacacaccaagccagaatacaatagtactcaggtctatatgttgcagtggtgccagtgcaagaggaaaccttcagggaggttgcagtgaccctccagggagctgagacccatggagggccctagggctggagggaggccagcaaaccactcagctcaaagcactcccttcaggcatctgaagagggaaagcccatgtgtcttcctgtgaagcactgaacgggcagccagcatctcagaaatgcaggcgatttttcatacatggtgtgaatgagtctggggtcacccagggggtccctcagtgatcagacacactttgaaacaatcagcacctacacaggagggtactaggaaaaaggaaaagtgttttcctgaatttcatagcagattgggagctacaggaagagattcccaagaccaccatggaaatattttgttctaacaaagtaaattcacaagagcacatcaaacacaagacctaatgcaaggggcagtgcccatggccactgcctgcctccggcgagaagttctttagcagccgtcacagggcaatgcttagg

SEQ ID NO: 25580 - DNA, 99 bp, Macaca Mulatta
cagggaaaggcgtaggaggaggagcaggagttcttccagatcaccaagaacgtcaaaaaccataaaaaggaaatcttctagatctccgtcccctaggag

SEQ ID NO: 25581 - DNA, 1447 bp, Macaca Mulatta
  misc_feature (1)...(1447): n = A,T,C or G
attgtgagaacaatgaaacagcaacaaagggcatctcagaagaaaaatcacagggactccctcaggaaccttcatttcgaggaattagtgagcatgnnnnnnnnnnnnnnnnnnnnnnnnnnnnnnnnnnnnnnnnnnnnnnnnnnnnnnnnnnnnnnnnnnnnnnnnnnnnnnnnnnnnnnnnnnnnnnnnnnnnnnnnnnnnnnnnnnnnnnnnnnnnnnnnnnnnnnnnnnnnnnnnnnnnnnnnnnnnnnnnnnnnnnnnnnnnnnnnnnnnnnnnnnnnnnnnnnnnnnnnnnnnnnnnnnnnnnnnnnnnnnnnnnnnnnnnnnnnnnnnnnnnnnnnnnnnnnnnnnnnnnnnnnnnnnnnnnnnnnnnnnnnnnnnnnnnnnnnnnnnnnnnnnnnnnnnnnnnnnnnnnnnnnnnnnnnnnnnnnnnnnnnnnnnnnnnnnnnnnnnnnnnnnnnnnnnnnnnnnnnnnnnnnnnnnnnnnnnnnnnnnnnnnnnnnnnnnnnnnnnnnnnnnnnnnnnnnnnnnnnnnnnnnnnnnnnnnnnnnnnnnnnnnnnnnnnnnnnnnnnnnnnnnnnnnnnnnnnnnnnnnnnnnnnnnnnnnnnnnnnnnnnnnnnnnnnnnnnnnnnnnnnnnnnnnnnnnnnnnnnnnnnnnnnnnnnnnnnnnnnnnnnnnnnnnnnnnnnnnnnnnnnnnnnnnnnnnnnnnnnnnnnnnnnnnnnnnnnnnnnnnnnnnnnnnnnnnnnnnnnnnnnnnnnnnnnnnnnnnnnnnnnnnnnnnnnnnnnnnnnnnnnnnnnnnnnnnnnnnnnnnnnnnnnnnnnnnnnnnnnnnnnnnnnnnnnnnnnnnnnnnnnnnnnnnnnnnnnnnnnnnnnnnnnnnnnnnnnnnnnnnnnnnnnnnnnnnnnnnnnnnnnnnnnnnnnnnnnnnnnnnnnnnnnnnnnnnnnnnnnnnnnnnnnnnnnnnnnnnnnnnnnnnnnnnnnnnnnnnnnnnnnnnnnnnnnnnnnnnnnnnnnnnnnnnnnnnnnnnnnnnnnnnnnnnnnnnnnnnnnnnnnnnnnnnnnnnnnnnnnnnnnnnnnnnnnnnnnnnnnnnnnnnnnnnnnnnnnnnnnnnnnnnnnnnnnnnnnnnnnnnnnnnnnnnnnnnnnnnnnnnnnnnnnnnnnnnnnnnnnnnnnnnnnnnnnnnnnnnnnnnnnnnnnnnnnnnnnnnnnnnnnnnnnnnnnnnnnnnnnnnnnnnnnnnnnnnnnnnnnnnnnnnnnnnnnnnntcttattaggaatactcaggaaatatgaaaaatgggaatgtaatattgaaatcttattttgtatgaaagtgtcatgaaaagaatatagcaacctaggctctgtcactgcatctgattgttagtgtaccaggttatggggctggtgtggactgtgtgaggcactttgtctcaggaac

SEQ ID NO: 25582 - DNA, 809 bp, Macaca Mulatta
cttcctgggtgtcctgtccttcatagactcctcggttttccatgggtggacacccccaggctgctggagagcttcctcatctcaagccaatccatcttctttgcaagctgtgtggtccagatggccctcatgaccctccatggtactgctgagtgtctgctcctggccatcatggcctatgaccaattcaccgctatctgccaccctctcctctatcacactattatgtcccaacatctgtgtgtcctgctagtggtgacctcctatactgtttctgttgccaattcagctttgctgactgggtgcctctttaagctgccctactgtggccccaatgtcattaaccactatttctgtggcatccctcctgtgcttcatcttgcctgcatagatactactgagggtgagaccattatcttctcatcgtgtgtctcgctcatcctctttaccatcaccattatcctagtctcctatgcctacatcctggtgcccatttgcagaatgcgctccctgcaggcccagagcaaagctctctccacctgtgcctcccacctcaccatcatctgcttcttctatagcaccatcaccttcatgtagccaagctctcacaattccatggaacacaacaaggtcatgtctgtcttctatactgtaatcatccccatgctgaaccctctgatctacagcctgaggaataaagatataaaatatgctttgaagaggagatgcctgtgaaagttgtgttcataaccaagtgtggagcattgagcatcctatcccaagccgtaacatggtagccacaatataaa

SEQ ID NO: 25583 - DNA, 732 bp, Macaca Mulatta
  misc_feature (1)...(732): n = A,T,C or G
ggagttgcaggaagttagttttagttctgtagaaggcaagagtagggtagacaaatcaaatgctctggggtcaggctggtggagacagtaacactggtgagcaggtgccccagctcagactaaactactgagctttgttctgctgctgctgctctacaggtccaggattgttagatttctgggtttttgttgctttttgaaataaggaaaataagtttatcttaagtttagttttccttggatatacctagattccatacagtgacaagataaatacaaagggagaacatctggatttcatccttgacccatttacaaagcaaaaagagatgctggattcagatataaatgttaattttacagtgtttaaggtaccaaannnnnnnnnnnnnnnnnnnnnnnnnnnnnngccacatatctatatttttctgtgaaagctttcagttaagtgttgggaactaatttcaagattttaaaaaatgttatgcaggcttaacatgtctgagagccataaatgacctaacgttttccatttttaatctctgaactaggtgatctcagtttttctttcaacttccagtactctgggaagttttgtgtgtgaacctggtagtgtaccatttctcaaggaagtggatatggggtttgggatgttttttgtccccctcccaaaattctccatgggttcaaaagtgggtggacaattttcaattggtttaaaaagagttgggc

SEQ ID NO: 25584 - DNA, 795 bp, Macaca Mulatta
  misc_feature (1)...(795): n = A,T,C or G
attttctgtggcccctctctccctttttctcctccgtccttggaacgcctccgtaggccctccncggcgccgtccgcgcggttttcccggccgccttgttttctccctgacaggccgcccttccgtaagaccctttcgcggttttccccagtggtccatcctcccttctccccccgggcggcaactccaaacttttccgggcgtttcttccgtggaggacctgcccggccgccagcagctcccgtcacacgtaccaagccactacccagccgcttcaggaacccccccctccttgctcttgtcgcgtccagcgaggatgatcagaactggtcccgggggtaatgctggctcgcagttttctcacgtgctgactgaagggtttcttgccgtggctcaacagctttccgaggcacatctccagtaggataatatctaggcattttgcgaagtttacccacccgggtaccgccgttcttgtcaccaccaactggctttgtaagagttgcaagacccttcnnnnnnnnnnnnnnnnnnnncttggatttagcggctgagtacttcctcttgtacatggcctttctggaatacatggcagatcgggaatacctgccaattcctctgacaaggacagggttgcggctgcaatggggcttccccttcttgggcttcttagccttgaggttaccctttttcaccttgccaccagcatcagccttcttggcttcgggtttcttctctttagtatctggcttctcaactttttcacccgccatcttgcacgatgggaaagagccc

SEQ ID NO: 25585 - DNA, 483 bp, Macaca Mulatta
  misc_feature (1)...(483): n = A,T,C or G
agtcgggaagacatcactcatgaaccagtatgtgaataagaaattcagcaatcagtacaaagccacaataggagctgactttctgaccaaggaggtgatggtggatgacagactagtcacaatgcagnnagatatgggacacagcaggacaggaacggttccagtctcttggtgtggccttctacagaggtgcagactgctgtgttctggtatttgatgtgactgcccccaacacattcaaaaccctagatagctggagagatgagtttctcatccaggccagtccccgagatcctgaaaacttcccctttgttgtgttgggaaacaagattgacctcgaaaacagacaagtngtggccacaaagcgggcacaggcctggtgctacagcaaaaacaacattccctactttgagaccagtgccaaggaggccatcaacgtggagcaggcgttccagacgattgcacggaatgcacttaagcagg

SEQ ID NO: 25586 - DNA, 96 bp, Macaca Mulatta
aggtcattttcttggtgaacagtggctcagaagccaatgagctggccatgctgatggccagggcgcactcaaacaacatagacatcatttctttca

SEQ ID NO: 25587 - DNA, 1630 bp, Macaca Mulatta
  misc_feature (1)...(1630): n = A,T,C or G
annnnnnnnnnnnnnnnnnnnnnnnnnnnnnnnnnnnnnnnnnnnnnnnnnnnnnnnnnnnnnnnnnnnnnnnnnnnnnnnnnnnnnnnnnnnnnnnnnnnnnnnnnnnnnannnnnnnnnnnnnnnnnnnnnnnnnnnnnnnnnnnnnnnnnnnnnnnnnnnnnnnnnnnnnnnnnnnnnnnnntcnnnnnnnnnnnnnngctgcaaggcgattaagttgggtaacgcnnnnnnacgacgtnnnnnnngccagtgaatgtaatactcactatagccgaaataggttaccggcnnnnnnnnnnnnnnttttttttttttcttttgaacttgtgcaaatagctttattaccataagcatatgaatattcatgcataggttcccaattctggggcactcagatagggagcaaaagcaaatgtttcaatttttgtttacaaaagtatactttaccaaattgctgtaaattataaatagcttcaaagagaaatttcataaatctggagaataaaacattcaaagaatcagtacattttcaaataaaaaattatgaaaacattatccttttgatgattcagtccaataaaattgtttcttgtcttcttctttgtcttgaatttcatgaaggtatcagcctgttcattaaaattttgaaagttctcagagagtccagtggtatgatcttgaagttatcagaaacttgtattcaagagttgtcatcagagtcttttccatatatcttctggaagaaaaaacaattttggactgtagctgattgtaaatacttcaaagaagaatcaaagcagctgtccagtcttcctgaaatacagaaatgacatcatggctgctatatcggattaagcccaggatagatctcctattcccgaaggagcagagacgttgattttcttgaatgtggaaatttccctgccagtggctgagttacgagcagagcaaccatagagcccgctatgctctgtagtaatttggaggatagagagcttatgtcctgattgctgaagcttcccatcaatcgtccaagaatactctgctggtgggttagagtccgcgaagcagtacaagtagaggttttctcctgaatggtaataggtgaacggagggaaaatgctggggaagtctggaccatagagaacattcagggtgacagggtcactgaagatgctaccaaatcggtcctgtatttcacattcatagggtcctgtgtcatttcttgtgacattggctagaatgaggatcctgttttcaccgggttgctttagcctggaactgaccgggaggctctgaccatttacccaccacacgtaggtatggttctgagtcttaggttcacaggttaaggctacaacattcttattctccatggggttgaagttgttgctggtgatgtacggcttgggcagcaccgggaggagattcagggtgactgggtcactgcgggtggaactcactgtgttcttcatttcacattcatagggtcctgcagtatcgtttgtaacaccagatataatgagggtcctgttgtttttggacagcttcaacttgtgactgatagggagactctgaccacttatccaccacaggtagcttacatcccgagtgtgaggatcacag

SEQ ID NO: 25588 - DNA, 555 bp, Macaca Mulatta
aggtacacatgttttcccttttgcagttggtgggttttgtgtatgcctgttatgtgatcagtatttccatggaagaagaagacacatgtaagtactgttttctctctccctgtgggttccttttgaatgagatacagcttccaaaactaatcattacagggttatgaactcttttatatttggagtctaaaatgattgaactcagcatactaaagttacagtcaaaagttgacagactgaactgcacacaaataaggtgacgctacatattgaaactctcaatttgtgagagcacgtgcagagactcagaaggccaaggactgctgtcatatagcttagcaacttttcatcagacatctaaccattatgctgagtagacaatcaacggttgtcttatctattaacaattttaggcatgttggtggcagaattttgaagtctgagtaacagtaatgatatcaatacaataatacattacagaaagatctatatgtatataaactatataaaatgcaatgaaaaacaactaaaatttacaaccttccaggtgagatg

SEQ ID NO: 25589 - DNA, 773 bp, Macaca Mulatta
tgcccttctccatcatccccagagagctgtgacgacactgcagccacagggagggagggccggtcagagggagaggcagcggtcagtgtggggcgacagtggcatcaggtgtggggcctcagggaaatccatctttagtgaacgcctccgcagctgcagccctcgttctcctggctcggccaagagggtcttcctggatttctttgttggtgccttgggaaacagtctgacttgaaccctaagtgcctttttgcagagttttgtggtgaccagacttgcaccccaatatctgggcaggggggagcctcacaattgtccttcaccctcacccatgcctctggttgggggtctggggatctcactccccgctctcagcacagcacagacttctggatccctctcaggtcttgcccagggcagtcacgacgtgaagaaactgggcaagtgggaagacgatgggatttctgggttcccttcccagacttggagttagcagatgatgcccacgttgcccctctttgccccctgaggccagctgggccccactgtgctctttccctctgctaccaagtgcctttggggcctctggggtctagccagggggtactgagcactggcccttacgcttccatttccacccaccccatctccctggaaatgtgttccagcccaagcagcctccgtcggctttagatcctgtggttgctagatccagtcctttctaataccctgagtcaacacattactcctgcaggtcttacgctacaatgcaa

SEQ ID NO: 25590 - DNA, 1519 bp, Macaca Mulatta
  misc_feature (1)...(1519): n = A,T,C or G
gctaccgacacccgctgtgtgtccctgaaggatgcgttcctggaggacatggcaggtagtggggaggccgagggctcgtcggcctcctccccgagcctcccgccaccccggaccccggccctcagccccacatcgttggggccccagcccacacgcctggggggcccgtcaccccctaccaacttcctggatgggatcgtggacttcttccgccagtacgtgatgctgattgctgtggtgggctccctggcctttctgctgatgttcatcgtctgtgccgcggtcatcacccggcagaagcacaaggcctcggcctattacccgtcgtccttccccaagaagaagtacgtggaccagagtgaccgggccgggggcccccgggccttcaataaggtccccgacagagcccccgacagccggcccgaggannnnnnnnnnnnnnnnnnnnnnnnnnnnnnnnnnnnnnnnnnnnnnnnnnnnnnnnnnnnnnnnnnnnnnnnnnnnnnnnnnnnnnnnnnnnnnnnnnnnnnnnnnnnnnnnnnnnnnnnnnnnnnnnnnnnnnnnnnnnnnnnnnnnnnnnnnnnnnnnnnnnnnnnnnnnnnnnnnnnnnnnnnnnnnnnnnnnnnnnnnnnnnnnnnnnnnnnnnnnnnnnnnnnnnnnnnnnnnnnnnnnnnnnnnnnnnnnnnnnnnnnnnnnnnnnnnnnnnnnnnnnnnnnnnnnnnnnnnnnnnnnnnnnnnnnnnnnnnnnnnnnnnnnnnnnnnnnnnnnnnnnnnnnnnnnnnnnnnnnnnnnnnnnnnnnnnnnnnnnnnnnnnnnnnnnnnnnnnnnnnnnnnnnnnnnnnnnnnnnnnnnnnnnnnnnnnnnnnnnnnnnnnnnnnnnnnnncctccttggccaccttgtggtgccaatcccagcatgtgctgattctacagcaggcagaaatgctggtcccccggaggaatctcaccaagtgccatcatccttcacctctgcagcctcaaagggctatatcctaaagcacagctcccctgacaaggtgagggagggcatgtgtccctgtgacagccaggataaaacatccctcgaggctgggtgcggaggctcatgcctgtaatcccagcattttgggaggccaagtccagacgtcgcttgagaccaggagttcaaaaccagccctggcaacattgcgagacccnnnnnnnnnnnnnnnnnnnnagtccactaaatcagccacatcaaccgggaatcatgtcacaggtcattcctggggcaaacatcactgcttttccatcaagggagcaaagaataagtgggagttttggaagagtttggatgacagacgctgagatgcccagcgtttgtaaggcaacatgcagcctggcgtgaagcaatattttggaactgcaaatgatccccctcttgtgtcctttcaatcctgaatattttagtgttattctgcctgtgcttagagctccagcagcagaagtgggtgtggttaattaggacacttctgtgag

SEQ ID NO: 25591 - DNA, 119 bp, Macaca Mulatta
gcttcctctgtcatctctgtcccaggatagcaaacttgtgtatattcagctgttatgggataatatcaaccttcatcaggaaccaagagaacctctgtatgtctcatggaggaatttta

SEQ ID NO: 25592 - DNA, 1313 bp, Macaca Mulatta
  misc_feature (1)...(1313): n = A,T,C or G
gggaactcggtggtggccactgctcagaccagacttcgctcgttttcgtgcgcctcgctccgcttttcctccgcaaccatgtctgacaaacccgatatggctgagatcgagaaattcgataagtcgaaactgaagaagacagagacgcaagagaaaaatccactgccttccaaagaaacgattgaacaggagaagcaagcaggcgaatcgtaatgaggcgtgcgccgccaatatgcactgtacgttccacaaacattgccttcttattttacttcttttagctgtttaactttgtaagatgcaaagaggttggatctaagtttaaatagactgtgtctgcgccctttcgtcttcacaagaacttctcgaccaaataaaaggccggatcctggacctttccaattcctgatcattttactgggctgagccaagggtaatcgaataagaagctttgccatagattagggtataaaacggcaaacaacgttgcgcgggatgggcataaaacaacctggagaagggtcggggaatcaacacacagtatagataatcttgtataatcatacgttcagactgaacctcacaaatctatgtagttccacctaagaagggangggatacacatatgaatgaagtgagactattagngcataaaagacagatcaaaaaatgcggtacttaatctgggcccgtcaccattaacagcactgtggcgacacccaacacatctacattactcgcataattaactttcttttgtaacaggacaaaagttcataacctattaggatatcgcgggcatttattaactaggcacaagaacagtcgaatggaggacgggcgacgagataaagaatgtgtggactactcttcgcagaggagaatcgtgttcgtgatccattgctcgcaggcgagtcttcttgggactcttttctacagcccacaacgccaattctaatcgtctttttcctaccacaccacacatttaaatctccttttagatatattatttcagttctacaatgtagattcataaactacgatataccacatttatattccctgtaatattgatcatcaatatggggtatagaggatggtccccatgatgtcatntccgtacctgatgataatacagtatcatgtaggacatatgttcttcaatcgataattcttngtcgtgtcaggatatgacactcaaaccgcaaatgatcctgttttggttgcgngatatttccccattcagtgacacttaagcactcgctatatggtctgcacattacttaatcntaaataacatctctcgaaattcc

SEQ ID NO: 25593 - DNA, 267 bp, Macaca Mulatta
tcagacaagagctcttctgggaattggtagatctctccagggtggtcagtgcaggtttgtatgaggcttggactttcttctgaggcctctctgccttgttggactgaaccagggcttgtggttcctgtgggtgcttgttgagtacttgttggcccctgactggagattaagaaggaaaagattttttcatagtttttggaccaatgaccagaagcatttttcagtccctttgtaggtgctggctttcttatatattctgcgtgggca

SEQ ID NO: 25594 - DNA, 584 bp, Macaca Mulatta
  misc_feature (1)...(584): n = A,T,C or G
acgttcgtggatagactcgtatctgtgaccagtgtcagccaccgcggatggcaagagacctaatcggaccggccctgccgcccggcttcaaggcccgcggaacagcggaggacgaagagcgggacccgagccctnnnnnnnnnnnnnnnnnnnnnnnnnnnnnnnnnnnnnnnnnnnnnnnnnnnnnnnnnnnnnnnnnnnnnnnnnnnnnnnnnnnnnnnnnnnnnnnnnnnnnnnnnnnnnnnnnnnnnnnnnnnnnnnnnnnnnnnnnnnnnnnnnnnnnnnnnnnnnnnnnnnnnnnnnnnnnnnnnnnnnnnnnnnnnnnnnnnnnnnnnnnnnnnnnnnnnnnnnnnnnnnnnnnnnnnnnggcccataataggtcctgcactgccacctggtttcattaaatctacacagaaaagtgacaagggcagagatgatccaggacaacaggtatcatcatcccatttcaactctaaggtttggaaagttttcattgaaaggataagatgtattgtaacaaactccaaactttatgcatgcagttactacaatcactggactcaactgtaatgtaagactca

SEQ ID NO: 25595 - DNA, 608 bp, Macaca Mulatta
  misc_feature (1)...(608): n = A,T,C or G
atcaattccacgaattttggagaatgtccgannnnnnnnnnnnnnnnnnnnnnnnnnnnnnnnnnnnnnnnnnnnnnnnnnnnnnnnnnnnnnnnnnnnnnnnnnnnnnnnnnnnnnnnnnnnatttatattggtcacattgtaccactgggtgctgctgataccgacggccgcctgaggtctggagatgaattaatctgtgtggatgggacgccagtaattggaaaatcacaccagcttgtggtccagcttatgcaacaagctgccaaacaaggccacgtcaatctcacagtgcggcgtaaagtggtttttgcgnnnnnnnnnnnnnnnnnnnnnnnnnnnnnnnnnnnnnnnnnnnnnnnnnnnnnnnnnnnnnnnnnnnnnnnnnnnnnnnnnnnnnnnnnnnnnnnnnnnnnnnnnnnnnnnnnnnnnnnnnnnnnnnnnnnnnnnnnnnnnnnnnnnnnnnnnnnnnnnnnnnnnnnnnnnnnnnnnnnntggtcagcactgtggtgcagccntacgacgtggagatccggcgtggggagaacgagggcttcggcttcgtcatcgtgtcctcggtgagcaggcccgaagcaggcacgaccttt

SEQ ID NO: 25596 - DNA, 706 bp, Macaca Mulatta
aactgctgttagttctggtgtgtaaatcagtcacgtttgccattatcacctcacacctgattcagttaagcctcagcagaaccgtccctgcctgtcaggtcccccagctcagtgagagaatcgcccccgtcattggcttaaaatgtgttctagccttgggcttcaaaaagaacaccactgactttgtggacgaggtaagagccatcatccccagagtccccagtttaagtgtaccatggcttcaagacagaactgaagattctggggaaagtttagagactgaacctctggaaagccaagacaaagagcttctggacacttcatttgaagatctgtcaaaacctaagagaaagcttgctgacggtcagcaggcttctgtaacattacaaccccttaaaatcaagaaactgattccaaaccctaataagaaaaggaaaccacccaaaagtaaaaaagctactccaaagtaatcttgcataaacttgccatgtcatactgtttgtgaaagcacaccttgtgaagaagccttacaactaataaaatgagttatatttacatagattcatacagtcctgtttggtaatattcaaatgtgtaagactctttgtaactatggcacagatactaagtgcaggaaatattcaaaaataggaatacccaaacagaagtttattgaaactagtgttcatgcgtatttaaattgact

SEQ ID NO: 25597 - DNA, 140 bp, Macaca Mulatta
ggaaccagcgaactccgtgtagacctggtggattttgagggcaatcgccaatttgctaagtacagatcattcaaggtggccagtgaggcagagaagtacaagctggtcctggggacctttgtggagggcagcgcgggtga

SEQ ID NO: 25598 - DNA, 150 bp, Macaca Mulatta
agattagctccctgcagcccggagcctgagtccgaccaggctggtggaagaacaaggccacgtgtcccctttcctcccgcaggaggctttgcagcgtcggactcctctcagcccaagacgggcctttcagggcgagcacttcaggcgggg

SEQ ID NO: 25599 - DNA, 494 bp, Macaca Mulatta
gttataaagctcatctgtcccgctgcattccctgtgtatattcaggacatggctcgtgggttgtgtgtcattgtgtgcgtctgtatgtatttttctgtcatcactgttccctcttctcccgagtgtgcattcagttaatataatcagttgcttgcttctttcaaagtgctttgaaggtcttgaactcacgtgtgagcatctttatcaactatcccaactgcatgttctccatcacatattctcttatttgctctgtaccccgagaatatgttttagagatattggaataaagctgtctgggtaaggagtaggcttagccgaactatgaataatacactttagtctagttctttattctaaatctggattgccagtattgtgtatttaaaccaagtctgtgaatacctgcttttttggccacagagtaacagtttttcatgtaagatcttcataccagagtaggaagtaaaaatagcttagaaagccctgtcagg

SEQ ID NO: 25600 - DNA, 321 bp, Macaca Mulatta
gtcaaagaaaaataaaggctagaacagcaccccagattgtgcgctttctttgttgggcaaagcatcccacgtaaccctcagctccccgggggccgtgtgaggcacagaccccaaagtccctggcctgtcctttggcacgtgggctcacaggcagtgggcatcagaaagtgacctgccctttgctctgccagtttgattctgggcgtgtggtggaattttttgggactcaggtcatgcgggaacccctccagcctggcctcagggctccccgctgtccagtgtgttggggtgcagcccagggctccctcctggggaacgggc

SEQ ID NO: 25601 - DNA, 1032 bp, Macaca Mulatta
  misc_feature (1)...(1032): n = A,T,C or G
aggaaggagggttgccctaccccagcggtctcggctcggggcctccgcggcaggcttgggtccttcacccgccagctccaggtngtcccgtgccgttttccgtccgcgactcttccggcccagagctttcggagtgcggttgctcaggggaaagccgtcgccgccccccgcctcggggnnnnnnnnnnnnnnnnnnnnnnnnnnnnnnnnnnnnnnnnnnggccgcctccttgcccccgtggcaggctccgttctgtctcaaagccctcccccaagctcggtgagtggaaatcggctccgcaggacccgctggggcccagcccctacccgtggtgcccagaagacttggctatggcaccatgggtaaacccattaaactgctggctgttttcaggttgaaatcccaaagattgatgtctacctctatgaggtagatactaaaccagacannnnnnnnnnnnnnnnnnnnnnggaggtgtttgactcaacggttcagcattttgaagtgactatatttggagacagtagaccagtttatgatggaaaaagaattctttacactgccaatccacttcctgtggcaactacagggatatatttagacgttactttacctggagaaggtggaaaagatcgaccttttaaggtgtcaatcaaatgtgtctcttgggtgagttggcacctactgcatgaagtactgacaggacggaccttgcttgagtcactggaattagacaagccaatcagcactaaccctgtccatgcagttgatgtggtgcgtcgacatctgccctccgtgaatacacacctatggggcattcctttttctcagttccagaaggatatgaccgccctctgggagggggcagggaagtatggtttggattccatcagtctgttcggcctgctgtgtggaaaatgacacttaatattgatgaaaaagacctctggcagcagtgtggagaatagatagatagagaagaaaaaactaatcggaggagccagttaggaggcttttcagtcactagttca

SEQ ID NO: 25602 - DNA, 131 bp, Macaca Mulatta
aagggccagagcctgaagctgatagcgaggaacaggttcacccgaagactgggtgtgagcgtagagatggtcctgatgtccaggagatgggcctgccaaatccagaggaggtgaaaatgactgaagaaggt

SEQ ID NO: 25603 - DNA, 455 bp, Macaca Mulatta
aaaggaaatatagggcattgttcctcattaacaactgcttttcatgctatacacaagaatctgagtctatgggagaaaaagaaacaagcaatgccttacagtattttccaaattctagggcatacaaatacagtacttgggcagccaagaaaattatacagtagaaagtcagccttctttctcagtgccttgcatttaagccttggagtacctaggtgatttctcagttctctttgttcttgagactgggtagatccaatcaacatgagagttacagtggctgccatcccatagtagagagtgagtgttcacttgtgtccagaaagttttctttggaaaaagcccttatcatattttttcaacatagtgaatttagtaggtagtcatcagcctgcagtcacttcaagatgttattatgtgaacagattctttcaatttctatagtccctttagta

SEQ ID NO: 25604 - DNA, 264 bp, Macaca Mulatta
  misc_feature (1)...(264): n = A,T,C or G
gaggcagacatgcccgacgagatcaacattgacgaattgttggagttagagagtgaagaggagagaagccggaaaatccaggnnnnnnnnnnnnnnnnnnnnnnnnnnnnnnaggacttcatccaggagctgctggcaaagcttcaaggcctccacaggcagcccggcctccgccagcccagcccctcccacgatggcagcctcagccacgtccaggaccgagcccggactgctcacccctgaccctctagcgctctccctgcc

SEQ ID NO: 25605 - DNA, 158 bp, Macaca Mulatta
ggatctgcatggcatattacgagagcggctacaacaccaccgcccagagggtcctggatgatggcagcatcgactacggcatcttccagatcaacagcttcacgtggtgcagacatggaaagctgcaggagaacaaccactgccacgtcgcttgctca

SEQ ID NO: 25606 - DNA, 772 bp, Macaca Mulatta
gggccatctccctgatgccatctgcatgatccatgttgagcggttcacaccagtgccttctctgctgttcaacggtatcatggcattgatctacttgtgtgtggaagacatcttccagctcattaactactacagcttcagctactggttctttgtggggctttctattgtgggtcagctttatctgcgctggaaggagcctgatcgacctcgtcccctcaagctcagcgttttcttcccgattgtcttctgcctctgcaccatcttcctggtggctgttccactgtacagtgataccatcaactccctcatcggcattgccattgccctctcaggcctgcccttttacttcctcatcatcagagtgccagaacataagcgacctctttacctccgaaggatcgtggggtctgccacaaggtacctccaggtcctgtgtatgtcagttgctgcagaaatggatttggaagatggagaagagatgcccaaacaacgggatcccaagtctaactaaacaccatctggaatcctgatgtggaaagcaggggtttctggtccactggctagagctgaggaaatttgaaaaggaaagctcacttctttggaaggcactgtcccagaagcctgggccaaagcaccttcaacctttggaacttacttttttgaaatggaaaagaaatttatttggttttgctaccttacagtttcccgaacttttaaaccggaaccataaaggaaaactgggggaagaagaaaccttgtcaaggtgttg

SEQ ID NO: 25607 - DNA, 2161 bp, Macaca Mulatta
  misc_feature (1)...(2161): n = A,T,C or G
gcaaataggagaaaatctgattgtgccaggaggggtgaagaccatcgaggcccactcccggatggtgatccccggaggaattgacgtccacactcgtttccagatgcctgaccagggaatgacgtctgctgatgatttcttccaaggaaccaaggcggccctggctgggggaaccaccatgannnnnnnnnnnnnnnnnnnnnnnnnnnnnnnnnnnnnnnnnnnnnnnnnnnnnnnnnnnnnnnnnnnnnnnnnnnnnnnnnnnnnnnnnnnnnnnnnnnnnnnnnnnnnnnnnnnnnnnnnnnnnnnnnnnnnnnnnnnnnnnnnnnnnnnnnnnnnnnnnnnnnnnnnnnnnnnnnnnnnnnnnnnnnnnnnnnnnnnnnnnnnnnnnnnnnnnnnnnnnnnnnnnnnnnnnnnnnnnnnnnnnnnnnnnnnnnnnnnnnnnnnnnnnnnnnnnnnnnnnnnnnnnnnnnnnnnnnnnnnnnnnnnnnnnnnnnnnnnnnnnnnnnnnnnnnnnnnnnnnnnnnnnnnnnnnnnnnnnnnnnnnnnnnnnnnnnnnnnnnnnnnnnnnnnnnnnnnnnnnnnnnnnnnnnnnnnnnnnnnnnnnnnnnnnnnnnnnnnnnnnnnnnnnnnnnnnnnnnnnnnnnnnnnnnnnnnnnnnnnnnnnnnnnnnnnnnnnnngaactgtggtgtatggcgagcccatcaccgccagcttgggaacggatggttcccattactggagcaagaactgggccaaggctgccgcctttgtcacctccccacctttgagccctgatccaaccactccagactttctcaactccttgctgtcctgngtggagacctccaggtcacgggcagtgcccattgcacgtttaacactgcccagaaggctgtaggaaaggacaacttcaccctgattccggagggcaccaatggcactgaggagcggatgtccgtcatctgggacaaggctgtggtnnnnnnnnnnnnnnnnnnnnnnnnnnnnnnnnnnnnnnnnnnnnnnnnnnnnnnnnnnnnnnnnnnnnnnnnnnnnnnnnnnnnnnnnnnnnnnnnnnnnnnnnnnnnnnnnnnnnnnnnnnnnnnnnnnnnnnnnnnnnnnnnnnnnnnnnnnnnnnnnnnnnnnnnnnnnnnnnnnnnnnnnnnnnnnnnnnnnnnnnnnnnnnnnnnnnnnnnnnnnnnnnnnnnnnnnnnnnnnnnnnnnnnnnnnnnnnnnnnnnnnnnnnnnnnnnnnnnnnnnnnnnnnnnnnnnnnnnnnnnnnnnnnnnnnnnnnnnnnnnnnnnnnnnnnnnnnnnnnnnnnnnnnnnnnnnnnnnnnnnnnnnnnnnnnnnnnnnnnnnnnnnnnnnnnnnnnnnnnnnnnnnnnnnnnnnnnnnnnnnnnnnnnnnnnnnnnnnnnnnnnnnnnnnnnnnnnnnnnnnnnnnnnnnnnnnnnnnnnnnnnnnnnnnnnnnnnnnnnnnnnnnnnnnnnnnnngtgctcaaattgatgacaacattccccgccgcaccacccagcgtatcgtggcgccccccggtggccgtgccaacatcaccagcctgggctagagctcctgggctgtgccgtccactggggactggggatgggacacctgaggacattctgagacttctttcttccttccnnnnnnnnnnnnnnnnnnnnnnnnnagagcctgtgatagttactgtggagcagccagttcatggggtcccccttggggccccacaccccatctctcaccgggagttactgattttgctcatccacttccttacacatctatgagtatcacacccaagcctacccaccaagctcatacacggaaccacacccaacactcagacatgcgaacaagcagcccccagcgagggtcttcttcgccttcaacctcctagtgtccgttagcatcttccttttcatggggggagggaagataaagtgaattgcccagagctgnnnnnnnnnnnnnnnnnnnnnnnnnnnnnnnnnnnnnnnnnnnnnnnnnnnnnnnnnnnnnnnnnnnnnnnnnnnnnnnnnnnnnnnnnnnnnnaatactaaattggaacatttaactccatattaatacaaggggtttgaactggacatcctaatgatgcaattacgtcatcacccagc

SEQ ID NO: 25608 - DNA, 1697 bp, Macaca Mulatta
  misc_feature (1)...(1697): n = A,T,C or G
ttccggtcaccatggcgaccaggcgccttggggttggggagacgctgggggccctcaacgcggccctggggcctggcagtccggtatggatcaaggagacgcgcacccgccacctgcgttcccgagactttctggcaccgcaccgcgcgctgcaggcgcgcttcgatgacggccaggtgggcgtgagccgggcgaggccgtgcggctgggagctgggtcccgtgcagtggcgcgctcacacgcccattctcccgcaggtacccgagcatttgctccatgccctcgcctgcctgcagggtcccggcgtggccccggtgctgcgctgcgcgccgactcccgcgggtctgtctctccaactgcagcggcccgcggtcttcgagcgcgtcctcagcgccgtggccgcctatgccacgcccgccttgcctgccttgccgggccagcgcgtcttactacactgcccagccctgcgcagctccccttgcgcactccgcttgagccagctgcgtacggtgctcgtggctgatcacctggcgcgagctctgcgcgctcacgggtgagcggggcctcagggccggaatggagaaggtgggactaccggggacctagagagcgagcggcgtcgcccctggggacagcggctggaggtgggaagtcttggcgagctggaccagctgctcaggctgaggcgaccgccctcccttcccagggtgtgcgtgcgcctagtgccagctgtgcaggatccgcacatgctgaccttcctgcagcaactgcgggtggactggcccgctgcctcggagagagcttcctcccacaccctgaggagccacgcccttgaagaagttacctctgctcatgacgggaggacactgtcccctggcatcctaggcagactgtgtctgaaggagttggtggaagaacagggccgcacagctggctatgactccaacctggccaactgtctggngtgactgaggatctcctgtctgtgctagctgagctgcaggaggctctatggcattggccagaggacagccacccaggcctggngctgggtccccagatactggtacagacagctgcctggttgtacatgttgttagctgtgaggaggagttccagcaacagaagttggacctgctttggcggaagttggttgacaaggctccactcagacannnnnnnnnnnnnnnnnnnnnnnnnnnnnnnnnnnnnnnnnnnnnnnnnnnnnnnnnnnnnnnnnnnnnnnnnnnnnnnnnnnnnnnnnnnnnnnnnnnnnnnnnnnnnnnnnnnnnnnnnnnnnnnnnnnnnnnnnncagcctgtacagagatctttggtgttctctctgtggccaccatcaagtttgagatgctgagcacagccccacagagtcagnagctcttcctggctctggctgacaagaacatctccacaaagggcacaaagagtggcacctttgtcatgtataattgtgcccgtcttgccacactctttgagagttacaagtgtagtatggaacaaggtctgtaccccacttttcctcctgtgagcagtctggacttctcactactacatgatgaggnagggtgagtggttgttgctcttcaacaatatcctcccctttccggatctgctgagccagacagcaatgctggactgcacagccccagggctccacatcactgcacgcacagagatg

SEQ ID NO: 25609 - DNA, 175 bp, Macaca Mulatta
gctcaagaatggggctgagtacacactgtgtgctaagcaaagaatatttggattgaattgaaccactgcagaacgtggactattcagagacactgaatttggccttgggtgaatacctgccttgggttggccaactcgcagtcaacagcaatgagccaaaagagacaaaccaagt

SEQ ID NO: 25610 - DNA, 141 bp, Macaca Mulatta
  misc_feature (1)...(141): n = A,T,C or G
caactgatgaacccagatgccactgcacgccaggaagcagtcatctctttggngggtgtcctggggatccgcagcccacaagtgttccacttgctcctggatttactagatgcagaaaaccaccaggctgtgaagaagagt

SEQ ID NO: 25611 - DNA, 125 bp, Macaca Mulatta
gtagcagtgttggtgtctcggaccgtgggccccacacagcggctgctcctctgtggcaccctggccgccctacacatgctcttcctgctctatctgcattttgcctaccacaaagtggtagaggg

SEQ ID NO: 25612 - DNA, 1083 bp, Macaca Mulatta
  misc_feature (1)...(1083): n = A,T,C or G
ggggatatttcctaatcaagaagttggcgtgcagccgggagagctggagtgagttggtcatgatgcagaagctactcaaatgcagtcggctcgtcctggctcttgccctcatcctggttctggaatcctcagttcaaggttatccagccaggtaccaatgggtgcgctgcaatccagacagtaattctgcaaactgcattgaagaaaaaggaccaatgttcgacctacttccaagtgaatccaacaagatcccccggctgaggactgacctttttccaaagacaagaatccaggacttgaatcgtatcttcccactttctgaggactattctggatcaggttccggctccggctctggatcaggatctgggagtggcttcgtaactgaaatggaacaagattaccaaccagtagatgaaagtgatgctttccatgacaaccttaggtctcttgacaggaatctgccctcagacagccaggacttgggtcaacatggattagaagaggattttatgatataaaagagaattttcccaccttgacaccaggcaatgtatttagcatattttgcgtaccatggttagatgatcaaccttgggacaaaggattttatagacatttttaaacatctgaaaaagaagcttaagttttatcatccttttttttctcatgaattcttaaaggattatgcttttaatgctgttatctatcttattgttcttgaaaatacctgcattttttggtatcatattcagccaacatcattatgaaattaattagattcccatggccataaaatggctttaaagaatannnnnnnnnnnnnnnnnngtttgagaagcaaattggcaggtaatatttcgtacctaaattaagaatctgacttggattgtgaattacagatatgcccccttttcttannnnnnnnnnnnnnnnnnnnagtgaagcacagtgaatttgtagagtggggggtatttgacatattttacagtggtggagtgtactatatactattaccctttgaatgtgtttgcagagctagttggacatggtttatctacaagttacaatttgctgttttcc

SEQ ID NO: 25613 - DNA, 648 bp, Macaca Mulatta
tctgttttcactgctacaggcgagaagaggcacgcacggcgcaggccggcctccgcttcccaggaagacggcgcactcccggccctgggttcttgctgctgcccaccctctcctccctggaatgggccccgaggcgagcggcttcagcacaggcctggccctgctccaggtgcaggaaggaggataaggccgggccgagaggcggctcacctggatcggcccatgggcctccgcccgcgccaccccgaggatgagcggtgatgtcctctagccacccctagcagcgtcggctctccctggaccctggacgtgcagctgtggactgggacttggctttctccggataagtagcggcactggcgacagcgatgactgtgcagagacttgtggctgcggccgtgctggtggccctagtctcactcatcctcaacaacgtggcggccttcacctccaactgggtgtgccagacgctggaggacgggcgcaggcgcagcgtggggctgtggaggtcctgctggctggtggacagggcccggggagggctgagccctggggccagggccagccaggtggacacacgtgactgtgaggcgctgggctggggctctgaggcggccggcttccaggagtcccgaggcaccgtcaaac

SEQ ID NO: 25614 - DNA, 6527 bp, Macaca Mulatta
  misc_feature (1)...(6527): n = A,T,C or G
agtccctctgtcgtgaaatcaagcaacgacgtcgaggagttgcctccattctgcgactatgccagcatcttttggatgacccgggagacttgcnnnnnnnnnnnnnnnnnnnnnnnnnnnnnnnnnnnnnnnnnnnnnnnnnnnnnnnnnnnnnnnnnnnnnnnnnnnnnnnnnnnnnnnnnnnnnnnnnnnnnnnnnnnnnnnnnnnnnnnnnnnnnnnnnnnnnnnnnnnnnnnnnnnnnnnnnnnnnnnnnnnnnnnnnnnnnnnnnnnnnnnnnnnnnnnnnnnnnnnnnnnnnnnnnnnnnnnnnnnnnnnnnnnnnnnnnnnnnnnnnnnnnnnnnnnnnnnnnnnnnnnnnnnnnnnnnnnnnnnnnnnnnnnnnnnnnnnnnnnnnnnnnnnnnnnnnnnnnnnnnnnnnnnnnnnnnnnnnnnnnnnnnnnnnnnnnnnnnnnnnnnnnnnnnnnnnnnnnnnnnnnnnnnnnnnnnnnnnnnnnnnnnnnnnnnnnnnnnnnnnnnnnnnnnnnnnnnnnnnnnnnnnnnnnnnnnnnnnnnnnnnnnnnnnnnnnnnnnnnnnnnnnnnnnnnnnnnnnnnnnnnnnnnnnnnnnnnnnnnnnnnnnnnnnnnnnnnnnnnnnnnnnnnnnnnnnnnnnnnnnnnnnnnnnnnnnnnnnnnnnnnnnnnnnnnnnnnnnnnnnnnnnnnnnnnnnnnnnnnnnnnnnnnnnnnnnnnnnnnnnnnnnnnnnnnnnnnnnnnnnnnnnnnnnnnnnnnnnnnnnnnnnnnnnnnnnnnnnnnnnnnnnnnnnnnnnnnnnnnnnnnnnnnnnnnnnnnnnnnnnnnnnnnnnnnnnnnnnnnnnnnnnnnnnnnnnnnnnnnnnnnnnnnnnnnnnnnnnnnnnnnnnnnnnnnnnnnnnnnnnnnnnnnnnnnnnnnnnnnnnnnnnnnnnnnnnnnnnnnnnnnnnnnnnnnnnnnnnnnnnnnnnnnnnnnnnnnnnnnnnnnnnnnnnnnnnnnnnnnnnnnnnnnnnnnnnnnnnnnnnnnnnnnnnnnnnnnnnnnnnnnnnnnnnnnnnnnnnnnnnnnnnnnnnnnnnnnnnnnnnnnnnnnnnnnnnnnnnnnnnnnnnnnnnnnnnnnnnnnnnnnnnnnnnnnnnnnnnnnnnnnnnnnnnnnnnnnnnnnnnnnnnnnnnnnnnnnnnnnnnnnnnnnnnnnnnnnnnnnnnnnnnnnnnnnnnnnnnnnnnnnnnnnnnnnnnnnnnnnnnnnnnnnnnnnnnnnnnnnnnnnnnnnnnnnnnnnnnnnnnnnnnnnnnnnnnnnnnnnnnnnnnnnnnnnnnnnnnnnnnnnnnnnnnnnnnnnnnnnnnnnnnnnnnnnnnnnnnnnnnnnnnnnnnnnnnnnnnnnnnnnnnnnnnnnnnnnnnnnnnnnnnnnnnnnnnnnnnnnnnnnnnnnnnnnnnnnnnnnnnnnnnnnnnnnnnnnnnnnnnnnnnnnnnnnnnnnnnnnnnnnnnnnnnnnnnnnnnnnnnnnnnnnnnnnnnnnnnnnnnnnnnnnnnnnnnnnnnnnnnnnnnnnnnnnnnnnnnnnnnnnnnnnnnnnnnnnnnnnnnnnnnnnnnnnnnnnnnnnnnnnnnnnnnnnnnnnnnnnnnnnnnnnnnnnnnnnnnnnnnnnnnnnnnnnnnnnnnnnnnnnnnnnnnnnnnnnnnnnnnnnnnnnnnnnnnnnnnnnnnnnnnnnnnnnnnnnnnnnnnnnnnnnnnnnnnnnnnnnnnnnnnnnnnnnnnnnnnnnnnnnnnnnnnnnnnnnnnnnnnnnnnnnnnnnnnnnnnnnnnnnnnnnnnnnnnnnnnnnnnnnnnnnnnnnnnnnnnnnnnnnnnnnnnnnnnnnnnnnnnnnnnnnnnnnnnnnnnnnnnnnnnnnnnnnnnnnnnnnnnnnnnnnnnnnnnnnnnnnnnnnnnnnnnnnnnnnnnnnnnnnnnnnnnnnnnnnnnnnnnnnnnnnnnnnnnnnnnnnnnnnnnnnnnnnnnnnnnnnnnnnnnnnnnnnnnnnnnnnnnnnnnnnnnnnnnnnnnnnnnnnnnnnnnnnnnnnnnnnnnnnnnnnnnnnnnnnnnnnnnnnnnnnnnnnnnnnnnnnnnnnnnnnnnnnnnnnnnnnnnnnnnnnnnnnnnnnnnnnnnnnnnnnnnnnnnnnnnnnnnnnnnnnnnnnnnnnnnnnnnnnnnnnnnnnnnnnnnnnnnnnnnnnnnnnnnnnnnnnnnnnnnnnnnnnnnnnnnnnnnnnnnnnnnnnnnnnnnnnnnnnnnnnnnnnnnnnnnnnnnnnnnnnnnnnnnnnnnnnnnnnnnnnnnnnnnnnnnnnnnnnnnnnnnnnnnnnnnnnnnaactgaatgggacttcaaaggtgtcagaaatcttggttcaatgggaaggagatttcagagagtgagcattgtaagtgtaaagcacttatggatagtttagatgattcaaatactgctggcaagaaatttgtttcccaagatgttagacatcttccaaagaaatgtccaagtcaccaccattttgaaaatcaaagcactgcttctacccccactgagaagtcattctcagaactggctttagaaaccagggttaacagcagacaagactctgatccgccgaaatcatctgatgaaacaccgagtatggctggaaaatctgctggttgttgcctagcacttgaagaaaacggaacagaggaaaatgcttctatcagcgacatttcctgttgcaactgtgagccagatgttttccatcaaaaagatgccgaagattgttcagtacacaactttgttaaggaaatcattgacatggcttcaacagccctaaaaagtaaatctcaacctgaaaacgaagtggctgctcctacttcattaactcaaatcaaggagaaagtgttggagcattctcaccggcccatccagctgagaaaaggagacttttattcatacttatctctctcatctcatgacagtgattgtggggaggtcaccaattacatagaagagaaaagcagcactccattgccgctagaccctactgactcgggcttagatgacaaggaagacattgaatgcttctttgaggcctgtgttgagggtgactctgatggagaggagccttgtttctctagtgctcccccaaatgaatctgcagttcccagcaaagctgcagtgccactacaagtaacagcatgttcttctgagttcggtgatagttctcttgtagctgatgatgcagatacagtggctctttcaagtccttcctctcagggaagagctgaagctgggaaggaagtgaatggtttnnnnnnnnnnnnnnnnnnnnnnnnnnnnnnnnnnnnnnnnnnnnnnnnnnnnnnnnnnnnnnnnnnnnnnnnnnnnnnnnnnnnnnnnnnnnnnnnnnnnnnnnnnnnnnnnnnnnnnnnnnnnnnnnnnnnnnnnnnnnnnnnnnnnnnnnnnnnnnnnnnnnnnnnnnnnnnnnnnnnnnnnnnnnnnnnnnnnnnnnnnnnnnnnnnnnnnnnnnnnnnnnnnnnnnnnnnnnnnnnnnnnnnnnnnnnnnnnnnnnnnnnnnnnnnnnnnnnnnnnnnnnnnnnnnnnnnnnnnnnnnnnnnnnnnnnnnnnnnnnnnnnnnnnnnnnnnnnnnnnnnnnnnnnnnnnnnnnnnnnnnnnnnnnnnnnnnnnnnnnnnnnnnnnnnnnnnnnnnnnnnnnnnnnnnnnnnnnnnnnnnnnnnnnnnnnnnnnnnnnnnnnnnnnnnnnnnnnnnnnnnnnnnnnnnnnnnnnnnnnnnnnnnnnnnnnnnnnnnnnnnnnnnnnnnnnnnnnnnnnnnnnnnnnnnnnnnnnnnnnnnnnnnnnnnnnnnnnnnnnnnnnnnnnnnnnnnnnnnnnnnnnnnnnnnnnnnnnnnnnnnnnnnnnnnnnnnnnnnnnnnnnnnnnnnnnnnnnnnnnnnnnnnnnnnnnnnnnnnnnnnnnnnnnnnnnnnnnnnnnnnnnnnnnnnnnnnnnnnnnnnnnnnnnnnnnnnnnnnnnnnnnnnnnnnnnnnnnnnnnnnnnnnnnnnnnnnnnnnnnnnnnnnnnnnnnnnnnnnnnnnnnnnnnnnnnnnnnnnnnnnnnnnnnnnnnnnnnnnnnnnnnnnnnnnnnnnnnnnnnnnnnnnnnnnnnnnnnnnnnnnnnnnnnnnnnnnnnnnnnnnnnnnnnnnnnnnnnnnnnnnnnnnnnnnnnnnnnnnnnnnnnnnnnnnnnnnnnnnnnnnnnnnnnnnnnnnnnnnnnnnnnnnnnnnnnnnnnnnnnnnnnnnnnnnnnnnnnnnnnnnnnnnnnnnnnnnnnnnnnnnnnnnnnnnnnnnnnnnnnnnnnnnnnnnnnnnnnnnnnnnnnnnnnnnnnnnnnnnnnnnnnnnnnnnnnnnnnnnnnnnnnnnnnnnnnnnnnnnnnnnnnnnnnnnnnnnnnnnnnnnnnnnnnnnnnnnnnnnnnnnnnnnnnnnnnnnnnnnnnnnnnnnnnnnnnnnnnnnnnnnnnnnnnnnnnnnnnnnnnnnnnnnnnnnnnnnnnnnnnnnnnnnnnnnnnnnnnnnnnnnnnnnnnnnnnnnnnnnnnnnnnnnnnnnnnnnnnnnnnnnnnnnnnnnnnnnnnnnnnnnnnnnnnnnnnnnnnnnnnnnnnnnnnnnnnnnnnnnnnnnnnnnnnnnnnnnnnnnnnnnnnnnnnnnnnnnnnnnnnnnnnnnnnnnnnnnnnnnnnnnnnnnnnnnnnnnnnnnnnnnnnnnnnnnnnnnnnnnnnnnnnnnnnnnnnnnnnnnnnnnnnnnnnnnnnnnnnnnnnnnnnnnnnnnnnnnnnnnnnnnnnnnnnnnnnnnnnnnnnnnnnnnnnnnnnnnnnnnnnnnnnnnnnnnnnnnnnnnnnnnnnnnnnnnnnnnnnnnnnnnnnnnnnnnnnnnnnnnnnnnnnnnnnnnnnnnnnnnnnnnnnnnnnnnnnnnnnnnnnnnnnnnnnnnnnnnnnnnnnnnnnnnnnnnnnnnnnnnnnnnnnnnnnnnnnnnnnnnnnnnnnnnnnnnnnnnnnnnnnnnnnnnnnnnnnnnnnnnnnnnnnnnnnnnnnnnnnnnnnnnnnnnnnnnnnnnnnnnnnnnnnnnnnnnnnnnnnnnnnnnnnnnnnnnnnnnnnnnnnnnnnnnnnnnnnnnnnnnnnnnnnnnnnnnnnnnnnnnnnnnnnnnnnnnnnnnnnnnnnnnnnnnnnnnnnnnnnnnnnnnnnnnnnnnnnnnnnnnnnnnnnnnnnnnnnnnnnnnnnnnnnnnnnnnnnnnnnnnnnnnnnnnnnnnnnnnnnnnnnnnnnnnnnnnnnnnnnnnnnnnnnnnnnnnnnnnnnnnnnnnnnnnnnnnnnnnnnnnnnnnnnnnnnnnnnnnnnnnnnnnnnnnnnnnnnnnnnnnnnnnnnnnnnnnnnnnnnnnnnnnnnnnnnnnnnnnnnnnnnnnnnnnnnnnnnnnnnnnnnnnnnnnnnnnnnnnnnnnnnnnnnnnnnnnnnnnnnnnnnnnnnnnnnnnnnnnnnnnnnnnnnnnnnnnnnnnnnnnnnnnnnnnnnnnnnnnnnnnnnnnnnnnnnnnnnnnnnnnnnnnnnnnnnnnnnnnnnnnnnnnnnnnnnnnnnnnnnnnnnnnnnnnnnnnnnnnnnnnnnnnnnnnnnnnnnnnnnnnnnnnnnnnnnnnnnnnnnnnnnnnnnnnnnnnnnnnnnnnnnnnnnnnnnnnnnnnnnnnnnnnnnnnnnnnnnnnnnnnnnnnnnnnnnnnnnnnnnnnnnnnnnnnnnnnnnnnnnnnnnnnnnnnnnnnnnnnnnnnnnnnnnnnnnnnnnnnnnnnnnnnnnnnnnnnnnnnnnnnnnnnnnnnnnnnnnnnnnnnnnnnnnnnnnnnnnnnnnnnnnnnnnnnnnnnnnnnnnnnnnnnnnnnnnnnnnnnnnnnnnnnnnnnnnnnnnnnnnnnnnnnnnnnnnnnnnnnnnnnnnnnnnnnnnnnnnnnnnnnnnnnnnnnnnnnnnnnnnnnnnnnnnnnnnnnnnnnnnnnnnnnnnnnnnnnnnnnnnnnnnnnnnnnnnnnnnnnnnnnnggatatggtattattttacatactgagacaacgttaattttctttgggtagtaactaatgtcaagtctacatctactggtaaaatattcaaagaacaaactgacaatgatgttctacctacttgttacatgctcatggaagactgtgcagtattgaaagtatttgttaattatctgcttagtattaacactaaatttgtagaatgactttcaggtttgttgaacaatgccttttcaggttggaagaggaaaaatagcctcaatctcccaccccatgtaggcactacctccccaattacccttagaaaacgatcacaccaactctgcctacacacttccagcgatagtggttcattgtctgttaaggcaaactgttccactgttgggcatatctctttgttagaaagttatttcttaggttgctaaaatctgcctagtaccccactaccc

SEQ ID NO: 25615 - DNA, 1718 bp, Macaca Mulatta
  misc_feature (1)...(1718): n = A,T,C or G
ggtgtccctggcaaccttgtgtgtctatttcttactggatgaaggaaacattttaacagccactaaagtgttcacatcgatgtctttgtttaatattttaaggattcctctgtttgagttaccaaccgtgatctcaactgtggtccaggtacatacagaataccttaaactaggagttattcctttacaggaatctatggttnnnnnnnnnnnnnnnnnnnnnnnnnnnnnnnnnnnnnnnnnnnnnnnnnnnnnnnnnnnnnnnnnnnnnnnnnnnnnnnnnnnnnnnnnnnnnnnnnnnnnnnnnnnnnnnnnnnnnnnnnnnnnnnnnnnnnnnnnnnnnnnnnnnnnnnnnnnnnnnnnnnnnnnnnnnnnnnnnnnnnnnnnnnnnnnnnnnnnnnnnnnnnnnnnnnnnnnnnnnnnnnnnnnnnnnnnnnnnnnnnnnnnnnnnnnnnnnnnnnnnnnnnnnnnnnnnnnnnnnnnnnnnnnngttttatgagcaactattaaaagcctgtgctctccttccagatttggagcagttcctaaagggagatcaaactgagattggagaaagagnnnnnnnnnnnnnnnnnnnnnnnnnnnnnnnnnnnnnnnnnnnnnnnnnnnnnnnnnnnnnnnnnnnnnnnnnnnnnnnnnnnnnnnnnnnnnnnnnnnnnnnnnnnnnnnnnnnnnnnnnnnnnnnnnnnnnnnnnnnnnnnnnnnnnnnnnnnnnnnnnnnnnnnnnnnnnnnnnnnnnnnnnnnnnnnnnnnnnnnnnnnnnnnnnnnnnnnnnnnnnnnnnnnnnnnnnnnnnnnnnnnnnnnnnnnnnnnnnnnnnnnnnnnnnnnnnnnnnaaaactagaaacctcactaatttgcaccaagtcatcagtgaagaagaaaaaggtnnnnnnnnnnnnnnnnnnnnnnnnnnnnnnnnnnnnnnnnnnnnnnnnnnnnnnnnnnnnnnnnnnnnnnnnnnnnnnnnnnnnnnnnnnnnnnnnnnnnnnnnnnnnnnnnnnnnnnnnnnnnnnnnnnnnnnnnnnnnnnnnnnnnnnnnnnnnnnnnnnnnnnnnnnnnnnnnnnnnnnnnnnnnnnnnnnnnnnnnnnnnnnnnnnnnnnnnnnnnnnnnnnnnnnnnnnnnnnnnnnnnnnnnnnnnnnnnnnnnnnnnnnnnnnnnnnnnnnnnnnnnnnnnnnnnnnnnnnnnnnnnnnnnnnnnnnnnnnnnnnnnnnnnnnnnnnnnnnnnnnnnnnnnnnnnnnnnnnnnnnnnnnnnnnnnnnnnnnnnnnnnnnnnnnnnnnnnnnnnnnnnnnnnnnnnnnnnnnnnnnnnnnnnnnnnnnnnnnnnnnnnnnnnnnnnnnnnnnnnnnnnnnnnnnnnnnnnnnnnnnnnnnnnnnnnnnnnnnnnnnnnnnnnnnnnnnnnnnnnnnnnnnnnnnnnnnnnnnnnnnnnnnnnnnnnnnnnnnnnnnnnnnnnnnnnnnnnnnnnnnnnnnnnnnnnnnnnnnnnnnnnnnnnnnnnnnnnnnnnnnnnnnnnnnnnnnnnnnnnnnnnnnnnnnnnnnnnnnnnnnngatactatgtggcaagctctcggcaaatccggaggctgacaggagcgtcccgttctcctgtcatttcccacttcagtgagactttatcaggagtgtccaccatcagagcatttggacatcaacagaggtttatccagcaatacaa

SEQ ID NO: 25616 - DNA, 260 bp, Macaca Mulatta
cttggattagctctgcagagtgtcttggttgagacaataacctcgtcgtccccacatgacacatgatttgaaaagagactagaggccacacttgataaatcatggagaacagatgtgtgcccacccaacaaatgtgataagtgatcacgcagccagagccagccttcgtacagtcaaggtttccaggcagagaaaacaccctgaagattctctgtgatataggaaatttggatgaaggaagctagaagaactatagggat

SEQ ID NO: 25617 - DNA, 1889 bp, Macaca Mulatta
  misc_feature (1)...(1889): n = A,T,C or G
ggaccggttcagggccgtggtcaacgtccttggtgatgcttttggcacaggcatcgtggaaaagctctccaagaaggagctggagcagatggatgtttcatctgaagtaaacattgtgaatccctttgccttggaatctacaatccttgacaacgaagactcagacaccaagaagtcttatgtcaatggaggctttgcagtagacaagtctgacaccatctcattcacccagacctcacagttctagggcccctggctgcagataactgaaaacaaggaaggacatttccatgagagtcatctcaaacactggttaaggaaaagaaaaatgctaatggccaggtgttcatttgatttgatatacagacctccagattattttgtatatttggattcacagcctttgctctccgggttttgggatttgggtgtggggtaagatgaagggaaatccattaaaagcaaagttctattatctgagttttagaaattctataagagacaaagtttggaagtacataaagtaataactattagaattaggtaatggatatgaaaaagaaaatgctttctcgtgcatagacaagtgttttgggttaaaaaaaatattctgtcattggttacaaaagtttactcaggctttctattggcatgaatttcctttgtcaatggacttttttataaattataannnnnnnnnnnnnnnnnnnnnnnnnnnnnnnnnnnnnnnnnnnnnnnnnnnnnnnnnnnnnnnnnnnnnnnnnnnnnnnnnnnnnnnnnnnnnnnnnnnnnnnnnnnnnnnnnnnnnnnnnnnnnnnnnnnnnnnnnnnnnnnnnnnnnnnnnnnnnnnnnnnnnnnnnnnnnnnnnnnnnnnnnnnnnnnnnnnnnnnnnnnnnnnnnnnnnnnnnnnnnnnnnnnnnnnnnnnnnnnnnnnnnnnnnnnnnnnnnnnnnnnnnnnnnnnnnnnnnnnnnnnnnnnnnnnnnnnnnnnnnnnnnnnnnnnnnnnnnnnnnnnnnnnnnnnnnnnnnnnnnnnnnnnnnnnnnnnnnnnncctttctcaggagcactagaatgagaaatcatgttgttcgatcgtttcacatctgtatatcagccctaaagcagagatgtactatggtgatactccaaggtggcatagccattcatttacaatttccagatttgagctgcctcgaggcaatccatattagctctgcataagattatatacaaagctgtcactcacaaaaggctggatgtgctttcatccaactggaaggctttattcttccaagttcattcgtactcaaagaggccagtactttgccatcattgcacttctgatatcaaggtccaaataatgttggccagctaccaactaaattgtattttaataaagattccatgggttgaacaagccacattgcagaaaaagacctgcccctaacctgggttcttgcagagtaaatcccatgacataaactgatatcagtggatcggggaaaatagttccattctatgacactcgtctcctcctcaagggaggactgttctaaccgataatcttggacctattcattacattctctgcttgtcattctgctaatttatgaagatagtttattaaagtctgtgcttcagttctcatcttgtaaataatgcttaacataaacctgtacttacactgagatccaaaatagtcatgtttctgcagtattgtgtagccaacttaaacctgtgctttcatgtttaagaaatgagaaattgtgccaaagatagcagaagagtaaataagtactcagtattgaccacctacatctgaaatctacaacataatgatactgaattgttatgtaaacatcataaatagtaaataatgattcaatgtg

SEQ ID NO: 25618 - DNA, 236 bp, Macaca Mulatta
cttcatggagtcttctttttcttcttaagtatttataatcatttcttaaatttatttaacaatttaaaatagcctgtttcatgttattacatgtttcttgtaaaaataatttctaaaggccacctttcatttcacttagcattttcttctttttaaaatatggggactatgttagtaaatctctctggcatcttccagcttcacacttctataatatgacataaaatgtataaatc

SEQ ID NO: 25619 - DNA, 704 bp, Macaca Mulatta
cctgaaggaagaggaagataaaaaacagcaagcagaatcacgtctcttatgactcattagtcaacttaaggaggacctttattgcagatggggaagcattactgcagctgctaccagtctgacacacatggatgcacatgccctcgtggcagcattgtctccctttgccccagacacccagactctggaatgatgcagccagtgggacattttccctgcacagatgttgtaaaatgcataaaagttcagagtatgtctctgaacactgcttctgtttccaccccctaaacagattgtgcctgcagcctggcttgttgcccacagcggtctacctgccacactgggaaagatcgagcagagacagagaagaaaaggaggctccatttttcagactgctctcccgcaggctcatgttttgtgttcatgccaggcagagaacacaaaatgttccaataaataagtatcaaaggttagcggtgaaaatgaaggaggaggcggcattgcatgaaaaactaaacatggaaaatactagacagaaagagaaccaaaatgtaggttcactggaaatgatagacaatatgttaaaacaagtggagagaagagagctgaaataattagatggaaacacacaatttagggataagatatttctatgtacagccacgaatgatggccagcaatgaggaatctgtgtgttctccaca

SEQ ID NO: 25620 - DNA, 869 bp, Macaca Mulatta
ttaaggcaggactgtaaagcatttattttacatgctggacttggtgaaatgaatgttggattattggagaattgacttgtatcaaagtcctttggattaagagatttagttaggtttactaaggatgtaaacttggaattggtttacagtttgacaggatggtttattgatgtgaattttgaaatgtagaggtataatgttaaattattttatactttatggaaatcaagtgaaatgtttgataaaatgccgccattgtcctctggtattttctactctctggaattatgtactgtaaatgatcggatgtaaatgtgaggcacgccgctcacccctgtgtgggaagtgtggtggtacttcctgccacccacccacctctctgccattactccttgtgacacttgtctgtcatctcccctccaaactccaagcttacagctacctcagtactgctttccttgtctgaaacacctcctttgccttccttcagtgtcccgctcaggtgccacctactccataaagctcatctcagcttttgatctgaatcaccatggaaacatgcagacagcctctcagtcttaactatttaatgttgtagctgggaaaaaacccagagaggttcactgatgtactgggttgggactaggatgtgggttttgtgactctgaatcccatgttctcaaactacgctgccttccaaagtctggcatttgttagctcatgcttcattgtagtccagcttcttatgtgcctgttatattctccagtaagattgtaagccccttaagggcagggacgtctttgcatctccagcactgctatagtgttcttagttatgacttacaactaaggggtggtgcaacaaaaaa

SEQ ID NO: 25621 - DNA, 805 bp, Macaca Mulatta
  misc_feature (1)...(805): n = A,T,C or G
gttgaaagattcactacaaggtccaagtacttgggaaactttccagagattattacttgtactttctaatctgcccagtgttacaacagacactaccatgtggcatatcctcacatttttcatcagtcactcacatgtgctcaaggaatgcagaccactgtgctcaccaaattctgaaaggagtaatataataaaagcctattgagggtcctcttccattttgctgaactgttcaaggcatagacaaaacccaaatttgacgaagaagagcaatctggattattgtagcccatggaggtttaccttcttcataggnnnnnnnnnnnnnnatgtgattgccatagtgggatattccctcccccacattacccaagagggacaatggggggtctcaccatgtgctgatgtatatgttctgccaatgggaagagtgaacagctccaactttatgtgcccctagggacatagtatgagatcagaaaatagtttagtcctatgtgtcttaatttttattggtttccaaggtctcctaggaaagagaacagagctgtgtggtcctaatcatggtgtcgattttatgccagatttatttgtagctccagaggtctccctgagaagaggcatttgtgacaaactcaagtgctggggtctgcatgaattgtttatttgcagtgatgctccgtatttcctagcactgttcatggcatcttatttcccaggtccttcattgtagtcatgggcactgaaggacagaattggtaggcaggtcactggttgtaagacctactggggccaggtaagaaca

SEQ ID NO: 25622 - DNA, 667 bp, Macaca Mulatta
gtgatgcaggcgaagcttgggatctgaccaagttgggctttgattctttaggcagatgtcccattgttccctggagcctgtgtcgtgcctgttgggggtcaggcagcctcctgatgccagaacacctcaggcagagcccttctcacctgagagttgtctgcctggactgtcccctgtccctgcatcttccctgggaccacccggagggccacatccacacacagcctagctgcccacagggagctctgctgcccttgctggccctgcccttcccacaggtgagcagggctcctgtccaccagcacactcaggtctcttccctgccgtgttttcattttattttagccaaacattttgcctgttttctgttttaaacatgatagttgatatgagactgaaaccccaggatagtggagggaaattggctcagaggagacggacaacctggcaactgtgagtccctgctttccctgacaccagcctcatggaatatgcaactctggtaccccagtccagggtgttctggcagcagggacacctgggccaaggggccatctggaccaaaggtggggtgtggggccctggatggcagctctggcccagacatgaatacctcggtgttcctcctccattactgtttcaccagagctgtcttagcttcaaatct

SEQ ID NO: 25623 - DNA, 348 bp, Macaca Mulatta
  misc_feature (1)...(348): n = A,T,C or G
agctaccactgctaagagccatctctaccagaagcctggccagacctggaagaacaaagagcatcatctctctgacagagagtttgtgttcaaagaacctcagcaggtannnnnnnnnnnnnnnnnnnnnnnnnnnnnnnnnnnnnnnnnnnnnnnnnnnnnnnnnnnnnnnnnnnnnnnnnnnnnnnnnnnnnnnnnnnnnnnnnnnnnnnnnnnnnnnnnnnnnnnnnnnnnnnnnnnnnnnnnnnnnnnnnnnnnnnnnnnnnnnnnnnnnnnnnnnnnnnnnnnnnnngatataacttatcagcaaccaagacttacagcatggtatggagaacttccttacac

SEQ ID NO: 25624 - DNA, 162 bp, Macaca Mulatta
cgtaatactgttttcaaagtcgtaggtaagttaatgctgtgctacaattagaatgattactttggacacctaaacaattataccatttgcttcaaagtattagtacataaaataacttgagggattgttattttctagtataaaacaaaagatgtaattaaa

SEQ ID NO: 25625 - DNA, 1734 bp, Macaca Mulatta
  misc_feature (1)...(1734): n = A,T,C or G
gctgggagctcctgtcaccgctggggccgggccgggcgggagtgcaggggacgtgagggctcaagggccgggacatggggccagccagccccgctgctcgcggtctaagtcgccgcccgggccagccgccgctgccgctgctgctgccactattgctgctgcttctgcgcgcgcagcccgccatcgggagcctggccggtgggagccccggcgcggccgnnnnnnnnnnnnnnnnnnnnnnnnnnnnnnnnnnnnnnnnnnnnnnnnnnnnnnnnnnnnnnnnnnnnnnnnnnnnnnnnnnnnnnnnnnnnnnnnnnnnnnnnnnnnnnnnnnnnnnnnnnnnnnnnnnnnnnnnnnnnnnnnnnnnnnncccggagctgcagatcgcacgtgtagagcaggctaccctggccatccccatggagcgctggtgcgggggtgcccggagcggcagctgcacccacccccaccaccaggttgtgcccttccgctgcctgnnnnnnnnnnnnnnnnnnnnnnnnnnnnnnnnnnnnnnnnnnnnnnnnnnnnnnnnnnnnnnnnnnnnnnnnnnnnnnnnnnnnnnnnnnnnnnnnnnnnnnnnnnnnnnnnnnnnnnnnnnnnnnnnnnnnnnnnnnnnnnnnnnnnnnnnnnnnnnnnnnnnnnnnnnnnnnnnnnnnnnnnnnnnnnnnnnnnnnnnnnnnnnnnnnnnnnnnnnnnnnnnnnnnnnnnnnnnnnnnnnnnnnnnnnnnnnnnnnnnnnnnnnnnnnnnnnnnnnnnnnnnnnnnnnnnnnnnnnnnnnnnnnnnnnnnnnnnnnnnnnnnnnnnnnnnnnnnnnnnnnnnnnnnnnnnnnnnnnnnnnnnnnnnnnnnnnnnnnnnnnnnnnnnnnnnnnnnnnnnnnnnnnnnnnnnnnnnnnnnnnnnnnnnnncccaccccgaggcccacagatggtgtggatatttactttggcatgcctggggaaatcagtgagcacgaggggttcctgagggccaagatggacctggaggagcgtaggatgcgccagattaatgaggtgatgnnnnnnnaggtgatgcgtgaatgggccatggccgacaaccagtccaagaacctgcctaaagccgacagacaggccctgaatgannnnnnnnnnnnnnnnnnnnnnnnnnnnnnnnnnnnnnnnnnnnnnnnnnnnnnnnnnnnnnnnnnnnnnnnnnnnnnnnnnnnnnnnnnnnnnnnnnnnnnnnnnnnnnnnnnnnnnnnnnnnnnnnnnnnnnnnnnnnnnnnnnnnnnnnnnnnnnnnnnnnnnnnnnnnnnnnnnnnnnnnnnnnnnnnnnnnnnnnnnnnnnnnnnnnnnnnnnnnnnnnnnnnnnnnnnnnnnnnnnnnnnnnnnnnnnnnnnnnnnnnnnnnnnnnnnnnnnnnnnnnnnnnnnnnnnnnnnnnnnnnnnnnnnnnnnnnnnnnnnnnnnnnnnnnnnnnnnnnnnnnnnnnnnnnnnnnnnnnnnnnnnnnnnnnnnnnnnnnnnnnnnnnnnnnnnnnnnnnnnnnnnnnnnnnnnnnnnnnnnnnnnnnnnnnnnnnnnnnnnnnnnnnnnnnnnnnnnnnnnnnnnnnnnnnnnnnnnnnnnnnnnnnnnnnnnnnnnnnnnnnnnnnnnnnnnnnnngggtccacagaacaagacgctgcatcccctgagaaagagaagatgtccccgctggaacagtatgagcaaaaggt

SEQ ID NO: 25626 - DNA, 306 bp, Macaca Mulatta
ttttttcaggtcctctagcacggtgagccgtgtgcctggcccaaagaactgctcatccaagtaggtatccccccagtcgaagctactggcacagagatacacggccgagtccccctgctctgtgcgctggatcttcagagtagagacggatccctcagtcctctctgcagagaagcgatcattgggcagccctgatttgtctcgttgagcatcattctggaagtaagtcagaaactctgggccctgccccggggcctgttggtaccagtaaaggtactcatgacccgaaattggatcacacctgag

SEQ ID NO: 25627 - DNA, 3760 bp, Macaca Mulatta
  misc_feature (1)...(3760): n = A,T,C or G
aggtcctgcagttgttagccatcaccttgctcgagttctgctgttgtggaagtgtgtctttccagcatctcctaaagatctagaaacagaaaagagccgaggagattcgtttacatggcaggtaaccctggaaggacgagctggtgcactgtgtnnnnnnnnnnnnnnnnnnnnnnnnnnnnnnnnnnnnnnnnnnnnnnnnnnnnnnnnnnnnnnnnnnnnnnnnnnnnnnnnnnnnnnnnnnnnnnnnnnnnnnnnnnnnnnnnnnnnnnnnnnnnnnnnnnnnnnnnnnnnnnnnnnnnnnnnnnnnnnnnnnnnnnnnnnnnnnnnnnnnnnnnnnnnnnnnnnnnnnnnnnnnnnnnnnnnnnnnnnnnnnnnnnnnnnnnnnnnnnnnnnnnnnnnnnnnnnnnnnnnnnnnnnnnnnnnnnnnnnnnnnnnnnnnnnnnnnnnnnnnnnnnnnnnnnnnnnnnnnnnnnnnnnnnnnnnnnnnnnnnnnnnnnnnnnnnnnnnnnnnnnnnnnnnnnnnnnnnnnnnnnnnnnnnnnnnnnnnnnnnnnnnnnnnnnnnnnnnnnnnnnnnnnnnnnnnnnnnnnnnnnnnnnnnnnnnnnnnnnnnnnnnnnnnnnnnnnnnnnnnnnnnnnnnnnnnnnnnnnnnnnnnnnnnnnnnnnnnnnnnnnnnnnnnnnnnnnnnnnnnnnnnnnnnnnnnnnnnnnnnnnnnnnnnnnnnnnnnnnnnnnnnnnnnnnnnnnnnnnnnnnnnnnnnnnnnnnnnnnnnnnnnnnnnnnnnnnnnnnnnnnnnnnnnnnnnnnnnnnnnnnnnnnnnnnnnnnnnnnnnnnnnnnnnnnnnnnnnnnnnnnnnnnnnnnnnnnnnnnnnnnnnnnnnnnnnnnnnnnnnnnnnnnnnnnnnnnnnnnnnnnnnnnnnnnnnnnnnnnnnnnnnnnnnnnnnnnnnnnnnnnnnnnnnnnnnnnnnnnnnnnnnnnnnnnnnnnnnnnnnnnnnnnnnnnnnnnnnnnnnnnnnnnnnnnnnnnnnnnnnnnnnnnnnnnnnnnnnnnnnnnnnnnnnnnnnnnnnnnnnnnnnnnnnnnnnnnnnnnnnnnnnnnnnnnnnnnnnnnnnnnnnnnnnnnnnnnnnnnnnnnnnnnnnnnnnnnnnnnnnnnnncagacctgggcattacattctctatcactgatcattgattctgctggcccactgtattatgtgcatgtggaacctaccctttctcttattataatgttgttgttaaatgtgcctcctactcatgctgaagttcaccaaagccttggtcgctgtttgaatgcccttattaccacgttaggtccggagctacaaggtnnnaggtaacagtacttcaatttctaccttaagggcctcctgtctactgggttgtgcagtaatgcaagataacccagactgccttgttcaagctcaggccatctcttgccttcagcagcttcatatgtttgctccacgacatgtcaacttgtctagcctggttagctgcctctgtgtgnnnnnnnnnnnnnnnnnnnnnnnnnnnnnnnnnnnnnnnnnnnnnnnnnnnnnnnnnnnnnnnnnnnnnnnnnnnnnnnnnnnnnnnnnnnnnnnnnnnnnnnnnnnnnnnnnnnnnnnnnnnnnnnnnnnnnnnnnnnnnnnnnnnnnnnnnnnnnnnnnnnnnnnnnnnnnnnnnnnnnnnnnnnnnnnnnnnnnnnnnnnnnnnnnnnnnnnnnnnnnnnnnnnnnnnnnnnnnnnnnnnnnnnnnnnnnnnnnnnnnnnnnnnnnnnnnnnnnnnnnnnnnnnnnnnnnnnnnnnnnnnnnnnnnnnnnnnnnnnnnnnnnnnnnnnnnnnnnnnnnnnnnnnnnnnnnnnnnnnnnnnnnnnnnnnnnnnnnnnnnnnnnnnnnnnnnnnnnnnnnnnnnnnnnnnnnnnnnnnnnnnnnnnnnnnnnnnnnnnnnnnnnnnnnnnnnnnnnnnnnnnnnnnnnnnnnnnnnnnnnnnnnnnnnnnnnnnnnnnnnnnnnnnnnnnnnnnnnnnnnnnnnnnnnnnnnnnnnnnnnnnnnnnnnnnnnnnnnnnnnnnnnnnnnnnnnnnnnnnnnnnnnnnnnnnnnnnnnnnnnnnnnnnnnnnnnnnnnnnnnnnnnnnnnnnnnnnnnnnnnnnnnnnnnnnnnnnnnnnnnnnnnnnnnnnnnnnnnnnnnnnnnnnnnnnnnnnnnnnnnnnnnnnnnnnnnnnnnnnnnnnnnnnnnnnnnnnnnnnnnnnnnnnnnnnnnnnnnnnnnnnnnnnnnnnnnnnnnnnnnnnnnnnnnnnnnnnnnnnnnnnnggtttgcagtgcctggatcgcaagtggagttgtaagtgaccttaatgatctccgaagagttcatcagttgcttgtttcatctttaactaaaatacaggctggaaaagaagctctaagtcacttatataatgaaagtgcttctaccatggagatcttagctgtgcttaaagcctgggcagaggtnnnnnnnnnnnnnnnnnnnnnnnnnnnnnnnnnnnnnnnnnnnnnnnnnnnnnnnnnnnnnnnnnnnnnnnnnnnnnnnnnnnnnnnnnnnnnnnnnnnnnnnnnnnnnnnnnnnnnnnnnnnnnnnnnnnnnnnnnnnnnnnnnnnnnnnnnnnnnnnnnnnnnnnnnnnnnnnnnnnnnnnnnnnnnnnnnnnnnnnnnnnnnnnnnnnnnnnnnnnnnnnggtgctttctacacagcagagactagtgaaaatgcaaaattgcactattacaactcctgggcacttatcctccatgctacggcattgtggcttacaagcacaggctttgttgttgctgacccagatgaaggagcatctgatctctccaggcctgtaacaccaacttccatgtgtcagggttcatcttctggggctaccataaagtcccctgaggatgtctatactgatagattccatctgattttagnnnnnnnnnnnnnnnnnnnnnnnnnnnnnnnnnnnnnnnnnnnnnnnnnnnnnnnnnnnnnnnnnnnnnnnnnnnnnnnnnnnnnnnnnnnnnnnnnnnnnnnnnnnnnnnnnnnnnnnnnnnnnnnnnnnnnnnnnnnnnnnnnnnnnnnnnnnnnnnnnnnnnnnnnnnnnnnnnnnnnnnnnnnnnnnnnnnnnnnnnnnnnnnnnnnnnnnnnnnnnnnnnnnnnnnnnnnnnnnnnnnnnnnnnnnnnnnnnnnnnnnnnnnnnnnnnnnnnnnnnnnnnnnnnnnnnnnnnnnnnnnnnnnnnnnnnnnnnnnnnnnnnnnnnnnnnnnnnnnnnnnnnnnnnnnnnnnnnnnnnnnnnnnnnnnnnnnnnnnnnnnnnnnnnnnnnnnnnnnnnnnnnnnnnnnnnnnnnnnnnnnnnnnnnnnnnnnnnnnnnnnnnnnnnnnnnnnnnnnnnnnnnnnnnnnnnnnnnnnnnnnnnnnnnnnnnnnnnnnnnnnnnnnnnnnnnnnnnnnnnnnnnnnnnnnnnnnnnnnnnnnnnnggaagcatctcaattctccctactatactgtacctcacaattggggtccttagagagactgctgtgaagttaccggggggccagttatcttcgacggttgcagcttccctacaggctctgaaaggaatcttatcttctcccatggcgcgggcagaaaagagccacactgcttggactgaccttctccgaagtgctttaacaacagttcttgactgttgggatccag

SEQ ID NO: 25628 - DNA, 522 bp, Macaca Mulatta
taaatttgaaaaatcaaattcatgtaactcataggtaatttacctttggcttctaagaggaaagtcctttaaggatatcctttttttaaaaattgcatttttctcttataatttataaatctgttagatctcaaaagacataattctttgtgatcagttatccttcatttcatcatggttttacacagtgagttgatacaggttctctgaaaagtcatgcatcaaataaaaggggcaggtcaaaccattatgtcacatggtaaattataaaatgacagtacaagttccagatagttaagggaataccgaagggatgattctctttttaagataacaggaagttatccacatgtttctttctgaattcttagagtaaatggaagcatagaatgagagaataatgactttgcatttatcttattttctagattcaaaaggaacattaacttgaatcagattaccagtttcaagatgactgatagacaagaaaaggaaaaataagcaataatagtgggcaactga

SEQ ID NO: 25629 - DNA, 447 bp, Macaca Mulatta
aacatcagaagtttttaaccaaacttttcatctaactcaagccaagtaaagcaggcatgtgaccaccaattctaaaatcagttcagtctgcttaggaaaatagtgtaactttaaaagtctttagaagaaaggcactaaggtcgccagaccagatgcaaatattaaattactttatggaacaaatctagaggggaagccaagatttggctaagtgtgtctgttttttccctattttatgcctctgtgtctcagctctgtgttagcttctgtgtttagggtagggtgtttctttgtagctccttttcactcttctgtatctttttcactccagccctccttcatcgttacatgtttagttcatagaatcatttaatttctgatttgggtaggcttattctaattgtttttaatattgaatacattacttgcattaattttccctactca

SEQ ID NO: 25630 - DNA, 311 bp, Macaca Mulatta
agccttcaatattctagtaacctatgcgagcatgaaagaactcacactgggagtgaaaccttatggatgtaaggaatgtggtaagtcgtttacttcttccagcgcccttcgaagccatgaaaggactcatactggagaaaaaccctatgaatgtaagaaatgtggtaaagccttcagttgttccagttcccttcgaaagcataaaagagcttatatgtggtaaaaaaaaacaacaacaacaataaaacacctctgtgaatgtaagaagtgtgttaaagctttcatttactctagtttcattagagcacgtg

SEQ ID NO: 25631 - DNA, 1015 bp, Macaca Mulatta
  misc_feature (1)...(1015): n = A,T,C or G
aagtttaaaaccccggctaagccagaagagccaaagtgagacctcgccaagaccactcctcgcgctctcggccgagaatactgcgcaaattctgcgaggtttgagcctcgcgcctctccgttcccgacccccggcgtggacacgttcccgcgctttctggcgtcaggggtcagagggcacgccgccgcgcaggagaacggagccgaggccgcggctgctatgggcgaagcgggcggtgctgagaaggcctgnnnnnnnnnnnnnnnnnnnnnnnnnnnnnnnnnnnnnnnnnnnnnnnnnnnnnnnnnnnnnnnnnnnnnnnnnnnnnnnnnnnnnnnnnnnnnnnnnnnnnnnnnnnnnnnnnnnnnnnnnnnnnnnnnnnnnnnnnnnnnnnnnnnnnnnnnncctggaaaggaaagagcaagaactagagcagctgaaaatggattgtgagcactttaaagcccgcctggaaaccgtgcaggccgacagcataagagacaagaaggnnaggagaaactggctcttcgacagcagctgaatgaagcgaagcagcaacttctgcagcaggcagagtattgtacagaaatgggagcagcagcttgtaccctcttgtggggcgtctccagcagcgaggaagtcgtcaaggccattttgggaggannnnnnnnnnnnnnnnnnnnnnnnnnnnnnnnnnnnnnnnnnnnnnnnnnnnnnnnnnnnnnnnnnnnnnnnnnnnnnnnnnnnnnnnnnnnnnnnnnnnnnnnnnnnnnnnnnnnnnnnnnnnnnnnnnnntgttgctgccatagcatgtggtcgtgaattcttggttaattcaagccgggtgctcttggacaccatattgcagcttctgggagacttgaagccaggacagtgtaccaaactcaaagtgnnnatgctgatgtccctgtacaatgtaagcatcaatttgaaaggcctgaaatacatcagcgagagtccaggattcatcccgttgctgtggtggcttatgagt

SEQ ID NO: 25632 - DNA, 4562 bp, Macaca Mulatta
  misc_feature (1)...(4562): n = A,T,C or G
ttgtcgttcaggtctcaggataccacagtcctggataccctatccaatgatttcagcatggacaacatcagtgacagtggggcctccaatgagacaaccaatgccctccaggaaaattcactggctgatttttctctgccgcagacgccacaaactgacaacccctcagagggccgaggagaaggcgtctccaagtcatttagcgatcatggtttctattccccttcctccacgctgggggactctccgtcggttgatgatcccttggagtatcaggctggcctcctggtgcagaatgccattcaacaagccatagccgagcaggtggataaagctgtgtctaaaaccagcagggatggagcagagcaacagggacctgaagcaactgtagaggaagctgaagctggggctttcggctcagaaaagcctcagagcatgtttgagccacctcaggtgtcttctcctgttcaagagaaaagggatgtattaccaaagattctgcctgctgaagacagggcactcagggaaagggggcccccccagccactgccagctgtgcaacccagtggcccgattaacatggaggagaccaggcccgaaggaagctatttcagcaagtactcggaggcagctgagctgagaagcacagcctccctcctggccactcaagaatccgacgtgatggttggacccttcaagctgaggtccaggaaacagcggactttgtccatgattgaggaagagatccgagcagctcagganagggaagaggagctgaagaagcagagacnagtcttgcagagtacacagagccccaggacaaagaacgccccatcgctgccctccagacnnnnnnnnnnnnnnnnnnnnnnnnnnnnnnnnnnnnnnnnnnnnnnnnnnnnnnnnnnnnnnnnnnnnnnnnnnnnnnnnnnnnnnnnnnnnnnnnnnnnnnnnnnnnnnnnnnnnnnnnnnnnnnnnnnnnnnnnnnnnnnnnnnnnnnnnnnnnnnnnnnnnnnnnnnnnnnnnnnnnnnnnnnnnnnnnnnnnnnnnnnnnnnnnnnnnnnnnnnnnnnnnnnnnnnnnnnnnnnnnnnnnnnnnnnnnnnnnnnnnnnnnnnnnnnnnnnnnnnnnnnnnnnnnnnnnnnnnnnnnnnnnnnnnnnnnnnnnnnnnnnnnnnnnnnnnnnnnnnnnnnnnnnnnnnnnnnnnnnnnnnnnnnnnnnnnnnnnnnnnnnnnnnnnnnnnnnnnnnnnnnnnnnnnnnnnnnnnnnnnnnnnnnnnnnnnnnnnnnnnnnnnnnnnnnnnnnnnnnnnnnnnnnnnnnnnnnnnnnnnnnnnnnnnnnnnnnnnnnnnnnnnnnnnnnnnnnnnnnnnnnnnnnnnnnnnnnnnnnnnnnnnnnnnnnnnnnnnnnnnnnnnnnnnnnnnnnnnnnnnnnnnnnnnnnnnnnnnnnnnnnnnnnnnnnnnnnnnnnnnnnnnnnnnnnnnnnnnnnnnnnnnnnnnnnnnnnnnnnnnnnnnnnnnnnnnnnnnnnnnnnnnnnnnnnnnnnnnnnnnnnnnnnnnnnnnnnnnnnnnnnnnnnnnnnnnnnnnnnnnnnnnnnnnnnnnnnnnnnnnnnnnnnnnnnnnnnnnnnnnnnnnnnnnnnnnnnnnnnnnnnnnnnnnnnnnnnnnnnnnnnnnnnnnnnnnnnnnnnnnnnnnnnnnnnnnnnnnnnnnnnnnnnnnnnnnnnnnnnnnnnnnnnnnnnnnnnnnnnnnnnnnnnnnnnnnnnnnnnnnnnnnnnnnnnnnnnnnnnnnnnnnnnnnnnnnnnnnnnnnnnnnnnnnnnnnnnnnnnnnnnnnnnnnnnnnnnnnnnnnnnnnnnnnnnnnnnnnnnnnnnnnnnnnnnnnnnnnnnnnnnnnnnnnnnnnnnnnnnnnnnnnnnnnnnnnnnnnnnnnnnnnnnnnnnnnnnnnnnnnnnnnnnnnnnnnnnnnnnnnnnnnnnnnnnnnnnnnnnnnnnnnnnnnnnnnnnnnnnnnnnnnnnnnnnnnnnnnnnnnnnnnnnnnnnnnnnnnnnnnnnnnnnnnnnnnnnnnnnnnnnnnnnnnnnnnnnnnnnnnnnnnnnnnnnnnnnnnnnnnnnnnnnnnnnnnnnnnnnnnnnnnnnnnnnnnnnnnnnnnnnnnnnnnnnnnnnnnnnnnnnnnnnnnnnnnnnnnnnnnnnnnnnnnnnnnnnnnnnnnnnnnnnnnnnnnnnnnnnnnnnnnnnnnnnnnnnnnnnnnnnnnnnnnnnnnnnnnnnnnnnnnnnnnnnnnnnnnnnnnnnnnnnnnnnnnnnnnnnnnnnnnnnnnnnnnnnnnnnnnnnnnnnnnnnnnnnnnnnnnnnnnnnnnnnnnnnnnnnnnnnnnnnnnnnnnnnnnnnnnnnnnnnnnnnnnnnnnnnnnnnnnnnnnnnnnnnnnnnnnnnnnnnnnnnnnnnnnnnnnnnnnnnnnnnnnnnnnnnnnnnnnnnnnnnnnnnnnnnnnnnnnnnnnnnnnnnnnnnnnnnnnnnnnnnnnnnnnnnnnnnnnnnnnnnnnnnnnnnnnnnnnnnnnnnnnnnnnnnnnnnnnnnnnnnnnnnnnnnnnnnnnnnnnnnnnnnnnnnnnnnnnnnnnnnnnnnnnnnnnnnnnnnnnnnnnnnnnnnnnnnnnnnnnnnnnnnnnnnnnnnnnnnnnnnnnnnnnnnnnnnnnnnnnnnnnnnnnnnnnnnnnnnnnnnnnnnnnnnnnnnnnnnnnnnnnnnnnnnnnnnnnnnnnnnnnnnnnnnnnnnnnnnnnnnnnnnnnnnnnnnnnnnnnnnnnnnnnnnnnnnnnnnnnnnnnnnnnnnnnnnnnnnnnnnnnnnnnnnnnnnnnnnnnnnnnnnnnnnnnnnnnnnnnnnnnnnnnnnnnnnnnnnnnnnnnnnnnnnnnnnnnnnnnnnnnnnnnnnnnnnnnnnnnnnnnnnnnnnnnnnnnnnnnnnnnnnnnnnnnnnnnnnnnnnnnnnnnnnnnnnnnnnnnnnnnnnnnnnnnnnnnnnnnnnnnnnnnnnnnnnnnnnnnnnnnnnnnnnnnnnnnnnnnnnnnnnnnnnnnnnnnnnnnnnnnnnnnnnnnnnnnnnnnnnnnnnnnnnnnnnnnnnnnnnnnnnnnnnnnnnnnnnnnnnnnnnnnnnnnnnnnnnnnnnnnnnnnnnnnnnnnnnnnnnnnnnnnnnnnnnnnnnnnnnnnnnnnnnnnnnnnnnnnnnnnnnnnnnnnnnnnnnnnnnnnnnnnnnnnnnnnnnnnnnnnnnnnnnnnnnnnnnnnnnnnnnnnnnnnnnnnnnnnnnnnnnnnnnnnnnnnnnnnnnnnnnnnnnnnnnnnnnnnnnnnnnnnnnnnnnnnnnnnnnnnnnnnnnnnnnnnnnnnnnnnnnnnnnnnnnnnnnnnnnnnnnnnnnnnnnnnnnnnnnnnnnnnnnnnnnnnnnnnnnnnnnnnnnnnnnnnnnnnnnnnnnnnnnnnnnnnnnnnnnnnnnnnnnnnnnnnnnnnnnnnnnnnnnnnnnnnnnnnnnnnnnnnnnnnnnnnnnnnnnnnnnnnnnnnnnnnnnnnnnnnnnnnnnnnnnnnnnnnnnnnnnnnnnnnnnnnnnnnnnnnnnnnnnnnnnnnnnnnnnnnnnnnnnnnnnnnnnnnnnnnnnnnnnnnnnnnnnnnnnnnnnnnnnnnnnnnnnnnnnnnnnnnnnnnnnnnnnnnnnnnnnnnnnnnnnnnnnnnnnnnnnnnnnnnnnnnnnnnnnnnnnnnnnnnnnnnnnnnnnnnnnnnnnnnnnnnnnnnnnnnnnnnnnnnnnnnnnnnnnnnnnnnnnnnnnnnnnnnnnnnnnnnnnnnnnnnnnnnnnnnnnnnnnnnnnnnnnnnnnnnnnnnnnnnnnnnnnnnnnnnnnnnnnnnnnnnnnnnnnnnnnnnnnnnnnnnnnnnnnnnnnnnnnnnnnnnnnnnnnnnnnnnnnnnnnnnnnnnnnnnnnnnnnnnnnnnnnnnagagctgggggttcttgggccatgctccgtgtgtggataaggaaagaaatgctttttctgggactttcccacagtcacaaagctgttttcactgtggcccctacaactcttaacttttgctagtactcctgtgctgccttccggattactgctgtctattttcttgctccactcactgaagatcctaatataatcccattaaaatgtaaattacagtttacttgggagagccagattttctctgtgctcttgagttttttattcattcaagaaaccttgggccaccgctttgtacatagcaccgtgctaggctctgggatcccaactggacccttttaactttctgaagatgggaccgtcccctggaggaaagtcattcctgcctaatccatcgagagaaagaggcttacgaaaaactttgcctctgatgctcggccccacccccaaatagcacgcaagcttgttaacctcacctcttacaaaatgtttagattctgtagatgttaaaagcctttctggaagtattgcattctgccgtgtttataggtgttcactttcctccggagctgattaactactgacat

SEQ ID NO: 25633 - DNA, 841 bp, Macaca Mulatta
ggggaactcggtggtggccactgttcagaccagacttcgctcgttttcgtgcgcctcgctccgcttttcctccgcaaccatgtctgacaaacccgatatggctgagatcgagaaattcgataagtcgaaactgaagaagacagagacgcaagagaaaaatccactgccttccaaagaaacgattgaacaggagaagcaagcaggcgaatcgtaatgaggcgtgcgccgccaatatgcactgtacattccacaagcattgccttcttattttacttcttttagctgtttaactttgtaagatgcaaagaggttggatcaagtttaaatgactgtgctgcccctttcacatcaaagaactactgacaacgaaggccgcgcctgcctttcccatctgtctatctggctggcagggaaggaaagaacttgcatgttggtgaaggaagaagtggggtgggaagaagtgggggtgggacgacagtgaaatcttgagtaaaaccagctggccccaaggtgtcctgcaggctgtaatggagtttaatcagagtgacatttttttttttgttcaaatggattttattatcggaatgcacaatttttttttatatggcgataaaaagttttcgcaagtagtggtacaacgaaatatttcatttggtgggccggccctgggcccttcaagaaaccttttcaaaacacatttctttttggcgccgcgggccccagttgggtaagttggaaaaatgtggccataagctgtttttcctaagggaaaccctggggccgagaaaaagtgggcttgggatttcccccccaataaaaaaaccgcccgggggggaaaact

SEQ ID NO: 25634 - DNA, 568 bp, Macaca Mulatta
tttctgggctgggcgggataacgctttaaatctagaggtcagagctgccaggcttgacgtccaggcagttaacttcagggtcctcgaaaaggtgagaacggccccaacgcggagtccccaagaaacagacaggtggctggagcaaaactttactgtcagaggctctgctgggccacaggtcttcaggacaccgggctggcccggcctcctctaaggcattcaataatattagtaattaaatagcaacgctcatcccccaatcggaatgtacaacagaggtcccattgtgccatgtggtcccaaagggtatggtcccatgaggtctggtactcaagaggcagagggggctccctgatgcagaggggttaaggccacaaaggaaaaggagaagggatggggtctggggacagtgagctggtccatcacatccaagaatctggctcagcccttggggtgactgagtgcagggcatgccaggtcccaagctctgcgggtccggaggggcggcgggggccccgaggcgtgtttagagaagagggtttacggtctggctgtgtgtccatccgac

SEQ ID NO: 25635 - DNA, 186 bp, Macaca Mulatta
aagggagccatgtcaggcaggacagcatggagcccagcgacctctgggacgacgtgtctaactgtcggtgtggggacaggctgaagaccctggagcagagggcgcggaagcagcaccagaggtgcctggcacattcactggtggggactccaaactatatcgcgcctgaggttctccttcgcaaag

SEQ ID NO: 25636 - DNA, 121 bp, Macaca Mulatta
caggtcaatacttctgcgaaggctctgtagtctgatgggaactgtattcttgcttcgctgctttaccatgtttgtgacctccctctccgtgccaggacaacacctgcagtgtactggaaag

SEQ ID NO: 25637 - DNA, 5076 bp, Macaca Mulatta
  misc_feature (1)...(5076): n = A,T,C or G
gtggctggattcgggggaaagcgtgagggcagtcggtgcaggcgggttgcttcttataccccagcgggagcgcccagacaagccgaactgactggacttttctggccggccccattcccgaggctggggcagcttcggttccgagcccgaccggagaggagccggagtcccggcccctgcggggttcgctctctgcagaccagtgggaccccnnnnnnnnnnnnnnnnnnnnnnnnnnnnnnnnnnnnnnnnnnnnnnnnnnnnnnnnnnnnnnnnnnnnnnnnnnnnnnnnnncctcttcattctccccccgaaggacacaaaagtggcttccgcggaaagatttggaggcagtgggagcttttctctccagagagcgactgtgtagaaaggatttttgggaagccgatttttaacacctctgccctccgtccccaaagcctctgtgtaaccctctgaggagaaaagcccatagtttgaaagttcgggggcattttgttgggttctgtaggagagagggggaggaccctgttctggtagtttggctggactagtgctggccgttgaaaaccccgaagtacatttccctgtggaacttttgcagatatatatttttagatttttaaataccagataaaaaatatatgccttctatatatctcctgacgtcctgcccctgacagcgcgatgtacaatacggtgtggagtatggaccgcgatgacgcagactggagggaggtgatgatgccctattcgacagaactgatattttatattgaaatggatcctccagnnnnnnnnnnnnnnnnnnnnnnnnnnnnnnnnnnnnnnnnnnnnnnnnnnnnnnnnnnnnnnnnnnnnnnnnnnnnnnnnnnnnnnnnnnnnnnnnnnnnnnnnnnnnnnnnnnnnnnnnnnnnnnnnnnnnnnnnnnnnnnnnnnnnnnnnnnnnnnnnnnnnnnnnnnnnnnnnnnnnnnnnnnnnnnnnnnnnnnnnnnnnnnnnnnnnnnnnnnnnnnnnnnnnnnnnnnnnnnnnnnnnnnnnnnnnnnnnnnnnnnnnnnnnnnnnnnnnnnnnnnnnnnnnnnnnnnnnnnnnnnnnnnnnnnnnnnnnnnnnnnnnnnnnnnnnnnnnnnnnnnnnnnnnnnnnnnnnnnnnnnnnnnnnnnnnnnnnnnnnnnnnnnnnnnnnnnnnnnnnnnnnnnnnnnnnnnnnnnnnnnnnnnnnnnnnnnnnnnnnnnnnnnnnnnnnnnnnnnnnnnnnnnnnnnnnnnnnnnnnnnnnnnnnnnnnnnnnnnnnnnnnnnnnnnnnnnnnnnnnnnnnnnnnnnnnnnnnnnnnnnnnnnnnnnnnnnnnnnnnnnnnnnnnnnnnnnnnnnnnnnnnnnnnnnnnnnnnnnnnnnnnnnnnnnnnnnnnnnnnnnnnnnnnnnnnnnnnnnnnnnnnnnnnnnnnnnnnnnnnnnnnnnnnnnnnnnnnnnnnnnnnnnnnnnnnnnnnnnnnnnnnnnnnnnnnnnnnnnnnnnnnnnnnnnnnnnnnnnnnnnnnnnnnnnnnnnnnnnnnnnnnnnnnnnnnnnnnnnnnnnnnnnnnnnnnnnnnnnnnnnnnnnnnnnnnnnnnnnnnnnnnnnnnnnnnnnnnnnnnnnnnnnnnnnnnnnnnnnnnnnnnnnnnnnnnnnnnnnnnnnnnnnnnnnnnnnnnnnnnnnnnnnnnnnnnnnnnnnnnnnnnnnnnnnnnnnnnnnnnnnnnnnnnnnnnnnnnnnnnnnnnnnnnnnnnnnnnnnnnnnnnnnnnnnnnnnnnnnnnnnnnnnnnnnnnnnnnnnnnnnnnnnnnnnnnnnnnnnnnnnnnnnnnnnnnnnnnnnnnnnnnnnnnnnnnnnnnnnnnnnnnnnnnnnnnnnnnnnnnnnnnnnnnnnnnnnnnnnnnnnnnnnnnnnnnnnnnnnnnnnnnnnnnnnnnnnnnnnnnnnnnnnnnnnnnnnnnnnnnnnnnnnnnnnnnnnnnnnnnnnnnnnnnnnnnnnnnnnnnnnnnnnnnnnnnnnnnnnnnnnnnnnnnnnnnnnnnnnnnnnnnnnnnnnnnnnnnnnnnnnnnnnnnnnnnnnnnnnnnnnnnnnnnnnnnnnnnnnnnnnnnnnnnnnnnnnnnnnnnnnnnnnnnnnnnnnnnnnnnnnnnnnnnnnnnnnnnnnnnnnnnnnnnnnnnnnnnnnnnnnnnnnnnnnnnnnnnnnnnnnnnnnnnnnnnnnnnnnnnnnnnnnnnnnnnnnnnnnnnnnnnnnnnnnnnnnnnnnnnnnnnnnnnnnnnnnnnnnnnnnnnnnnnnnnnnnnnnnnnnnnnnnnnnnnnnnnnnnnnnnnnnnnnnnnnnnnnnnnnnnnnnnnnnnnnnnnnnnnnnnnnnnnnnnnnnnnnnnnnnnnnnnnnnnnnnnnnnnnnnnnnnnnnnnnnnnnnnnnnnnnnnnnnnnnnnnnnnnnnnnnnnnnnnnnnnnnnnnnnnnnnnnnnnnnnnnnnnnnnnnnnnnnnnnnnnnnnnnnnnnnnnnnnnnnnnnnnnnnnnnnnnnnnnnnnatgggatttgatgaaaagacaaccaaaggaaaatgggaaggcttgggatttcattcaaacaatctaagccaagatgatnnnnnnnnccttcaactgaaggtactttatttcttaccaacataatttaggcttcagcatctcatcagcccctccctttaaagaggtattatgttcagaagccaacaaaacaatgtttgttgccagaccaatgtttgatggaaaaacgtagcactcatagatgaatgtatacttctgtaccaaaacttgaacataaaaagactagaaattgtgagttttagcaaacactaaaattggtcagtgtaaccccttctgtcctgcctgtttctctgagatgagaaatagcattctttttgtggggatggtgagttttgaatcataaaatgaagttggtgcttgtgtggtgtttccttagcctaaagaatgatctattgtttgaaatctttgtaacttgtttgtatgagtcaagaaaaggtgcaatccagtgcttttagatggcttgatataccaaataacaatatagaacaacattattatatgtgctttccaagtttaaaggccctgcagaaatagtaaacatgatttaatttcccttcatctccccctcctttgctggatggggttttgggagctacaggttgctaaggaggggagtcagattgtggtcaggggcctcagtaaatcacagacccaggggccctgtggtccgggtgagagtcataccacattacacatgtgcttccatacagtggtttctgaagcttttgcagggagagaagatggcttagtgtttagactgttagtagaagccatctggaagcttttctctttgcctttttttgtgatcctgccataaaggctatgtgcagtctgccctcatgctccagtggccttgattttaggccaggaatcttctgctccatggggctnnnnnnnnnnnnnnnnnnnnnnnnnnnnnnnnnnnnnnnnnnnnnnnnnnnnnnnnnnnnnnnnnnnnnnnnnnnnnnnnnnnnnnnnnnnnnnnnnnnnnnnnnnnnnnnnnnnnnnnnnnnnnnnnnnnnnnnnnnnnnnnnnnnnnnnnnnnnnnnnnnnnnnnnnnnnnnnnnnnnnnnnnnnnnnnnnnnnnnnnnnnnnnnnnnnnnnnnnnnnnnnnnnnnnnnnnnnnnnnnnnnnnnnnnnnnnnnnnnnnnnnnnnnnnnnnnnnnnnnnnnnnnnnnnnnnnnnnnnnnnnnnnnnnnnnnnnnnnnnnnnnnnnnnnnnnnnnnnnnnnnnnnnnnnnnnnnnnnnnnnnnnnnnnnnnnnnnnnnnnnnnnnnnnnnnnnnnnnnnnnnnnnnnnnnnnnnnnnnnnnnnnnnnnnnnnnnnnnnnnnnnnnnnnnnnnnnnnnnnnnnnnnnnnnnnnnnnnnnnnnnnnnnnnnnnnnnnnnnnnnnnnnnnnnnnnnnnnnnnnnnnnnnnnnnnnnnnnnnnnnnnnnnnnnnnnnnnnnnnnnnnnnnnnnnnnnntgggcacacctccatggctttgcacctggtgttgaacgtgctgaggcaggtggatgctggattacgggtaaggaatccctcctgtctggtactaacatttcagtgtgttctgagtgtctttaaaccaaaaatggaaatacagatacatgcctgtagtattcagtgtgtctgctccttttgggcagacacagagggtggcagggagagaccaagtaccatctttatctacacttgggctggcttgtggagaagggctgcnnnnnnnnnnnnnnnnnnnnnnnnnnnnnnnnnnnnnttcttgaattcattgttttgtgggatctaagacccaggggtcatttgagaggtttgacagtatcttttctgaccagttgccacatgacttgcttgaccctgagccagtggaaatggcatagtgaccagtctactacccactgagcctggtgtgtagagggggatagggtagcaaggtgcatctctacgcccgtgacttgagaggagatcttggcctctttcatgagaatctagtgctgtttcctgtcccatgatctggaccctgggactatctgttttggcatcttaactgcagtttcaatgaggcagagggcaaagagagaccaagatcagaggggctcattatacccctggctggagaacccaactactgacatgaaagcagcttggggctggctggacacaggtactaggcccatcgttttcaggtgaagctttcatcacagaacagtgccatctccacctggccatagatgccatgccatgattcaggcctggataggctgcctgtgtccttaccactgatctggccaagaatgaggacctcccaacactttcactccctctccaagccttgatgggacctccacttactttaggcctcatgtgctgtgaagaagctttgagagcccaatgtggtgtcttccacaaggtctcctctttttgctgcaaggaatcagccccaatgtattctctgaaactgagaatgcacctgg

SEQ ID NO: 25638 - DNA, 1035 bp, Macaca Mulatta
  misc_feature (1)...(1035): n = A,T,C or G
gatcctcggcgagcttccggagcactgtgcctacatcatcatctacgggatgcccacctactggctggccaacctgaggccgggcctccagcccttcctgctgcacttcctgctggtgtggctggtggtcttctgttgcaggattatggccctggccaccgcggccctgctgcccaccttccacatggcctccttcctcagcaacgccctctacaactccttctacctcaccgcgggctacatgataaacttgagcagcctgtggacagnnnnnnnnnnnnnnnnnnnnnnnnnnnnnnnnnnnnnnnnnnnnnnnnnnnnnnnnnnnnnnnnnnnnnnnnnnnnnnnnnnnnnnnnnnnnnnnnnnnnnnnnnnnnnnnnnnnnnnnnnnnnnnnnatcctcagtgccatggagctgaactcgtaccctctttacgccatctacctcatcgtcattggcctcagcggtggcttcatggtcctgtactacgtgtccttaaggttcatcaaacagaagccaagtcaagactggtgattcacgccaggcgcctgcccgctggtgagggacctgagcagacccttcaactgcactccctcctcaagacccccttcctggggaccgtgaagacaatgaccctacagatgctcagctacatccggcccacggtgctgcagtggcacagaccagccacaggatggcagtagaataaagacagtcgaaagggatttctgctcactggcaggagactgcgatgactgggagtgagaaaacctgcactcggtggcacctacaacgttgctaatttatttccttttgatatgcatttatataggcaacttgatataggatgggagcaaactaggaatgaattgagtagctagactgtgcaggaattgttggaacctggagggaacagtaacagtagctagcagatatggcttcatcttccaggggccccacactccgtggtgagccaccatcaatacagaaagtgacctaagatgtaccagcaagaatccatcccttctttttgt

SEQ ID NO: 25639 - DNA, 638 bp, Macaca Mulatta
ggtggatgcccggagcataccagtgttagcaaaatggcaaaattcatatagcattaaagttgtacttcaagagctaagacgtctaatgatgtccaaagaaaatatgaagcttccacagccaccagaaggacaaacatacaacaattaattttagtggatctcaaacttgtcttaaatcaacaaccttctactcatgttaatgtcttgattaaatatcacaatgaaaaatacccacacattaagtaaaagaattccagctggtaaacatgacctggacatttgtaagaatatatttaatacatgtacacccattatgttttcaggtaacaggaggaaaaatgcagcacaattttttttctcttgttaaggcactgtcatttaaacataaacctggagtactcaaagtagaattcaggtttacaagatgaaagcgtgtggagaagtgtcagatggcagtggaagcatgtgtgtttctaaaaagtgaaaatctcaagaaagaaaacagaaatggcatgctttacccatcttgcttagtgaaagagagctgcagttgaaattgtttaaaaagtagcaggtacaaggaatattgtcacagatgtgttaatttttgaagcggtgtgggtgctgactactagtag

SEQ ID NO: 25640 - DNA, 568 bp, Macaca Mulatta
cggtttaagaggatgaggattatgaccctctaattaaaattgcccgattagagtctacaccgaatagtcttttcagtgccccgtcctgtggatcttctgaaaaatcaagtgcagcttctcagcactcctctcaaatgtcttcagactcctcccgatctagtagccccagtgttgatacctccacagactctcaggcttctgaggagattcaggtacttcctgaggagcggagcgatacccctgaagttcacactccactgcccatttcccagtccccagaaaatgagagtaacgataggagaagcagaaggtattcagtgtcggagagaagttttggatccagaacgacgaaaaaattaactctacaaagtgccccccagcagcagacctcctcgtctccacctccacctctgctgactccacccccaccactgcagccagcctccagtatctctgaccacacaccttggcttatgcctccaacaatccccttagcatcaccatttttgcctgcttccactgctcctatgcaagggaagcgaaaatctattttgcgagaaccgacatt

SEQ ID NO: 25641 - DNA, 721 bp, Macaca Mulatta
  misc_feature (1)...(721): n = A,T,C or G
gggcgcctcagtcctcaggatgctctccagcttcctgtccgaggatgtattcaagcagggcctggcngtcctacctccacacctttgcctaccagaacaccatctacctgaacctgtgggaccacctgcaggaggnnnnnnnnnnnnnnnnnnnnnnnnnnnnnnnnnnnnnnnnnnnnnnnnnnnnnnnnnnnnnnnnnnnnnnnnnnnnnnnnnnnnnnnnnnnnnnnnnnnnnnnnnnnnnnnnnnnnnnnnnnnnnnnnnnnnnnnnnnnnnnnnnnnnnnnnnnnnnnnnnnnnnnnnnnnnnnnnnnnnnnnnnnnnnnnnnnnnnnnnnnnnnnnnnnnnnnnnnnnnnnnnnnnnnnnnnnnnnnnnnnnnnnnnnnnnnnnnnnnnnnnnnnnnnnnnnnnnnnnnnnnnnnnnnnnnnnnnnnnnnnnnnnnnnnnnnnnnnnnnnnnnnnnnnnnnnnnnnnnnnnnnnnnnnnnnnnnnnnnnnnnnnnnnnnnnnnnnnnnnnnnnnnnnnnnnnnnnnnnnnnnnnnnnnnnnnnnnnnnnnnnnnnnnnnnnnnnccagtgcccgtaaggtccctgtcactctggcgctgaccaacaccctcttcctgattgaagagacagagtacatgccctgggaggccgccctgagcagcctgagctacttcaagctcatgttcgaccgctccgaggtctatggccccatgaa

SEQ ID NO: 25642 - DNA, 165 bp, Macaca Mulatta
cccagaaactttcgaacaaaaccaaacacccggacgaccctctccggtgagcggcgaacacggcccggtaggctgcgtcacccgagccccgggagagaggagcgaagatccggaactcgccaactcaccccgggcatcctgcccgccccatgctctctgccccca

SEQ ID NO: 25643 - DNA, 795 bp, Macaca Mulatta
gggggctaattttcaatctgtgttttgaatttttttattatatgttatttaaaatattacatatgcagctgggagaactacacctttgtgcacatagatttatatattaatttgtagaaaatattttctttatatatttccttaccatacaaggtgccttgttcatcaggaaaacttttgtttcatatgttgacaaaaaaggcacctttagagtttctttttaagtatagttgacaaatatataaatgttacatttattttcagagttctttttagatctaaagaagtcagttcaaaaatggaaatcaacaatgttaggagaaatctgaattctgttaagttagtacatattatgtatagcatctgtttttaaccatttccattcttatccctagtgtatcagttgatcacactaagaaagcttaaagattgagcatttgaaataaatgctgtttataaatgattagatttttgaagggatattgaaatcattgtgctgtgatttcatctatgatatgaaaaataaatttattatccttggtgcttttccccccaaccaatgcacaaataattgtggaacccacttgaaatgacttaaactgggtaatccaaatgggataatctgataagaatttcatgcattgctagttaaataacttaaattgctaaagcttttacttgaaacttacgttttgaaaaaactatagattttcccatggtatgaaataatacctatcggtatttcttcaaaaaagattccttccccctttagtcatataatgaaattactttaaa

SEQ ID NO: 25644 - DNA, 251 bp, Macaca Mulatta
gtagataccactctgtctcagttcaccgacctgaatgtttacctgtgggatgtccaccacagtaaaaggcttattaaagtggatggggttgtgaccaagaagagaaaatcctactgtgttgattttgccgccatccagccccagatcactttactccaggaaatgcacgttacgcattttcgcttctccctggactgggccctgattctccctctgggtaaccagtcccaggtaaaccacaccatcctgca

SEQ ID NO: 25645 - DNA, 1515 bp, Macaca Mulatta
  misc_feature (1)...(1515): n = A,T,C or G
gcaggggtgctggcattgtgggtcctggtgactcacattatgtacatgcaagattactggaggacctggctcaaggggctgcgcggcttcttcttcgtgggtgtcctcttctcggcatatccatcgctgccttctgcaccttcctcgtgctggccatcacccggcatcagannnnnnnnnnnnnnnnnnnnnnnnnnnnnnnnnnnnnnnnnnnnnnnnnnnnnnnnnnnnnnnnnnnnnnnnnnnnnnnnnnnnnnnnnnnnnnnnnnnnnnnnnnnnnnnnnnnnnnnnnnnnnnnnnnnnnnnnnnnnnnnnnnnnnnnnnnnnnnnnnnnnnnnnnnnnnnnnnnnnnnnnnnnnnnnnnnnnnnnnnnnnnnnnnnnnnnnnnnnnnnnnnnnnnnnnnnnnnnnnnnnnnnnnnnnnnnnnnnnnnnnnnnnnnnnnnnnnnnnnnnnnnnnnnnnnnnnnnnnnnnnnnnnnnnnnnnnnnnnnnnnnnnnnnnnnnnnnnnnnnnnnnnnnnnnnnnnnnnnnnnnnnnnnnnnnnnnnnnnnnnnnnnnnnnnnnnnnnnnnnnnnnnnnnnnnnnnnnnnnnnnnnnnnnnnnnnnnnnnnnnnnnnnnnnnnnnnnnnnnnnnnnnnnnnnnnnnnnnnnnnnnnnnnnnnnnnnnnnnnnnnnnnnnnnnnnnnnnnnnnnnnnnnnnnnctgcctcggcctcccaagtagctgggattacaggcatctgccactatgcctggcaaatttttgtgtttttagtagagatggggttttgccatgttagccaggctggtcttgaactcctgacctcaggtgatttcacccgtctcagccttccaaagtgctggtattacaggcgtgagccactgtgcccggcctggatctgttttcttagcacgcagtgaggaatctttgtatgtaaggccagggcaacaaagtcaagaggttaaggggtagggccatgaggcctggacctatgctgcaggcaagggctttcatccctgctgccctaggcactctcttcccaaggccaggatgggcacctggggaggtcagttcaggaatatctagcagagacctcttaagcccccatcccagcaccccatcctgttgttcccagagctggtctcccatgagtgtgctacagccagatagccatggcccctcacccatctcacccacacacacaggcatccatatatcccagaggacttccaaatgaggccagactcagggtcatggggaatgtgctctcgcccctggaagggctttggggaagggggcaacatggcagaggctggaaggagcccccaaacctgttcccatgcccttctagccctgcgtttccactctgccttctcagagtgcccttactgcacccagaccaccggccaggagagaccttctctcccactccagcccctcactgcccttcaactagagctttcacctttttacatttcccttctgaaggacacaaatctgctttcctgcccatac

SEQ ID NO: 25646 - DNA, 104 bp, Macaca Mulatta
ttatccgcaatgtgtgttagatccaaagaaaggtggagccatgaagaccaccaagacagggactaaatgggctcatgtcagctgtgccctgtggatcccagagg

SEQ ID NO: 25647 - DNA, 635 bp, Macaca Mulatta
  misc_feature (1)...(635): n = A,T,C or G
ggggggcagacggcgctgcagtttcagactggagggcggcggacggctgctcagcggcccaactctctcgcagcccttctctccgcaagatgtcagcctccacctcctcgcaccggcccatcaaggggatcctgaaaaacaaaagctcctcgggttcctcggtggcgacttccggtcagcagtctggagggaatattcaagatgtgaagagaaagaaatcccagaagtgggacgaatcaagcatccttgcgacacaccgcgcaacgtacagagattacgatttaatgaaggcaaatgagcccggcacttcctacatgaatttgcaagatgatggggaagattcagtgcgcgatgtcgaaagaaagattcagtgcgcggtgtcgaangaaagaagccatggccgccactgatgcctcggaccacagctgtgaaggggaggagaagagagcaacaagcctacatgaaaaactcctcctcacaacaggaaaaaaccggcagttccaaataaaagaaggctccctcacccaaaatttgacctcatttcctgacaattatgggaacccctccagggaaacaaaaaacaaaaaggccccccccaataaaaaaatgcctcaaaacaaaaaaccccaagcggg

SEQ ID NO: 25648 - DNA, 404 bp, Macaca Mulatta
ttgtcctcctttcatttcttgcctttcatttttggtagctgcttaaacaggttgcctaattagcagcttttgggtgattttttaaaatgttataccaagacttcaagactgtgtacattttaaattatttccaaagatagtgacaggagagaactggaacaaatctaccaactttgtaggcctacaaagcccttacactttaaagggtaagataaaggcttaggtttgaaaggtagagaactgtttagcatctgagaaaaaatacttaattaggcctgtaattttggttcttggccttaaacactttctggaaccttaaaatatgctgcatagcacagtaggaaagccttaggtcttcacacctttaaggaactctaaacaaaatattactttcctttagttca

SEQ ID NO: 25649 - DNA, 741 bp, Macaca Mulatta
  misc_feature (1)...(741): n = A,T,C or G
atcccaacaccttgggaggccaaggcgggaggatcacttgagctcaagagttcaagaccagcgtgggcaacatnnnnnnnnnnnnnnnnnnnnnnnnnnnnnnnnnnnnnnnnnnnnnnnnnnnnnnnnnnnnnnnnnnnnnnnnnnnnnnnnnnnnnnnnnnnnnnnnnnnnnnnnnnnnnnnnnnnnnnnnnnnnnnnnnnnnnnnnnnnnnnnnnnnnnnnnnnnnnnnnnnnnnnnnnnnnnnnnnnnnnnnnnnnnnnnnnnnnnnnnnnnnnnnnnnnnnnnnnnnnnnnnnnnnnnnnnnnnnnnnnnnnnnnnnnnnnnnnnnnnnnnnnnnnnnnnnnnnnnnnnnnnnnnnnnnnnnnnnnnnnnnnnnnnnnnnnnnnnnnnnnnnnnnnnnnnnnnnnnnnnnnnnnnnnnnnnnnnnnnnnnnnnnnnnnnnnnnnnnnnnnnnnnnnnnnnnnnnnnnnnnnnnnnnnnnnnnnnnnnnnnnnnnnnnnnnnnnnnnnnnnnnnnnnnnnnnnnnnnnnnnnnnnnnnnnnnnnnnnnnnnnnnnnnnaaaatataagggctcaggaaccagtttggacttgattttgaatcccagttcatccccttcctagctgtattaccttgattgtgtgccttaactgctctgtgacacagtctgtctgcaaaatggaaacataatacctgccatcaggattgttgaggagtaaataaatggaaattggtgga

SEQ ID NO: 25650 - DNA, 2450 bp, Macaca Mulatta
  misc_feature (1)...(2450): n = A,T,C or G
tgcaaactgcattcctccatcttctttctcaacatgtttgccagcggcttcctgctcagcgccatcagcctggaccgctgcctgcaggtggtgtggccggtgtgggcgcagaaccaccgcaccgtggccgcagcgcacaaagtctgcctggtgctctgggcactagcggtgctcaacacggtgccctatttcgtgttccgggacaccatctcacggctggacgggcgcatcatgtgttactacaacgtgctgctcctgaacccggggcctgaccgtgacgccacgtgcaactcgcgccaggcggccctgccagtcagcaagttcctgctggccttcctggtaaaaatggcgatcatcgcctcgagccatgcggccgtgagcctgcgactgcagcaccgcggacgccggcggcccggccgctttgtgcgcctggtggcggccgtcgtggcggccttcgcactctgctgggggccctaccacgtgttcagcctgctggaggcgcgggcgcacgccaaccccgggttgcggccgcttgtgtggcgcgggctgcccttcgtcaccagcctgnnnnnnnnnnnnnnnnnnnnnnnnnnnnnnnnnnnnnnnnnnnnnnnnnnnnnnnnnnnnnnnnnnnnnnnnnnnnnnnnnnnnnnnnnnnnnnnnnnnnnnnnnnnnnnnnnnnnnnnnnnnnnnnnnnnnnnnnnnnnnnnnnnnnnnnnnnnnnnnnnnnnnnnnnnnnnnnnnnnnnnnnnnnnnnnnnnnnnnnnnnnnnnnnnnnnnnnnnnnnnnnnnnnnnnnnnnnnnnnnnnnnnnnnnnnnnnnnnnnnnnnnnnnnnnnnnnnnnnnnnnnnnnnnnnnnnnnnnnnnnnnnnnnnnnnnnnnnnnnnnnnnnnnnnnnnnnnnnnnnnnnnnnnnnnnnnnnnnnnnnnnnnnnnnnnnnnnnnnnnnnnnnnnnnnnnnnnnnnnnnnnnnnnnnnnnnnnnnnnnnnnnnnnnnnnnnnnnnnnnnnnnnnnnnnnnnnnnnnnnnnnnnnnnnnnnnnnnnnnnnnnnnnnnnnnnnnnnnnnnnnnnnnnnnnnnnnnnnnnnnnnnnnnnnnnnnnnnnnnnnnnnnnnnnnnnnnnnnnnnnnnnnnnnnnnnnnnnnnnnnnnnnnnnnnnnnnnnnnnnnnnnnnnnnnnnnnnnnnnnnnnnnnnnnnnnnnnnnnnnnnnnnnnnnnnnnnnnnnnnnnnnnnnnnnnnnnnnnnnnnnnnnnnnnnnnnnnnnnnnnnnnnnnnnnnnnnnnnnnnnnnnnnnnnnnnnnnnnnnnnnnnnnnnnnnnnnnnnnnnnnnnnnnnnnnnnnnnnnnnnnnnnnnnnnnnnnnnnnnnnnnnnnnnnnnnnnnnnnnnnnnnnnnnnnnnnnnnnnnnnnnnnnnnnnnnnnnnnnnnnnnnnnnnnnnnnnnnnnnnnnnnnnnnnnnnnnnnnnnnnnnnnnnnnnnnnnnnnnnnnnnnnnnnnnnnnnnnnnnnnnnnnnnnnnnnnnnnnnnnnnnnnnnnnnnnnnnnnnnnnnnnnnnnnnnnnnnnnnnnnnnnnnnnnnnnnnnnnnnnnnnnnnnnnnnnnnnnnnnnnnnnnnnnnnnnnnnnnnnnnnnnnnnnnnnnnnnnnnnnnnnnnnnnnnnnnnnnnnnnnnnnnnnnnnnnnnnnnnnnnnnnnnnnnnnnnnnnnnnnnnnnnnnnnnnnnnnnnnnnnnnnnnnnnnnnnnnnnnnnnnnnnnnnnnnnnnnnnnnnnnnnnnnnnnnnnnnnnnnnnnnnnnnnnnnnnnnnnnnnnnnnnnnnnnnnnnnnnnnnnnnnnnnnnnnnnnnnnnnnnnnnnnnnnnnnnnnnncctctgggcactggtaatcccaagatctgtgcagcccccgcctccaggctgcatggggctgggcagctaccatttcccatttgtgggtagaaggggtaacttgcatttctgacctaccacttccactgcaccgtgtctcattcctccatctgccatggacttggggtcagagactgctgggtgtgagctctgcggcccagggactgaaaaactggcgccagtgaattctgcttggtggatgaaacgtcagtggaagaagcagatgagaaactcttgagatcttggtcctgtatttttttctgccaccaaagccagggtcactgaaggcctggcccacagcaggcgttgagcaaagggaacagtgaggtgcccagctagctgtattgacaccctgtattgacacctcacccctgctccctcctatcccttccccctttactcatagcacttcccccattggacacgtggtgcattttgtttgtttattatgtttcctctccattagaatgaaagcttctcgagggcagggactttggtatattgtctgtatttgctggtgcctaggattgtgcctgtatgcaatagg

SEQ ID NO: 25651 - DNA, 1538 bp, Macaca Mulatta
  misc_feature (1)...(1538): n = A,T,C or G
acagacacacccaggccaccactctcgtttgtcagatatttggaggatacctaagatctagagnnnnnnnnnnnnnnnnnnnnnnnnnnnnnnnnnnnnnnnnnnnnnnnnnnnnnnnnnnnnnnnnnnnnnnnnnnnnnnnnnnnnnnnnnnnnnnnnnnnnnnnnnnnnnnnnnnnnnnnnnnnnnnnnnnnnnnnnnnnnnnnnnnnnnnnnnnnnnnnnnnnnnnnnnnnnnnnnnnnnnnnnnnnnnnnnnnnnnnnnnnnnnnnnnnnnnnnnnnnnnnnnnnnnnnnnnnnnnnnnnnnnnnnnnnnnnnnnnnnnnnnnaggatgtgaaatatcctgagtatcttgatattcggccatatatgtctcaacccaacggagagccgattgtttacgtcttgtatgcagtgctggtccacactggttttaattgccatgctggccattacttctgctacataaaannnnnnnnnnnnnnnnnnnnnnnnnnnnnnnnnnnnnnnnnnnnnnnnnnnnnnnnnnnnnnnnnnnnnnnnnnnnnnnnnnnnnnnnnnnnnnnnnnnnnnnnnnnnnnnnnnnnnnnnnnnnnnnnnnnnnnnnnnnnnnnnnnnnnnnnnnnnnnnnnnnnnnnnnnnnnnnnnnnnnnnnnnnnnnnnnnnnnnnnnnnnnnnnnnnnnnnnnnnnnnnnnnnnnnnnnnnnnnnnnnnnnnnnnnnnnnnnnnnnnnnnnnnnnnnnnnnnnnnnnnnnnnnnnnnnnnnnnnnnnnnnnnnnnnnnnnnnnnnnnnnnnnnnnnnnnnnnnnnnnnnnnnnnnnnnnnnnnnnnnnnnnnnnnnnnnnnnnnnnnnnnnnnnnnnnnnnnnnnnnnnnnnnnnnnnnnnnnnnnnnnnnnnnnnnnnnnnnnnnnnnnnnnnnnnnnnnnnnnnnnnnnnnnnnnnnnnnnnnnnnnnnnnnnnnnnnnnnnnnnnnnnnnnnnnnnnnnnnnnnnnnnnnnnnnnnnnnnnnnnnnnnnnnnnnnnnnnnnnnnnnnnnnnnnnnnnnnnnnnnnnnnnnnnnnnnnnnnnnnnnnnnnnnnnnnnnnnnnnnnnnnnnnnnnnnnnnnnnnnnnnnnnnnnnnnnnnnnnnnnnnnnnnnnnnnnnnnnnnnnnnnnnnnnnnnnnnnnnnnnnnnnnnnnnnnnnnnnnnnnnnnnnnnnnnnnnnnnnnnnnnnnnnnnnnnnnnnnnnnnnnnnnnnnnnnnnnnnnnnnnnnnnnnnnnnnnnnnnnnnnnnnnnnnnnnnnnnnnnnnnnnnnnnnnnnnnnnnnnnnnnnnnnnnnnnnnnnnnnnnnnnnnnnnnnnnnnnnnnnnnnnnnnnnnnnnnnnnnnnnnnnnnnnnnnnnnnnnnnnnnnnnnnnnnnnnnnnnnnnnnnnnnnnnnnnnnnnnnnnnnnnnnnnnnnngttgatgcccgttcctttgccgtctctcccagaagacaaaatcttagagaccttcaagtttagcaacaaactgaaaggctcgacagatgaaatgag

SEQ ID NO: 25652 - DNA, 86 bp, Macaca Mulatta
ggtctttaagatgctcagcaataaggaatctctggatcagatcattgtggccaccccaggcctcagcagtgaccccattgctcttg

SEQ ID NO: 25653 - DNA, 130 bp, Macaca Mulatta
tcagcaaacggggattcagcgtccgatcctttggaacagggactcacgtgaagcttccaggaccagctcccgacaagcccaatgtttatgatttcaaaaccacatatgaccagatgtacaatgatcttct

SEQ ID NO: 25654 - DNA, 589 bp, Macaca Mulatta
catgcctctccagactgcaccagcttggcactgactacccacccctcctgcctcctggccctgttggtggcaggcctagcccaaggcatcagaggctcccttagggcccaggacctcagtccccagccgctggagctgaaagaggccttcaagctgttccagatccagttcaacggagttacttgagcccagaagagcatgctcaccgcctggacatctttgcccacaaactggcccaggctcagcggctgcaggaggaggacttgggcacagctgagtttggggtgactccattcagtgacctcacagaggaggagttttggccagctctacgggtatcggagggccgctggaagggtccccggcatgggcagagagatagggtccgaagagccacaggagtcagtgcctttcacctgtgactggcggaaggtggccggtgccatctcagccatcaaggaccagaaaaaactgcgactgctgctgggccctggcagcgtgccggcaacatagaggccctgtggcgcatcaatttctgggatttcgtggatgtctccgtgcaggaactgctggactgtggtcgctgtgg

SEQ ID NO: 25655 - DNA, 583 bp, Macaca Mulatta
  misc_feature (1)...(583): n = A,T,C or G
aggtttatgtgtggtatcggggtcaagagtgcacatgactggtggagcagcacagctggatggagggtcaggtgaccgtctggctgctggagcagaagctgcaggtctcctgcagggtggaggaagtgtggctagcggagctgcagggcccctgtcaccaggcactacccctagagcccggagcccaggccctggcctacaggcctgtctccaggaacattgatgtcccaaagagnnggaagtcggacgcagtggaaatggatgagatgatggcggccatggtgctgacgtccctgtcctgcagccctgttgtgcagagtcctcccgggaccgaggccaacttctctggcttcccgtgcggcctgtgacccgtggaaggagagcggtgacgtctcggacagcggcagcagcactaccagcggtcactggagtgggagcagtggtgtctccnnnnnnnnnnnnnnnnnnnnnaggccagccccaagtatttgggggatgcttttggttctccccaaactgatcatggctttgagaccgatcctgaccctttcctgttggatgaaccagctccacgaaaaagaaa

SEQ ID NO: 25656 - DNA, 761 bp, Macaca Mulatta
  misc_feature (1)...(761): n = A,T,C or G
ccgaccgagaggtacaggcagagcaaccatcctcttcatcacccagatgcaagacaataaaggaaaaggatgaccctggcccaaagaagcacagcagcaagaactcagagagagctcagaaggcagagcccagggaggggcagaagctccccaaatccaggactgcctactctggtggagcagaggacctagagagggacctgaagaaggagaaacccaagcacgagcacaagtcctcaagcaggagggaggcaagagaagaaaagaccaggattagggacagagggcggagctcagacacacattctagctggtacaatgggcgttccgaagggcgtagtcatagaagtagaagtaggagccgagataaatcccataggcataaaagggcccggcgctcccgggagcgggaatcttcgaatcccagtgaccgtaggcgtcactgaggactgttcagctgctcagtagatttggaaataatnnnnnnnnnnnnnnnnnnnnnnnnnnnnnnnnnnnnnnnnnnnnnnnnnnnnnnnnnnnnnnnnnnnnnnnnnnnnnnnnnnnnnnnnnnnttagagtcattgagagggctgcagtttcaacagctacatatcctggatattcttcctaccattcattgtccctgaaccagagtatgtgtcctgaattttggttcataaatatggctcttgaacccatagaccccagttaaagatggaattttcaggaaagggaaaatacgagataattctagaattcta

SEQ ID NO: 25657 - DNA, 738 bp, Macaca Mulatta
cgagaaggcagaacgcatgggttcacagaggtaaccccagtgacaggggccagtctcagaagaactatgctcctcctctcaaggtccccagaagcacagccaaagacactccctctcactggcagcaccttccatgaccagatagccatgctgagccaccggtgcttcaacactctgactaacagcttccagccttccttgctcggccgcaagattctggccgccatcgttatgaaaaaagactctgaggacatgggtgtcgtcgtcagcttgggaacagggaatcgctgtgtgaaaggagattctctcagcctgaagggagaaactgtcaatgactgccatgcagaaatcatctcccggagaggcttcatcaggtttctctacagtgagttaatgaaatacaacccccagactgcgaaggatagtatatttgaacctgctaagggaggagaaaagctccaaataaaaaagactgtgtcattccatctctatatcagcaccgctccatgtggagatggtgccctctttgacaagtcctgcagcgaccgtgctatggaaagcacagactcccgccactaccctgtctttgagaatcccaaacaaggcaagctccgcaccaaggtggaaaacggagaaggcacaatccctgtggaatccagtgacattgtacctacgtgggatggcgttcgggtccggggaaaaattcgtaccatgtcctgtagtgacaaatcctacgct

SEQ ID NO: 25658 - DNA, 3946 bp, Macaca Mulatta
  misc_feature (1)...(3946): n = A,T,C or G
tgctattaccagccagccccctatgcagtagatgccaactttagcaattactacattgcacaggttcagtcagtattcacgtgccagcaacagacctactccacttggctaccctgcaattaagaatcatttaaaaatgtcctatggggaagccatttcagacaagacagtagagnnnnnnnnnnnnnnnnnnnnnaaaagagtgatccagcccttattagggatgtgttttgtgcaatgatgatatgctcctggttttaagtctggcaaagcttatgtatcttttaatagatgtgggagcatgatcttgaaaggatccttttccctagtcctccccttattctcctacccaattggattctatcttgcaaaaaaagagagacctgtcagtaaaaccaaccaggttctcctcatataacaagagaagaaaaatgtttgatgacaatatgggtttgctgtatctgctcccatagctttgccataggnnnnnnnnnngtggaaagtttcttttaagatggaattcataaaagggaaaatacagaagaaaaaaggtctcactccaacttgtgaatcagttcaggagttcagatattaatagtaacaatacaggaaaaaggggaactccaacgttgggattactgtctgaggcttgtagcaagtgctttctgtggaatgatcttgttttgctaacaaacggcttgctccgaatgaacagtagtaggttggtgcagttctcataacaatcagcagaacttaagatgacacaatccattaattccagctgcgtgcatagttcgcatttttataaggtaaaaatgcaagcaaaaacagctgtagcaaagaaagtgctcaaggaccaaagatttaacagataaaaatacccaattagaagagatatagtagaatatatgaagagatattatatttgttacacaccagtatacatcaaagtgcctgttgccttccgaaaatttgaagtggcaaaattattttatggtttaatgattattttattttatcagggactgcctcaagaagaaaataacatataagcttgtgaatggtggagaaaatgccctattttttcttgcaaatacttgtataaagttaacatttgttgatctgatactatcataggtacnnnnnnnnnnnnnnnnnnnnnnnnnnnnnnnnnnnnnnnnnnnnnnnnnnnnnnnnnnnnnnnnnnnnnnnnnnnnnnnnnnnnnnnnnnnnnnnnnnnnnnnnnnnnnnnnnnnnnnnnnnnnnnnnnnnnnnnnnnnnnnnnnnnnnnnnnnnnnnnnnnnnnnnnnnnnnnnnnnnnnnnnnnnnnnnnnnnnnnnnnnnnnnnnnnnnnnnnnnnnnnnnnnnnnnnnnnnnnnnnnnnnnnnnnnnnnnnnnnnnnnnnnnnnnnnnnnnnnnnnnnnnnnnnnnnnnnnnnnnnnnnnnnnnnnnnnnnnnnnnnnnnnnnnnnnnnnnnnnnnnnnnnnnnnnnnnnnnnnnnnnnnnnnnnnnnnnnnnnnnnnnnnnnnnnnnnnnnnnnnnnnnnnnnnnnnntgcattcctccatgatgtttaatctagtgcatcatggatcagtaataggctacttaaatccctgactgctaaaaagaatttctggtgatctgaacactacttgctaatgtttaaatgaattttaatgaatgcattctgcatttctggaccactagaatttagtaatgtgaaatgaccctttttaaagaatatttgcacaattgcttaaaatnnnnnnnnnnnnnnnnnnnnnnatataacattttataaatcatgtcagtatgaaacatctttgatctggttgtcacactgcatttaaatatttagtactgtactttaaatcactttccattaaatcaaatccaactttattttctttcttacaaaaataccagttatacttttgtgaaatgaactggcattactatttcagttcaatgacagttaatcctaaaaccaccctttctgctagccagtagatcctctagacactggtctctgaaaatgcatttgttcaaaacaaaacaaaactaacacataagaaccttccctttgtgtagtgaaacaaccacataatctccacagccttagtggatgactgcttgctgtgataattcctcgaagacccaatcagaagattttcatcatcagttaaagagagaccacgggagaaaacagtatcctcctgttggcagtataatttgtttgtttgtttatctagggatcctcagatgcttagtgctaggttaatccaggttaatccatctggactgccttttgtgcatcatttttgaagccttaatgggaacctgatgggtttgctgtagcagcttccctgtgaattctgtcagagctgcaacagcccctgcactgccactcagttttctaaggaactcctcctactaccatcttggctcaatctccctcactcgagccctgggtttgaaaaattaattgcaacttcccaggaaatactgttcagtttgcagattaagcctggcactcacctatcagaaaccagagctccgcctgcttagttgtttcagagttttctaaaagcaagctaggggagcacatgtgaacacaggagcagctggtaatctgctttctcaccctaactcttgacaaatgagtcgtttactattttagagagtctggaggtctctggctctgccataacaataacctgctgttaatttataacacagatttttgtatggaagagccttatttgagatacactttgatttcttttctcaaatatttatgttcttttcttgcttacttcagggttggtagcttagttgaaagtgccagcacctggcacctattcatatagaacaggctgtactcaagacaacttccagcatttacgttaagacttacataatttatttctattttatgtgtactatagtcttgtgcatacgtagttgaacacacagtgaaatatatgtctctctttgtggatgtgtggccaacaaatcggaatgtctggtgagagagagccgtgcgtataggtcagaggaaagaaaagcgcccgactcccnnnnnnnnnnnnnnnnnnnnnnnnnnnnnnnnnnnnnnnnnnnnnnnnnnnnnnnnnnnnnnnnnnnnnnnnnnnnnnnnnnnnnnnnnnnnnnnnnnnnnnnnnnnnnnnnnnnnnnnnnnnnnnnnnnnnnnnnnnnnnnnnnnnnnnnnnnnnnnnnnnnnnnnnnnnnnnnnnnnnnnnnnnnnnnnnnnnnnnnnnnnnnnnnnnnnnnnnnnnnnnnnnnnnnnnnnnnnnnnnnnnnnnnnnnnnnnnnnnnnnnggactaataatatagctccaaaaatgcgaggatggaagaatatctgtaatccaagccaaggaaggaaatgaaaagtgaacgcactgtttttaccacccctttctgtttgcttattgtcggttgcttcactgtgcataacgttgttttcaatgcaatgcttgttaaataaatattgtgaactattttgtaaatgaaatgtattatgttgaaagctgtcagttcaaacataagctttttttgttgttcaagatgaagtgtgttagatgaaaccaaaaagccaaaaaaagtaatttcatatatagcatctatttgaatataatctttctttaaaatttcttttagcatagcattttcagtgctaagaaagaatctctgctatattttgttaaaataatggctttctaacaaagcaaatggtaaagtacaaagttggaagatgtcaagttaacgagacttgctgcaaagtcttgcagaacggaggaggctctgcccgctggctgtctctccctccagcctctctacaatcattgcctgctctgaggcgttctcttgcagcaagctacaccttcggccactcttttggaatattttgactctaggct

SEQ ID NO: 25659 - DNA, 1230 bp, Macaca Mulatta
  misc_feature (1)...(1230): n = A,T,C or G
agatatcaacgaatgccgtcaccccggtacctgccctgatgggagatgcgtcaattccctcggctcctacacttgtctggcctgtgaggagggctaccggggccagagtgggagctgtgtagnnnnnnnnnnnnnnnnnnnnnnnnnnnnnnnnnnnnnnnnnnnnnnnnnnnnnnnnnnnnnnnnnnnnnnnnnnnnnnnnnnnnnnnnnnnnnnnnnnnnnnnnnnnnnnnnnnnnnnnnnnnnnnnnnnnnnnnnnnnnnnnnnnnnnnnnnnnnnnnnnnnnnnnnnnnnnnnnnnnnnnnnnnnnnnnnnnnnnnnnnnnnnnnnnnnnnnnnnnnnnnnnnnnnnnnnnnnnnnnnnnnnnnnnnnnnnnnnnnnnnnnnnnnnnnnnnnnnnnnnnnnnnnnnnnnnnnnnnnnnnnnnnnnnnnnnnnnnnnnnnnnnnnnnnnnnnnnnnnnnnnnnnnnnnnnnnnnnnnnnnnnnnnnnnnnnnagatgtggatgagtgtgaagacccccagggcagctgcctgggaggggaatgcaagaacaccgcaggctcctaccagtgcctctgtccccagggcttccagctggccaatggcaccctgtgtgaggngatgtgaacgaatgcatgggggaggagcactgcgcaccccacggcgagtgcctcaacagccacgggtctttcttctgtctgtgcgcacccggcttcgtcagcgcagaggggggtaccagctgccnnnnnnnnnnnnnnnnnnnnnnnnnnnnnnnnnnnnnnnnnnnnnnnnnnnnnnnnnnnnnnnnnnnnnnnnnnnnnnnnnnnnnnnnnnnnnnnnnnnnnnnnnnnnnnnnnnnnnnnnnnnnnnnngaggaaagggagtgtcacagaaggctaggagctcactgcttcctaagtagcatacggttctcttcccagatgctcagccctgcaggntgacctggccatctctgtcctctctcatggcatggctctggggacagatatcgacgagtgtgaggactacggagacccggtgtgtggcgcctggaagtgtgaaaacagccctggctcctaccgctgtgttctgggctgccagcctggcttccacatggccccgaacggagactgcattgngacatagacgagtgcaccaacgacaccatgtgtggcagccatggcttctgtgacaacactgacggctccttccgctgcctcgtgaccagg

SEQ ID NO: 25660 - DNA, 149 bp, Macaca Mulatta
ggtctgtgaccggcaaagctgagcctgccatgcccggccgcctctacgtgcacccggactctcccgccaccggggcgcattggatgaggcagctcgtctccttccagaaactcaagctcaccaacaaccacctggacccatttgggcat

SEQ ID NO: 25661 - DNA, 74 bp, Macaca Mulatta
gacaactggattgcccatcaggatgattttaaccagcttctggctgaactgaacacttgccatgggcaggaaac

SEQ ID NO: 25662 - DNA, 601 bp, Macaca Mulatta
  misc_feature (1)...(601): n = A,T,C or G
gtccgcctctccaaggaccgatccaccctgcaggtgctggacccggccacagggaactggttctctgcctgtttcgacaacttcacagcagctctggccgagacagcctgcaggcagatgggctacagcagnnnnnnnnnnnnnnnnnnnnnnnnnnnnnnnnnnnnnnnnnnnnnnnnnnnnnnnnnnnnnnnnnnnnnnnnnnnnnnnnnnnnnnnnnnnnnnnnnnnnnnnnnnnnnnnnnnnnnnnnnnnnnnnnnnnnnnnnnnnnnnnnnnnnnnnnnnnnnnnnnnnnnnnnnnnnnnnnnnnnnnnnnnnnnnnnnnnnnnnnnnnnnnnnnnnnnnnnnnnnnnnnnnnnnnnnnnnnnnnnnnnnnnnnnnnnnnnnnnnnnnnnnnnnnnnnnnnnnnnnnnnnnnnnnnnnnnnnnnnncaggaaacataccgatgtgttcaactggaaggtgcgggctggctcagacaaactgggcagtttcccatccctggctgtggccaagatcatcatcattgaattcaaccccatgtaccccaaagacaatgacatcgccctcatgaagctgcagctcccactcactttctcag

SEQ ID NO: 25663 - DNA, 4735 bp, Macaca Mulatta
  misc_feature (1)...(4735): n = A,T,C or G
agatatgcatttccccacctggaccccgccccctggagtccacagccagnnnnnnnnnnnnnnnnnnnnnnnnnnnnnnnnnnnnnnnnnnnnnnnnnnnnnnnnnnnnnnnnnnnnnnnnnnnnnnnnnnnnnnnnnnnnnnnnnnnnnnnnnnnnnnnnnnnnnnnnnnnnnnnnnnnnnnnnnnnnnnnnnnnnnnnnnnnnnnnnnnnnnnnnnnnnnnnnnnnnnnnnnnnnnnnnnnnnnnnnnnnnnnnnnnnnnnnnnnnnnnnnnnnnnnnnnnnnnnnnnnnnnnnnnnnnnnnnnnnnnnnnnnnnnnnnnnnnnnnnnnnnnnnnnnnnnnnnnnnnnnnnnnnnnnnnnnnnnnnnnnnnnnnnnnnnnnnnnnnnnnnnnnnnnnnnnnnnnnnnnnnnnnnnnnnnnnnnnnnnnnnnnnnnnnnnnnnnnnnnnnnnnnnnnnnnnnnnnnnnnnnnnnnnnnnnnnnnnnnnnnnnnnnnnnnnnnnnnnnnnnnnnnnnnnnnnnnnnnnnnnnnnnnnnnnnnnnnnnnnnnnnnnnnnnnnnnnnnnnnnnnnnnnnnnnnnnnnnnnnnnnnnnnnnnnnnnnnnnnnnnaggtgctgtgtgccatcatcgccagtgccttgcattatctctacctggcggccttcacctggatgctgctggaggccctgtacctcttcctcactgcacggaacctgatggtggtcaactactcgagcatcaacagattcacgaagaagctcatgttccctgtgggctatggagtcccagctgtgacagtggccatttctgcagcctccaggcctcacctttatggaacaccttcccnnnnnnnnnnnnnnnnnnnnnnnnnnnnnnnnnnnnnnnnnnnnnnnnnnnnnnnnnnnnnnnnnnnnnnnnnnnnnnnnnnnnnnnnnnnnnnnnnnnnnnnnnnnnnnnnnnnnnnnnnnnnnnnnnnnnnnnnnnnnnnnnnnnnnnnnnnnnnnnnnnnnnnnnnnnnnnnnnnnnnnnnnnnnnnnnnnnnnnnnnnnnnnnnnnnnnnnnnnnnnnnnnnnnnnnnnnnnnnnnnnnnnnnnnnnnnnnnnnnnnnnnnnnnnnnnnnnnnnnnnnnnnnnnnnnnnnnnnnnnnnnnnnnnnnnnnnnnnnnnnnnnnnnnnnnnnnnnnnnnnnnnnnnnnnnnnnnnnnnnnnnnnnnnnnnnnnnnnnnnnnnnnnnnnnnnnnnnnnnnnnnnnnnnnnnnnnnnnnnnnnnnnnnnnnnnnnnnnnnnnnnnnnnnnnnnnnnnnnnnnnnnnnnnnnnnnnnnnnnnnnnnnnnnnnnnnnnnnnnnnnnnnnnnnnnnnnnnnnnnnnnnnnnnnnnnnnnnnnnnnnnnnnnnnnnnnnnnnnnnnnnnnnnnnnnnnnnnnnnnnnnnnnnnnnnnnnnnnnnnnnnnnnnnnnnnnnnnnnnnnnnnnnnnnnnnnnnnnnnnnnnnnnnnnnnnnnnnnnnnnnnnnnnnnnnnnnnnnnnnnnnnnnnnnnnnnnnnnnnnnnnnnnnnnnnnnnnnnnnnnnnnnnnnnnnnnnnnnnnnnnnnnnnnnnnnnnnnnnnnnnnnnnnnnnnnnnnnnnnnnnnnnnnnnnnnnnnnnnnnnnnnnnnnnnnnnnnnnnnnnnnnnnnnnnnnnnnnnnnnnnnnnnnnnnnnnnnnnnnnnnnnnnnnnnnnnnnnnnnnnnnnnnnnnnnnnnnnnnnnnnnnnnnnnnnnnnnnnnnnnnnnnnnnnnnnnnnnnnnnnnnnnnnnnnnnnnnnnnnnnnnnnnnnnnnnnnnnnnnnnnnnnnnnnnnnnnnnnnnnnnnnnnnnnnnnnnnnnnnnnnnnnnnnnnnnnnnnnnnnnnnnnnnnnnnnnnnnnnnnnnnnnnnnnnnnnnnnnnnnnnnnnnnnnnnnnnnnnnnnnnnnnnnnnnnnnnnnnnnnnnnnnnnnnnnnnnnnnnnnnnnnnnnnnnnnnnnnnnnnnnnnnnnnnnnnnnnnnnnnnnnnnnnnnnnnnnnnnnnnnnnnnnnnnnnnnnnnnnnnnnnnnnnnnnnnnnnnnnnnnnnnnnnnnnnnnnnnnnnnnnnnnnnnnnnnnnnnnnnnnnnnnnnnnnnnnnnnnnnnnnnnnnnnnnnnnnnnnnnnnnnnnnnnnnnnnnnnnnnnnnnnnnnnnnnnnnnnnnnnnnnnnnnnnnnnnnnnnnnnnnnnnnnnnnnnnnnnnnnnnnnnnnnnnnnnnnnnnnnnnnnnnnnnnnnnnnnnnnnnnnnnnnnnnnnnnnnnnnnnnnnnnnnnnnnnnnnnnnnnnnnnnnnnnnnnnnnnnnnnnnnnnnnnnnnnnnnnnnnnnnnnnnnnnnnnnnnnnnnnnnnnnnnnnnnnnnnnnnnnnnnnnnnnnnnnnnnnnnnnnnnnnnnnnnnnnnnnnnnnnnnnnnnnnnnnnnnnnnnnnnnnnnnnnnnnnnnnnnnnnnnnnnnnnnnnnnnnnnnnnnnnnnnnnnnnnnnnnnnnnnnnnnnnnnnnnnnnnnnnnnnnnnnnnnnnnnnnnnnnnnnnnnnnnnnnnnnnnnnnnnnnnnnnnnnnnnnnnnnnnnnnnnnnnnnnnnnnnnnnnnnnnnnnnnnnnnnnnnnnnnnnnnnnnnnnnnnnnnnnnnnnnnnnnnnnnnnnnnnnnnnnnnnnnnnnnnnnnnnnnnnnnnnnnnnnnnnnnnnnnnnnnnnnnnnnnnnnnnnnnnnnnnnnnnnnnnnnnnnnnnnnnnnnnnnnnnnnnnnnnnnnnnnnnnnnnnnnnnnncaggctcagtggctcacgcctggaatccctgtgctttgggaggctgnnnnnnnnnnnnnnnnnnnnnnnnnnnnnnnnnnnnnnnnnnnnnnnnnnnnnnnnnnnnnnnnnnnnnnnnnnnnnnnnnnnnnnnnnnnnnnnnnnnnnnnnnnnnnnnnnnnnnnnnnnnnnnnnnnnnnnnnnnnnnnnnnnnnnnnnnnnnnnnnnnnnnnnnnnnnnnnnnnnnnnnnnnnnnnnnnnnnnnnnnnnnnnnnnnnnnnnnnnnnnnnnnnnnnnnnnnnnnnnnnnnnnnnnnnnnnnnnnnnnnnnnnnnnnnnnnnnnnnnnnnnnnnnnnnnnnnnnnnnnnnnnnnnnnnnnnnnnnnnnnnnnnnnnnnnnnnnnnnnnnnnnnnnnnnnnnnnnnnnnnnnnnnnnnnnnnnnnnnnnnnnnnnnnnnnnnnnnnnnnnnnnnnnnnnnnnnnnnnnnnnnnnnnnnnnnnnnnnnnnnnnnnnnnnnnnnnnnnnnnnnnnnnnnnnnnnnnnnnnnnnnnnnnnnnnnnnnnnnnnnnnnnnnnnnnnnnnnnnnnnnnnnnnnnnnnnnnnnnnnnnnnnnnnnnnnnnnnnnnnnnnnnnnnnnnnnnnnnnnnnnnnnnnnnnnnnnnnnnnnnnnnnnnnnnnnnnnnnnnnnnnnnnnnnnnnnnnnnnnnnnnnnnnnnnnnnnnnnnnnnnnnnnnnnnnnnnnnnnnnnnnnnnnnnnnnnnnnnnnnnnnnnnnnnnnnnnnnnnnnnnnnnnnnnnnnnnnnnnnnnnnnnnnnnnnnnnnnnnnnnnnnnnnnnnnnnnnnnnnnnnnnnnnnnnnnnnnnnnnnnnnnnnnnnnnnnnnnnnnnnnnnnnnnnnnnnnnnnnnnnnnnnnnnnnnnnnnnnnnnnnnnnnnnnnnnnnnnnnnnnnnnnnnnnnnnnnnnnnnnnnnnnnnnnnnnnnnnnnnnnnnnnnnnnnnnnnnnnnnnnnnnnnnnnnnnnnnnnnnnnnnnnnnnnnnnnnnnnnnnnnnnnnnnnnnnnnnnnnnnnnnnnnnnnnnnnnnnnnnnnnnnnnnnnnnnnnnnnnnnnnnnnnnnnnnnnnnnnnnnnnnnnnnnnnnnnnnnnnnnnnnnnnnnnnnnnnnnnnnnnnnnnnnnnnnnnnnnnnnnnnnnnnnnnnnnnnnnnnnnnnnnnnnnnnnnnnnnnnnnnnnnnnnnnnnnnnnnnnnnnnnnnnnnnnnnnnnnnnnnnnnnnnnnnnnnnnnnnnnnnnnnnnnnnnnnnnnnnnnnnnnnnnnnnnnnnnnnnnnnnnnnnnnnnnnnnnnnnnnnnnnnnnnnnnnnnnnnnnnnnnnnnnnnnnnnnnnnnnnnnnnnnnnnnnnnnnnnnnnnnnnnnnnnnnnnnnnnnnnnnnnnnnnnnnnnnnnnnnnnnnnnnnnnnnnnnnnnnnnnnnnnnnnnnnnnnnnnnnnnnnnnnnnnnnnnnnnnnnnnnnnnnnnnnnnnnnnnnnnnnnnnnnnnnnnnnnnnnnnnnnnnnnnnnnnnnnnnnnnnnnnnnnnnagagaccatataacatctggccttctattacatgcatgatgggtgcatgggattctgcatgccctctgcatgatagagactgctgaggtgagatggggaatgtcagagtcagctgctgcttgaggaagcagaacccacagctggaggcttggaacacgtggagccctatgagtgcagagcccatatccccatagagtctacctagggcaggggtcgccaaatgttttcttaaagagcttgatagtgtacatgttaggctttgtgggacaggtatttacagcaactcaactctaccactgtggtatgaaaacagctatagacaatcataaatgaatgatcatggctatgttttaataaaactttatggacactg

SEQ ID NO: 25664 - DNA, 412 bp, Macaca Mulatta
tgccaaaattaatcacattttacaaaaaatggtgtcatcattttaatcaaatactgtatgtccaagtgctttatgagggcgaaaatcccctagtctttatccattaatgctaaacctacatatgattctaaaatatttcttgtaccactgcatttaaaaaatagtttcaaatatactgcatcaagctagcccaaaagatttttcaagatttttcacaaatattctgttttatttttactatatgttcactagatccaggccaccatattattctataataactttaatttcagcttgtgtcattcttttgatttaaatttatgggattttattcattctagtttcacctttcacagtttaaagccatatttgaagtctggggtcttattgcaatttttagccatctttaata

SEQ ID NO: 25665 - DNA, 123 bp, Macaca Mulatta
  misc_feature (1)...(123): n = A,T,C or G
gacccagacacaggaccatgggaccccagcatttgagacttgtgcagctgttctgcnttctgggggccatctccactctgcctcgtatgtcctgtggggctggatgctataagacccagaaag

SEQ ID NO: 25666 - DNA, 195 bp, Macaca Mulatta
tcactggggaacccttgattcgtcgatcagatgataatgagaaggccttgaaaatccgcctgcaagcttaccacactcaaaccaccccgctcatagagtactacaggaaacgggggatccactccgctatcgatgcatcccagacccctgatgtcgtgttcgcaagcatcctagcagccttctccaaagccacat

SEQ ID NO: 25667 - DNA, 144 bp, Macaca Mulatta
gaccgctggcagatgaagcaggatctcggcatctggcgagaggtaggcagggaacggcacaggcggccacacttcctctgaaccgggcactttgtgtgtatggccacatgctcattccagtgggacggcggttgctcaagccat

SEQ ID NO: 25668 - DNA, 98 bp, Macaca Mulatta
aagaaagacccagcccagttcctgcaggtacatggccgagcttgcaaggtgcacctggattctgcagtcgccctggccgctgagagccctgttaatat

SEQ ID NO: 25669 - DNA, 654 bp, Macaca Mulatta
  misc_feature (1)...(654): n = A,T,C or G
tctgtgtgcacaactaaatctacagcttaggggattataaaatgtatattggtatactcttgtgtgnctgcattcctaaatcaataactctagcccccgccaaaatgaaatccagtcctttgcaacaacatgaatggaactggagatcattatattaagtgaaataatccaggcacagaaagacaaatgtcacatggtatcaattatttgggggatctaaaaatcaaatgaattgaactcatggacatagagactagagggatggttacaagaggctgggaagggtagtggggatttggaagggaagtggggatggttaatgggtacaaaaaaattagaaaggatgaataagaactactattgataatacaatagggttactataatcgataataactgaattatatatttttaaataacttaaagaatataattagattctttgtaactcaaaggaaaaatgcttgaaagcattcttcaataagcacattctccctgatgtgcttatttttcattcatgcttgtaacaaaataccttatgtatctcataaatatatacacctactatgtacccacaaaaaatttaaataatatttttaaattatttattttcataggttttgggaaaacagngtggtatttggttacatgccc

SEQ ID NO: 25670 - DNA, 764 bp, Macaca Mulatta
gggctctttccttgcctaacgcagccatggctcgtggtcccaagaagcatctgaagcgggtagcagctccaaagcattggatgctggataaattgaccggtgtgtttgctcctcgtccatccaccggtccccacaagttgagagagtgtctccccctcatcatcttcctaaggaacagacttaagtatgccctgacaggagatgaagtaaagaagatttgcatgcagcggttcattaagatcgatggcaaggtccgaactgatataacctaccctgctggattcatggatgtcatcagcattgacaagacgggagagaatttccgtctgatctatgacaccaagggtcgctttgctgtacatcggattacacctgaggaggccaagtacaagttatgcaaagtgggaaagatctttgtggggacaaaaggaatccctcatctggtgactcatgatggccgcaccatccgctagccccatcccctcgtcaaagggaatgataccatgcagattgatttggaaactgggaagaatactgatttcatgcaggtcgacacgggtaacctgggtatgggtgactggagggtggtaacctggggaagatttggggtggatcccgcccgggaagagaggatccggggaaacgttgtaaaccagggtgccccgtcagaaaggaggccgcaggggcaaacccgccttggggccaggccgaacggtttctggaacgattgttccggagaagggagcgcaacagggagcggtaaa

SEQ ID NO: 25671 - DNA, 1671 bp, Macaca Mulatta
  misc_feature (1)...(1671): n = A,T,C or G
ccactgaactctgcagccggcatccaaatcagcccttgagatttgaggcctcggagactcacaggagttttgagagtaaaatgacaacacccagaaattcagtaaatgggactttcccagcagagccaatgaaaggccctattgctatgcaacctggtccaaaaccactcctcaggaggatgtcttcactggtgggtcccacgcaaagcttcttcatgagggaatctaaggctttgggggctgtccagattatgaatgggctcttccacattgccctggggggtcttctgatgatcccagcagggatctatgcacccatctgtgtgactgtgtggtaccctctgtggggaggcattatgtatattatttccggatcactcctggcagcaacggagaaaaactccaggaagtgtttggtcaaaggaaaaatgataatgaattcattgagcctctttgctgccatttctggaatgattctttcaatcatggacatacttaatattaaaatttcccattttttaaaaatggagagtctgaattttattagagttcacacaccatatattaacatatacaactgtgaaccagctaatccctctgagaaaaactctccatctactcaatactgttacagcatacaatctctgttcctgggcattttgtcagtgatgctgatctttgccttcttccaggaacttgtaatagctggcatcgttgagaatgaatggagaagaacatgctccagacccaaatctagcgtagttctcctgtcagcnnnnnnnnnnnnnnnnnnnngtcattgaaataaaagaagaagtggttgggctaactgaaacatcttcccaaccaaagaatgaagaagacattgaaattattccaatccaagaagaggacgaaaagaaacagagacaaactttccagaacctccccaagatcaggaatcttcaccaatagaaaatgacagctctccttaaatgatttcttctattttctgtttccttttttaaacattagtgttcatagcttccaagagacacgctgactttcatttcttgaggtactctgcacatacccaccacatctctatctggcatttgcatggagtgaccatagccccttctctcttacactgaatgtagagaatgtagccattgtagcagcttgtgttgtcatgattcttcttttgagcaactttcttacattgaagaaaggcagaatgagtgcttcagaatgtgatttcctactaacctgttccttggataggctttttagtatggttgttcnnnnnnnnnnnnnnnnnnnnntttctccatcagcaaccagagagactgcacctgatggtaaagatatatgactacttcacaacattcctaaactatcttttaattatttttcccacatctatgcttttggtggagtccctttggcatcactgttttaaggatgattaaaaaaataacaactagggacaatacagaacctattccatttatctttctacagggctgacattgcggcacgttcttagagtaaccaaaccccatgagggaagctctaaatggccaacactcaatctgtatttgtaaaaacagcatagctaatacatggacatgtctctgccttaactcttcctgaatcccactctaggctattgggtgcatgtttacctac

SEQ ID NO: 25672 - DNA, 146 bp, Macaca Mulatta
catgccagtctctaagtgcccgaaaaagtcggagtccctgtggaaggggtgggaccggaaggcccagaagaacggcctgcggcgccaggtctacgctgtgaatggcgactactatgtgggcgagtggaaggacaacgtgaaacacg

SEQ ID NO: 25673 - DNA, 694 bp, Macaca Mulatta
  misc_feature (1)...(694): n = A,T,C or G
agatgaagatctccttcaatgacaaaagcctgcagaccacatttgagtacccctccgagagctccctnnnnnnnnnnnnnnnnnnnnnnnnnnnnnnnnnnnnnnnnnnnnnnnnnnnnnnnnnnnnnnnnnnnnnnnnnnnntccggctcagaggagaagccctttgcactcttcctgccccgggccacgtttgtgagcagcgtgagacccgagagctctcggctgccagagggcagctcaggncaggcctgtccagctacaccccgaagcactctgtggccttcagcaagtggcaggagcaggcactagagcaggctccgagggaggcagagcccccgcccacagaggccatggtgagctgcaggggaggggagcgcttcggggagtctgatgcctgggcgagcccatgtgtccacattctgttctctcactttcagctcacacctgccagtcagaatgacctctcggacttccgcagcgagccagccctttatttctgagcccagcactgccaggaccaaggctgagccccagctgtgggagtcccggaagctgggcagtagccagggactactgcacccacttctgccttgtctggtctcaccgtattccacccacccctcctggccttggaagcagccagggtgcctcctgccattgggaccaggtctgggtctcactccccggccctg

SEQ ID NO: 25674 - DNA, 277 bp, Macaca Mulatta
ttcttctgagaaataaagcttgttcgttctcccctgagtcatgagttggttgatttgttggggaggccgagttgatgacatgacacagaagctgccacctttagggtccctggagtcggagggttggggaggaggccagccttccacagaacggctcaccactggcccatgagggacagaaggtgtctggaaatcaatgtgcttaccaggtggggcccttggtgtgtccaggggcgttcctaggagtcccaatctgaggtgtttctctggaaacagt

SEQ ID NO: 25675 - DNA, 1318 bp, Macaca Mulatta
  misc_feature (1)...(1318): n = A,T,C or G
tactgcgagtcgccggctgctgccatggacgcctactacagcccggtgtcgcagagtcgggagggctcgtcgccttttagggcatttcccggaggcgacaagttcggcacaactttcctgtcggccgccgccaaagcacagggattcggggacgccaagaaccgggcccgttacagcgctgggcagcaggacttagcgacacccctggagagtggcgccggggcgcggggctcctttaacaagttccagccccagccgtcgnnnnnnnnnnnnnnnnnnnnnnnnnnnnnnnnnnnnnnnnnnnnnnnnnnnnnnnnnnnnnnnnnnnnnnnaccgcatctttacttgcagcgaggcgcctgcaagacgcccccggacggcagtctcaaactccaagaaggcagcagtggccacaacgcggccttgcagattccctgctacgnnnnnnnnnnnnnnnnnnnnnnnnnnnnnnnnnnnnnnnnnnnnnnnnnnnnnnnnnnnnnnnnnnnnnncctgagtgtcaggaggctggggtgaaggggccccaggaccgggccagctcagacctccccagcccactggagaaggccgactcggagagcaacaagggcaagaagcggaggaaccggaccaccttcaccagctaccagctggaggagctggagaaggtcttccagaagacccactacccagacgtgtatgcacgagaacagctggccatgaggacagacctcaccgaggcccgtgtgcaggtcnnnnnnnnnnnnnnnnnnnnnnnnnnnnnnnnnnnnnnnnnnnnnnnnnnnnnnnnnnnnnnnnnnnnnnnnnnnnnnnnnnnnnnnnnnnnnnnnnnnnnnnnnnnnnnnnnnnnnnnnncccagattcagaacccgtcctggctcggcaacaacggggctgcctcaccagtgccggcctgcgtggtcccctgcgacccggtgcctgcctgcatgtcccctcatgcccacccccctggctctggggccagcagcgtcaccgacttcctgagtgtgtctggggctggcagtcacgtgggccagacgcacatgggcagcctgtttggagcaaccagcctcagcccaggcctcaatggctacgagctcaatggcgagccggaccgcaagacctcaagcatcgcggccctctgcatgaaggccaaggagcacagtgcggccatcttcctgggccacatgacagggcacccctgccgcgtccccacctcgggacaccatgggccactgccatgttttccaggcctctagcctcgcactcaactttcctctttggaacctggactggg

SEQ ID NO: 25676 - DNA, 808 bp, Macaca Mulatta
  misc_feature (1)...(808): n = A,T,C or G
ggggattcaggggcggccggctttgttgggtgtgcttggtttggtgtccctgcggctgaccgtgattggtgattcgcagcatcttcgtaaccgctaacaggtcaaaatgcagatcttcgtgaagaccctgaccggcaagaccatcacccttgaggtggagcccagnnnnnnnnnnnnnnnnnnnnnnnnnnnnnnnnnnnnnnnnnnnnnnnnnnnnnnnnnnnnnnnnnnnnnnnnnnnnnnnnnnnnnnnnnnnnnnnnnnnnnnnnnnnnnnnnnnnnnnnnnnnnnnnnnnnnnnnnnnnnnnnnnnnnnnnnnnnnnnnnnnnnnnnnnnnnnnnnnnnnnnnnnnnnnnnnnnnnnnnnnnnnnnnnnnnnnnnnnnnnnnnnnnnnnnnnnnnnnnnnnnnnnnnnnnnnnnnnnnnnnnnnnnnnnnnnnnnnnnnnnnnnnnnnnnnnnnnnnnnnnnnnnnnnnnnnnnnnnnnnnnnnnntggccgcactcttttctgactacaacattccagaagagtcgacccctgccacctggtcttgcgcctgagaagtggtatgcagatctttcgtgaaaaccctgaccggcaagaccatcacccctgaaggtggaacccagtgaccccatcgaaaaatgtgaaaggccaagatcccaggataaagaaaggcattcccccccgaccagcaaaaggctcatctttttgcaaggccaagcaacctgggaaaaatgggcccgcccttcttttcttgaactacaaacttccgagaaaggaagttcaacccctggacccctgggtcc

SEQ ID NO: 25677 - DNA, 342 bp, Macaca Mulatta
atctggcttacaggaggttggaagctgtcctcactgtctcaggagttgtggcccccaccccatcactatatgcacccctggaaccagcaagccccagacaaggagagcgaaggaggaagtcatgggaacgcagcctccagttgtagcaggttcaccttattcctatgctggagtgcacaatgagagtactcacttctcacctgtcttgctcttagattgggctgtggctttcatcctgtgtcccctgacctgtccagatgagcgtgagggcagcattgggaagccagagtgctgcttgtgcctcccttgccagtgggctgtgttgactgctgctccccaccc

SEQ ID NO: 25678 - DNA, 1062 bp, Macaca Mulatta
  misc_feature (1)...(1062): n = A,T,C or G
gctgtttttgttctctcgctttctgtgttttgatttctttttttgttatggtttgtttcttttgttgtttatttctttttgtgtttctgtttgcttttcttgtgtttttctttgttannnnnnnnnnnnnnnnnnnnnnnnnnnnnnnnnnnnnnnnnnnnnnnnnnnnnnnnnnttgttatgagtgatgtgaggggcggagaccagagggggcagatatttcgcgtggtgtcacaccatctcttctcgtcttgcatctaagtcgagtcgatgacgcttgctacgtcctgttcggcattggtgtctgtctttattttgacctttgtccaccctgccgatctgtcacgtggcttcgacactgctgatcttaggaccgtacatttacttgtttttcccggttgttaaacgagttcttgttttaacccgtctaagattgaaggaccggttgtccagtttggagagtcagaaccaattatctatctgaaaatttacacgattgtaaactgccttgtccaggcacagtgactcacacctgtgagtacccnnnnnnnnnnnnnnnnnnnngggtgcatcacgagatcgagaccatcctggtccacatggtgaaacgccatctctacttgagtataccaaaattagctgggcgtggtggcacacgcctgtggtcccaggtannnnnnnnnnnnnnnntgnnnnnnnnnnnnncctcggcaggtggagggcgcaatgagccaagattgnnnnnnnnnnnnnnnnnnnnntnnnnnnnnnnnnnnncatgtccnnnnnnnnnnnnnnnnnnnnnnnnnnngccttgtgggaaaagatgttttatcacttagattagttaatagttaagaaccgaatacatgtgggatggctttactgtggtgggataacgtacttcagaacataagttacttggctatttctgctactatcatcggtatctggaaaaccctctggtaacacaacagagggtaagaaaaaccagtccagtattggagactgagtagaattcctattgaagatctcagttaaatcagtctatcaagcctgtcc

SEQ ID NO: 25679 - DNA, 613 bp, Macaca Mulatta
gggtaatctggtttattctttgaggatgttgggtttgtgctctaaagatgttactccctgcctgttagtctgatcaaaggagacctacaaattaaagtctcctagataagtagttctcaaactttttggtcccagaaccaaaacattaaaatttattgaggactccaaatagctatttattagtttatttcagaatcacaataaactcattacctgttaatgtaaataaaacaattttaattaactatatttttcaaataaaaaatagaagaatggtattgttttttatttttatcttttgagacagggttttactctgtctcccagcttagaatatagtgacacaatcttgccttactgcagcctcgacctcctgggttcaaaagatcctcccaactcagccttcccagtagctgggactttaggagtgcaccttgccctgcctatttttatattttgggaaaaacaaatcttgccatgttgcccaaggcggttttgaaagcctaaattaaagaatccccccccttagcctcccaaatgttgaataacgggtatgcccctctccccgccccgatttttttttttgaccccttttgggtaaaagggtttattt

SEQ ID NO: 25680 - DNA, 112 bp, Macaca Mulatta
atatacacacatataaagaaataaaaagaagtctcagttgcagctatttgtcaaaattaatatccatttctttttatatacggtgaatattgcgcaattatagatctggatt

SEQ ID NO: 25681 - DNA, 77 bp, Macaca Mulatta
ctgtgtgatgccaccagatttgactgcatttgctaaacaatttgacatacagctgttgactcacaatgatccaaaag

SEQ ID NO: 25682 - DNA, 109 bp, Macaca Mulatta
agctctgtctgacctggagcttgtggcccagtcaattatcattatttttgctgcctatgacacaactagcaccactctccccttcattatgtatgaactggccactcac

SEQ ID NO: 25683 - DNA, 3262 bp, Macaca Mulatta
  misc_feature (1)...(3262): n = A,T,C or G
tcacattcctggcatagcagccgcctccggcgcgggccgaccctgggactgcgcgctggggcgcgaacagccagagcgtcggcgccacggccgagaacacatctccgccgccgagctgagccgcgccgaccaggaggttgtggtgtctgactgcgccgggcaccctcgggccgcagcggnnnnnnnnnnnnnnnnnnnnnnnnnnnnnnnnnnnnnnnnnnnnnnnnnnnnnnnnnnnnnnnnnnnnnnnnnnnnnnnnnnnnnnnnnnnnnnnnnnnnnnnnnnnnnnnnnnnnnnnnnnnnnnnnnnnnnnnnnnnnnnnnnnnnnnnnnnnnnnnnnnnnnnnnnnnnnnnnnnnnnnnnnnnnnnnnnnnnnnnnnnnnnnnnnnnnnnnnnnnnnnnnnnnnnnnnnnnnnnnnnnnnnnnnnnnnnnnnnnnnnnnnnnnnnnnnnnnnnnnnnnnnnnnnnnnnnnnnnnnnnnnnnnnnnnnnnnnnnnnnnnnnnnnnnnnnnnnnnnnnnnnnnnnnnnnnnnnnnnnnnnnnnnnnnnnnnnnnnnnnnnnnnnnnnnnnnnnnnnnnnnnnnnnnnnnnnnnnnnnnnnnnnnnnnnnnnnnnnnnnnnnnnnnnnnnnnnnnnnnnnnnnnnnnnnnnnnnnnnnnnnnnnnnnnnnnnnnnnnnnnnnnnnnnaggcacgggcacgtgcgctccctgagtgaacggctcctgcagttgtccctggagaggaacggcgcccgggcccccatccacatgagctcctcccacagcttcccacagctggcccgcagccagcagggccccccactgaggggcccccctgctgagggcccagagtcccgaggacccccacctcagaaccctcacgttgtactagctcannnnnnnnnnnnnnnnnnnnnnnnnnnnnnnnnnnnnnnnnnnnnnnnnnnnnnnnnnnnnnnnnnnnnnnnnnnnnnnnnnnnnnnnnnnnnnnnnnnnnnnnnnnnnnnnnnnnnnnnnnnnnnnnnnnnnnnnnnnnnnnnnnnnnnnnnnnnnnnnnnnnnnnnnnnnnnnnnnnnnnnnnnnnnnnnnnnnnnnnnnnnnnnnnnnnnnnnnnnnnnnnnnnnnnnnnnnnnnnnnnnnnnnnnnnnnnnnnnnnnnnnnnnnnnnnnnnnnnnnnnnnnnnnnnnnnnnnnnnnnnnnnnnnnnnnnnnnnnnnnnnnnnnnnnnnnnnnnnnnnnnnnnnnnnnnnnnnnnnnnnnnnnnnnnnnnnnnnnnnnnnnnnnnnnnnnnnnnnnnnnnnnnnnnnnnnnnnnnnnnnnnnnnnnnnnnnnnnnnnnnnnnnnnnnnnnnnnnnnnnnnnnnnnnnnnnnnnnnnnnnnnnnnnnnnnnnnnnnnnnnnnnnnnnnnnnnnnnnnnnnnnnnnnnnnnnnnnnnnnnnnnnnnnnnnnnnnnnnnnnnnnnnnnnnnnnnnnnnnnnnnnnnnnnnnnnnnnnnnnnnnnnnnnnnnnnnnnnnnnnnnnnnnnnnnnnnnnnnnnnnnnnnnnnnnnnnnnnnnnnnnnnnnnnnnnnnnnnnnnnnnnnnnnnnnnnnnnnnnnnnnnnnnnnnnnnnnnnnnnnnnnnnnnnnnnnnnnnnnnnnnnnnnnnnnnnnnnnnnnnnnnnnnnnnnnnnnnnnnnnnnnnnnnnnnnnnnnnnnnnnnnnnnnnnnnnnnnnnnnnnnnnnnnnnnnnnnnnnnnnnnnnnnnnnnnnnnnnnnnnnnnnnnnnnnnnnnnnnnnnnnnnnnnnnnnnnnnnnnnnnnnnnnnnnnnnnnnnnnnnnnnnnnnnnnnnnnnnnnnnnnnnnnnnnnnnnnnnnnnnnnnnnnnnnnnnnnnnnnnnnnnnnnnnnnnnnnnnnnnnnnnnnnnnnnnnnnnnnnnnnnnnnnnnnnnnnnnnnnnnnnnnnnnnnnnnnnnnnnnnnnnnnnnnnnnnnnnnnnnnnnnnnnnnnnnnnnnnnnnnnnnnnnnnnnnnnnnnnnnnnnnnnnnnnnnnnnnnnnnnnnnnnnnnnnnnnnnnnnnnnnnnnnnnnnnnnnnnnnnnnnnnnnnnnnnnnnnnnnnnnnnnnnnnnnnnnnnnnnnnnnnnnnnnnnnnnnnnnnnnnnnnnnnnnnnnnnnnnnnnnnnnnnnnnnnnnnnnnnnnnnnnnnnnnnnnnnnnnnnnnnnnnnnnnnnnnnnnnnnnnnnnnnnnnnnnnnnnnnnnnnnnnnnnnnnnnnnnnnnnnnnnnnnnnnnnnnnnnnnnnnnnnnnnnnnnnnnnnnnnnnnnnnnnnnnnnnnnnnnnnnnnnnnnnnnnnnnnnnnnnnnnnnnnnnnnnnnnnnnnnnnnnnnnnnnnnnnnnnnnnnnnnnnnnnnnnnnnnnnnnnnnnnnnnnnnnnnnnnnnnnnnnnnnnnnnnnnnnnnnnnnnnnnnnnnnnnnnnnnnnnnnnnnnnnnnnnnnnnnnnnnnnnnnnnnnnnnnnnnnnnnnnnnnnnnnnnnnnnnnnnnnnnnnnnnnnnnnnnnnnnnnnnnnnnnnnnnnnnnnnnnnnnnnnnnnnnnnnnnnnnnnnnnnnnnnnnnnnnnnnnnnnnnnnnnnnnnnnnnnnnnnnnnnnnnnnnnnnnnnnntcagccatttcagcagcctgtcagccgctgctttgtccctttccccagccagactctcattcccattgaccatctggccccaggagctcaggaggaggaccccaggggagaggagaactgtgagagcaccagcacccccagaagactctgcttcttagcccacattcctcccggccttatggagaatgaggattcagccttgacttgttgcccaaggcctgctactggggtagcaactgacagctcagaaaggagctgagctccctctgccctgccagttgtcagtcaggcagggagggaggggctgtgttggtttgggggactaatttcccaggacggctgcccgtggacaccaggcagactggttcactaatcaagtcagccatattgttctctggctaagtttggttccagccaacctcatctgctcttcagttcctcactgccttcctgggatactaagacttgaatcttttggcgactattaagggtgttagtcttggagaagccacagcctcaccttctcacttgctgtgggttaggggccattaagtggactgggagacagtgtgcagtttgtatataactccctttcttgtggaacagaagactgaggcttgcag

SEQ ID NO: 25684 - DNA, 211 bp, Macaca Mulatta
aggacctgttgcgccaggagctgcgcaagctgaagcggcgcttcttggaggagcacgagtgcctttccgagcagcagctcgagcagttcctgggccgggtgaaagaggccagcaactacggcgtgtcggtgctcagcaacgcctcgggaaactggaactgggacttcacctccgcgctcttcttcgccagcaccgtgctctccaccacagg

SEQ ID NO: 25685 - DNA, 850 bp, Macaca Mulatta
  misc_feature (1)...(850): n = A,T,C or G
ggcagcgccgggccactgcagtgctacggagttggacccttgggcgacttgaactgctcgtgggagcctcttggggacctgggagccccctccgagttacactttcagagccaaaagtnnnnnnnnnnnnnnnnnnnnnnnnnnnnnnnnnnnnnnnnnnnnnnnnnnnnnnnnnnnnnnnnnnnnnnnnnnnnnnnnnnnnnnnnnnnnnnnnnnnnnnnnnnnnnnnnnnnnnnnnnnnnnnnnnnnnnnnnnnnnnnnnnnnnnnnnnnnnnnnnnnnnnnnnnnnnnnnnnnnnnnnnnnnnnnnnnnnnnnnnnnnnnnnnnnnnnnnnnnnnnnnnnnnnnnnnnnnnnnnnnnnnnnnnnnnnnnnnnnnnnnnnnnnnnnnnnnnnnnnnnnnnnnnnnnnnnnnnnnnnnnnnnnnnnnnnnnnctggaactggagctgaagaccatacccctggcccctgttgagatccaagatttggagctagccactggctaccaagtgtatggccgctgccgaatggagaaggaagaggatttgtggggcgaggggagccccattttgtccttccagacaccgcctnnnctccaaaagatgtgtgggtatcagggnnnnnnnnnnnnnnnnnnnnnnnnnnnnnnnnnnnnnnnnnnnnnnnaggccccagggccctgtgtgcaggtgagctacaaagtctggttctgggttggaggtcgtgagctgagtccggaaggagttacctgctgcggctcccttattcccagcggggcagagtgggccagagtgtccgctatcaacgccacaagctgggagcctctcaccaacctctctttggtctgcttg

SEQ ID NO: 25686 - DNA, 563 bp, Macaca Mulatta
  misc_feature (1)...(563): n = A,T,C or G
nnnnnnnnnnnnnnnnnnnnnnnnnnnnnnnnnnnnnntagttgtatataaaatttagtcgcatcgaatgtacagttttcaaatttcacatgtatattaaggaattgatgtatcctttcatatgagcattgtcaaacaaacgggaagaagaagttaaagggcagcctggcattgatggctggcggagctctgaagcctgcctctgcaggtgcagacacatccacaaaagtaaccgcagtagaaataagaatcgtcctttcatttcctgagctgacctcaggaaaggaggatgaaattagatttgcagttacattgactattttggcctgtggattcagtagggatccgtatttggtccacttcacttctataaccaaagcccctgggagctggcaggaatccttcctgttgaatgactgggtgatgaagtggatgggcacccagtccagcacatcctgggcctgcgaatttccaaaaggggccacataatctgggaagccctggccccacagcaggttcttcaccttctgggctacaagccgacacgggagagctccaatccc

SEQ ID NO: 25687 - DNA, 106 bp, Macaca Mulatta
aggatatgacatgtctacatttattaggcggtatagtagatatttaaatgaaaaagcagtttcatacagacaagttgcatttgatttcacaaaagtgaagagaggg

SEQ ID NO: 25688 - DNA, 931 bp, Macaca Mulatta
  misc_feature (1)...(931): n = A,T,C or G
ggcctgcagggaaggccggctttccctggctatggcgtccaggacagcagcccctacccgggccgctatgctggtgaggagagcctgcaggcttggggtgccccacagccaccacccccacagccgcagcccctaccagcgggggtgaccaagtatgatgagaacttgatgaaaaagacagcagtgccctccagcaggcagtatgcagagcagggcgcccaggtgccctttcggactcactccctgcacgtccagcagccaccgccgccccagcagcccctggcatatcccaagctccaaaggcagaagctgcagaacgacattgcctcccctctgcccttcccccagagtacccactttcctcagcattcccagtccttccctacctcctccacctactcctcctctgtccagggcggtgggcagggtgcccactcctataagagttgcacagcgccgactgcccagccccatgacaggtcactgaccgccagctccagcctggccccagggcagcgggtccagaatcttcacgcctatcagtcgagccgcctcagctatgacnnnnnnnnnnnnnnnnnnnnnnnnnnnnnnnnnnnnnnnnnagcccttcagagccggcaccatgcccaggaaaccctccattaccaaaaccttgccaagtatcagcactacgggcagcaaggccagggctactgccagccggacgcagctgtccggaccccggagcagtactaccagaccttcagccccagctccagccactcacccgcccgctccgtgggccgctcgccttcctacagctccacgccgtcgccactgatgccaaacctggagaactttccctacagccagcagccgctcagcacgggggccttccctgcggggatcactgaccacagccacttcatgcccctgctcaatccctccc

SEQ ID NO: 25689 - DNA, 3725 bp, Macaca Mulatta
  misc_feature (1)...(3725): n = A,T,C or G
naggagtggttcagggagccatcgggggagctggtgtcacagtcctgctcgctctttgtctctgcctcatcttcttcnnnnnnnnnnnnnnnnnnnnnnnnnnnnnnnnnnnnnnnnnnnnnnnnnnnnnnnnnnnnnnnnnnnnnnnnnnnnnnnnnnnnnnnnnnnnnnnnnnnnnnnnnnnnnnnnnnnnnnnnnnnnnnnnnnnnnnnnnnnnnnnnnnnnnnnnnnnnnnnnnnnnnnnnnnnnnnnnnnnnnnnnnnnnnnnnnnnnnnnnnnnnnnnnnnnnnnnnnnnnnnnnnnnnnnnnnnnnnnnnnnnnnnnnnnnnnnnnnnnnnnnnnnnnnnnnnnnnnnnnnnnnnnnnnnnnnnnnnnnnnnnnnnnnnnnnnnnnnnnnnnnnnnnnnnnnnnnnnnnnnnnnnnnnnnnnnnnnnnnnnnnnnnnnnnnnnnnnnnnnnnnnnnnnnnnnnnnnnnnnnnnnnnnnnnnnnnnnnnnnnnnnnnnnnnnnnntagtttcttattcactgttcccaagaggagagggtgcaccacaccatgcaagaccatatagaaaagcaccagggtcagtcaggaagcagagggagcaaggggaaaatgggaccagagcctttactgtggctttcatcgaaaataatgggtaagactagggtaagcaagctaggcaggtttaggattggctactttgaacaatttcagcagactctggggtataggagttgtgtctagttgtctggtacgtggccctgggtttattaagggggattgtggcctggagtgtaagagctcaataaaggatccagctggtagtgtgggctttagattgactggtttgcacacgaaacgtgcacttatatgcaagccctttattagctctagaaatctactatccctgggagaggtagtctctcaaggctcagcaatgccccagatgtcggaacatcaggaacacttggttgacacacctctaaatatacttctcctggttggttctctgtctcactaatggcactcttgtccccattacccaaccagagacatggccccctcctgccccagtcctccatctcttcttcctgtgccagtatgctacgatgcatgtctgagcttcctctgaacacagcttaacacaatcactccttctgagctgagatcccctgttactccttattctgctgcagcctcacctcccatttctcctctccagaacattacctccctaaaagatcatcgtcccctcattcccaagtttgaaatgcactgcttctccacactcctgaaaggttggcattccaacaacttggtctggcatttggagcaggaaaaccagagtccccttcagtgctacgctcccccaacattagccactcaatcacctcaagcagagcaagctttttcatctcagaatcattgctgagctgttccttcctcctcatatgcctagtagctacctgcccaaccccagtgcatccttcaagctctgannnnnnnnnnaatttatttaactctgactaaagtgaacaccacagtaaagttttttaacacagggtcaataagcactcattcattctgcaaatatctatataatcccatttgccagttgttctaggcccttgtgccattctgtatttttataaacatgtattttacaaatataaagtattcctcctatcaggggcttaacatctattgggaaaagggatgaaaataatgaacaaataagtagtgcaaatatacatgaaataggcatgaaataagtgctatggcagaaaatgaaatgggaggatggattggacagtcctgggggccaaagagtggcctttgggcaaacagctgcaggaagaaaatgggtacagtgtgagcagtagagaatcatcgaggaagcagcgagtaccatggctctgaggctggagcacatctgacgttttagagaaacaaagtaggacagtgtggataaggcagtgtcgggggaggggtgtggactgaacaatggcaggtaggaaatgaagttgaagagacatagaagctgcaaatattgcagggtcctaagtccatcatagttatcgatgcatttagagcagaagagtgacatgaactgacactcattttggtgggagtgactctggctgctctgcgagaaactctagtacgtagcatagaagagaagataccagaatagaggatacacggataatcaagccaagagatgactgactcagacttagtcccaagtaagaatgatgaatctggtgtggagaaattgggttccggatacgtcttgaaggtggagtcaacagtatttgcaaatgcagtgatggagtgcatgcaaggcaggagcaaagatagctcatgggctctgctcggtaagggtctcagatgtcataggtgggtcaacagatatcatagatgtcnnnnnnnnnnnnnnnnnnnnnnnnnnnnnnnnnnnnnnnnnnnnnnnnnnnnnnnnnnnnnnnnnnnnnnnnnnnnnnnnnnnnnnnnnnnnnnnnnnnnnnnnnnnnnnnnnnnnnnnnnnnnnnnnnnnnnnnnnnnnnnnnnnnnnnnnnnnnnnnnnnnnnnnnnnnnnnnnnnnnnnnnnnnnnnnnnnnnnnnnnnnnnnnnnnnnnnnnnnnnnnnnnnnnnnnnnnnnnnnnnnnnnnnnnnnnnnnnnnnnnnnnnnnnnnnnnnnnnnnnnnnnnnnnnnnnnnnnnnnnnnnnnnnnnnnnnnnnnnnnnnnnnnnnnnnnnnnnnnnnnnnnnnnnnnnnnnnnnnnnnnnnnnnnnnnnnnnnnnnnnnnnnnnnnnnnnnnnnnnnnnnnnnnnnnnnnnnnnnnnnnnnnnnnnnnnnnnnnnnnnnnnnnnnnnnnnnnnnnnnnnnnnnnnnnnnnnnnnnnnnnnnnnnnnnnnnnnnnnnnnnnnnnnnnnnnnnnnnnnnnnnnnnnnnnnnnnnnnnnnnnnnnnnnnnnnnnnnnnnnnnnnnnnnnnnnnnnnnnnnnnnnnnnnnnnnnnnnnnnnnnnnnnnnnnctagagagagttcaagagagaatgggaagagaggaggcagaatctgtgagtttaaggactcttttgagaaacactgcaccaaatctagaaacaagcaatgggcctgcaccagaaaatggttgtaccctgtagacttgccaattctccagcatctgctcctgtgtctcttgggataccatgttccctgtttgtatagagctttgcaccacttgaactaactacattcccatagctccacctaccacaccgtgagctccacaaggaaaaggctgagttttatcagacctccatcattctactctctcctgttcagctgcacactgtcacaatttgcaattaccagtctgtttctgtcttcatcccctgcagtactggaaatcacagggctcctgctctgctttgctccctcctgaggatccagttcccagcacagaggaggtcccagagacctgggactgagttcagggtcaacagatgtgtgactttggaaattacctaagctctctgagagctagtttcctggtctgtaaaatggacaaaataatagatgccaaagatgatgtcagtgtagctggccataatttttccacattagtctctgtgaatattgaagaagattgggaatcaatcaatacatgctacatgtgttaggtaacgaataagtaaagccttaattaataaacat

SEQ ID NO: 25690 - DNA, 112 bp, Macaca Mulatta
agggctacttccggctacaccgaggcagcaatacctgcggcatcaccaggttcccgctcactgcccgtgtgcagaaaccggatgtgaagccccgagtctcctgccctccctg

SEQ ID NO: 25691 - DNA, 127 bp, Macaca Mulatta
caagtgggtcttgtgttgccagcttctatttggaaattgcctttgcactcagtctaagtttctgtcagcagtagtttcacccatttgcatggaaaaatttaaagctaataaagcaatttaaaaagca

SEQ ID NO: 25692 - DNA, 1072 bp, Macaca Mulatta
  misc_feature (1)...(1072): n = A,T,C or G
gggcttttttttcctgcactccatcatggcgcaggatcaaggtgaaaaggagaaccccatgcgggaacttcgcatccgcaagctctgtctcaacatctgtgttggggagagtggagacagactgacccgagctgccaaggttttggagcagctcacagggcagacccctgtgttttccaaagctagatacactgtcaggtcctttggcatccggagaaatgaaaaagattgctgtccactgcacagttcgaggggccaaggcagaagaaatcttggagaagggtctaaaggtgcgggagtatgagttaagaaaaaacaacttctcagatactggaaactttggtttttgggatccaggaacacatcgatctggggccataaagtattgacccaatcattgggtaatctacggggttggaacttactatgtggtgcctgggttgtgcctaggtttttcagcgtccgcataactaaaaaaccgccaaagacaagggcctgcctttcgggagtcacaaacaacaagaaatccaacccaataaaagggaaggcaccatgccagacttgggatttaccgagccctgcaagtgtaattacaatggggggaatacccatctaccaattccctccggaggcacgtaaacataaaaactttaccccccagatatgttccgttattacacctaaagatatcatcgctctttatacaatacaaaacggctttttttaccagtctaggtacaatgtgtgcgataagtgatctatgtgaaatacgtgtccgatctctgcaatagtcagntaattattatatagaccctaatgtgttcgcagtgcactatactacttgtcggattgctcatcttagtgtagcgatagcctttctttcttatagagacaatccataaccatctctttagtggtgattgacaccgcaggagtgccatctccccgtctatggggatcttattctctacaactatgtgcgtgttcaatatcaaaacagggttatcattcctacacgtaggcagaaaattatacccgcgggagtacatgtactgatactaaaaatggcgat

SEQ ID NO: 25693 - DNA, 337 bp, Macaca Mulatta
  misc_feature (1)...(337): n = A,T,C or G
atgcctttgacaatgaactcattctcaaaacactcaaagaaatcactgaagggaaaacagtccagatccccgtgtatgacttcgtctcccattcccggnnnnnnnnnnnnnnnnnnnnnnnnnnnnnnnnnnnnnnnnnnnnnnnnnnnnnnnnnnnnnnnnnnnnnnnnnnnnnnnnnnnnnnnnnnnnnnnnnnnnnnnnnnnnnnnnnnnnnnnnnnnnnnnnnnnnnnnnnnnngtattaagggacatcagcgagagaggcagggatcttgaacagattttatctcagtacattacattcgtcaagcctgcctttgaggaattctgcttgcca

SEQ ID NO: 25694 - DNA, 802 bp, Macaca Mulatta
  misc_feature (1)...(802): n = A,T,C or G
ggggcagttcggcggtcccgcgggtctgtctcttgcttcaacagtgtttggacggaacagatccggggactctttcttccagcctccgagcgccctccgatttcctctccacttgcaacctccgggaccatcttctcggccatctcctgcttctgggacctgccagcaccgtttttgtggttagctccgtcttgccgaccaaccatgagctcccagattcgtcagaattattccaccgacgtggaggcagccgtcaacagcctgggcaagatgtacctgcaggcctcctacacctacctctctctgggcttctatttggacggggatgatgtggctctgganagcgtgaggcagttcttccgcgagttggccgaggaaaaacgcgagggctacgagcgtctcctgaagatgcaagaccggcgtgggggggcggcctgctgttggaggacgtgggagaaaccagccggaagaagaaggggggggaagaggcccggaaggccggggaagagccgccatcgagccagnnnnnnnnnnnnnnnnnnnnncagggcgcgaaaagcggaacctcgataaccggcaggggacaagaaaggagcggaagcggcggaggaaaagggcaaagagccaggaaaagcacacgtggccagggatggaaggaaggagaaccgccgagggggaggagaaggcggggaacaacggggcggcagaacaggaccaggaagggatgcaggaacgcgcgggagaaaggcagacgcaagaagcagaagaccaaaagcgagagcgaaggaagaaacgagaagag

SEQ ID NO: 25695 - DNA, 739 bp, Macaca Mulatta
tcccaaacatcttccctgcatccccctgaccctcccacacagcttggctcttgcccctgacaggatactgagccaagccctgcctgtggccaggccctgagtggccactgccaagctgtggggaagggtcctgagcaggggcatctgggaggctccggctgccttctgcatttatttgccttttttctttttctcttgcttctaaggggtggtggccaccactgtttagaatgacccttgggaacagtgaacgtagagaattgtttttagcggagtttgtgaccaaagtcagagtggatcatggtggtttggcagcagggaagttgtcttgtcggagcctgctctgtgctccccactccatttctctgtccctctgcctgggctatgggaagtggggatgcggatggtcaagcttccaccctgggtattcgaaaacagcagacacaacatgttcctccacatggctcactcaatgcctgccggccccagtgtgtgcctcaactgattctgacttcaggaaacgtaacacagagtggccttggcctgttgtcttcccctattttctgtcccagctcatccatgtccctgaagaacaaatatgcttttggaccacgaattcccagtttggtctacacaggctcgcagctctgacctgccctgctatagcctgaatgctcccatgtgggaatagcactctgccgcctgcccggtatctgcctctgctgtgtgtctggtgtga

SEQ ID NO: 25696 - DNA, 383 bp, Macaca Mulatta
aaaccaagtctgcccagttcccttcccaatcctacaaaggagccttcctcccagaacctgtggtccctgattctggagggggaagttcttgcttctcattttgctaaggaagtttatttcagtgaagttgttcccattttgagccccaggacttttattttgatgacgtgtcacccccacattggcacctcctactacccccacacaaacttagttcatatgctcttacttgggcaagggtgctttccttccaataccccaattgcttttattttagtaaagggaccctttcccctagcctagggtcccatattgggtcaagctgcttacctgcctcagcccaggagtccttattctgggggaggtaatgccctgctgttacc

SEQ ID NO: 25697 - DNA, 2943 bp, Macaca Mulatta
  misc_feature (1)...(2943): n = A,T,C or G
ggtgaaaaccaagacagctgccaaatatggcctttctgcccagccccggctggtggatatcattgctgccgtccctcctcaatatcgcaaggtcttgattcccaagttaaaggcgaaacccatcagaactgccagtggnnnnnnnnnnnnnnnnnnnnnnnnnnnnnnnnnnnnnnnnnnnnnnnnnnnnnnnnnnnnnnnnnnnnnnnnnnnnnnnnnnnnnnnnnnnnnnnnnnnnnnnnnnnnnnnnnnnnnnnnnnnnnnnnnnnnnnnnnnnnnnnnnnnnnnnnnnnnnnnnnnnnnnnnnnnnnnnnnnnnnnnnnnnnnnnnnnnnnnnnnnnnnnnnnnnnnnnnnnnnnnnnnnnnnnnnnnnnnnnnnnnnnnnnnnnnnnnnnnnnnnnnnnnnnnnnnnnnnnnnnnnnnnnnnnnnnnnnnnnnnnnnnnnnnnnnnnnnnnnnnnnnnnnnnnnnnnnnnnnnnnnnnnnnnnnnnnnnnnnnnnnnnnnnnnnnnnnnnnnnnnnnnnnnnnnnnnnnnnnnnnnnnnnnnnnnnnnnnnnnnnnnnnnnnnnnnnnnnnnnnnnnnnnnnnnnnnnnnnnnnnnnnnnnnnnnnnnnnnnnnnnnnnnnnnnnnnnnnnnnnnnnnnnnnnnnnnnnnnnnnnnnnnnnnnnnnnnnnnnnnnnnnnnnnnnnnnnnnnnnnnnnnnnnnnnnnnnnnnnnnnnnnnnnnnnnnnnnnnnnnnnnnnnnnnnnnnnnnnnnnnnnnnnnnnnnnnnnnnnnnnnnnnnnnnnnnnnnnnnnnnnnnnnnnnnnnnnnnnnnnnnnnnnnnnnnnnnnnnnnnnnnnnnnnnnnnnnnnnnnnnnnnnnnnnnnnnnnnnnnnnnnnnnnnnnnnnnnnnnnnnnnnnnnnnnnnnnnnnnnnnnnnnnnnnnnnnnnnnnnnnnnnnnnnnnnnnnnnnnnnnnnnnnnnnnnnnnnnnnnnnnnnnnnnnnnnnnnnnnnnnnnnnnnnnnnnnnnnnnnnnnnnnnnnnnnnnnnnnnnnnnnnnnnnnnnnnnnnnnnnnnnnnnnnnnnnnnnnnnnnnnnnnnnnnnnnnnnnnnnnnnnnnnnnnnnnnnnnnnnnnnnnnnnnnnnnnnnnnnnnnnnnnnnnnnnnnnnnnnnnnnnnnnnnnnnnnnnnnnnnnnnnnnnnnnnnnnnnnnnnnnnnnnnnnnnnnnnnnnnnnnnnnnnnnnnnnnnnnnnnnnnnnnnnnnnnnnnnnnnnnnnnnnnnnnnnnnnnnnnnnnnnnnnnnnnnnnnnnnnnnnnnnnnnnnnnnnnnnnnnnnnnnnnnnnnnnnnnnnnnnnnnnnnnnnnnnnnnnnnnnnnnnnnnnnnnnnnnnnnnnnnnnnnnnnnnnnnnnnnnnnnnnnnnnnnnnnnnnnnnnnnnnnnnnnnnnnnnnnnnnnnnnaggggtcggcaccaggaattattatagaaagatcggctacagattacaaggcccgtacatggtgaagatgctgaaataatggccacaccagtccacctttctgcagtatcctccctggcagaacatgaagaatcaagatttcttaaatactcaacagagaggctgagcagagcaaataggggacttcaccctcatcccgcagctgcagagaccttcaaggccacggctggtcatctgctgaccacaccccagatccgtcctctcctgtgtgcacccnnnnnnnnnnnnnnnnnnnnnnnnnnnnnnnnnnnnnnnnnnnnnnnnnnnnnnnnnnnnnnnnnnnnnnnnnnnnnnnnnnnnnnnnnnnnnnnnnnnnnnnnnnnnnnnnnnnnnnnnnnnnnnnnnnnnnnnnnnnnnnnnnnnnnnnnnnnnnnnnnnnnnnnnnnnnnnnnnnnnnnnnnnnnnnnnnnnnnnnnnnnnnnnnnnnnnnnnnnnnnnnnnnnnnnnnnnnnnnnnnnnnnnnnnnnnnnnnnnnnnnnnnnnnnnnnnnnnnnnnnnnnnnnnnnnnnnnnnnnnnnnnnnnnnnnnnnnnnnnnnnnnnnnnnnnnnnnnnnnnnnnnnnnnnnnnnnnnnnnnnnnnnnnnnnnnnnnnnnnnnnnnnnnnnnnnnnnnnnnnnnnnnnnnnnnnnnnnnnnnnnnnnnnnnnnnnnnnnnnnnnnnnnnnnnnnnnnnnnnnnnnnnnnnnnnnnnnnnnnnnnnnnnnnnnnnnnnnnnnnnnnnnnnnnnnnnnnnnnnnnnnnnnnnnnnnnnnnnnnnnnnnnnnnnnnnnnnnnnnnnnnnnnnnnnnnnnnnnnnnnnnnnnnnnnnnnnnnnnnnnnnnnnnnnnnnnnnnnnnnnnnnnnnnnnnnnnnnnnnnnnnnnnnnnnnnnnnnnnnnnnnnnnnnnnnnnnnnnnnnnnnnnnnnnnnnnnnnnnnnnnnnnnnnnnnnnnnnnnnnnnnnnnnnnnnnnnnnnnnnnnnnnnnnnnnnnnnnnnnnnnnnnnnnnnnnnnnnnnnnnnnnnnnnnnnnnnnnnnnnnnnnnnnnnnnnnnnnnnnnnnnnnnnnnnnnnnnnnnnnnnnnnnnnnnnnnnnnnnnnnnnnnnnnnnnnnnnnnnnnnnnnnnnnnnnnnnnnnnnnnnnnnnnnnnnnnnnnnnnnnnnnnnnnnnnnnnnnnnnnnnnnnnnnnnnnnnnnnnnnnnnnnnnnnnnnnnnnnnnnnnnnnnnnnnnnnnnnnnnnnnnnnaacaatggaaaacaggattggcttcttcaaaggctcctcttgtagaactacctttttgagatttcgaggtaatctactttggagactgcctggagagggtcagttcctaagttaagagcattgcttaaccttggctcctgtggcattttacaaaggtttaaaggaattgattcctctgaaagggcctgaaaataaaaagtccttaacatacaaagaag

SEQ ID NO: 25698 - DNA, 423 bp, Macaca Mulatta
gagtcaactctcattaaacatcagagaagtcacacaggagataaaaacctatgattatacttgaaagtgggataattatactagtagttatttgtcatttgactattactaatatcattatttgtcaaataatcatggggagtaatcttataaatgtctagaatattggaaattcttcatatgttaatgttcatttaacttaataaaaggtacaaaagtataattccagaggtgtcaataaatgtgatcagttttttcacccagaattcttcacccaggagtgaagaactatacgtcaaataattcaaaaggggcaaaactgagtgtagttatgtgggaaagccttcagaaataatttaaatggcactgtttatcagagtatttatgctgagaaaaactaagaaatgagtgagcttataaaac

SEQ ID NO: 25699 - DNA, 175 bp, Macaca Mulatta
aggctgtgtgctgtgaggaccatatacactgctgtcccgcggggtttacgtgtgacacgcagaagggtacctgtgaacagggaacttaccaggtgtcctggatggagaagaccctagctcacctcagcctgccagacccgcaagccttgaagagagatgtcccctgtgataatgt

SEQ ID NO: 25700 - DNA, 758 bp, Macaca Mulatta
tcgctatcttgttgccacgaaagatattctcccaggagagctcctggtgaaggaggatgcttttgtgagtgttctcaaccctggagaactgccaccaccgcatcatggcctagacagccagtgggacaccagagtcaccaatggggacctctattgtcaccgatgtttgaagcacactttggccacagttccgtgtgacggatgcagttatgccaagtattgcagccaggagtgtttgcagcaggcctgggagctctaccacaggacagaatgtcctctgggggggctgcttctcacactgggtgtcttttgccacattgccctgaggttgactcttgtggtgggagttgaggatgttcgcaaaatcatgaagaagctttgtgttaagattagtaacaaggacatctgtttaccagaaagcgacaatcaggtcaagacacttaattatggccgaggagagagtgagaaaaatggcaatgtggttgagaccccgattcctggatgcgatgctaatgggaagtatgacagtaattatgatgctgtcttcaaccttttgccccatactgaaaaccacagcccggagcacaaattcctctgtgctctctgtgtttctgtactgtgcaggcagctagaagcagccagtttacaggccatcccaacaggtgtgaactcctctcagctcacagcagcagtgacacctgagtcgtgtcccgacgtgactataaggggagtggcaatgctgaggcacatgttacagc

SEQ ID NO: 25701 - DNA, 700 bp, Macaca Mulatta
cccccgaggggctgcctgccttcacagcggggtgatgctgctgaacctggaggccatgcgccagtccccactctacagccgcctgctggagccggcccaggtgcagcagctggccgacaagtaccacttccgcggccacctcggggaccaggacttcttcaccatgattggcatggagcaccccaggctcttccatgtgctggactgtacctggaaccggcagctgtgcacctggtggagggaccatggctacagtgacgtcttcgaggcctatttccggtgtgaaggccacgtcaagatctaccacgggaactgcaacactcccatcccggaggactaggcgcacccccgccttgcccccggggcctccagatctggggggaggacagggctccagacagacctgagagcagtgtctgacccgctagagagacactgcaggggcgtcctgtgattaaggtgctgagacctcctgccgggcaggtcactgtgctaaggccacccgccgaggactggcctgtgcactgctggtgcttggggccttattccttcagggagcaggtgacatgaaggacacgcatgggcatcttccggtgggctaggaagcaagcgcttgaagagaaggaaggggagaagggggcccccttgctgtccgcctctaggaatggaaatcctttaagacctggcctcttctggacca

SEQ ID NO: 25702 - DNA, 815 bp, Macaca Mulatta
cttgcctgtctaagagtctatgtgtatggggagataaagtactgttgaatatgaaacactatctttcactatgggaatttgtgtttacccccttttctcccatgctctgctttcttttattttcttactaggcctatctccactaactctggaccctaaaacagctcacccaaatctggtgctctccaaaaaccaaaccagcgtctggcatggtgacattaagaaggtaatgcctgatgatccagagaggtttgactcaagtgtggctgtgctgggctcaagaggcttcacctctggaaagtggtactgggaagtagaagtagcaaagaagacaaaatggacagttggagtcgtcagagaatccatcattcggaaaggcagctgtcctctaactcctgagcaaggattctggcttttaagactaaggaaccaaactgatctaaaggctctggatttgccttcttgcagtctgacactgactaacaacctcgacaaagtgggcatatacctggattatgaaggagggcaggtgtccttctacaatgctaaaaccatgactcacatttataccttcagtaacactttcatagagaaactttatccctacttctgcccctgccttaatgatggcggagagaataaagagccattgcacatcttacatccacagtaatgagtcatactattatacaaactcagagtgttattaaagaggtattgaaatattttaccagtctcactgtctcactggattctaagctcaatttacggggaacgatggaataatgaaaagaggatgcacaaatcaaattcca

SEQ ID NO: 25703 - DNA, 483 bp, Macaca Mulatta
  misc_feature (1)...(483): n = A,T,C or G
ggtaaagttaacaaatgccgaaggaaaagacttctgtggtggtgttataatacaggaaaactttgtactgacaacagcaagatgctcactgttacacaggaatatcagtgtaaaaacatnattttaacagaacgagccaagacccactgatgatcaagataatgcgtgcccatgtgcacatgtggtatgacgcggacacgggggagaatgacctgtcactgctggagctggagtggcccatccagtgcccagatgcggggctccccgtgtgcacccctgagaacgacttcgctgagcacctcctcatcccacgcactgggggcctcctcagcggctgggcacgcaatggcactgacctgggcaactcgctaaccacgctgcctgtcacacttgtggagggggaggagtgcgggcaggtcctgaatgtgaccgtcaccaccaggacctattgtgagagaagcagtgtggcggccgtgcactgga

SEQ ID NO: 25704 - DNA, 438 bp, Macaca Mulatta
catatagacaacagccctgctacaaagatggtcaacgtgcctaaaacccgaagaaccttctgtaagaagtgtggcaagcatcagcctcacaaagtgacacagtataagaagggcaaggattctttgtatgcccagggaaagaggcgctatgatcggaagcagagtggctatggtgggcagacaaagccaattttccggaagaaggctaagaccacaaagaagattgtgctaaggctggaatgtgttgagcctaactgcagatccaagaggatgctggccattaagagatgcaagcattttgaactgggaggagataagaagagaaagggccaagtgatccagttctaaactttgggatatttttcttctgattttgaagagaaaatgttgaagccataggaaaattacctgagggaaaataaatagtgatattcttac

SEQ ID NO: 25705 - DNA, 834 bp, Macaca Mulatta
  misc_feature (1)...(834): n = A,T,C or G
ggtagatgcccttctatgtcctggggcccaaatcagtcctgggtgggaagttcccagggcagtggccacatcatgagaattagcaggaaaggcggggcctttctcatcatagctgtttctgaggatgaaatgggagacatatgcccagcacctgatgtaaatttatgtcatgtaatactatgtacctaccactaagaaatacatgagccacgccatgtggacagtaagtgttcataaagcaacgtgaagcaagaaacagtgcagggtgcccagtgcacacactagagagaaattgtggacattaagcacaagcagaattgttgtttttctaaaacataattatttaaaaacatgtatccacttactaatgtggaattacacagtttgtaacaagaaaacagtctccccattctctagtacagctcccctacccagcagtcacttctagttcgttcagctatttttaaaatgtgcttatgtgactcttgcttgatagatgaatcttaggcattacctgttgactccctgttgtcatacatgaggctttagctctcttttgtcagcacccctcccccatccctagttattaaggtaaaaaatacttcgattactattttccattacaatgtggaaagtttattaactggcggagccaaaaatttgggactataatttaaattacccttccccccnnnnncctaataaaaaccaaaaaaaggaataaaaatgttggggcccgcccccggggcccctctgaggaaggcttttcctaaaaacaatttacttttgggggcggccggggggcccccggtaagggtaaaagtggaaaaccag

SEQ ID NO: 25706 - DNA, 716 bp, Macaca Mulatta
tggaatctcagggagctcctcttacttaaatgcccagttcactgtgataattgaaaattaaaacttaatttaaagctttaatttctgccttttctgggtgtagatttttgaattggggagccttcattggtagcaatgaaggttgacttatgtattagctctttcagcaaacacttttctctctacttatttcagtgactggtccttcaagcattacactgtggggggagggataggtggagggaacgtctttcttgattgtcactgtcatgttctggcaatagtgctttcagatgttgcacactgagtctttctcatgcagggagctttcctggctgctgaaataattccttacttggagcttctaccacatttcttgtgatatggttgaatctgcctctagctgacagcttgtaaattttcctcttaattctgaggtttcaacattcatctgggtcccatgttttccaaagttcttattggacaaaatgttatttttaagtgattctccaatgagaatttctcctaaatggtcaataagtgatccaaaagaaaattttgacaatccttgctacccatagtcagttgaagttcagatatctttctctgtgtactggtatttcaggccaataactgcagatttctacatttagatttctcaggtgagctcagataccaatcaactgtgttcctttgtctccaacagatatatatca

SEQ ID NO: 25707 - DNA, 210 bp, Macaca Mulatta
ggcctggccaccacccccttcttcccttccagtcctgacggatgagcagaagtccccattccaggccatgaagcccatgaccaaggaggagtgggatgcccggcagagcataatgcgcaaggtggtggaccccgagacggggcgcaccaggtggggagccctcggcctgacttacaccgcggggtctgggagtgttggccgaagatgtga

SEQ ID NO: 25708 - DNA, 7333 bp, Macaca Mulatta
  misc_feature (1)...(7333): n = A,T,C or G
aggtctctgataaaaatgcacttttcaatttaatgtttaatgatcttgataaacatccannnnnnnnnnnnnnnnnnnnnnnnnnnnnnnnnnnnnnnnnnnnnnnnnnnnnnnnnnnnnnnnnnnnnnnnnnnnnnnnnnnnnnnnnnnnnnnnnnnnnnnnnnnnnnnnnnnnnnnnnnnnnnnnnnnnnnnnnnnnnnnnnnnnnnnnnnnnnnnnnnnnnnnnnnnnnnnnnnnnnnnnnnnnnnnnnnnnnnnnnnnnnnnnnnnnnnnnnnnnnnnnnnnnnnnnnnnnnnnnnnnnnnnnnnnnnnnnnnnnnnnnnnnnnnnnnnnnnnnnnnnnnnnnnnnnnnnnnnnnnnnnnnnnnnnnnnnnnnnnnnnnnnnnnnnnnnnnnnnnnnnnnnnnnnnnnnnnnnnnnnnnnnnnnnnnnnnnnnnnnnnnnnnnnnnnnnnnnnnnnnnnnnnnnnnnnnnnnnnnnnnnnnnnnnnnnnnnnnnnnnnnnnnnnnnnnnnnnnnnnnnnnnnnnnnnnnnnnnnnnnnnnnnnnnnnnnnnnnnnnnnnnnnnnnnnnnnnnnnnnnnnnnnnnnnnnnnnnnnnnnnnnnnnnnnnnnnnnnnnnnnnnnnnnnnnnnnnnnnnnnnnnnnnnnnnnngctatttctaccaagctttctgtcatatattgcgaattgcttcctaattgatgatgctgtnnnnnnnnnnnnnnnnnnnnnnnnnnnnnnnnnnnnnttctgaacaaagcggtacctcccactgctggctcgatggcaattgaaaagtaccctctgactttctcaccgcagatggtgggnnnnnnnnnnnnnnnnnnnnnnnnnnnnnnnnnnnnnnnnnnnnnnnnnnnnnnnnnnnnnnnnnnnnnnnnnnnnnnnnnnnnnnnnnnnnnnnnnnnnnnnnnnnnnnnnnnnnnnnnnnnnnnnnnnnnnnnnnnnnnnnnnnnnnnnnnnnnnnnnnnnnnnnnnnnnnnnnnnnnnnnnnnnnnnnnnnnnnnnnnnnnnnnnnnnnnnnnnnnnnnnnnnnnnnnnnnnnnnnnnnnnnnnnnnnnnnnnnnnnnnnnnnnnnnnnnnnnnnnnnnnnnnnnnnnnnnnnnnnnnnnnnnnnnnnnnnnnnnnnnnnnnnnnnnnnnnnnnnnnnnnnnnnnnnnnnnnnnnnnnnnnnnnnnnnnnnnnnnnnnnnnnnnnnnnnnnnnnnnnnnnnnnnnnnnnnnnnnnnnnnnnnnnnnnnnnnnnnnnnnnnnnnnnnnnnnnnnnnnnnnnnnnnnnnnnnnnnnnnnnnnnnnnnnnnnnnnnnnnnnnnnnnnnnnnnnnnnnnnnnnnnnnnnnnnnnnnnnnnnnnnnnnnnnnnnnnnnnnnnnnnnnnnnnnnnnnnnnnnnnnnnnnnnnnnnnnnnnnnnnnnnnnnnnnnnnnnnnnnnnnnnnnnnnnnnnnnnnnnnnnnnnnnnnnnnnnnnnnnnnnnnnnnnnnnnnnnnnnnnnnnnnnnnnnnnnnnnnnnnnnnnnnnnnnnnnnnnnnnnnnnnnnnnnnnnnnnnnnnnnnnnnnnnnnnnnnnnnnnnnnnnnnnnnnnnnnnnnnnnnnnnnnnnnnnnnnnnnnnnnnnnnnnnnnnnnnnnnnnnnnnnnnnnnnnnnnnnnnnnnnnnnnnnnnnnnnnnnnnnnnnnnnnnnnnnnnnnnnnngagaaagaactacagaatgatatgacagatgagaagtccattggagatgaaagttgggagcagacccaggaaggagatgttggagctctttatcatgagcagttagcattgaaaactgactgtcgggaaagacttgaccacaccaacttcagattcctgctctggagagctctgacaaaattcccagaaagagtagagccacggtccagggagctttccccgcttttcttgagatttatcannnnnnnnnnnnnnnnnnnnnnnnnnnnnnnnnnnnnnnnnnnnnnnnnnnnnnnnnnnnnnnnnnnnnnnnnnnnnnnnnnnnnnnnnnnnnnnnnnnnnnnnnnnnnnnnnnnnnnnnnnnnnnnnnnnnnnnnnnnnnnnnnnnnnnnnnnnnnnnnnnnnnnnnnnnnnnnnnnnnnnnnnnnnnnnnnnnnnnnnnnnnnnnnnnnnnnnnnnnnnnnnnnnnnnnnnnnnnnnnnnnnnnnnnnnnnnnnnnnnnnnnnnnnnnnnnnnnnnnnnnnnnnnnnnnnnnnnnnnnnnnnnnnnnnnnnnnnnnnnnnnnnnnnnnnnnnnnnnnnnnnnnnnnnnnnnnnnnnnnnnnnnnnnnnnnnnnnnnnnnnnnnnnnnnnnnnnnnnnnnnnnnnnnnnnnnnnnnnnnnnnnnnnnnnnnnnnnnnnnnnnnnnnnnnnnnnnnnnnnnnnnnnnnnnnnnnnnnnnnnnnnnnnnnnnnnnnnnnnnnnnnnnnnnnnnnnnnnnnnnnnnnnnnnnnnnnnnnnnnnnnnnnnnnnnnnnnnnnnnnnnnnnnnnnnnnnnnnnnnnnnnnnnnnnnnnnnnnnnnnnnnnnnnnnnnnnnnnnnnnnnnnnnnnnnnnnnnnnnnnnnnnnnnnnnnnnnnnnnnnnnnnnnnnnnnnnnnnnnnnnnnnnnnnnnnnnnnnnnnnnnnnnnnnnnnnnnnnnnnnnnnnnnnnnnnnnnnnnnnnnnnnnnnnnnnnnnnnnnnnnnnnnnnnnnnnnnnnnnnnnnnnnnnnnnnnnnnnnnnnnnnnnnnnnnnnnnnnnnnnnnnnnnnnnnnnnnnnnnnnnnnnnnnnnnnnnnnnnnnnnnnnnnnnnnnnnnnnnnnnnnnnnnnnnnnnnnnnnnnnnnnnnnnnnnnnnnnnnnnnnnnnnnnnnnnnnnnnnnnnnnnnnnnnnnnnnnnnnnnnnnnnnnnnnnnnnnnnnnnnnnnnnnnnnnnnnnnnnnnnnnnnnnagatcagcaggcttggatctgagagtcaatattctcctactcctctgctgaaactgatcagtatctggagcagaaacgcaagnnnnnnnnnnnnnnnnnnnnnnnnnnnnnnnnnnnnnnnnnnnnnnnnnnnnnnnnnnnnnnnnnnnnnnnnnnnnnnnnnnnnnnnnnnnnnnnnnnnnnnnnnnnnnnnnnnnnnnnnnnnnnnnnnnnnnnnnnnnnnnnnnnnnnnnnnnnnnnnnnnnnnnnnnnnnnnnnnnnnnnnnnnnnnnnnnnnnnnnnnnnnnnnnnnnnnnnnnnnnnnnnnnnnnnnnnnnnnnnnnnnnnnnnnnnnnnnnnnnnnnnnnnnnnnnnnnnnnnnnnnnnnnnnnnnnnnnnnnnnnnnnnnnnnnnnnnnnnnnnnnnnnnnnnnnnnnnnnnnnnnnnnnnnnnnnnnnnnnnnnnnnnnnnnnnnatcagcaagtttatgaaagacaaagaacaaagttctctactcattacgcttctccttccattcctccaccgtggcaatattgctgaggnnnnnnnnnnnnnnnnnnnnnnnnnnnnnnnnnnnnnnnnnnnnnnnnnnnnnnnnnnnnnnnnnnnnnnnnnnnnnnnnnnnnnnnnnnnnnnnnnnnnnnnnnnnnnnnnnnnnnnnnnnnnnnnnnnnnnnnnnnnnnnnctctttctgattttgagagtgggttaaaatatattactgatgttgtcaagnagcttaacgccttcgatcaaagacatcttgatgatatcaactttgaccttcgctttgagactttccagacgatcacctcttatattaaagaaatgctaattgtggatgttaactacctaattccagttatgcataattgtttctataatctagaggtaggnnnnnnnnnnnnnnnnnnnnnnnnnnnnnnnnnnnnnnnnnnnnnnnnnnnnnnnnnnnnnnnnnnnnnnnnnnnnnnnnnnnnnnnnnnnnnnnnnnnnnnnnnnnnnnnnnnnnnnnnnnnnnnnnnnnnnnnnnnnnnnnnnnnnnagagtattcaacaggattataccacgatactttcctgtttaattcaaacctttccaaaccaactggaattcaaagacttggtacagcttactcattcccatgatccagaaatggacttctttgagaacatgaagcacattcanagatccacagaagagcaagagccttgaagaaacttgcaaaacaactaatggaaggcaaagttgttctgtcttctaaatctcttcagaattacatcatgccttatgccatgactccaatttttgatgagaaaatgctcaannnnnnnnnnnnnnnnnnnnnnnnnnnnnnnnnnnnnnnnnnnnnnnnnnnnnnnnnnnnnnnnnnnnnnnnnnnnnnnnnnnnnnnnnnnnnnnnnnnnnnnnnnnnnnnnnnnnnnnnnnnnnnnnnnnnnnnnnnnnnnnnnnnnnnnnnnnnnnnnnnnnnnnnnnnnnnnnnnnnnnnnnnnnnnnnnnnnnnnnnnnnnnnnnnnnnnnnnnnnnnnnnnnnnnnnnnnnnnnnnnnnnnnnnnnnnnnnnnnnnnnnnnnnnnnnnnnnnnnnnnnnnnnnnnnnnnnnnnnnnnnnnnnnnnnnnnnnnnnnnnnnnnnnnnnnnnnnnnnnnnnnnnnnnnnnnnnnnnnnnnnnnnnnnnnnnnnnnnnnnnnnnnnnnnnnnnnnnnnnnnnnnnnnnnnnnnnnnnnnnnnnnnnnnnnnnnnnnnnnnnnnnnnnnnnnnnnnnnnnnnnnnnnnnnnnnnnnnnnnnnnnnnnnnnnnnnnnnnnnnnnnnnnnnnnnnnnnnnnnnnnnnnnnnnnnnnnnnnnnnnnnnnnnnnnnnnnnnnnnnnnnnnnnnnnnnnnnnnnnnnnnnnnnnnnnnnnnnnnnnnnnnnnnnnnnnnnnnnnnnnnnnnnnnnnnnnnnnnnnnnnnnnnnnnnnnnnnnnnnnnnnnnnnnnnnnnnnnnnnnnnnnnnnnnnnnnnnnnnnnnnnnnnnnnnnnnnnnnnnnnnnnnnnnnnnnnnnnnnnnnnnnnnnnnnnnnnnnnnnnnnnnnnnnnnnnnnnnnnnnnnnnnnnnnnnnnnnnnnnnnnnnaggtccatgtgctgactttcactgttcacatgttgctgcaaggcctcaccaataagctgcaagtcggggatttggactcttgtttggatataatgattgannnnnnnnnnnnnnnnnnnnnnnnnnnnnnnnnnnnnnnnnnnnnnnnnnnnnnnnnnnnnnnnnnnnnnnnnnnnnnnnnnnnnnnnnnnnnnnnnnnnnnnnnnnnnnnnnnnnnnnnnnnnnnnnnnnnnnnnnnnnnnnnnnnnnnnnnnnnnnnnnnnnnnnnnnnnnnnnnnnnnnnnnnnnnnnnnnnnnnnnnnnnnnnnnnnnnnnnnnnnnnnnnnnnnnnnnnnnnnnnnnnnnnnnnnnnnnnnnnnnnnnnnnnnnnnnnnnnnnnnnnnnnnnnnnnnnnnnnnnnnnnnnnnnnnnnnnnnnnnnnnnnnnnnnnnnnnnnnnnnnnnnnnnnnnnnnnnnnnnnnnnnnnnnnnnnnnnnnnnnnnnnnnnnnnnnnnnnnnnnnnnnnnnnnnnnnnnnnnnnnnnnnnnnnnnnnnnnnnnnnnnnnnnnnnnnnnnnnnnnnnnnnnnnnnnnnnnnnctgctgcatctgagtctgaagacttccaagatcaagtcttcaagtgagcatgtcctggaaatgctggatccttttgtgtctctcctcatagactgcctgggctccatggatgtgaaggtnnnnnnnnnnnnnnnnnnnnnnnnnnnnnnnnnnnnnnnnnnnnnnnnnnnnnnnnnnnnnnnnnnnnnnnnnnnnnnnnnnnnnnnnnnnnnnnnnnnnnnnnnnnnnnnnnnnnnnnnnnnnnnnnnnnnnnnnnnnnnnnnnnnnnnnnnnnnnnnnnnnnnnnnnnnnnnnnnnnnnnnnnnnnnnnnnnnnnnnnnnnnnnnnnnnnnnnnnnnnnnnnnnnnnnnnnnnnnnnnnnnnnnnnnnnnnnnnnnnnnnnnnnnnnnnnnnnnnnnnnnnnnnnnnnnnnnnnnnnnnnnnnnnnnnnnnnnnnnnnnnnnnnnnnnnnnnnnnnnnnnnnnnnnnnnnnnnnnnnnnnnnnnnnnnnnnnnnnnnnnnnnnnnnnnnnnnnnnnnnnnnnnnnnnnnnnnnnnnnnnnnnnnnnnnnnnnnnnnnnnnnnnnnnnnnnnnnnnnnnnnnnnnnnnnnnnnnnnnnnnnnnnnnnnnnntactaacatgagaccgggagagagtccaccttggaaatgatcgcctatctctttgacacattccctcaaggggctgctccatgagaactgtggaatgttctttatccctctttgtctaatgacgatcaatgatggctctgccacatgcaaaaagatggcatccatgaccatcaaggccctactggtaaaatcagnnnnnnnnnnnnnnnnnnnnnnnnnnnnnnnnnnnnnnnnnnnnnnnnnnnnnnnagcgcttaaatagacagcttgctgccctgatctgtggcttgtttgtggaaagtgaaggagttgattttgagaaaagacttggaacggtccttcctgtgattgaaaaggaaattgatcctgaaaactttaaagannnnnnnnnnnnnnnnnnnnnnnnnnnnnnnnnnnnnnnnnnnnnnnnnnnnnnnnnnnnnnnnnnnnnnnnnnnnnnnnnnnnnnnnnnnnnnnnnnnnnnnnnnnnnnnnnnnnnnnnnnnnnnnnnnnnnnnnnnnnnnnnnnnnnnnnnnnnnnnnnnnnnnnnnnnnnnnnnnnnnnnnnnnnnnnnnnnnnnnnnnnnnnnnnnnnnnnnnnnnnnnnnnnnnnnnnnnnnnnnnnnnnnnnnnnnnnnnnnnnnnnnnnnnnnnnnnnnnnnnnnnnnnnnnnnnnnnnnnnnnnnnnnnnnnnnnnnnnnngatgaaaagtatctctctcgcttcttgccatcaattgcattccaaattcttggatcagtctctaggagaacaggtnnnaggttgttaagaatttgttgtttgtagccaaagtcttgtatttactggaaccttattgtgaggataagcaaagtaagataaaagaagacctggaagaacaagcagctttaggagatggcgtggcctgtgcagatgagaaggcagagtaaaacggagaagagaaggaagaggtgaaggaagagcttggcaggccggccacactgctgtggttgatccagaagctgtcccggatcgcaaaactggaagctgcttattcaccgagaaaccccttaaa

SEQ ID NO: 25709 - DNA, 586 bp, Macaca Mulatta
  misc_feature (1)...(586): n = A,T,C or G
ggggcttttccggcggtgacgacctacccacacgagaacatgcctctcgcaaaggatctccttcatccctccccagaagaggagaagaggaaacacaagaagaaacgcctggtgcagagccccaattcctacttcatggatgtgaaatgcccaggatgctataaaatcaccacggtctttagccatgcacaaacggtagttttgtgtgttggctgctccactgtcctctgccagcctacaggaggaaaagcaaggcttacagaaggatgttcctttaggaggaagcagcactaaaggcattctgaatcagatgagtgggaaaccatctcaataacacattttggaataaaacaatacctctccatatcactatataactcatcaccctctcaatatccaacacctcccacatactcactccataaaactccccccacaaatataaaaaatataactttttcnnnnnnnnnnnnnnnnnnnnctttaaaaaactttttttgccccccccccatataacgaaaactctcattcttttttaaaaaccatgccgaacagggttgnnnnnnnnnnnnnnnnnnnnncggcg

SEQ ID NO: 25710 - DNA, 662 bp, Macaca Mulatta
aggaagccccacgtgcccgggagcccagagagcaggggctgcgggtcggacgcgacccccggtgcccaacagctgctgccctcctcagaaccgcatgcacgagagcctgcacctgttcaacagtatctgcaaccaccgctacttcgccacgacgtccatcgtgctcttcctcaacaagaaggacgttttctttgagaagatcaagaaggcccacctcagcatctgtttcccggactacgatggtgagacgtcccgcactgtcgccaggctgcgcccccgccccacgatcccggcgcgcgcccccggcaaagggaagtaagggctgggccgagtgagggctcccacccccgcaggacccaacacctacgaggacgccggcaactacatcaaggtgcagttcctcgagctcaacatgcggcgcgacgtgaaggagatctattcccacatgacgtgcgccaccgacacgcagaacgtcaagtttgtcttcgacgctgtcaccgacatcatcatcaaggagaacctcaaagactgtggcctcttctgaggtaggtcgctgccctctccagccccttgcctcagtactccagccccgccccagctccccaccccacaccgcggcctggcgtctcacccccaaatcctgagagcccactgcctctagg

SEQ ID NO: 25711 - DNA, 1793 bp, Macaca Mulatta
  misc_feature (1)...(1793): n = A,T,C or G
tgacccaggctgcctatgtgggcgaggcgcggaggactttggagagggtccggcgccgccggctgcggcttcgcgagagggcccgggaacgcgaggccgagcgggaggcataggccgcgcgggcagtggaacgcgagcaggagattgaccgctggagggtgaagtgtgtgcaggaggtggaggagaagaagcgggnnnnnnnnnnnnnnnnnnnnnnnnnnnnnnnnnnnnnnnnnnnnnnnnnnnnnnnnnnnnnnnnnnnnnnnnnnnnnnnnnnnnnnnnnnnnnnnnnnnnnnnnnnnnnnnnnnnnnnnnnnnnnnnnnnnnnnnnnnnnnnnnnnnnnnnnnnnnnnnnnnnnnnnnnnnnnnnnnnnnnnnnnnnnnnnnnnnnnnnnnnnnnnnnnnnnnnnnnnnnnnnnnnnnnnnnnnnnnnnnnnnnnnnnnnnnnnnnnnnnnnnnnnnnnnnnnnnnnnnnnnnnnnnnnnnnnnnnnnnnnnnnnnnnnnnnnnnnnnnnnnnnnnnnnnnnnnnnnnnnnnnnnnnnnnnnnnnnnnnnnnnnnnnnnnnnnnnnnnnnnnnnnnnnnnnnnnnnnnnnnnnnnnnnnnnnnnnnnnnnnnnnnnnnnnnnnnnnnnnnnnnnnnnnnnnnnnnnnnnnnnnnnnnnnnnnnnnnnnnnnnnnnnnnnnnnnnnnnnnnnnnnnnnnnnnnnnnnnnnnnnnnnnnnnnnnnnnnnnnnnnnnnnnnnnnnnnnnnnnnnnnnnnnnnnnnnnnnnnnnnnnnnnnnnnnnnnnnnnnnnnnnnnnnnnnnnnnnnnnnnnnnnnnnnnnnnnnnnnnnnnnnnnnnnnnnnnnnnnnnnnnnnnnnnnnnnnnnnnnnnnnnnnnnnnnnnnnnnnnnnnnnnnnnnnnnnnnnnnnnnnnnnnnnnnnnnnnnnnnnnnnnnnnnnnnnnnnnnnnnnnnnnnnnnnnnnnnnnnnnnnnnnnnnnnnnnnnnnnnnnnnnnnnnnnnnnnnnnnnnnnnnnnnnnnnnnnnnnnnnnnnnnnnnnnnnnnnnnnnnnnnnnnnnnnnnnnnnnnnnnnnnnnnnnnnnnnnnnnnnnnnnnnnnnnnnnnnnnnnnnnnnnnnnnnnnnnnnnnnnnnnnnnnnnnnnnnnnnnnnnnnnnnnnnnnnnnnnnnnnnnnnnnnnnnnnnnnnnnnnnnnnnnnnnnnnnnnnnnnnnnnnnnnnnnnnnnnnnnnnnnnnnnnnnnnnnnnnnnnnnnnnnnnnnnnnnnnnnnnnnnnnnnnntcccagttttagtgcagcttgggaggctgctaattaggaagatggcagtgactgtaggctgggttgccagaaaatatggtggcctagtcttattattcaggtggggtacttagaaaacctgaagagtacccaaattggattgtgttttaatggacaatggctgtattttttccatgttagcaggatcctaatgaaagcacctgttatttttaagtttctaagggtctagttgttcagaatcccccaggatatttccttaacctcactcagtcacattacaggagccagtgtagctgtggaattatcttnnnnnnnnnnnnnnnnnnnnnnnnnnnnnnnnnnnnnnnnnnnnnnnnnnnnnnnnnnnnnnnnnnnnnnnngccgggcgcggtggcccacgcctgtaatcccagcactttgggaggctgaggcgggtggatcactaggtcaggagttcaaggccagcctggccaagatggtgaaaccccgtctcttctaaaaatataaaaa

SEQ ID NO: 25712 - DNA, 373 bp, Macaca Mulatta
cactgtcttcgtgctcaacgtgcactacagaccgactacacacacaatgccctcatgggtgaagaccgtattcttgaacctgctccccagggtcatgttcatgaccaggccaacaagcaatgagggcaacgctcagaagccaaggcccctctctggtgccgagctctcaaatctgaattgcttcagccgtgcagagtccaaaggctgcaaggagggctacccctgccaggacaggatgtgtggttactgccaccaccgcaggataaaaatctccaatttcagtgctaacctcacaagaagctctagttctgaatctgttgatgctgtgctgtccctctctgctttgtcaccagaaatcaaagaagccatccaa

SEQ ID NO: 25713 - DNA, 655 bp, Macaca Mulatta
  misc_feature (1)...(655): n = A,T,C or G
tagcatattatattaaactgcccccagnattaccctgtaggcctaaagtactcangttttaagacaaacactacttcccatgcggggtactttccttgtggtaaatgtaaacatgtagactgcattcgaggtgacctaaagtagagaggtcatgaactttgagaatgggcttcctttttggttcagtattagagggagagggagatggatggtggggtaggttttctagtctatcattttacagttttcatggaggccctgcttagtgcagtttccattggagtgggtggaagatgataaagctctcttttatctactaataatgtgattgcaacttaaaatagcaaaacccaactctccctgttcctccaatccctctcctaaaaagttcagtttggaatctcattctggaaaagatggaatcgcatggagattctctagctgttaggtagacctaaataaaagttctcaatagattcctcttttgagtaaatataagacctcttgtagctacaatgttttagagcatgtttcatcttcatttttaatatcctgaactgaatgatagtgtttttttagatgaagaactgatgtcagcctgccaggtactgtaatttattctatcatattattatattatatatcaagtaggaca

SEQ ID NO: 25714 - DNA, 194 bp, Macaca Mulatta
  misc_feature (1)...(194): n = A,T,C or G
ggcacctgaagcccttcggggcggaggagggcggggactcggggcgactctcagcatcagccaggagttggtggctctctgtttcggcgctgtggagtcgcctactccgcctcctccccgcgngaataagaataaaagattctggaggagttggagagagtgtattcagtccccaaaccaggagatcaacaaag

SEQ ID NO: 25715 - DNA, 1608 bp, Macaca Mulatta
  misc_feature (1)...(1608): n = A,T,C or G
agaggtccggagtcagggcgtgtggctgaggannnnnnnnnnnnnnnnnnnnnnnnnnnnnnnnnnnnnnnnnnnnnnnnnnnnnnnnnnnnnnnnnnnnnnnnnnnnnnnnnnnnnnnnnnnnnnnnnnnnnnnnnnnnnnnnnnnnnnnnnnnnnnnnnnnnnnnnnnnnnnnnnnnnnnnnnnnnnnnnnnnnnnnnnnnnnnnnnnnnnnnnnnnnnnnnnnnnnnnnnnnnnnnnnnnnnnnnnnnnnnnnnnnnnnnnnnnnnnnnnnnnnnnnnnnnnnnnnnnnnnnnnnnnnnnnnnnnnnnnnnnnnnnnnnnnnnnnnnnnnnnnnnnnnnnnnnnnnnnnnnnnnnnnnnnnnnnnnnnnnnnnnnnnnnnnnnnnnnnnnnnnnnnnnnnnnnnnnnnnnnnnnnnnnnnnnnnnnnnnnnnnnnnnnnnnnnnnnnnnnnnnnnnnnnnnnnnnnnnnnnnnnnnnnnnnnnnnnnnnnnnnnnnnnnnnnnnnnnaagaagctcagtgatatggaggaggtagccaaggaacgggcccagaacctcttgcagagagccaacaagctgcggatggagcaggaggaggagctcaaggacatgagcaannnnnnnnnnnnnnnnnnnnnnnnnnnnnnnnnnnnnnnnnnnnnnnnnnnnnnnnnnnnnnnnnnnnnnnnnnnnnnnnnnnnnnnnnnnnnnnnnnnnnnnnnnnnnnnnnnnnnnnnnnnnnnnnnnnnnnnnnnnnnnnnnnnnnnnnnnnnnnnnnnnnnnnnnnnnnnnnnagaggaaggcgacaaattgtggaacagatggaaaagaaccaggaggagcgatcactgcttgctgagcagcgggagcaggagaaggagcagatgctggagtatatggaacagctccaagaggaagatctaaagnnnnnnnnnnnnnnnnnnnnnnnnnnnnnnnnnnnnnnnnnnnnnnnnnnnnnnnnnnnnnnnnnnnnnnnnnnnnnnnnnnnnnnnnnnnnnnnnnnnnnnnnnnnnnnnnnnnnnnnnnnnnnnnnnnnnnnnnnnnnnnnnngctcgagaagcagagtttgaggctgagcaggagagaatccggagggagaaagagaaggagatcgcccgcctgagggccatgcaggagaaggcccaggattaccaggcagaacaggnnnnnnnnnnnnnnnnnnnnnnnnnnnnnnnnnnnnnnnnnnnnnnnnnnnnnnnnnnnnnnnnnnnnnnnnnnnnnnnnnnnnnnnnnnnnnnnnnnnnnnnnnnnnnnnnnnnnnnnnnnnnnnnnnncaaggagcatgctctggctgttcaggtgcaacgggatcgagatgagttcgagaggattcttcgnggctcagagagaacagattgagaaggagcggctggaggaggagaaaaaggccacagggcgcttacagcatgccaacgagctccggcgccaggtgcgagagaaccagcagaagcaggtgcagaaccggattgccacctttgaggagggccggcgcctcaaagaggaggcccagaaacgccgtgagcgcatcgatgacatcaagaggaaaaagcttgaagagctgag

SEQ ID NO: 25716 - DNA, 767 bp, Macaca Mulatta
  misc_feature (1)...(767): n = A,T,C or G
gattattttgattccggaatgtttcatctgaaaaactccaaatttagtgtagtccctccgggtnccagaggcttccaggaccacctattacttttcccatactggcctgcaccacctgattgttttttatgtgtaaactcaaacggggacaggggcagtaatggtctctcgaaaggcaacttttggctttcctgtgatacaaggacagccatattctctttccatcctctgagcatagatttccaggtgtaattctcccattccagatacaattgtctctttgttctcagtgtcaaagtgtactttaaatgtgggatcttctcttgtaaacctgccaataccttttgaaaacttttccagatcgttcttgttagaaggcttcattgctattgaaatgacaggatcaggaacatgaattgactccatggaaaggtcactgttggctttgtttgtgaacgtgtctccactagcacagtcaatgccaaacaatgcacagatgtctccagcatatacttcctcaacatcctccatcatgtcggcatgcatgcgagtcagccgttgcaatcgtactttctttcttgtccttgtgttatagatggtgtcacccttctttagctctccctggtaaatgcgaacgtaagttaattgtccaaatcgacctacctccagtttaaaagccaggcctacaaacgggtgggaattgtctctactggagttcattaggattttggttttctcttttgagtcatcctcctgattgagaatcc

SEQ ID NO: 25717 - DNA, 279 bp, Macaca Mulatta
tggttccaacaccagcactggctttattggcgaacccagcaccagcacgggcttccatagtggacccagttctattgttggcttcagtggtggaccaagcactggtgttggcttctgcagtggaccaagcatcagtggcttcagcggtggaccgagcacaggagctggcttcggcggtggaccaaacactggtgctggctttggtggtggaccaagcaccagtgctggcttcggcagtggagccaccaatcttggtgcctgtggcttctcctatggcta

SEQ ID NO: 25718 - DNA, 322 bp, Macaca Mulatta
  misc_feature (1)...(322): n = A,T,C or G
gggtctcccagaccccagcagggtatcctccgaggtgcagcagatgtgggcactgacagagatgatccgggccagtcacacctccgcgaggatcggccgttttgatgtngtggatggctgttatgacctgaacttgctctcctacacttgaatggtggctcctacccaagatgttggcctttctgtgcccacccagacttggtttgggccaccagaggctgaagtgggtttcctgtgtattccgaatgttgcctgcatgcctattctgtctgggccacgttcacagattcaagattctcgggggctaagtgtgttacttcag

SEQ ID NO: 25719 - DNA, 315 bp, Macaca Mulatta
  misc_feature (1)...(315): n = A,T,C or G
tctactggcagaacatgaattcgggcaacctggtgtctgtgctcacccagcagagggtgcctttgtgggctcactgattaaggagagtggcactgatgacttcaatgtctggactggcctccatggacccaaaaagnnnnnnnnnnnnnnnnnnnnnnnnnnnnnnnnnnnnnnnnnnnnnnnnnnnnnnnnnnnnnnnnnnnnnnnnnnnnnnnnnnnnnnnnnnnnnnnnnnnnnnnnnnnnnnaggattccggaaatggaaggacgtaccttgtgaagacaagttctcctttgtctgcaagttcaaaaacta

SEQ ID NO: 25720 - DNA, 133 bp, Macaca Mulatta
cataagtttacctagatctttctataacagtgacagaacccagagagaaaattcacccttctggaagagctcttgatattaggaaggctctcactcctagagttgcagtcatataattatgctttttgtaaaa

SEQ ID NO: 25721 - DNA, 2965 bp, Macaca Mulatta
  misc_feature (1)...(2965): n = A,T,C or G
gctgcccctgcctctgttgagactcctctagactctgtgctgggagactcttctgcttctgagccaggcttgcaggcagcctctcagccggccgagactccaacgcaacaggnnnnnnnnnnnnnnnnnnnnnnnnnnnnnnnnnnnnnnnnnnnnnnnnnnnnnnnnnnnnnnnnnnnnnnnnnnnnnnnnnnnnnnnnnnnnnnnnnnnnnnnnnnnnnnnnnnnnnnnnnnnnnnnnnnnnnnnnnnnnnnnnnnnnnnnnnnnnnnnnnnnnnnnnnnnnnnnnnnnnnnnnnnnnnnnnnnnnnnnnnnnnncatctggattctttttggcatctgtgtcagaagacaatcgccctttaactggacttgcagctgcaattgccggagcaaaacttaggaaagtgtcacggnnnnnnnnnnnnnnnnnnnnnnnnnnnnnnnnnnnnnnnnnnnnnnnnnnnnnnnnnnnnnnnnnnnnnnnnnnnnnnnnnnnnnnnnnnnnnnnnnnnnnnnnnnnnnnnnnnnnnnnnnnnnnnnnnnnnnnnnnnnnnnnnnnnnnnnnnnnnnnnnnnnnnnnnnnnnnnnnnnnnnnnnnnnnnnnnnnnnnnnnnnnnnnnnnnnnnnnnnnnnnnnnnnnnnnnnnnnnnnnnnnnnnnnnnnnnnnnnnnnnnnnnnnnnnnnnnnnnnnnnnnnnnnnnnnnnnnnnnnnnnnnnnnnnnnnnnnnnnnnnnnnnnnnnnnnnnnnnnnnnnnnnnnnnnnnnnnnnnnnnnnnnnnnnnnnnnnnnnnnnnnnnnnnnnnnnnnnnnnnnnnnnnnnnnnnnnnnnnnnnnnnnnnnnnnnnnnnnnnnnnnnnnnnnnnnnnnnncaatcaggcaggaactgagcaagtcaaatactgcatagaggaacagactaaggagagataggactttaatctgaaggaaaaaaaatcctacaaacaacaactgttcacaacagcaaatccctacattttatgagctgtaagaagaaaatggagacaaacagaaggagggaaaaaccaacctactctgaaagccttcaaacattatgactctggcgataagctcttttccctctcggtttgctgcttttttctggcctttacaacagaatggaagagaatcatataagagttcctgtaacagttatgcagaaaatactaaaacccatcaggcaaaatcaccgtgcattgaaatattttcatgtcaagataaaattgcacattttccacaatacattgctaaaataaagaggagaaaggcttacgaagtttttttgcagagagtgctggtaaagaattgagcaagtttgctattgtattgtaatgtttctctcaggtttgttcttcctatcatnnnnnnnnnnnnnnnnnnnnnnnnnnnnnnnnnnnnnnnnnnnnnnnnnnnnnnnnnnnnnnnnnnnnnnnnnnnnnnnnnnnnnnnnnnnnnnnnnnnnnnnnnnnnnnnnnnnnnnnnnnnnnnnnnnnnnnnnnnnnnnnnnnnnnnnnnnnnnnnnnnnnnnnnnnnnnnnnnnnnnnnnnnnnnnnnnnnnnnnnnnnnnnnnnnnnnnnnnnnnnnnnnnnnnnnnnnnnnnnnnnnnnnnnnnnnnnnnnnnnnnnnnnnnnnnnnnnnnnnnnnnnnnnnnnnnnnnnnnnnnnnnnnnnnnnnnnnnnnnnnnnnnnnnnnnnnnnnnnnnnnnnnnnnnnnnnnnnnnnnnnnnnnnnnnnnnnnnnnnnnnnnnnnnnnnnnnnnnnnnnnnnnnnnnnnnnnnnnnnnnnnnnnnnnnnnnnnnnnnnnnnnnnnnnnnnnnnnnnnnnnnnnnnnnnnnnnnnnnnnnnnnnnnnnnnnnnnnnnnnnnnnnnnnnnnnnnnnnnnnnnnnnnnnnnnnnnnnnnnnnnnnnnnnnnnnnnnnnnnnnnnnnnnnnnnnnnnnnnnnnnnnnnnnnnnnnnnnnnnnnnnnnnnnnnnnnnnnnnnnnnnnnnnnnnnnnnnnnnnnnnnnnnnnnnnnnnnnnnnnnnnnnnnnnnnnnnnnnnnnnnnnnnnnnnnnnnnnnnnnnnnnnnnnnnnnnnnnnnnnnnnnnnnnnnnnnnnnnnnnnnnnnnnnnnnnnnnnnnnnnnnnnnnnnnnnnnnnnnnnnnnnnnnnnnnnnnnnnnnnnnnnnnnnnnnnnnnnnnnnnnnnnnnnnnnnnnnnnnnnnnnnnnnnnnnnnnnnnnnnnnnnnnnnnnnnnnnnnnnnnnnnnnnnnnnnnnnnnnnnnnnnnnnnnnnnnnnnnnnnnnnnnnnnnnnnnnnnnnnnnnnnnnnnnnnnnnnnnnnnnnnnnnnnnnnnggtgggaagaaggaattagactctctgcctgccaccctgtgtgtgttgccctcgcgcacatgctgtctgtatggaagccacttttctttcctttgaaactggcaaggttaaaataagggagaaatcctgtatgttgcaatgatagctttttggaaaatttaagaaatcaaactctccaggctctccatcttgatttatgcttgagttgttatgtgccatatttgctttgaactctgattatcagaagttttactaaaattttgaaataattcactttcatctgctttctagattttgtacatctctgtccataaagcagagcttgttgatagtgtagttttctaaatgctgcaaatttgcagcatttaccactacaaagaagtttggatgaggnnnnnnnnnnnctttgttaaaatagttcctatttctgtagaaatttcacttttagattaaactgtgatggatgagctatcataattcaagtatacatttcttttttctatcagatattcattgtcatgcagtagtagtaaaaacatcaaagatgcaaaaagcttatgacgtattttctaaaagaaataggaggcaaattcatctttattattgtactt

SEQ ID NO: 25722 - DNA, 797 bp, Macaca Mulatta
  misc_feature (1)...(797): n = A,T,C or G
tctgcatgactttaattcttgggacaaaacggtagtttgtaccgtaagacacagtttctggcccagtgtgatgggggtgggtggccgggtgggtggagcgttctgctgttggagacctggagggaaaccctgactgggtgtcatttcccaccatggagcacgcctcccagccctggcctgcagggtgggcagggtggggggcaagggagtccgaagcctctgggaggaggggcagggcgctgccttgggctgggtgggaagagggttggccgcctcggctcctgctggccatgctcctggtctctccttcctgaggtcccaggtgggggttgccctgnnnnnnnnnnnnnnnnntggcctggaaggggagacagaggaggagggtgacacaggtcgcacatccagcctagaggcagacctggctttggtggcaggagaagaaacacttgcccagacccttttgtgtagggaattggggagggggtgtggcaggcaggtgggccacggaactgggtcccgggcaccaaggccatgtgcagggccacggacggatgctcctcacgaggcttcagaagtgagcgaggggacggagaagccccgcgtccgagggccttttgtcccgttagcaattgaggtgtgcagagcactgtacagaccccactcccctgtacaatctccctggaggtgcccggtccctgctcggggatgggagttttgtagactgtatagaaatcggcaccctatatattgcagctagattttgttaatctggaaaatacagacaaaggtgaagtgtt

SEQ ID NO: 25723 - DNA, 1152 bp, Macaca Mulatta
  misc_feature (1)...(1152): n = A,T,C or G
gggattccagcggctgacagcacccgggccgagatgtctccctcagtggccttagccgtgctggcgctactctctctttctggcctggaggctatccagcgtactccaaagattcaggtttactcacgccatccaccagagaatggaaagccaaatttcctgaattgctatgtgtctggatttcatccatctgatattgaagttgacttactgaagaatggagagaaaatgggaaaagtggagcattcagacttgtctttcagcaaagactggtctttctatctcttgtactacactgaattcacccccaatgaaaaagatgagtatgcctgccgtgtgaaccatgtgactttgtcagggcccaggacagttaagtgggatcgagacatgtaagcagcatcatggaggtttgaagatgccgcatttggattggatgaattccaaattctgcttccttgctttttaatattgatatgcttatacagtttatgcaaaaaatgcagagttataataatgttaacacaggcatgatcttctttataattctactttgagtgctatctccacgtttgaggtatctgggcagctagctttaggagggctggcaacttagaggtggggagcagagaattctcatatccaacatcaacatcttggtcagatctgacctcttcaatctcttgcactcagaagcttgataaagatagttatgcgttatattaaggttaaccttcccaatttacatactgtgcttagaattcggaggaaaaattagaaatataattgatggggtcatcggacatctgtttaatgagtacacctttcgtccttagatcattttacttctttactttgtcacgtgcgttacctgtcatttcgtccgcataataatctgactcgacaaaaacaaaaaaccgggggcgccaacctaggttacaggcgtactgacagacatattttgaacngctcctctttctttcctccaccttctcccacacacaacacaaaaaacaaccaaaaaacacacnnnnnnnnnnnnnnnnnnnnnnnnnnnnnngagggaaggcagcgagaggagcagtgcacaggcgggacggagccgcgagcagcacagagggaagacggagagacgcatgaggagggaacaagaaa

SEQ ID NO: 25724 - DNA, 82 bp, Macaca Mulatta
gtggggagcaagtgcatatcctgggctgtgaagtgagcgaggaagagtttcgtgaaggttttgactctgatatcaacaatcg

SEQ ID NO: 25725 - DNA, 5177 bp, Macaca Mulatta
  misc_feature (1)...(5177): n = A,T,C or G
agaaaatggggagagaccaaatttttaagaatacatttcagggcatctactctgatcagaagatctgtaaagactgtcctcacanncagatatgagcgtgaagaagctttcatggctctcaatctaggagtgacttcttgtcagagtttggaaatttctttggaccaattagttagaggagaagttctagagggaagtaacgcgtactacagtgaaaagtgtaaagaaaannnnnnnnnnnnnnnnnnnnnnnnnnnnnnnnnnnnnnnnnnnnnnnnnnnnnnnnnnnnnnnnnnnnnnnnnnnnnnnnnnnnnnnnnnnnnnnnnnnnnnnnnnnnnnnnnnnnnnnnnnnnnnnnnnnnnnnnnnnnnnnnnnnnnnnnnnnnnnnnnnnnnnnnnnnnnnnnnnnnnnnnnnnnnnnnnnnnnnnnnnnnnnnnnnnnnnnnnnnnnnnnnnnnnnnnnnnnnnnnnnnnnnnnnnnnnnnnnnnnnnnnnnnnnnnnnnnnnnnnnnnnnnnnnnnnnnnnnnnnnnnnnnnnnnnnnnnnnnnnnnnnnnnnnnnnnnnnnnnnnnnnnnnnnnnnnnnnnnnnnnnnnnnnnnnnnnnnnnnnnnnnnnnnnnnnnnnnnnnnnnnnnnnnnnnnnnnnnnnnnnnnnnnnnnnnnnnnnnnnnnnnnnnnnnnnnnnnnnnnnnnnnnnnnnnnnnnnnnnnnnnnnnnnnnnnnnnnnnnnnnnnnnnnnnnnnnnnnnnnnnnnnnnnnnnnnnnnnnnnnnnnnnnnnnnnnnnnnnnnnnnnnnnnnnnnnnnnnnnnnnnnnnnnnnnnnnnnnnnnnnnnnnnnnnnnnnnnnnnnnnnnnnnnnnnnnnnnnnnnnnnnnnnnnnnnnnnnnnnnnnnnnnnnnnnnnnnnnnnnnnnnnnnnnnnnnnnnnnnnnnnnnnnnnnnnnnnnnnnnnnnnnnnnnnnnnnnnnnnnnnnnnnnnnnnnnnnnnnnnnnnnnnnnnnnnnnnnnnnnnnnnnnnnnnnnnnnnnnnnnnnnnnnnnnnnnnnnnnnnnnnnnnnnnnnnnnnnnnnnnnnnnnnnnnnnnnnnnnnnnnnnnnnnnnnnnnnnnnnnnnnnnnnnnnnnnnnnnnnnnnnnnnnnnnnnnnnnnnnnnnnnnnnnnnnnnnnnnnnnnnnnnnnnnnnnnnnnnnnnnnnnnnnnnnnnnnnnnnnnnnnnnnnnnnnnnnnnnnnnnnnnnnnnnnnnnnnnnnnnnnnnnnnnnnnnnnnnnnnnnnnnnnnnnnnnnnnnnnnnnnnnnnnnnnnnnattttcttactggagtgcagtgtgagagaagtacgagttgctgtggccaccattctggagaaaaccctagacagtgccttgttttatcaggataagnnnnnnnnnnnnnnnnnnnnnnnnnnnnnnnnnnnnnnnnnnnnnnnnnnnnnnnnnnnnnnnnnnnnnnnnnnnnnnnnnnnnnnnnnnnnnnnnnnnnnnnnnnnnnnnnnnnnnnnnnnnnnnnnnnnnnnnnnnnnnnnnnnnnnnnnnnnnnnnnnnnnnnnnnnnnnnnnnnnnnnnnnnnnnnnnnnnnnnnnnnnnnnnnnnnnnnnnnnnnnnnnnnnnnnnnnnnnnnnnnnnnnnnnnnnnnnnnnnnnnnnnnnnnnnnnnnnnnnnnnnnnnnnnnnnnnnnnnnnnnnnnnnnnnnnnnnnnnnnnnnnnnnnnnnnnnnnnnnnnnnnnnnnnnnnnnnnnnnnnnnnnnnnnnnnnnnnnnnnnnnnnnnnnnnnnnnnnnnnnnnnnnnnnnnnnnnnnnnnnnnnnnnnnnnnnnnnnnnnnnnnnnnnnnnnnnnnnnnnnnnnnnnnnnnnnnnnnnnnnnnnnnnnnnnnnnnnnnnnnnnnnnnnnnnnnnnnnnnnnnnnnnnnnnnnnnnnnnnnnnnnnnnnnnnnnnnnnnnnnnnnnnnnnnnnnnnnnnnnnnnnnnnnnnnnnnnnnnnnnnnnnnnnnnnnnnnnnnnnnnnnnnnnnnnnnnnnnnnnnnnnnnnnnnnnnnnnnnnnnnnnnnnnnnnnnnnnnnnnnnnnnnnnnnnnnnnnnnnnnnnnnnnnnnnnnnnnnnnnnnnnnnnnnnnnnnnnnnnnnnnnnnnnnnnnnnnnnnnnnnnnnnnnnnnnnnnnnnnnnnnnnnnnnnnnnnnnnnnnnnnnnnnnnnnnnnnnnnnnnnnnnnnnnnnnnnnnnnnnnnnnnnnnnnnnnnnnnnnnnnnnnnnnnnnnnnnnnnnnnnnnnnnnnnnnnnnnnnnnnnnnnnnnnnnnnnnnnnnnnnnnnnnnnnnnnnnnnnnnnnnnnnnnnnnnnnnnnnnnnnnnnnnnnnnnnnnnnnnnnnnnnnnnnnnnnnnnnnnnnnnnnnnnnnnnnnnnnnnnnnnnnnnnnnnnnnnnnnnnnnnnnnnnnnnnnnnnnnnnnnnnnnnnnnnnnnnnnnnnnnnnnnnnnnnnnnnnnnnnnnnnnnnnnnnnnnnnnnnnnnnnnnnnnnnnnnnnnnnnnnnnnnnnnnnnnnnnnnnnnnnnnnnnnnnnnnnnnnnnnnnnnnnnnnnnnnnnnnnnnnnnnnnnnnnnnnnnnnnnnnnnnnnnnnnnnnnnnnnnnnnnnnnnnnnnnnnnnnnnnnnnnnnnnnnnnnnnnnnnnnnnnnnnnnnnnnnnnnnnnnnnnnnnnnnnnnnnnnnnnnnnnnnnnnnnnnnnnnnnnnnnnnnnnnnnnnnnnnnnnnnnnnnnnnnnnnnnnnnnnnnnnnnnnnnnnnnnnnnnnnnnnnnnnnnnnnnnnnnnnnnnnnnnnnnnnnnnnnnnnnnnnnnnnnnnnnnnnnnnnnnnnnnnnnnnnnnnnnnnnnnnnnnnnnnnnnnnnnnnnnnnnnnnnnnnnnnnnnnnnnnnnnnnnnnnnnnnnnnnnnnnnnnnnnnnnnnnnnnnnnnnnnnnnnnnnnnnnnnnnnnnnnnnnnnnnnnnnnnnnnnnnnnnnnnnnnnnnnnnnnnnnnnnnnnnnnnnnnnnnnnnnnnnnnnnnnnnnnnnnnnnnnnnnnnnnnnnnnnnnnnnnnnnnnnnnnnnnnnnnnnnnnnnnnnnnnnnnnnnnnnnnnnnnnnnnnnnnnnnnnnnnnnnnnnnnnnnnnnnnnnnnnnnnnnnnnnnnnnnnnnnnnnnnnnnnnnnnnnnnnnnnnnnnnnnnnnnnnnnnnnnnnnnnnnnnnnnnnnnnnnnnnnnnnnnnnnnnnnnnnnnnnnnnnnnnnnnnnnnnnnnnnnnnnnnnnnnnnnnnnnnnnnnnnnnnnnnnnnnnnnnnnnnnnnnnnnnnnnnnnnnnnnnnnnnnnnnnnnnnnnnnnnnnnnnnnnnnnnnnnnnnnnnnnnnnnnnnnnnnnnnnnnnnnnnnnnnnnnnnnnnnnnnnnnnnnnnnnnnnnnnnnnnnnnnnnnnnnnnnnnnnnnnnnnnnnnnnnnnnnnnnnnnnnnnnnnnnnnnnnnnnnnnnnnnnnnnnnnnnnnnnnnnnnnnnnnnnnnnnnnnnnnnnnnnnnnnnnnnnnnnnnnnnnnnnnnnnnnnnnnnnnnnnnnnnnnnnnnnnnnnnnnnnnnnnnnnnnnnnnnnnnnnnnnnnnnnnnnnnnnnnnnnnnnnnnnnnnnnnnnnnnnnnnnnnnnnnnnnnnnnnnnnnnnnnnnnnnnnnnnnnnnnnnnnnnnnnnnnnnnnnnnnnnnnnnnnnnnnnnnnnnnnnnnnnnnnnnnnnnnnnnnnnnnnnnnnnnnnnnnnnnnnnnnnnnnnnnnnnnnnnnnnnnnnnnnnnnnnnnnnnnnnnnnnnnnnnnnnnnnnnnnnnnnnnnnnnnnnnnnnnnnnnnnnnnnnnnnnnnnnnnnnnnnnnnnnnnnnnnnnnnnnnnnnnnnnnnnnnnnnnnnnnnnnnnnnnnnnnnnnnnnnnnnnnnnnnnnnnnnnnnnnnnnnnnnnnnnnnnnnnnnnnnnnnnnnnnnnnnnnnnnnnnnnnnnnnnnnnnnnnnnnnnnnnnnnnnnnnnnnnnnnnnnnnnnnnnnnnnnnnnnnnnnnnnnnnnnnnnnnnnnnnnnnnnnnnnnnnnnnnnnnnnnnnnnnnnnnnnnnnnnnnnnnnnnnnnnnnnnnnnnnnnnnnnnnnnnnnnnnnnnnnnnnnnnnnnnnnnnnnnnnnnnnnnnnnnnnnnnnnnnnnnnnnnnnnnnnnnnnnnnnnnnnnnnnnnnnnnnnnnnnnnnnnnnnnnnnnnnnnnnnnnnnnnnnnnnnnnnnnnnnnnnnnnnnnnnnnnnnnnnnnnnnnnnnnnnnnnnnnnnnnnnnnnnnnnnnnnnnnnnnnnnnnnnnnnnnnnnnnnnnnnnnnnnnnnnnnnnnnnnnnnnnnnnnnnnnnnnnnnnnnnnnnnnnnnnnnnnnnnnnnnnnnnnnnnnnnnnnnnnnnnnnnnnnnnnnnnnnnnnnnnnnnnnnnnnnnnnnnnnnnnnnnnnnnnnnnnnnnnnnnnnnnnnnnnnnnnnnnnnnnnnnnnnnnnnnnnnnnnnnnnnnnnnnnnnnnnnnnnnnnnnnnnnnnnnnnnnnnnnnnnnnnnnnnnnnnnnnnnnnnnnnnnnnnnnnnnnnnnnnnnnnnnnnnnnnnnnnnnnnnnnnnnnnnnnnnnnnnnnnnnnnnnnnnnnnnnnnnnnnnnnnnnnnnnnnnnnnnnnnnnnnnnnnnnnnnnnnnnnnnnnnnnnnnnnnnnnnnnnnnnnnnnnnnnnnnnnnnnnnnnnnnnnnnnnnnnnnnnnnnnnnnnnnnnnnnnnnnnnnnnnnnnnnnnnnnnnnnnnnnnnnnnnnnnnnnnnnnnnnnnnnnnnnnnnnnncatctgaccacgacttctcctggagtcctcacacggtcactgacaactacaatcagttttaggaagtagagcactgtatcatcaaacttaccctgtcctgccccaccttccctgctaacattgaggtgtgtgcagttaccttctgagcttggaacaagcagactggaattttcctctgctacctcttgtgtataaaatcttgtttataaaatttcaaaagtaagtagatacactagggaagaaccttaattctaaatttggttcatgcgtggcaaagttcttagcttctaagagtataaaataaatttttcaaaaac

SEQ ID NO: 25726 - DNA, 128 bp, Macaca Mulatta
  misc_feature (1)...(128): n = A,T,C or G
natgtcggtagtcatcttgacgagagatgatgaaccccgggtatttaccacagacagcgatgccgcttcaccagcattgcactgtacttacgcgcttcctgatcctgcctcagcttctcctctgcaca

SEQ ID NO: 25727 - DNA, 496 bp, Macaca Mulatta
caggtatctgtgaacttgacttccaactaagtgacccacccaaagcctgcgtaggagtttaccaagcccctctgttacattttcttccacctgtgtctgagccttcctctactcagtggaacatctattctgcccttggccttcaggaagaggggcatctgagggttccagtcataaggctctctccttcccaaaataccagcacaaaaggcaatacggtcagatggtgtcaaaaaggaccaagttagacatcaggaaaagctatctccaaggacagcctatacatgtctcccagaaacacactggggtgtcctgctccggattcttttaggaaagagctggtcagggattccagaagacccaccagcttgaaaggcaggatccagagctggagctaaccagggagccagaagcaggacatggtggaagcaaagcactcccatccctctatgctgaggtgtcaccggctgcccacctccctcgggccagggacaga

SEQ ID NO: 25728 - DNA, 686 bp, Macaca Mulatta
tgctctaccagcaagtcctgtgatggtgcccgatcccgccatggcaagtgacaacactccagtgacccagccggccggcgagtggtcagagggcagccaggctcacgtcactccggtggccgctgtccctgggcctgcagcgcagccattcctctctgtccccggatctcccacccagatgaattcttacaggcctgtggtggcccttcccacagcgtcccccagtacccttgccatggagaccacaggacttcctgcgcctggcatgctgcccttttgccatctctgggtgccggtgaccctagtggctgctggggctgcacagcctgttgtctccatggccatgttcccccatcccctagctctgcaccaccattgcccccacagccaccgcacatcacagtacatgccagctagcgatggccccaggcatacccagactacgcagaccagcgcacatagaggcaagcatttgggcagaatatgtgccggtcaataaatgtgtcacaaaatgagtaattttctgactgcacaaaagagtcttcatggtctccgtcctttttgtttctttgcagtcgagtaccccctccgacatctttggcttgcatgataaagacttcagcctaacacacctccctggaaaaatgcccaggagatactcgagcaggtgctgggttttaggaagc

SEQ ID NO: 25729 - DNA, 792 bp, Macaca Mulatta
ctcgctgcaatagtaacttcgtggtgagacataacaactaggaaatgctggtggatgtgcccccacagttgaagcgtctgggtgtcctcctggattatgacaacaatatgctgtctttctatgacccagctaactctctccatcttcatacttttgatgtgaccttcattcttccagtttgtccaacatttacaatctggaacaaatccctaatgatcttgtctggcttgcctgccccagattttattgattaccctgagcggcaggaatgcaactgcaggcctcaagaatccccttatgtttctgggatgaaaacctgtcattaagtttcaggagagcatataattcaccggctctctagttcagcagttcttccctcctacacctaagttagcgttcaatatatgagatacaaaataaagtttgtttgaagcatccaaaataactagatactgcagatttaatttttgtgcattaaagcttgtatttgaattaatatattgagtttctcagaacaaattatctgagtagtctgcgttcaagccattggagaaaaatttagaaaatgcctctgttgtcactggagaattaaaaattcccagtgatttaggaatataaattatattggaagcaattaggataattctagttaaataatgtggaaagatgccctgaataaggggctagccagccagaagaggggggtggtcagcctttctagtactggccagtttggccatgtagaattttgaacgatgtcaaattatcacatattatattttacttttgatg

SEQ ID NO: 25730 - DNA, 167 bp, Macaca Mulatta
  misc_feature (1)...(167): n = A,T,C or G
gatggattgataactttaatggaccaagtggtctctttattgcggnggcagggaaaggaattcttcgaacaatacgtgcctccaacaatgcccttgcagatcttgttcctgtagatgtagttgtcaacatgagtcttgcggcagcctggtattccggagttaatagn

SEQ ID NO: 25731 - DNA, 594 bp, Macaca Mulatta
  misc_feature (1)...(594): n = A,T,C or G
aatttgtaatggtttctgtgggctgtagactctttgtatttacttggaaattcgtcatgtggatacgtttttggagatgaatttcatctcatgagttgctgtgggatttaaacaacaggaaatatgtccctaaatgggaacaaatataatcccacaaaaccaacaattttatttgcttctactacatcaggcagaattcttcaattaagttgaactacatttgttgatcccttttctcaacttacccctttatgccacccactgaaaagaaaagcaaatagctaggtctggcttcctgttttttgtctacgtcccagctgacattcagtcaaatgctgggatacttctaatttggtggtgtttctctgtacatttttcagtgcaactgtttagtcatgtgttttcatctaagaaattctcttttgaatatttaagccttgatccttttattctgaaaccattaatattccttcttggccagngtgtggtgggtcacgcctgtaataccagcactttgggaggctgaggcggatggatgacctgaggtcaggaattccataccagcctgaccaacatggagaaaccccatctcta

SEQ ID NO: 25732 - DNA, 1159 bp, Macaca Mulatta
  misc_feature (1)...(1159): n = A,T,C or G
caggagttcgagagcaagcatggccaacatggtgagatcccttctctactaaaactacgaaattaatcaggtgtggtgacgcatgcctttagtcccaggtacttgggaggctgaagcagannnnnnnnnnnnnntcnnnnnnnnnnnnnnnnnnnnnnnnnnnnnngtnnnnnnnnnnnnnnnnnnnnacaacaagagcaaannnnnnnnnnnnnnnnnnnnnnnnnnnnnnngatatttgatatttggaggcagagagaccccagaggtgcaggtgcatagaggaaaagccacagaggacacggctgggagactccctgccagccaggagaattgacctcagagaaaacaactctcacccaaccctcgaactttggacctgcagcctccagatcttcgagaaaataaatgcccgccgtgtggacacctggcccggggcatcttctatggaggccacggcatgaaggggtcatttttatagagtctcattctctaataacttacatctgccttgaaaatgtcaagtcaaatttaaagtgtggagaagagcctctaaatttcatatttcattagcaaagaaagaattgtaatttgggacacacacgcagtccgggtggtgttcaccatgtcgggagaacaaagagatggcaattataggaggagaaatgttctcttgccctttgggaaagcccgtgggcactaggaagggttgggagctgggaggttccattgctgagttgctgcttttggagcaaggagtccaagacttacagccatttatcgcagaagctatggataaagctggtttcagggtacaatgcacagtttcaggagtcaggcttgcacagaagtccatttcgggagcaatggcgtgtggcctgattgcttttcctccctggcccctggcctctgttttagctgggcaggacatgaatgacccaattcgtaggatgaaatttacaaaggatgtttctcaaaacttctggtattcaatttacatatattcacacccatttaggttgagtttatttattgatttattttcaggcagggtctcgatctactctgcccagaccggagttcagtggtgcgatctctgttcactccagcctccacctccagggctcaataatcctcccacttcagccttccaagtagc

SEQ ID NO: 25733 - DNA, 800 bp, Macaca Mulatta
  misc_feature (1)...(800): n = A,T,C or G
ggtttttgcctcctgcacttccacctgtgagcctgttctcggagatgctggctgcatcattttccatcgctgtggtggcttatgctatcgcagtgtcagtaggaaaagtatatgccaccaagtatgattacgccatcgatgggaaccagnnnnnnnnnnnnnnnnnnnnnnnnnnnnnnnnnnnnnnnnnnnnnnnnnnnnnnnnnnnnnnnnnnnnnnnnnnnnnnnnnnnnnnnnnnnnnnnnnnnnnnnnnnnnnnnnnnnnnnnnnnnnnnnnnnnnnnnnnnnnnnnnnnnnnnnnnnnnnnnnnnnnnnnnnnnnnnnnnnnnnnnnnnnnnnnnnnnnnnnngcagctgttgtgattgccaacctgaaagggatgtttatgcaggtgtgtgacattcctcgtctgtggaggcagaataagattgatgctgnnnnnnnnnnnnnnnnnnnnnnnnnnnnnnnnnnnnnnnnnnnnnnnnnnnnnnnnnnnnnnnnnnnnnnnnnnnnnnnnnnnnnnnnnnnnnnnnnnnnnnnnnnnnnnnnnnnnnnnnnnnnnnnnnnnnnnnnnnnnnnnnnnnnnnnnnnnnnnnnnnnnnnnnnnnnnnnnnnnnnnnnnnnnnnnnnnnnnnnnnnnnnnnnnnnnnnnnnnnnnnnnnnnnnnnnnnnnnnnnnnnnnnnnnnnnnnnnnnnnnnnnnnnnttggatttgatgccattagagtatataataagaggctgaaagcactgaggaaaatacagaaactcataaaaaatggacaattaagagcaacaaag

SEQ ID NO: 25734 - DNA, 172 bp, Macaca Mulatta
aacgagaacaagagtgcactgcagttggagcagcaagtaaaggagctgcaggagaagctgagtgaggtgaagaagacggtaacctctgccccatttaagatgggccgggaggcgggcaccagcctctggggaggggcggtcccaggccaaaggcagctccagctggggggca

SEQ ID NO: 25735 - DNA, 73 bp, Macaca Mulatta
gtattttgaagatggcctgtggctatcttggaaatcggtgatttatgctagaaagcttttaatgttggtttat

SEQ ID NO: 25736 - DNA, 1074 bp, Macaca Mulatta
  misc_feature (1)...(1074): n = A,T,C or G
agttcagtcaaagagtgctgatcctttgaagtcaaagcatcagttggacttagagcgtgctcatttccttgttacacaagcttttgatgaagatgaaaaagagaatgttgaagatgctatagaattgtacacagaagctgtggatctctgtctgaaaacnnnnnnnnnnnnnnnnnnnnnnnnnnnnnnnnnnnnnnnnnnnnnnnnnnnnnnnnnnnnnnnnnnnnnnnnnnnnnnnnnnnnnnnnnnnnnnnnnnnnnnnnnnnnnaatcaggtcaacaaatgttaagccaaagccacctccagtgagagcacattttcccctgggagctaatcccttcctcgaaagacctcagtcattcataagtccacagtcatgtgatgcacaaggacagaaatacacagcagaagaaatagaagtactcaggnnnnnnnnnnnnnnnnnnnnnnnnnnnnnnnnnnnnnnnnnnnnnnnnnnnnnnnnnnnnnnnnnnnnnnnnnnnnnnnnnnnnnnnnnnnnnnnnnnnnnnnnnnnnnnnnnnnnnnnnnnnnnnnnnnnnnnnnnnnnnnnnnnnnnnnnnnnnnnnnnnnnnnnnnnnnnnnnnnnnnnnnnnnnnnnnnnnnnnnnnnnnnnnnnnnnnnnnnnnnnnnnnnnnnnnnnnnnnnnnnnnnnnnnnnnnnnnnnnnnnnnnnnnnnnnnnnnnnnnnnnnnnnnnnnnnnnnnnnnnnnnnnnnnnnnnnnnnnnnnnnnnnnnnnnnnnnnnnnnnnnnnnnnnnnnnnnnnnnnnnnnnnnnnnnnnnnnnnnnnnnnnnnnnnnnnnnnnnnnnnnnnnnnnnnnnnnnnnnnnnnnnnnnnnnnnnnnnnnnnnnnnnnnnnnnnnnnnnnnnnnnnnnnnnnnnnnnnnnnnnnnnnnnnnnnnnnnnnnnnnnnnnnnnnnnnnnnnnnnnnnnnnnnnnnnnnnnnnnnnaatattgatcttcatgcactgactggctggataccagaaagaattgctatgcattcagatagccaaactttcagtaaggataattctttcagaatgctttatcaaa

SEQ ID NO: 25737 - DNA, 518 bp, Macaca Mulatta
  misc_feature (1)...(518): n = A,T,C or G
agagagagccccagactgaggaaaggatggacggatggagaagaatgcctcgctggggactgctgctgctgctctggggctcctgcaccttcggtctcccgacagacaccaccacctttaaacgnnnnnnnnnnnnnnnnnnnnnnnnnnnnnnnnnnnnnnnnnnnnnnnnnnnnnnnnnnnnnnnnnnnnnnnnnnnnnnnnnnnnnnnnnnnnnnnnnnnnnnnnnnnnnnnnnnnnnnnnnnnnnnnnnnnnnnnnnnnnnnnnnnnnnnnnnnnnnnnnnnnnnnnnnnnnnnnnnnnnnnnnnnnnnnnnnnnnnnnnnnnnnnnnnnnnnnnnnnnnnnnnnnnnnnnnnnnnnnnnnnnnnnnnnnnnnnnnnnnnnnnnnnnnnnnnntgtatcacaagctcttcgatgcttcggattcctccagctacaagcacaatggaacggaactcaccctccgctattcaacagggacagtcagtggctttctgagccaggacatcatcaccgt

SEQ ID NO: 25738 - DNA, 172 bp, Macaca Mulatta
cctcgccgaccaggggaagcgccgggcactcagcattcatttcaaacctgaatgtcctggcaccccctttctcccttagccaaagtcttccgcagaggattaagaacctctggtccccttcttctgggtcatgcccatggaggaggggcccctccacctgagccccaccttg

SEQ ID NO: 25739 - DNA, 225 bp, Macaca Mulatta
  misc_feature (1)...(225): n = A,T,C or G
ggaagattactaagcagagctaacactgaaaaatctaatggtactgatgaaaatgggaaagatgagaatactatgaaaaatatattttcaaaaaagaggaaattagaagttgcgtgttcagattgtgaagttgaagttctcccattaggatggganacacatcctagaactgctaanatttgagaatgtccaccaaagttcagtaataatccccaggagcttact

SEQ ID NO: 25740 - DNA, 712 bp, Macaca Mulatta
  misc_feature (1)...(712): n = A,T,C or G
tagcatctttaattagatcacagcattgaattcaacgtttcttctgcaaagaaagttgtggggcataagacaccaggaacgagggaggaggaagacagttttgttttctctttaaaccttgagctctagccgatgcatttgtcaggaaattcgacactttgtgttaagaaaacaaggaaagaggcctgacannnnnnnnnnnnnnnnnnnnnnnnnnnnnnnnnnnnnnnnnnnngggcggatcacctgaggtcgggagtatgagaccatcctgaccaacatggannnnnnnnnnnnnnntnnnnnnnnnnnnnnnnnnnnnnngtggtggtgcacgcctgtaatcccacctacttannnnnnnnnnnnnnnnnnnnnnnnnnnnnncccggaggtggaggttgccgtgaatcgagatcgcnnnnnnnnnnnnnnnnnnnnnnnnnnngagcgaaactcggtctcaaggaaaaaaaagaaagcaaggaaagagtgatttacaaccaaggaaagaaacccacagcacacccttcgcgggtgtcagcgctcccctgacatcactgtggctgcgtgtccttggggtgggtgaggtgtggggaggcaagcccctggccctggctcccgtgccccaccccgcttctctcccttctcggttaagccatagcgaggcctccgctcgtttcagatgtgactttgtttgatagattataaa

SEQ ID NO: 25741 - DNA, 163 bp, Macaca Mulatta
acagtttttatatactcctttaaaatgatgaatgttgcaggttaataaagttaatacctttaaaaacttggtgaaattccattaaagaagccaaaaataaaaactccctgcctctgaaaagtcagattggtatcttcttgtttggcaaccatcagtttgttta

SEQ ID NO: 25742 - DNA, 955 bp, Macaca Mulatta
  misc_feature (1)...(955): n = A,T,C or G
agaaaaaattgtctccacaaaataaaaaaggaaagttgaaaaagctgaaccagcatcggcagctgagttaagtagcgtgcgtaaagaagaagaagctgctgttgccattcgaaccactgaggagcgtcctgcatcttttgactggagctcttttaagccaatgggatttgaagtatcatttctgaagtttcttgaggagtctgcagtgaagcagaagaaaaatattgacaaagaccatccaaatactggaaacaaaaaaggatcccattcaaattcaagaaaaaatactgataagactgctgtgactagtggaaatcatgtatgtccttgtaaagaaagcgaaacgtttgtacagtttgccaatccatcacagcttcagtgcagtgataatgtaaaaattgttttagacaagaatcttaaagattgcactgagcttgtcttaaagcagcttcaggaaatgaaacctaccgtcagtctgaaaaaacttgaagtacattcaaatgatccagatatgtctgttgtgaaagatatcagtataggtaaagccacaggcagaggtcagtactgataattaatgtagtataaatacatcatttaccattttattttaaataggaagccatcaagcatgctagaattgtggaactttcattatattttttgttgttgtcatgaattaacctggacaaaacaaaannnnnnnnnnnnnnnnnnnnnnnacattgtcatgtaaaacttttttttttatccctatgggacttgaggaacagaatcagtacttcagttattgtaaatagctaaacctcaaatttctatcacccaattgcccttttcatgaactaaacaattatctgtgtgattggtatgtttcaccaggtcactgctcatgtataacagtactctttatttgtagatacctttttcgtatatatttattattgtaaatcatgtgctg

SEQ ID NO: 25743 - DNA, 715 bp, Macaca Mulatta
ctaagtccccaggcctggcccaccaatgtctacctcagacagcactccctctgtcttttttttcccattagttattgaagctttggtcaaagtggaattttcctgctctctctgatttctaagaatgatcttaaatggaatttcttaaacttttctgtctttatatctttttctctaggctcttcagaagaataatgatgtacttcctgaattatttcagtgtcatggtactgcagatgagttagttcttcattcttgggcagaagagacaaacgcaatgttaaaatctctaggagtgaccacgaagtttcatagttttccagatgtttaccatgagctaagcaaacctgagttagacaaattgaaattatggattcttacaaaactgccaagagaaatggaaaaacaacaatgaatgaatcaagagtgttttgttaatatacatgtaatgtctttgtgaaaagtgatttttactgccaaattataatgataattaaaatattaagaaataacaatttcctgacttattaaaatgcttatcactgtagagagtagctaatcttactaatgaaaaacaatagacaaacatctgtgcataatttttcagacaattctgtaaatatttggaaaccttttaagtatttaaacctttaaatttttgaaataaagtattctaaactaatataaataaggacaatggaaaaacatgaaaggg

SEQ ID NO: 25744 - DNA, 2437 bp, Macaca Mulatta
  misc_feature (1)...(2437): n = A,T,C or G
ggaaggaaaggaggtgagctggcctcagctgtccacgcctacacaaaaacaggagacccgtacatgcggtctctggtgcagcacatcctcagcctcgtgtctcatcctgttttgagcttcctgtaccgctggatatatgatggggagcttgaggacacttaccacgaannnnnnnnnnnnnnnnnnnnnnnnnnnnnnnnnnnnnnnnnnnnnnnnnnnnnnnnnnnnnnnnnnnnnnnnnnnnnnnnnnnnnnnnnnnnnnnnnnnnnnnnnnnnnnnnnnnnnnnnnnnnnnnnnnnnnnnnnnnnnnnnnnnnnnnnnnnnnnnnnnnnnnnnnnnnnnnnnnnnnnnnnnnnngtgaccaagtctgcagagtcaccccaggacnnnnnnnnnnnnnnnnnnnnnnnnnnnnnnnnnnnnnnnnnnnnnnnnnnnnnnnnnnnnnnnnnnnnnnnnnnnnnnnnnnnnnnnnnnnnnnnnnnnnnnnnnnnnnnnnnnnnnnnnnnnnnnnnnnnnnnnnnnnnnnnnnnnnnnnnnnnnnnnnnnnnnnnnnnnnnnnnnnnnnnnnnnnnnnnnnnnnnnnnnnnnnnnnnnnnnnnnnnnnnnnnnnnnnnnnnnnnnnnnnnnnnnnnnnnnnnnnnnnnnnnnnnnncaacgcacagtttgacagtcctgagatcctgcgaaggctggacgtgcggctgctggaggnnnnnnnnnnnnnnnnnnnnnnnnnnnnnnnnnnnnnnnnnnnnnnnnnnnnnnnnnnnnnnnnnnnnnnnnnnnnnnnnnnnnnnnnnnnnnnnnnnnnnnnnnnnnnnnnnnnnnnnnnnnnnnnnnnnnnnnnnnnnnnnnnnnnnnnnnnnnnnnnnnnnnnnnnnnnnnnnnnnnnnnnnnnnnnnnnnnnnnnnnnnnnnnnnnnnnnnnnnnnnnnnnnnnnnnnnnnnnnnnnnnnnnnnnnnnnnnnnnnnnnnnnnnnnnnnnnnnnnnnnnnnnnnnnnnnnnnnnnnnnnnnnnnnnnnnnnnnnnnnnnnnnnnnnnnnnnnnnnnnnnnnnnnnnnnnnnnnnnnnnnnnnnnnnnnnnnnnnnnnnnnnnnnnnnnnnnnnnnnnnnnnnnnnnnnnnnnnnnnnnnnnnnnnnnnnnnnnnnnnnnnnnnnnnnnnnnnnnnnnnnnnnnnnnnnnnnnnnnnnnnnnnnnnnnnnnnnnnnnnnnnnnnnnnnnnnnnnnnnnnnnnnnnnnnnnnnnnnnnnnnnnnnnnnnnnnnnnnnnnnnnnnnnnnnnnnnnnnnnnnnnnnnnnnnnnnnnnnnnnnnnnnnnnnnnnnnnnnnnnnnnnnnnnnnnnnnnnnnnnnnnnnnnnnnnnnnnnnnnnnnnnnnnnnnnnnnnnnnnnnnnnnnnnnnnnnnnnnnnnnnnnnnnnnnnnnnnnnnnnnnnnnnnnnnnnnnnnnnnnnnnnnnnnnnnnnnnnnnnnnnnnnnnnnnnnnnnnnnnnnnnnnnnnnnnnnnnnnnnnnnnnnnnnnnnnnnnnnnnnnnnnnnnnnnnnnnnnnnnnnnnnnnnnnnnnnnnnnnnnnnnnnnnnnnnnnnnnnnnnnnnnnnnnnnnnnnnnnnnnnnnnnnnnnnnnnnnnnnnnnnnnnnnnnnnnnnnnnnnnnnnnnnnnnnnnnnnnnnnnnnnnnnnnnnnnnnnnnnnnnnnnnnnnnnnnnnnnnnnnnnnnnnnnnnnnnnnnnnnnnnnnnnnnnnnnnnnnnnnnnnnnnnnnnnnnnnnnnnnnnnnnnnnnnnnnnnnnnnnnnnnnnnnnnnnnnnnnnnnnnnnnnnnnnnnnnnnnnnnnnnnnnnnnnnnnnnnnnnnnnnnnnnnnnnnnnnnnnnnnnnnnnnnnnnnnnnnnnnnnnnnnnnnnnnnnnnnnnnnnnnnnnnnnnnnnnnnnnnnnnnnnnnnnnnnnnnnnnnnnnnnnnnnnnnnnnnnnnnnnnnnnnnnnnnnnnnnnnnnnnnnnnnnnnnnnnnnnnnnnnnnnnnnnnnnnnnnnnnnnnnnnnnnnnnnnnnnnnnnnnnnnnnnnnnnnnnnnnnnnnnnnnnnnnnnnnnnnnnnnnnnnnnnnnnnnnnnnnnnnnnnnnnnnnnnnnnnnnnnnnnnnnnnnnnnnnnnnnnnnnnnnnnnnnnnnnnnnnnnnnnnnnnnnnnnnnnnnnnnnnnnnnnnnnnnnnnnnnnnnnnnnnnnnnnnnnnnnnnnnnnnnnnnnnnnnnnnnnnnnnnaatgcgtcagctaaagcagcgtgtacacattaatgatgagaaaaagttaatggagtattttattttcaacgtttacagataagcattggaaagaaatcgacatggataatgaagatttcctttttccttgcctattttttcattgtaaatatttatatactactgaccaagatgttggggt

SEQ ID NO: 25745 - DNA, 225 bp, Macaca Mulatta
cagatgatctgaccataactcccactgacactcgttgggttggtgcatggtggtttggctttctgatttgtgcaggagttaatgtgctcactgccattccttttttctttttgcccaaaacacttccaaaggaaggactggagaataatgctgacatcattaaaaatgaaaatgaagacaaacaaagagaagaggacaagaaagaaaaatatggaatcactaaag

SEQ ID NO: 25746 - DNA, 820 bp, Macaca Mulatta
cgcccccacactcgggagaggtggccaccattgcccccgtccgggcggggctcagcctctcagagggagacggggtcctgaggcagggcagcagcgaggggctcccggccaagagcccaggtcggtcttctgatttggctccccaccccggccgggtccctgaggactgcagtcgagggagcatgtccaagagcactcccgcctccccggagccaggcggggacccgcagaccgtgtggtatgagtacggctgcgtgtgactgtctcatggttgagcttgcaaacctgaaaactactgacacgccttctgactctcacggccttttctcctgcttgcctgcggtgtcaggaaagggtttggaatgaggaaaggggttcccatgcatttctgctgtttgttctgtgaatggaaacactgtgccaagtcccgagaggattacgcttccaggtgtgtaacgtgtcttctgtgtctgccgcttccagcagctgatatctttggaacaaatccacgtcagcacggggacaaattaggatgcaatgacaaactgacttcccccaaagcacacgcgtctccggtatgtcccagtagaacactcatttgcaatgtgttgagctccattaagcatacatacactcacacaacaggctcacgaggctcaggcctggcgagtcgaaaagcccactccctctcccaaaggccactaggtcccaggagaagcccagactggtaatactaaggtctccagggccttgggcagaccccagaggcaggcctgctggtaaaaagtgagagtgctgctgttccattcctgggttcccc

SEQ ID NO: 25747 - DNA, 466 bp, Macaca Mulatta
atctgggcaggaggcctggggatgagggtggggggacccccttgtcccagaggggaagtgaagcaacagcccagctggaagggcgtcttctacagagaaataaagtcacttttgagtcctgagacccgggtctgagcctgggtgtcgggggcgggaaaggggtcctggcaaagagctgggaatgaggtgctgagggatctgaggggctgaggacagggcgggcgctcagccatggtctcgggctcttgggctcagggcactggggtggtgggtgcttgtgctgggctgcttggtcctggtgaggattaggagcccttggggtgatggggtgagagctgagatgagcaagatcacagggtgggcttgggggaagatgccggaatcctgtgagcacaccacagacaccagacatgcccacaaacggtggtgcccacgcagccagcatgtgcacacacacccatgcccg

SEQ ID NO: 25748 - DNA, 2211 bp, Macaca Mulatta
  misc_feature (1)...(2211): n = A,T,C or G
aggtggtgcggttgtgtcagaacccaaagctggcgctaaagaatagcccaccttatatcttagacctgctgccagatacctaccaacatctccgtactatcttgtcaagatatgaggggaagatggagacacttggagaaaatgagtattttagggtattcatggagaatttgatgaagaaaactaagcaaaccataagcctcttcaaggagggaaaagaaagaatgtatgaggagaattctcagcctaggnnnnnnnnnnnnnnnnnnnnnnnnnnnnnnnnnnnnnnnnnnnnnnnnnnnnnnnnnnnnnnnnnnnnnnnnnnnnnnnnnnnnnnnnnnnnnnnnnnnnnnnnnnnnnnnnnnnnnnnnnnnnnnnnnnnnnnnnnnnnnnnnnngacaatagtcccttggaagagctttcgacaggctctacatgaagtgcatcccatcagttctgggctggaggccatggctctgaaatccactattgatctgacctgcaatgattatatttcagtttttgaatttgacatctttacccgactctttcagnagccctggtcctctttgctcaggaattggaacagccttgctgtaactcatcctggctacatggcttttttgacgtatgacgaagtgaaagctcggctccagaaattcattcacaaacctggcagnagttacatcttccggctgagctgtactcgtctgggtcagtgggctattgggtatgttactgctgatgggaacattctccagacaatccctcacaataaacctctcttccaagcactgattgatggcttccgggaaggcttnnnnnnnnnnnnnnnnnnnnnnnnnnnnnnnnnnnnnnnnnnnnnnnnnnnnnnnnnnnnnnnnnnnnnnnnnnnnnnnnnnnnnnaggaacaatatgaattatactgtgagatgggctccacattccagctgtgtaaaatatgtgctgaaaatgataaggatgtaaagattgagccctgtggacacctcatgtgcacatcctgtcttacatcctggcaggngcaggaatcagaaggtcagggctgtcctttctgccgatgtgaaattaaaggtactgaacccatcgtggtagatccatttgatcctagagggagtggcagcctgttgaggcaaggagcagagggagctccctccccaaattnnnnnnnnnnnnnnnnnnnnaggtggaacggccgccttctccattctccatggccccacaagcttcccttcccccagtgccaccacgacttgaccttctgccacagcgagtatgtgttccctcaagtgcttctgctcttggaactgcttctaaggnaggctgcttctggctcccttcataaagacaaaccattgccagtacctcccacacttcgagatcttccgccaccaccgcctccagaccggccatattctgttggaacagaatcccgacctcagagacgccccttgccttgtacaccaggcgattgtccatccagagacaaactgccacctgtcccctctagccgccttggagactcatggctgccccggccgatccccaaagtaccagtatctgccccaagttccagtgatccctggacaggaagagaattaaccaaccggcactcacttccattttcattgccctcacaaatggagcccagaccagatgtgcctaggctcggaagcacgtttagtctggatacctccatgnnnnnnnnnnnnnnnnnnnnnnnnnnnnnnnnnnnnnnnnnnnnnnnnnnnnnnnnnnnnnnnnnnnnnnnnnnnnnnnnnnnnnnnnnnnnnnnnnnnnnnnnnnnnnnnnnnnnnnnnnnnnnnnnnnnnnnnnnnnnnnnnnnnnnnnnnnnnnnnnnnnnnnnnnnnnnnnnnnnnnnnnnnnnnnnnnnnnnnnnnnnnnnnnnnnnnnnnnnnnnnnnnnnnnnnnnnnnnnnnnnnnnnnnnnnnnnnnnnnnnnnnnnnnnnnnnnnnnnnnnnnnnnnnnnnnnnnnnnnnnnnnnnnnnggtgaagggagtttggctgcagcccatgccaacactggccccgaggagccagaaaatgaggatgatgggtatgatgtccctaagccacctgtgccggccgtgctggcccgccggactctgtcagatatctctaatgccagctcctcctttggctggttgtctctggatggtgatcccacaacaa

SEQ ID NO: 25749 - DNA, 761 bp, Macaca Mulatta
ggggcaagtggccgctgataatcatggcgcccctcataaccactgtgtcgctgtggaacctcctgaggggttctccaggcatgaaaagggtctgtttccgggctcgaatccagccctggcacggtggcctgctccaaccgctaccttgctctttcgaggtggggctgccacgctgccggttcagctccgaggccgaatctggtagcccagagaccaagaaacctacatttatggatgaggaagttcaaagcatactcacaaaaatgacaggcttgaacttgcagaagacttttaaaccagctgtacaagaactgaagccaccaacctataagctaatgactcaagcacagttggaagaggctacaagacaggcagttgaagcagctaaagtacgattaaaaatgccaccggttctggaagagcgagtaccaataaatgatgtgttagctgaagatacgattttggaaggaacagaaacaaccaaatatgtgtttactgatatatcatatagcataccacaccgggagcgttttattgtcgttagagaaccaagtggcacactacgcaaagcctcttgggaagaacgggaccggatgatacacatttatttcccaaaagaaggtcgtaaagttgtgacaccaataatttttcaggcaagaaaatctttaggactatgctatagtcggggacaggcatggttgatgtccctcaaatctctgcctttgccccagtttttgagcccagaattcccactgaagttg

SEQ ID NO: 25750 - DNA, 225 bp, Macaca Mulatta
  misc_feature (1)...(225): n = A,T,C or G
tttcataataagttgctttgctttaataatttttaattatatggcttgagtttaaattgtaataagtgtaactaattctaactctataatgtgttcattctggaataatcctaaacatatgaattatgtttgcatgttcacttccaagagcnnnnnnnnnnnnnnnnnnnnnnnnnaatcatcaagtctttcacatttaaataaagtgtttgaaagccttattta

SEQ ID NO: 25751 - DNA, 567 bp, Macaca Mulatta
  misc_feature (1)...(567): n = A,T,C or G
tccgtgtacaacagctggtggccaaggaattgggccagacagggacacggctcactccagctgacaaagcagaacacatgaagcgacaaagacaccccagattgcgcccccagtcagcccagtcttctttccctccctcccctggtacttctcctgatgtgcaactggcaactctggctcagagagttaaggaagttttgccccatgttccattgggtgtcatccagagagacctggccaagactggctgtgtagacttgactatcactaatctgcttgagggagccgtagctttcatgcctgaagacatcaccaagggaactcagtccctacccacagcctctgcccccaaggtgagacccaggacggagactgggggcagccctcacccaactcacaacaggctggatgggtgggtggtaaaagggaaggatgaggctcccccaatatcacattaaattcatggttttcattcaagnnnnnnnnnnnnnnnnnnnnnnnnnnnnnnnnnnnncannnnnnnnnnnnnntaccaattcggcctattgtgagtcgttttaccattca

SEQ ID NO: 25752 - DNA, 910 bp, Macaca Mulatta
aatggaaagggggattcactggaactcatggagagcatcattgtcccttgaatctctcttctgttactccctactcctactcctccccatccccactccttcacaggcaagagaaatatgtgttaaattcactcgtggtgtggacttcaattggcaagcccaggccctattggccctacaagaggtaagaaggcaccaaggcacaattgggtgagggctgagtgggagaaagaggcagcctagaattctccaaggctgactggagtgtcacatgctgaatctgaactcctggaaaagaacaacaaggtaacccctgagggtttggaggctggattctgtgtggtgacagcagaattccctggcaaagttcggtctcattctgtgaacagtttcctacagtcctttgtgccctcagagattaagtttagcgggtctgcaagaaaaagcagcctatgccccttcatctgtgtccatctttttttctctttctgtctccaggcagcggaagcatttctagttcatctctttgaagatgcctatctcctcgccttacatgccggccgagttactctcttcccaaaggatgtgcaactggcccggaggatccggggcattgaggcgggactcggctgagctcctgcgcccagtgtttctgtcagtctttcctgctcagccagggggtaagcgcacccgctttctcatgactggggctggaatttctcaaggaatttcctttctccatccttagtcccttgccacctcaccttccctttgttctctagtaaaggtttgatctagttttgactgtctgggactatgtggcttgtgcccttttgtacaatgttagataaaagatatccttctattaaataatgaccagatgaccccaattttcttttggttgttattt

SEQ ID NO: 25753 - DNA, 254 bp, Macaca Mulatta
tgttttcttccctgctcagaccattctggacaaatatgaactgccagacaccttccatctccctttctgtctgtttttcttgctagttcctctcttctgattaaagctttattccttcatcgttggtctgttccctaacttggacttgctagccctattgttctgaatagaggtttgtgtttgaggtgcagaaaggttcttacgggacgtagtaagacaaggtgtgtaaggaagggtgaattcctcttttgtgt

SEQ ID NO: 25754 - DNA, 1229 bp, Macaca Mulatta
  misc_feature (1)...(1229): n = A,T,C or G
aggctgaagaggtgccgcatctccagctcagcctgtgaggacctctctgcagctctcatagccaataagaatttaacaaggatggatctcagtggcaatggtgttggattcccaggcatgatgctgctttgcgagggcctgcggcatccccaatgcaggctgcagatgattcagtnnnnnnnnnnnnnnnnnnnnnnnnnnnnnnnnnnnnnnnnnnnnnnnnnnnnnnnnnnnnnnnnnnnnnnnnnnnnnnnnnnnnnnnnnnnnnnnnnnnnnnnnnnnnnnnnnnnnnnnnnnnnnnnnnnnnnnnnnnnnnnnnnnnnnnnnnnnnnnnnnnnnnnnnnnnnnnnnnnnnnnnnnnnnnnnnnnnnnnnnnnnnnnnnnnnnnnnnnnnnnnnnnnnnnnnnnnnnnnnnnnnnnnnnnnnnnnnnnnnnnnnnnnnnnnnnnnnnnnnnnnnnnnnnnnnnnnnnnnnnnnnnnnnnnnnnnnnnnnnnnnnnnnnnnnnnnnnnnnnnnnnnnnnnnnnnnnnnnnnnnnnnnnnnnnnnnnnnnnnnnnnnnnnnnnnnnnnnnnnnnnnnnnnnnnnnnnnnnnnnnnnnnnnnnnnnnnnnnnnnnnnnnnnnnnnnnnnnnnnnnnnnnnnnnnnnnnnnnnnnnnnnnnnnnnnnnnnnnnnnnnnnnnnnnnnnnnnnnnnnnnnnnnnnnnnnnnnnnnnnnnnnnnnnnnnnnnnnnnnnnnnnnnnnnnnnnnnnnnnnnnnnnnnnnnnnnnnnnnnnnnnnnnnnnnnnnnnnnnnnnnnnnnnnnnnnnnnnnnnnnnnnnnnnnnnnnnnnnnnnnnnnnnnnnnnnnnnnnnnnnggttatttgggatggacctgaataaaatgacccacagtaggttggcagcgcttcgagtcacaaaaccttatttggacattggctgctgaatggtcctgtctgctggctctccccctgagatctggacagacgaagacgggagggtgttcgtcaccccccacagcataatgatcaggctccttcctagagacagactcatgcagattaagatcaaaagtccctctgcctgagatcaaattaatgtttgacggagctggctgggtgcggtggctcatgtctgtaatcccagcactttgggaggccaaggtgggcggatcacgaggtcaggagatcgagaccatcctggctaatacggtgaaaccccgtctctact

SEQ ID NO: 25755 - DNA, 2149 bp, Macaca Mulatta
  misc_feature (1)...(2149): n = A,T,C or G
gaaagggaccaaagagaatctttgccccacctgcacaaaaatcttacagcctgttaccttgtagtcctaactcccccaaggaggagaccctggggatcagttccccagagacagaggccagcataagcctgccaaaggccagtttaaagaaggaagaggaaaaagcaaccacaaagaatggtccaagcagggnnnnnnnnnnnnnnnnnnnnnnnnnnnnnnnnnnnnnnnnnnnnnnnnnnnnnnnnnnnnnnnnnnnnnnnnnnnnnnnnnnnnnnnnnnnnnnnnnnnnnnnnnnnnnnnnnnnnnnnnnnnnnnnnnnnnnnnnnnnnnnnnnnnnnnnnnnnnnnnnnnnnnnnnnnnnnnnnnnnnnnnnnnnnnnnnnnnnnnnnnnnnnnnnnnnnnnnnnnnnnnnnnnnnnnnnnnnnnnnnnnnnnnnnnnnnnnnnnnnnnnnnnnnnnnnnnnnnnnnnnnnnnnnnnnagtgactattacctgagagggacagttaagtctgacagcttctctcttcctctcccatcttctaaataaggnagggatgggatctggccttgattttgcagagacttcctgtgcccagcccatagtatccaaccaatcagccaaggagccaggaattactgcttctgctactgatactgataatgctaatggngagaggaggtaccacatactcaagagatttcagtgtcttgggaaggtgaagctgcccctgatataagaacgtctaagctaggccagccagatcctgtaccctctaagaagaaatccaatagactcaccttaagcaaaagaaagaaggaagctcnaagatgagaaggtggagaaaactcaaagtggacatgagcacagacaggaagaccaactaaaggagacagttcaggatcattctcagatcacggacctgcaaaaaggagagagaagtggttttggtnggtcaatgtctggtctgggtccagtgttccttcccaaactgtgggaaatggaggcggctgtgtgggaacattgacccctcagttctcccagataattggtcctgtgatcagaacacagncagatgtgcagtataatcgctgtgatattcctgaggagacctggacagggcttgaaagtgatgtggcctatgcctcctacatcccaggatccatcatctgggccaagcaatacggttacccctggtnggtggccaggcatgatagaatctgatcctgacttaggagaatattttctttttacttcccatcttgattccctgccgngtctaagtaccacgtgacattttttggagaaacagtttctcgtgcatggatcccagtcaacatgctaaagaacttccaggagctgtccctggagctatcaggcatgngaaaaagcgcagaaatgactgcagccagaaactgggggtggccctgatgatggctcaagaagcagaacagatcagcattcaggnnnnnnnnnnnnnnnnnnnnnnnnnnnnnnnnnnnnnnnnnnnnnnnnnnnnnnnnnnnnnnnnagacttccagctctttggtttgaccagcccaggatcctgcttnnnnnnnnnnnnnnnnnnnnnnnnnnnnnnnnnnnnnnnnnnnnnnnnnnnngacccaactttgcctatttgtaagcaagtcaaaatacagacccaaaaaaccaagccaagaggnaggccctaagaaaaaatttaaagctccccagagcaaggccttggcagccagcttttcagagggagaagaagttagaacagtgccaaaggacctgggcctatcagcatgtaaaggggcctgcccctcagctgcaaaagaagagccaagaccccgggaacccctgacccaggaggctggacatgttccccttgaggacgaagcctccagtgatctggacctggagcaactcatggaagatgttgggagagagctggggcagagcggggagctgcagcacagtgacagtgatggcgaggacatccccctggcgctgtttgggaagtagctggtgctcctgcgctcccttcttttctctcttctctggggcgcaggagggagaagtggctaagtgctggggctgttcattggctaccaggttcaagtgtgtgttgtgctgtttctttgttaataaagcaggtt

SEQ ID NO: 25756 - DNA, 1998 bp, Macaca Mulatta
  misc_feature (1)...(1998): n = A,T,C or G
aaaacctgtgggtgcctcagaccacagcagagctcacagaacccgaggggattcaggctgaccctccagcatggtagagttcgcgcccttgtttgtgccatgggagcgcaggctgcagacacttgctgtcctacagtttgtcttctcgttcttggctctggngccgagatctgcattgtgggcttcatagccctcctgtttacaagattctggctcctcactgtcctatatgcggcctggtggtacctggaccgagacaagccgcggcaggggggccggcgcgtccaggccatcaggtgctggaccatatggaagtacatgaaggactatttccccatctcgnnnnnnnnnnnnnnnnnnnnnnnnnnnnnnnnnnnnnnnnnnnnnnnnnnnnnnnnnnnnnnnnnnnnnnnnnnnnnnnnnnnnnnnnnnnnnnnnnnnnnnnnnnnnnnnnnnnnnnnnnnnnnnnnnnnnnnnnnnnnnnnnnnnnnnnnnnnnnnnnnnnnnnnnnnnnnnnnnnnnnnnnnnnnnnnnnnnnnnnnngcagggttggtcacatcagaaaaggagagcgctgctcacattctgaacaggaagggtggcggaaacttgctgggcatcattgtagggggtgcccaggaggccctggatgccaggcctggatccttcacgctgttactgcggaaccgaaagggcttcatcaggctcgccctgacacacgggtatcaagcctctgggaagagcactctggtttcagttggcgattggcaaggattttattttgatgggaagagggcagagacgaatgcagattctattttggtagagattttcagtccattcacaatgaagattatattttggtgtctcacgcccaaatacctagaaaagtttccacaagggagactcagtaatctaagaaactaggtggcaatgaacatattccacaaaactggcacttgacctgagacctatgatatctagaagagtgatatttggggtacatttcagagctcttctccctacttggggtgaagcatccttgagaaacatgagccagctgaggtgggagagatttttctgggaaaaacaatgcagatttttgtatctgggaggactgtctgaagcatgctggtctacctctcatggtgcaactggggaagttgtggccctgcaagggacctgcccagagaatggggctgtgaaggtctgggagataacccaggcctccacttccagcccaggtggctgacctctgctccatttcttggtcacagagtccctgcaggaagctaaagggcctttcagcttgtgccttctctggggcctcccacatgccctctttcctctatttgtctccagggcacccctggtgccgatcttctccttcggagagaatgacctatttgaccagattcccaactcnnnnnnnnnnnnnnnnnnnnnnnnngtgccttctctggggcctcccacatgccctctttcctctatttgtctccagggcacccctggtgccgatcttctccttcggagagaatgacctatttgaccagattcccaactcttctggctcctggttgcgctgtatccagaatcggttgcagaagatcatgggcatctccctcccactctttcatggccgtggtgtcttccagtacagctttggtttaataccctaccgccggcccatcaccactgtgggtaagtccaggaccaggctgggagggaggaggcnnnnnnnnnnnnnnnngttgtgtgctgcaaggggacgtggagatgggccagatttattcctgccctaatggggctcacattctagattgggaaacatacacatgcaagcagatagaatagaagacagtctgggataggaactatagcagaggtgccaagagcaatagttgcgaccagttgctgagcatctactgtgtgccaggcactacactagctgccctacatgaagcaactcagcttattctaacaaccttcaaggcagga

SEQ ID NO: 25757 - DNA, 734 bp, Macaca Mulatta
cagcatggtaaacactcactattcctagccctgtcattgctaggtaggtagggatgtagagggaaaacaagattactacgggaccttgcttagagtgcattcaataagtacttgaatggactagagaaatgttgaagtcctaggaaatcactaagggtttatcttctgtacgcccttctgtatttttttttcccccagagttgtaaacaaactagatgttcctgcccagtaaaacttcgccacgtggaccctaaacggccccaccgtcaagatttgtgtggtagatgcaaaggcaaacgcctgtcctgtgacagcactttcagcttcaaatacatcatttaggtgaaagtcagtgttgctgtgcatgcactgatggagtagatgagtgagcttttccgtgcctctcctccacctctcccttctcaaaatacttcatgaaaggcagtgtattctgaaaaagccttcaaataaaggtattgcaacacaatttatatattgcataaaatctgtctttgaaaataaagtttcaagagcgcttgtcttgtgctaacagtctgggcctgtcacttcacctttatgaatgcttgctgatggcagagagtgggccaggctctgagttaggctgtggctacttggaaaacaatttagtggggcctcgtagacgaggtctactttttaggcagctctggaagactgaagcttagaagggagttaactgaataaaaagccaccta

SEQ ID NO: 25758 - DNA, 1439 bp, Macaca Mulatta
  misc_feature (1)...(1439): n = A,T,C or G
agaagcaaatccagagaaattcaacagtcgttttcgaaataaaatgttctatgcaggggtannnnnnnnnnnnnnnnnnnnnnnnnnnnnnnnnnnnnnnnnnnnnnnnnnnnnnnnnnnnnnnnnnnnnnnnnnnnnnnnnnnnnnnnnnnnnnnnnnnnnnnnnnnnnnnnnnnnnnnnnnnnnnnnnnnnnnnnnnnnnnnnnnnnnnnnnnnnnnnnnnnnnnnnnnnnnnnnnnnnnnnnnnnnnnnnnnnnnnnnnnnnnnnnnnnnnnnnnnnnnnnnnnnnnnnnnnnnnnnnnnnnnnnnnnnnnnnnnnnnnnnnnnnnnnnnnnnnnnnnnnnnnnnnnnnnnnnnnnnnnnnnnnnnnnnnnnnnnnnnnnnnnnnnnnnnnnnnnnnnnnnnnnnnnnnnnnnnnnnnnnnnnnnnnnnnnnnnnnnnnnnnnnnnnnnnnnnnnnnnnnnnnnnnnnnnnnnnnnnnnnnnnnnnnnnnnnnnnnnnnnnnnnnnnnnnnnnnnnnnnnnnnnnnnnnnnnnnnnnnnnnnnnnnnnnnnnnnnnnnnnnnnnnnnnnnnnnnnnnnnnnnnnnnnnnnnnnnnnnnnnnnnnnnnnnnnnnnnnnnnnnnnnnnnnnnnnnnnnnnnnnnnnnnnnnnnnnnnnnnnnnnnnnnnnnnnnnnnnnnnnnnnnnnnnnnnnnnnnnnnnnnnnnnnnnnnnnnnnnnnnnnnnnnnnnnnnnnnnnnnnnnnnnnnnnnnnnnnnnnnnnnnnnnnnnnnnnnnnnnnnnnnnnnnnnnnnnnnnnnnnnnnnnnnnnnnnnnnnnnnnnnnnnnnnnnnnnnnnnnnnnnnnnnnnnnnnnnnnnnnnnnaggaacatntgcactttgtgatggagatttcccaagatgagatttttattctggacccagatatggtggtgtcacagccagcggggacacctccgggcatgcctgacctggtggtggagcaagcctcgggnnnnnnnnnnnnnnnnnnnnnnnnnnnnnnnnnnnnnnnnnnnnnnnnnnnnnnnnnnnnnnnnnnnnnnnnnnnnnnnnnnnnnnnnnnnnnnnnnnnnnnnnnnnnnnnnnnnnnnnnnnnnnnnnnnnnnnnnnnnnnnnnnnnnnnnnnnnnnnnnnnnnnnnnnnnnnnnnnnnnnnnnnnnnnnnnnnnnnnnnnnnnnnnnnnnnnnnnnnnnnnnnnnnnnnnnnnnnnnnnnnnnnnnnnnnnnnnnnnnnnnnnnnnnnnnnnnnnnnnnnnnnnnnnnnnnnnnnnnnnnnnnnnnnnnnnnnnnnnnnnnnnnnnnnnnnnnnnnnnnnnnnggtgagactgcactgcacaaggctgcctgccagcggaaccgggctgtgtgccagcttctggtggatgcaggagcatctctgagaaagacggactccaagg

SEQ ID NO: 25759 - DNA, 241 bp, Macaca Mulatta
aggtggccgagacctgccagctggctgtgcgcaggctggagtggctgcagcagcacggcggggagccgacggcaggaccctacctctccgtggaccctgccccgccggctgaggagcgtgacgtggggcgcctgcgggaggcgctgctggacgagtcccggccgctcttcgagcgataccgcgccatgttcgccctgcgcaacgcgggaggcgaggaggccgccctggcgctggccgaggg

SEQ ID NO: 25760 - DNA, 129 bp, Macaca Mulatta
agatccccaaatcactagtaccccattactgtgagctggtgggagcgaaccccaaggtgcgtcccaagagggcccgcttcctgcagaactgccgggcacctggtggcttcatgagcaaccgctttgtag

SEQ ID NO: 25761 - DNA, 643 bp, Macaca Mulatta
caaatgcagcatcacacagaaatggaaattctcccactccgtaacaaaattacagtccatggctgaccttccactgatgaaggaattcatgaaatcaacatttaccccactgctggcccaacacaaattgtgacccactcttgagcatacaggcgagacacgtacaaagctgagtaactgcatctgtcttctaagctagtcaggatcaagtctttgtaagcactgccaaaggtacgcggggttgggtgggggtaatacatagcttgggctttgtagtcctgataaggggtgtctgtgagttcattagcttctttcctgtctatataaaacaagtttcatatttggctactcaaattccatgatttttctgttggggcgctgctggagcagatgagataaaatccctaaactattactagaactatcagcataaaaaggtatgaaagatgaattttccttcgaattttctcttcaaacagatgaaaggaaaaacaaaacagacttagcccaaacccatctttacaggctaaaggttattaagcgccctccaatacatccaactgcactcagaagatctttgctctattttcacaaaaatgaaggaatctgccaaaactaagttttaaacacaggcaagcatgga

SEQ ID NO: 25762 - DNA, 3741 bp, Macaca Mulatta
  misc_feature (1)...(3741): n = A,T,C or G
ggttttggcacaaataccagtgggaatagtatttttggaagtaaaccagcacctgggactcttggaactgggcttggtgcaggatttggaacannnnnnnnnnnnnnnnnnnnnnnnnnnnnnnnnnnnnnnnnnnnnnnnnnnnnnnnnnnnnnnnnnnnnnnnnnnnnnnnnnnnnnnnnnnnnnnnnnnnnnnnnnnnnnnnnnnnnnnnnnnnnnnnnnnnnnnnnnnnnnnnnnnnnnnnnnnnnnnnnnnnnnnnnnnnnnnnnnnnnnnnnnnnnnnnnnnnnnnnnnnnnnnnnnnnnnnnnnnnnnnnnnnnnnnnnnnnnnnnnnnnnnnnnnnnnnnnnnnnnnnnnnnnnnnnngagattgaaaccaacaaatccagcagcccagaaggctcttactacacctactcattataaattgacgccccgccctgccactagagtccggccaaaggctttacaaacaacaggcacagcgaagtcacatctttttgatgggctggatgacgatgaaccatccctagccaatggagcattcatgcccaagnnnnnnnnnnnnnnnnnnnnnnnnnnnnnnnnnnnnnnnnnnnnnnnnnnnnnnnnnnnnnnnnnnnnnnnnnnnnnnnnnnnnnnnnnnnnnnnnnnnnnnnnnnnnnnnnnnagatttagtttcctaagcaaacctgttgatgagaatcaccagcaggacggagatgaagattcccttgtgtcacgtttttatactaatcctattgccaaacctattcctcaaaccccagaaagtgctggaaataaacacaacaacagcaacagtgtggatgataccattgttgcattaaacatgcgtgctgctttgcgaaatgggctggaaggaagcagtgaagaaacctcttttcatgatgagtcacttcaagatgaccgagaagaaatagaaaataattcttaccatatgcatccggcaggnnnnnnnnnnnnnnnnnnnnnnnnnnnnnnnnnnnnnnnnnnnnnnnnnnnnnnnnnnnnnnnnnnnnnnnnnnnnnnnnnnnnnnnnnnnnnnnnnnnnnnnnnnnnnnnnnnnnnnnnnnnnnnnnnnnnnnnnnnnnnnnnnnnnnnnnnnnnnnnnnnnnnnnnnnnnnnnnnnnnnnnnnnnnnnnnnnnnnnnnnnnnnnnnnnnnnnnnnnnnnnnnnnnnnnnnnnnnnnnnnnnnnnnnnnnnnnnnnnnnnnnnnnnnnnnnnnnnnnnnnnnnnnnnnnnnnnnnnnnnnnnnnnnnnnnnnnnnnnnnnnnnnnnnnnnnnnnnnnnnnnnnnnnnnnnnnnnnnnnnnnnnnnnnnnnnnnnnnnnnnnnnnnnnnnnnnnnnnnnnnnnnnnnnnnnnnnnnnnnnnnnnnnnnnnnnnnnnnnnnnnnnnnnnnnnnnnnnnnnnnnnnnnnnnnnnnnnnnnnnnnnnnnnnnnnnnnnnnnnnnnnnnnnnnnnnnnnnnnnnnnnnnnnnnnnnnnnnnnnnnnnnnnnnnnnnnnnnnnnnnnnnnnnnnnnnnnnnnnnnnnnnnnnnnnnnnnnnnnnnnnnnnnnnnnnnnnnnnnnnnnnnnnnnnnnnnnnnnnnnnnnnnnnnnnnnnnnnnnnnnnnnnnnnnnnnnnnnnnnnnnnnnnnnnnnnnnnnnnnnnnnnnnnnnnnnnnnnnnnnnnnnnnnnnnnnnnnnnnnnnnnnnnnnnnnnnnnnnnnnnnnnnnnnnnnnnnnnnnnnnnnnnnnnnnnnnnnnnnnnnnnnnnnnnnnnnnnnnnnnnnnnnnnnnnnnnnnnnnnnnnnnnnnnnnnnnnnnnnnnnnnnnnnnnnnnnnnnnnnnnnnnnnnnnnnnnnnnnnnnnnnnnnnnnnnnnnnnnnnnnnnnnnnnnnnnnnnnnnnnnnnnnnnnnnnnnnnnnnnnnnnnnnnnnnnnnnnnnnnnnnnnnnnnnnnnnnnnnnnnnnnnnnnnnnnnnnnnnnnnnnnnnnnnnnnnnnnnnnnnnnnnnnnnnnnnnnnnnnnnnnnnnnnnnnnnnnnnnnnnnnnnnnnnnnnnnnnnnnnnnnnnnnnnnnnnnnnnnnnnnnnnnnnnnnnnnnnnnnnnnnnnnnnnnnnnnnnnnnnnnnnnnnnnnnnnnnnnnnnnnnnnnnnnnnnnnnnnnnnnnnnnnnnnnnnnnnnnnnnnnnnnnnnnnnnnnnnnnnnnnnnnnnnnnnnnnnnnnnnnnnnnnnnnnnnnnnnnnnnnnnnnnnnnnnnnnnnnnnnnnnnnnnnnnnnnnnnnnnnnnnnnnnnnnnnnnnnnnnnnnnnnnnnnnnnnnnnnnnnnnnnnnnnnnnnnnnnnnnnnnnnnnnnnnnnnnnnnnnnnnnnnnnnnnnnnnnnnnnnnnnnnnnnnnnnnnnnnnnnnnnnnnnnnnnnnnnnnnnnnnnnnnnnnnnnnnnnnnnnnnnnnnnnnnnnnnnnnnnnnnnnnnnnnnnnnnnnnnnnnnnnnnnnnnnnnnnnnnnnnnnnnnnnnnnnnnnnnnnnnnnnnnnnnnnnnnnnnnnnnnnnnnnnnnnnnnnnnnnnnnnnnnnnnnnnnnnnnnnnnnnnnnnnnnnnnnnnnnnnnnnnnnnnnnnnnnnnnnnnnnnnnnnnnnnnnnnnnnnnnnnnnnnnnnnnnnnnnnnnnnnnnnnnnnnnnnnnnnnnnnnnnnnnnnnnnnnnnnnnnnnnnnnnnnnnnnnnnnnnnnnnnnnnnnnnnnnnnnnnnnnnnnnnnnnnnnnnnnnnnnnnnnnnnnnnnnnnnnnnnnnnnnnnnnnnnnnnnnnnnnnnnnnnnnnnnnnnnnnnnnnnnnnnnnnnnnnnnnnnnnnnnnnnnnnnnnnnnnnnnnnnnnnnnnnnnnnnnnnnnnnnnnnnnnnnnnnnnnnnnnnnnnnnnnnnnnnnnnnnnnnnnnnnnnnnnnnnnnnnnnnnnnnnnnnnnnnnnnnnnnnnnnnnnnnnnnnnnnnnnnnnnnnnnnnnnnnnnnnnnnnnnnnnnnnnnnnnnnnnnnnnnnnnnnnnnnnnnnnnnnnnnnnnnnnnnnnnnnnnnnnnnnnnnnnnnnnnnnnnnnnnnnnnnnnnnnnnnnnnnnnnnnnnnnnnnnnnnnnnnnnnnnnnnnnnnnnnnnnnnnnnnnnnnnnnnnnnnnnnnnnnnnnnnnnnnnnnnnnnnnnnnnnnnnnnnnnnnnnnnnnnnnnnnnnnnnnnnnnnnnnnnnnnnnnnnnnnnnnnnnnnnnnnnnnnnnnnnnnnnnnnnnnnnnnnnnnnnnnnnnnnnnnnnnnnnnnnnnnnnnnnnnnnnnnnnnnnnnnnnnnnnnnnnnnnnnnnnnnnnnnnnnnnnnnnnnnnnnnnnnnnnnnnnnnnnnnnnnnnnnnnnnnnnnnnnnnnnnnnnnnnnnnnnnnnnnnnnnnnnnnnnnnnnnnnnnnnnnnnnnnnnnnnnnnnnnnnnnnnnnnnnnnnnnnnnnnnnnnnnnnnnnnnnnnacgtgagaaggctgttcgagagctgcttacccggcactgccagcttttggagacccctgaatcttgggctaaagagactttccttacccagaagctctgtgtacctgccgaatggattcacgaggccaaagctgtacgagcacacatggaatctgacaagcacttagaggccctctgtttatttaaggctgggcactggaaccgctgccacaagctcatcatccgacacttagcttctg

SEQ ID NO: 25763 - DNA, 689 bp, Macaca Mulatta
ggcttcctcgagcttatccatgtaaatttagacttcccctaaagttaatttgcctacctggtcagccttcaaaaactgcaagccacaagaagtactattgataccaacaaatctccagtcagtcttcttagtctcttcccaggttttgccagtcagtcagatgatgatcaggtgaatgtaatgggttttcacttcttaggaggtgcccgagttactcttcttgcttccaaaacttctcaacgatatcgcattcagagtgaacaatttgaagatctttggctcataaccaatgagcttattcttcgccttcaagaatattttgaaaaacagggagtcaaagattttgcatgttctttttctggatctatgccccttcaagaatattttgagttgattgatcatcattttgagttacggataaatggtgaaaaattagaagaactcttatctgagagagctgtacaatttcgggccattcaacgccgactattagcaagattcaaagataaaacccctgcccctcttcaacacctggacaccttgttagatggaacctacaagcaggtaatcgctctagcagatgcagtggaggaaaaccaaggcaatctgttccagtcattcaccaggctgaagagtgccacccatttggtgattctgctgatcgggctgtggcagaagcttagtgctga

SEQ ID NO: 25764 - DNA, 771 bp, Macaca Mulatta
gttgcctcaggctatggcccaccttcctctcacccttccagccgcgttgtcaatggtgaggatgcggtcccctacagctggccctggcaggtttccctgcagtatgagaaaaatggaagcttccaccacacctgcggtggcagcctcatcgcccccgactgggttgtgactgccggccactgcatctcgagctccctgacctaccaggtggcgttaggcgactacaaccttgctgtgaaggagggccccgagcaggtgatccccatcaactctggggacctctttgtgcatccactctggaaccgcttgtgtgtggcctgtggcaatgacatcgccctcatcaagctctcacgcagcgcccagctgggagacgccgtccagctcgcctcactccctcccgctggtgacatccttcccaacgagacaccctgctacatcaccggctggggccgtctctataccaacggaccactcccagacaagctgcagcgggccctgctgcccgtggtggactatgagcactgctccaagtggaactggtggggttccaccgtgaagaagaccatggtgtgtgctggtggggacatccgctccggctgcaacggtgactctggaggacccctcaactgccccacagacgatggtggctggcaggtccacggtgtgaccagctttgtttcttcctttggctgcaacacccaaaggaagcccacagtgttcactcgagtctcggccttcatcgactggatcgaggagaccatagcaagccac

SEQ ID NO: 25765 - DNA, 3004 bp, Macaca Mulatta
  misc_feature (1)...(3004): n = A,T,C or G
gtcaattcacctggtgctgctttggcttcaggctcttccttctgcccagctccatcctgcccagcagcctgcagagaggaggcagctggcaccacactgggctttggagaggttgcggggactgaggacctcaccccgctgcacggagctcctgcgaaagcgaacctgagnnnnnnnnnnnnnnnnnnnnnnnnnnnnnnnnnnnnnnnnnnnnnnnnnnnnnnnnnnnnnnnnnnnnnnnnnnnnnnnnnnnnnnnnnnnnnnnnnnnnnnnnnnnnnnnnnnnnnnnnnnnnnnnnnnnnnnnnnnnnnnnnnnnnnnnnnnnnnnnnnnnnnnnnnnnnnnnnnnnnnnnnnnnnnnnnnnnnnnnnnnnnnnnnnnnnnnnnnnnnnnnnnnnnnnnnnnnnnnnnnnnnnnnnnnnnnnnnnnnnnnnnnnnnnnnnnnnnnnnnnnnnnnnnnnnnnnnnnnnnnnnnnnnnnnnnnnnnnnnnnnnnnnnnnnnnnnnnnnnnnnnnnnnnnnnnnnnnnnnnnnnnnnnnnnnnnnnnnnnnnnnnnnnnnnnnnnnnnnnnnnnnnnnnnnnnnnnnnnnnnnnnnnnnnnnnnnnnnnnnnnnnnnnnnnnnnnnnnnnnnnnnnnnnnnnnnnnnnnnnnnnnnnnnnnnnnnnnnnnnnnnnnnnnnnnnnnnnnnnnnnnnnnnnnnnnnnnnnnnnnnnnnnnnnnnnnnnnnnnnnnnnnnnnnnnnnnnnnnnnnnnnnnnnnnnnnnnnnnnnnnnnnnnnnnnnnnnnnnnnnnnnnnnnnnnnnnnnnnnnnnnnnnnnnnnnnnnnnnnnnnnnnnnnnnnnnnnnnnnnnnnnnnnnnnnnnnnnnnnnnnnnnnnnnnnnnnnnnnnnnnnnnnnnnnnnnnnnnnnnnnnnnnnnnnnnnnnnnnnnnnnnnnnnnnnnnnnnnnnnnnnnnnnnnnnnnnnnnnnnnnnnnnnnnnnnnnnnnnnnnnnnnnnnnnnnnnnnnnnnnnnnnnnnnnnnnnnnnnnnnnnnnnnnnnnnnnnnnnnnnnnnnnnnnnnnnnnnnnnnnnnnnnnnnnnnnnnnnnnnnnnnnnnnnnnnnnnnnnnnnnnnnnnnnnnnnnnnnnnnnnnnnnnnnnnnnnnnnnnnnnnnnnnnnnnnnnnnnnnnnnnnnnnnnnnnnnnnnnnnnnnnnnnnnnnnnnnnnnnnnnnnnnnnnnnnnnnnnnnnnnnnnnnnnnnnnnnnnnnnnnnnnnnnnnnnnnnnnnnnnnnnnnnnnnnnnnnnnnnnnnnnnnnnnnnnnnnnnnnnnnnnnnnnnnnnnnnnnnnnnnnnnnnnnnnnnnnnnnnnnnnnnnnnnnnnnnnnnnnnnnnnnnnnnnnnnnnnnnnnnnnnnnnnnnnnnnnnnnnnnnnnnnnnnnnnnnnnnnnnnnnngctcaagcaggaagccaggaccagggagccctgtccacgggagaagcagcggctggtgcggatgcacgccatccgccccagaggcgacagcgacggcagcctcgtcagctccannnnnnnnnnnnnnnnnnnnnnnnnnnnnnnnnnnnnnnnnnnnnnnnnnnnnnnnnnnnnnnnnnnnnnnnnnnnnnnnnnnnnnnnnnnnnnnnnnnnnnnnnnnnnnnnnnnnnnnnnnnnnnnnnnnnnnnnnnnnnnnnnnnnnnnnnnnnnnnnnnnnnnnnnnnnnnnnnnnnnnnnnnnnnnnnnnnnnnnnnnnnnnnnnnnnnnnnnnnnnnnnnnnnnnnnnnnnnnnnnnnnnnnnnnnnnnnnnnngcagcctgcagccattctcacctggaagccttgatgtcttggagagnagcggcgtcctcatgcggcggaggccagcccgcaggatcctgagccaggtcacggtgctggcgttccagggggatgcgttgctggagcagatcggcgtcatcggcgggaacctcacgggcatcttcatccaccgggtcaccccgggctcggcggcggatcagatggccttgcgcccgggcacccagatcgtgatggtnnnnnnnnnnnnnnnnnnnnnnnnnnnnnnnnnnnnnnnnnnnnnnnnnnnnnnnnnnnnnnnnnnnnnnnnnnnnnnnnnnnnnnnnnnnnnnnnnnnnnnnnnnnnnnnnnnnnnnnnnnnnnnnnnnnnnnnnnnnnnnnnnnnnnnnnnnnnnnnnnnnnnnnnnnnnnnnnnnnnnnnnnnnnnnnnnnnnnnnnnnnnnnnnnnnnnnnnnnnnnnnnnnnnnnnnnnnnnnnnnnnnnnnnnnnnnnnnnnnnnnnnnnnnnnnnnnnnnnnnnnnnnnnnnnnnnnnnnnnnnnnnnnnnnnnnnnnnnnnnnnnnnnnnnnnnnnnnnnnnnnnnnnnnnnnnnnnnnnnnnnnnnnnnnnnnnnnnnnnnnnnnnnnnnnnnnnnnnnnnnnnnnnnnnnnnnnnnnnnnnnnnnnnnnnnnnnnnnnnnnnnnnnnnnnnnnnnnnnnnnnnnnnnnnnnnnnnnnnnnnnnnnnnnnnnnnnnnnnnnnnnnnnnnnnnnnnnnnnnnnnnnnnnnnnnnnnnnnnnnnnnnnnnnnnnnnnnnnnnnnnnnnnnnnnnnnnnnnnnnnnnnnnnnnnnnnnnnnnnnnnnnnnnnnnnnnnnnnnnnnnnnnnnnnnnnnnnnnnnnnnnnnnnnnnnnnnnnnnnnnnnnnnnnnnnnnnnnnnnnnnnnnnnnnnnnnnnnnnnnnnnnnnnnnnnnnnnnnnnnnnnnnnnnnnnnnnnnnnnnnnnnnnnnnnnnnnnnnnnnnnnnnnnnnnnnnnnnnnnnnnnnnnnnnnnnnnnnnnnnnnnnnnnnnnnnnnnnnnnnnnnnnnnnnnnnnnaaagaacacccacggcctcctggacgtccggctggacagtgtctgcgccctgcacaggatggacatcttccccattgtcatccacgtctctgtcaacgagaagatggcaaagaagctcaa

SEQ ID NO: 25766 - DNA, 289 bp, Macaca Mulatta
  misc_feature (1)...(289): n = A,T,C or G
tcactgttttgtgatatagttcactgagcacttacatagattaacagttacaagtttccataaatcagttagacttgacaagcttcagggaaagaattttcaacaactgcaatctttgattgttttactatgggaacttgcagggatataattgacaacattataataataataggtaaannnnnnnnnnnnnggtggctcatgcctataatcccagcactttgagaggccgaggtgggcagatcacaaggtcaggagatcgagaccatcatggccaacatggtgaaac

SEQ ID NO: 25767 - DNA, 802 bp, Macaca Mulatta
ggcagcacaggctaaaccaggaatccttctcttcttcttcctttatcaggccatcagacatgagggagtgttggttgctacggtgatggggctcagagcagaaccaaagcatgattgtgacctccagaggtgatggtaactgcacacatggtttccaagggtcttcctcctaaatttccaggggcctcccaaggaaaatggacatattctttttggaaataaaatacttccaccaacatatctgaggatccttcaggatctttttgtcttcttttacctccatgtgattaattcgactgcttttttcatccacaattaaaacttagtagcttcacctgtgtcttatgtacaacaatagttatctcatccttacaaatagcctttcctcacattaagcaagcaagaattcccattagtcttcaacattagcacttggctcaaacaccctaaccagcgataaagcttccctatgtcacttagctgagtcagtctaggcatctcttttcagtgaggatgatctgagcccagcccacagactctaattctaaagaatgccaagcgaaaacaagaaagacaaagagcctcagagcttagtaaatacctttttgttttctggcttaattttctgcagacagaccttccttgattttttcttaggctccacgtttgatctcacgatcttgtttcaatgattagtctaccagactatgcctctgtgttgaattgctttgaaaagagcattgcttgctacttttaaatcagtttgttagaagacaaatgtaacctgccaagatatctgatg

SEQ ID NO: 25768 - DNA, 612 bp, Macaca Mulatta
  misc_feature (1)...(612): n = A,T,C or G
gcttaatactctggcctggagaaaaggatannnnnnnnnnnnnnnnnnnacccagatcagttgcatgtaaacagatggcacgtggctatttaaaatgctgtatgatgcggctgagtgtnnnnnnnnnnnnnnnnnnnnnnnnnnnnnnnnnnnnnnnnnnngggcagatcatnnnnnnnnnnnnnnnntnnnnnnnnnnnnnnnnnnnnnnnngnnnnnnnnnnnnnnnnnnnnnnngaacttagctgggtgtggtatcgcgtgcctgtaatcctagctacttaannnnnnnnnnnnnnnnnnnnnnnnnnnnntgggtagcgaaggttgcaatgagccgagatcgcnnnnnnnnnnnnnnnnnnnnnnncagtgaaactgggagtgaannnnnnnnnnnnnnnnnnnnnnnnctgtatgaacaagatgagcattccgtcaggctttggggcacctgggcaaagacaaattcatactgtccgcactgtaaaatatgccatatcttggcccttgctttgtatgcaaccttagctgatgggggaaattccaaacaagtatcacaggaaagaggcaggtggaggcggcaggggtctgtgctgtgcaaggcactga

SEQ ID NO: 25769 - DNA, 594 bp, Macaca Mulatta
  misc_feature (1)...(594): n = A,T,C or G
caagttggtgctggaagcgggaggaacggtgaaccgggcggcaggcgagagccaggagacgcccctgcatgtggcggcggcgggcggcctggagcagcatgtggctctgtacctggagcaatggcgccgacgtgggcctgcgcaccagccagggcgagacggcactaaacgcggcgtgcgctggggccgagggcccaggcagctgcaggcggcaccaggttgcggcgcgccggctcctggaagctggagctgatgcccgggccgctgggcgcaagcgccacacgccgctgcacaacgcctgtgccaacggctgcgggggcctggccgagctgctgcttcgccatggggcccgggctgaggtccccaatggggcgggccacacgcccatggactgtgcgctgcaggccgtccaggacgcccccaactgggagcccgaggtcctcttcgccgcactgctggactacggggcccagcctgtgcgccctgagnagatgctgaaacactgtgccaacttccctcgggccctggaagtcctgcttaatgcctatccttgtgtcccatcctgtgagacctgggggaggcggtgctcccaga

SEQ ID NO: 25770 - DNA, 1963 bp, Macaca Mulatta
  misc_feature (1)...(1963): n = A,T,C or G
agcaagggcaagtattttgtaaccttcccatatccatatatgaatggacgccttcatttgggacacacgnnnnnnnnnnnnnnnnnnnnnnnnnnnnnnnnnnnnnnnnnnnnnnnnnnnnnnnnnnnnnnnnnnnnnnnnnnnnnnnnnnnnnnnnnnnnnnnnnnnnnnnnnnnnnnnnnnnnnnnnnnnnnnnnnnnnnnnnnnnnnnnnnnnnnnnnnnnnnnnnnnnnnnnnnnnnnnnnnnnnnnnnnnnnnnnnnnnnnnnnnnnnnnnnnnnnnnnnnnnnnnnnnnnnnnnnnnnnnngagtaaagctgctgctaaagctggatcttctaaataccagtggggcattatgaagtcccttggtctgtctgatacagagatagtaaaattttctgaagcagaatattggctagattatttcccgccactggctattcaggatttaaagagaatgggtttgaaggtannnnnnnnnnnnnnnnnnnnnnnnnnnnnnnnnnnnnnnnnnnnnnnnnnnnnnnnnnnnnnnnnnnnnnnnnnnnnnnnnnnnnnnnnnnnnnnnnnnnnnnnnnnnnnnnnnnnnnnnnnnnnnnnnnnnnnnnnnnnnnnnnnnnnnnnnnnnnnnnnnnnnnnnnnnnnnnnnnnnnnnnnnnnnnnnnnnnnnnnnnnnnnnnnnnnnnnnnnnnnnnnnnnnnnnnnnnnnnnnnnnnnnnnnnnnnnnnnnnnnnnnnnnnnnnnnnnnnnnnnnnnnnnnnnnnnnnnnnnnnnnnnnnnnnnnnnnnnnnnnnnnnnnnnnnnnnnnnnnnnnnnnnnnnnnnnnnnnnnnnnnnnnnnnnnnnnnnnnnnnnnnnnnnnnnnnnnnnnnnnnnnnnnnnnnnnnnnnnnnnnnnnnnnnnnnnnnnnnnnnnnnnnnnnnnnnnnnnnnnnnnnnnnnnnnnnnnnnnnnnnnnnnnnnnnnnnnnnnnnnnnnnnnnnnnnnnnnnnnnnnnnnnnnnnnnnnnnnnnnnnnnnnnnnnnnnnnnnnnnnnnnnnnnnnnnnntgttccttccgactcgcctgatgatattgctgccctcagagacttgaagaaaaagcaagnnnnnnnnnnnnnnnnnnnnnnnnnnnnnnnnnnnnnnnnnnnnnnnnnnnnggtgccagtcattgaaatcccaggttttggaaatctttctgcagtaaccatttgtgatgagttgaaaattcagagccagaatgaccgagaaaaacttgcagaagcgaaggagaagttatatctaaaaggattttatgagggnnnnnnnnnnnnnnnnnnnnnnnnnnnnnnnnnnnnnnnnnnnnnnnnnnnnnnnnnnnnnnnnnnnnnnnnnnnnnngagatgcacttatttacatggaaccagagaaacaagtgatgtccaggtcgtcagatgaatgtgtcgtggctctgtgtgaccagtggtnnnnnnnnnnnnnnnnnnnnnnnnnnnnnnnnnnnnnnnnnnnnnnnnnnnnnnnnnnnnnnnnnnnnnnnnnnnnnnnnnnnnnnnnnnnnnnnnnnnnnnnnnnnnnnnnnnnnnnnnnnnnnnnnnnnnnnnnnnnnnnnnnnnnnnnnnnnnnnnnnnnnnnnnnnnnnnnnnnnnnnnnnnnnnnnnnnnnnnnnnnnnnnnnnnnnnnnnnnnnnnnnnnnnnnnnnnnnnnnnnnnnnnnnnnnnnnnnnnnnnnnnnnnnnnnnnnnnnnnnnnnnagaccacaacagatgaccaaggaagtttgggattatgttttcttcaaggaggctccatttcctaagactcagatcccaaaggaaaaattagatcagttaaagcaggagtttgagttctggtatccagttgatcttcgcgtctctggcaaggatcttgttccagaatcatctttcatattacctttataatcatgtggctatgtggccggaacaaa

SEQ ID NO: 25771 - DNA, 1010 bp, Macaca Mulatta
gggctttcactgcaaggcggcggcggtagcggctgtgttgctcgtttctctgagccatccagtgccatcctcgtcgctgcagcgacacacgcgctcgccgccgccatgactgagcagatgacccttcgtggcaccctcaagggccacaacggctgggtaacccagatcgctactaccccgcagttcccggacatgatcctgtccgcctctcgagataagaccatcatcatgtggaaactgaccagggatgagaccaactatggaattccacagcgtgctctgcggggtcactcccactttgttagtgatgtggttatctcctcagatggccagtttgccctctcaggctcctgggatggaaccctgcgcctctgggatctcacaacgggcaccaccacgaggcgatttgtgggccataccaaggatgtgctgagtgtggccttctcctctgacaaccggcagattgtctctggatctcgagataaaaccatcaagctatggaataccctgggtgtgtgcaaatacactgtccaggatgagagccactcagagtgggtgtcttgtgtccgcttctcgcctaacagcagcaaccctatcatcgtctcctgcggctgggacaaactggtcaaggtatggaaacctggctaactgcaagctgaagaccaaccacattggccacacgggctatctgaacacggtgactgtctctccagacggatccctctgtgcttctggaaggcaaaggatggccaggccatgttatgggatctcaacgaagggcaaacacctttacacgctaaatggtgggggacatcatcaatgcccctggtgctttcagcccttaaccgctactgggctgtggtggctgccacagggcccccagcatccaagattctggggaatttggaaggggaaagatcaatgggagaatgaactgaaagcgagaaagtttatcagtaattaccccccaggccagaacccacccgccagggtaccctcccctgggcctg

SEQ ID NO: 25772 - DNA, 951 bp, Macaca Mulatta
gggtgctctttccaccccaaaggggcctctccttttctccactgtcataatctctttctatcttacttgcccatccacactttctcacatttgtctccccctgaattttgcttcctttgggggctcattcttttcacaaggctcacatgctccttgcctctgctctttgtgcactcatgctcagcacacatgcatcctcccctctcctgcgtgtgcccactgaacatgctcgtgtgcaccgcgtttttcacatgtgctttcttcaagttcaaacacatgtgctctcatgcgccctgtattaccatctacatgtgccccactcacggataagggtctgcccctcaatcatgttttggtaagcattgtacaaattgatcaaacatgcatgaatcaagacctttccctgtatgcaacacaatccctgtacatattcccggtgtaccctccacgattaccttgaggaaccctcttccccttaaaacatgggtatactttcttaaacgaatccatttgcaaccccttactcctggatcaactggttatagccactttttacccgacacataaaaatctagggagggggcccatgcctaaaacaatttcttcttagatacagaaaaatcctcataaatatttagcttatgaaaacactctactcatgacatcatattgagaagttcaaaggtaaccaaacacttaaattttctacacatctcaaatattatatgattatctgcccacaagagcatggactgccatattttcaagatgatagtgaatgtattatatattcacctcaaggggggtaaaaataaggagaaaaataaaacaataagggagtgaaatattcttttatgtagaaggtctggaaccactcacacaggattagtacgtctaaaacggcttaataatctctttgtcatattaacaaggaatgggtataagctcagt

SEQ ID NO: 25773 - DNA, 119 bp, Macaca Mulatta
ggaatatttagatgccatcaagaaattttaccagaccagtgtggaatctgttgattttgcaaaggctccagaagaaagtcgaaagaagattaactcctgggtggaaagtcaaacgaatg

SEQ ID NO: 25774 - DNA, 760 bp, Macaca Mulatta
  misc_feature (1)...(760): n = A,T,C or G
ccgtctggctcgggctggggccggcgggagcgcgaacgagcgacggcggaacccgtgggcctgtggactgcagccgcggcggccagcagnnnnnnnnnnnnnnnnnnnnnnnnnnnnnnnnnnnnnnnnnnnnnnnnnnnnnnnnnnnnnnnnnnnnnnnnnnnnnnnnnnnnnnnnnnnnnnnnnnnnnnnnnnnnnnnnnnnnnnnnnnnnnnnnnnnnnnnnnnnnnnnnnnnnnnnnnnnnnnnnnnnnnnnnnnnnnnnnnnnnnnnnnnnnnnnnnnnnnnnnnnnnnnnnnnnnnnnnnnnnnnnnnnnnnnnnnnnnnnnnnnnnnnnnnnnnnnnnnnnaaacatcggagcagtgtgggtccgagcaaacctgtttcccagccccggcggaacatcgtaggctgcaggattcagcatgggtggaaagaggggaatggccctgttacccagtggaaaggaaccgttctggaccaggtgnnnnnnnnnnnnnnnnnnnnnnnnnnnnnnnnnnnnnnnnnnnnnnnnnnnnnnnnnnnnnnnnnnnnnnnnnnnnnnnnnnnnnnnnnnnnnnnnnnnnnnnnnnnnnnnnnnnnnacatctcgaatcagcgatgcacacttggcagacacaatgattggcaaagcagtggaacatatgtttgagacagaggatggttctaaaaatgagtggaggggaatggtcttagcacgtgcacctgtcatgaacacatggttttacattacctatgaga

SEQ ID NO: 25775 - DNA, 83 bp, Macaca Mulatta
ttcaacatttatacatacaaatgtggatggccttaacccagatggacagactgaacttcaggtcttgcttaatatgacgaaaa

SEQ ID NO: 25776 - DNA, 291 bp, Macaca Mulatta
gactgtctccctgcaggagctgcagcaggactttgagaacgcgtcccccactgaccccaacaacaaccagacgcaggctaacggcaccagtgtgtcctacatcaccttcagccccgacagctcctcagctgcccagagtgagccaccggcctctgctgaggcccccggcgagcccagtgacactctggccagtgtcccgcccttcgtcaccttccacaccctcatcctggacatgagtggagtcagctttgtggacttgatgggcatcaagaccctggccaaggtgagctc

SEQ ID NO: 25777 - DNA, 688 bp, Macaca Mulatta
  misc_feature (1)...(688): n = A,T,C or G
atgttgcaagaaaaaatagaccatttggagcgcttgaaggctgagaataatgagatcatctcaaatattagagactcagtcatcaatttgagtgagtctgtggagtttggaccgaaaagttcacaaagcaatttcagtcaaggtgctggctcacgtcttctgccctcacaattatccctctcagttgacactgcagactgtctgtttgcttcacaaagtggaagtcacaattcagatgtgcagnnnnnnnnnnnnnnnnnnnnnnnnnnnnnnnnnnnnnnnnnnnnnnnnnnnnnnnnnnnnnnnnnnnnnnnnnnnnnnnnnnnnnnnnnnnnnnnnnnnnnnnnnnnnnnnnnnnnnnnnnnnnnnnnnnnnnnnnnnnnnnnnnnnnnnnnnnnnnnnnnnnnnnnnnnnnnnnnnnnnnnnnnnnnnnnnnnnnnnnnnnnnnnnnnnnnnnnnnnnnnnnnnnnnnnnnnnnnnnnnnnnnnnnnnnnnnnnnnnnnnnnnnnnnnnnnnnnnnnnnnnnnnnnnnnnnnnnnnnnnnnnnnnnnnnnnnnnagtttaatagaaaatggtcagcttgaaattgtgacaggtggctgggttatgcctgatgaagccactgcacattattttgccttaattgatcaactaattgaaggacatcagtggctggaaaataatatag

SEQ ID NO: 25778 - DNA, 214 bp, Macaca Mulatta
agaataatccaagccgagcctcacctgctgggtccagggctaaagcctttgagaatgttcccatggatcttggaactaggtctaccgtggcagcaaggcacaggctgtgggcctcaggggtcctggaggtcaggcaggtcagccagcagcattggggagtccatctggatctcacgctgcagggactcaatatcggcagggttcatgccatggc

SEQ ID NO: 25779 - DNA, 133 bp, Macaca Mulatta
cagtgccacctcggcgccacctcacccccgttcctaagatcaggccgcaaaggcagtaattcactggtgaaagcagctcagaatccgggaccacaatacccacagcaagtcccccgatgcctcccccatgtcc

SEQ ID NO: 25780 - DNA, 963 bp, Macaca Mulatta
  misc_feature (1)...(963): n = A,T,C or G
gtcttttgaggtattctatttagtattccgatttttattctttagagtgtattttcaaacctaaggaagatacaccttttacttgttctcattgcaaaatcctctctaattctgtatgtatgtctttgttatcttacgtttgctatggagccatgttatatagtgatataataaccacttcatattgtttgtatctttgcttttctacgaagggtacaagacttggtcagataaagacaaagtcacaccccttatttaaatgtaagcagatcaggaagagtgtcctttccaacttctagcatacataggagactcaaattagatactttggcggattattcatgccatttttaataaaacatagttaccaattgtttactgatgctgtggttgattgtctcttccccaggtattgggagatcgatgggcaaacatctgcagatggacagaagaccgctgggttcttttacaagacatccttctcaaatggcaacgtcttactgaagaacaggtgagtcatgtgtgagaaactagctgtaaaaggcatggggggataataaattggaaaagtaaagatttatgtttatttattccttggaattctttaatgtcttgcagtgcctttttagtgcatggctttcagaaaaagaagatgtggtgaacaggattcacacaactggcttttaggatcaaaatgaaatgttatcaagtcttcaaaaactggccgtatgtaatttctagctttncatagtcttataacccagtagtgtatattatcactattatttagtctcttctttgctatggaatattaaatgtttatttttgcttggatcatagattattcaaaatgtcatatttctacttttctgaattaaatgggaaaaactctagctggatttttcactttgttttttcaacaagttgtactattgataaacacagcataccagataagacttt

SEQ ID NO: 25781 - DNA, 3744 bp, Macaca Mulatta
  misc_feature (1)...(3744): n = A,T,C or G
ggaggagctagacattcgaacactgcaaaccaaaaatcgcaagctggcagaaatgttggatcagcggcaggccattgaagatgaacttcgtgagcacattgaaaaactggaacgacgacaggccactgatgatgcctcactattgattgtcaaccgatactggagtcagncagtttgatgaaaacatccgtatcatccttaaacgttatgatctggagcagggcttgggagacctactcacagaacggaaagcccttgttgtgcctgaaccagaaccagactctgatagcaatcaggaacgtaaagatgaccgagagagaggcaagtngggaagggcaagagccagctttctctttccttgctactttggccagcagttccagtgaagagatggagtctcagctgcaggaacgtgtggagtcttcccgccgagccgtgtcccagattgtgactgtctatgataaattgcaagaaaaagtggaactcttatcccggaagctaaacagtggagnagataatctgatagtggaggaagcagtgcaggagctgaactctttcctcgcacaggagaatatgaggctacaggaattgacagatcttcttcaggaaaagcatcgcaccatgtctcaggagnnnnnnnnnnnnnnnnnnnnnnnnnnnnnnnnnnnnnnnnnnnnnnnnnnnnnnnnnnnnnnnnnnnnnnnnnnnnnnnnnnnnnnnnnnnnnnnnnnnnnnnnnnnnnnnnnnnnnnnnnnnnnnnnnnnnnnnnnnnnnnnnnnnnnnnnnnnnnnnnnnnnnnnnnnnnnnnnnnnnnnnnnnnnnnnnnnnnnnnnnnnnnnnnnnnnnnnnnnnnnnnagtttgaggaaatgaatgcagagcttgaagagaacaaagagttggctcagaaccgtctctgtgagctggagaaacttcggcaagactttgaggaggtcactacacaaaatgaaaagctgaaggtnnnnnnnnnnnnnnnnnnnnnnnnnnnnnnnnnnnnnnnnnnnnnnnnnnnnnnnnnnnnnnnnnnnnnnnnnnnnnnnnnnnnnnnnnnnnnnnnnnnnnnnnnnnnnnnnnnnnnnnnnnnnnnnnnnnnnnnnnnnnnnnnnnnnnnnnnnnnnnnnnnnnnnnnnnnnnnnnagcgagatgaggttagtcttcataagaagctgaggactgaagtaattcagctagaagatacattggcccaggtccgcaaggagtatgaaatgctgaggatagaatttgagcagacccttgctgccaatgaacaagcaggnaggccctataaaccgggagatgcgccacctcatcagtagcttccagaatcacaatcaccagctgaaaaggggaggtcctgagatataagcggaaattgagagaagcgcagtctgacctgaacaagnagacacgtctgcgtagtggtagtgccctcctccagtcccagtctagtactgaggaccctaaggatgagcnnnnnnnnnnnnnnnnnnnnnnnnnnnnnnnnnnnnnnnnnnnnnnnnnnnnnnnnnnnnnnnnnnnnnnnnnnnnnnnnnnnnnnnnnnnnnnnnnnnnnnnnnnnnnnnnnnnnnnnnnnnnnnnnnnnnnnnnnnnnnnnnnnnnnnnnnnnnnnnnnnnnnnnnnnnnnnnnnnnnnnnnnnnnnnnnnnnnnnnnnnnnnnnnnnnnnnnnnnnnnnnnnnnnnnnnnnnnnnnnnnnnnnnnnnnnnnnnnnnnnnnnnnnnnnnnnnnnnnnnnnnnnnnnnnnnnnnnnnnnnnnnnnnnnnnnnnnnnnnnnnnnnnnnnnnnnnnnnnnnnnnnnnnnnnnnnnnnnnnnnnnnnnnnnnnnnnnnnnnnnnnnnnnnnnnnnnnnnnnnnnnnnnnnnnnnnnnnnnnnnnnnnnnnnnnnnnnnnnnnnnnnnnnnnnnnnnnnnnnnnnnnnnnnnnnnnnnnnnnnnnnnnnnnnnnnnnnnnnnnnnnnnnnnnnnnnnnnnnnnnnnnnnnnnnnnnnnnnnnnnnnnnnnnnnnnnnnnnnnnnnnnnnnnnnaggaagaagaagcactcctctctgagatggatgtcacaggccaggcctttgaagacatgcaggagcaaaatatccgtttgatgcagcaattgcgggagaaggatgatgcaaatttcaagctcatgtcagagcgtatcaagtccaatcagatccataaattgcttaaagaagagaaggaggagctggcagaccaggttttgactttgaagactcaggtnnnnnnnnnnnnnnnnnnnnnnnnnnnnnnnnnnnnnnnnnnnnnnnnnnnnnnnnnnnnnnnnnnnnnnnnnnnnnnnnnnnnnnnnnnnnnnnnnnnnnnnnnnnnnnnnnnnnnnnnnnnnnnnnnnnnnnnnnnnnnnnnnnnnnnnnnnnnnnnnnnnnnnnnnnnnnnnnnnnnnnnnnnnnnnnnnnnnnnnnnnnnnnnnnnnnnnnnnnnnnnnnnnnnnnnnnnnnnnnnnnnnnnnnnnnnnnnnnnnnnnnnnnnnnnnnnnnnnnnnnnnnnnnnnnnnnnnnnnnnnnnnnnnnnnnnnnnnnnnnnnnnnnnnnnnnnnnnnnnnnnnnnnnnnnnnnnnnnnnnnnnnnnnnnnnnnnnnnnnnnnnnnnnnnnnnnnnnnnnnnnnnnnnnnnnnnnnnnnnnnnnnnnnnnnnnnnnnnnnnnnnnnnnnnnnnnnnnnnnnnnnnnnnnnnnnnnnnnnnnnnnnnnnnnnnnnnnnnnnnnnnnnnnnnnnnnnnnnnnnnnnnnnnnnnnnnnnnnnnnnnnnnnnnnnnnnnnnnnnnnnnnnnnnnnnnnnnnnnnnnnnnnnnnnnnnnnnnnnnnnnnnnnnnnnnnnnnnnnnnnnnnnnnnnnnnnnnnnnnnnnnnnnnnnnnnnnnnnnnnnnnnnnnnnnnnnnnnnnnnnnnnnnnnnnnnnnnnnnnnnnnnnnnnnnnnnnnnnnnnnnnnnnnnnnnnnnnnnnnnnnnnnnnnnnnnnnnnnnnnnnnnnnnnnnnnnnnnnnnnnnnnnnnnnnnnnnnnnnnnnnnnnnnnnnnnnnnnnnnnnnnnnnnnnnnnnnnnccagcccactgtataaacttggattgtccattcctcctgaagaaatcaagttggtatttttgatatggaaaagggaacaaaagtggaaacatggctacttttggggagtgatattttaaaaaataagttgtctatgggcacaaagttttcttcatttgtgtagcaaactttttgtgaatgtggattacaaaatagtgtaattgtgctactctcccctgggtggtttgcagccctgatgaaattatgtctaggatgattcagtccatttcccatttactagcagagtaacttgttaagaccagctgactttcctgttaaagttatttaagttttgaatgctctactacttcaagtctgtaaatttctggaggctagaataattttaaataatatgaccctttgtcttctgatgaaataaagattgaagagggtgagtcaggactgagctggtgaagaaatcttctgggtattctgggaatttgatacggagagaacttggtgagctatgaattactctcagtctcctttttacaggggtggttgtgatccctcttttccagaaaattccgtggaatgtttctgtaggacttttttctccacaagcttgaattaaagcaggattcagtttgc

SEQ ID NO: 25782 - DNA, 275 bp, Macaca Mulatta
gatgactcctcctctgagagtggcagcggtaatggctcctccaccctgaacccttccacatcgagcagcacgcagggcgaccctgccttccccgagatgaatggcaacggcgccgtggcccccatggacttcaccacggccgccgaggatcagcccatcaacctgtgtgacaagctcccgccggccacggcacttggcacaccctcctacccctccgatggctgtggtgccgacgggctgcggagccgagtcaaatacggggtgaagaccacccc

SEQ ID NO: 25783 - DNA, 728 bp, Macaca Mulatta
  misc_feature (1)...(728): n = A,T,C or G
ggcaatgtggcctggatgcatgtgctggcagccctggagctggagcggcgggcagccctgatgggcggccaggtgtacttctgctacgacggatcgccctacaagagctacgaggacttcaacatggaattcctgggcccctgtggactgcagctggtgggtgcccgcccactgctgccctactggctgctggtgttcctcgctgccctcaatgccctgctgcagtggctgctgcggccgctggtgctctacgcgcccctgctgaacccctacacgctggccgtggccaacaccaccttcactgtcagcaccgacaaggctcagcgccattttggctatgagcccctgttctcgtgggaggatagccggacccgcaccattctctgggtacaggccgctgggagttcagcccagtgacggcggggctggggcctggaggcccatcgtggcacatccacccaggtcctgagccctcacaccctggacgggaagggacggctgcattccagagcaggaggtagggctctggggccagaatggctgtcctnnnnnnnnnnnnnnnnnnnnnnnnnnnnnnnnnnnnagacagggtcttgctctgccacccagactggagtgcagtggcgagatcataactcactgcaccctcagcttcctgggttcaagtgatcctcctgcctcagcctcctgaatagctgggaccacaggtgcacaccaccacacctggc

SEQ ID NO: 25784 - DNA, 1412 bp, Macaca Mulatta
  misc_feature (1)...(1412): n = A,T,C or G
agaggacgatgtgtttctggcctcagaggaggagagacaggagtacgtgctcaacgacagcggcatcatcttccgaggcgtggagaagcacatacgagcccagggctggaactacgggcagnnnnnnnnnnnnnnnnnnnnnnnnnnnnnnnnnnnnnnnnnnnnnnnnnnnnnnnnnnnnnnnnnnnnnnnnnnnnnnnnnnnnnnnnnnnnnnnnnnnnnnnnnnnnnnnnnnnnnnnnnnnnnnnnnnnnnnnnnnnnnnnnnnnnnnnnnnnnnnnnnnnnnnnnnnnnnnnnnnnnnnnnnnnnnnnnnnnnnnnnnnnnnnnnnnnnnnnnnnnnnnnnnnnnnnnnnnnnnnnnnnnnnnnnnnnnnnnnnnnnnnnnnnnnnnnnnnnnnnnnnnnnnnnnnnnnnnnnnnnnnnnnnnnnnnnnnnnnnnnnnnnnnnnnnnnnnnnnnnnnnnnnnnnnnnnnnnnnnnnnnnnnnnnnnnnnnnnnnnnnnnnnnnnnnnnnnnnnnnnnnnnnnnnnnnnnnnnnnnnnnnnnnnnnnnnnnnnnnnnnnnnnnnnnnnnnnnnnnnnnnnnnnnnnnnnnnnnnnnnnnnnnnnnnnnnnnnnnnnnnnnnnnnnnnnnnnnnnnnnnnnnnnnnnnnnnnnnnnnnnnnnnnnnnnnnnnnnnnnnnnnnnnnnnnnnnnnnnnnnnnnnnnnnnnnnnnnnnnnnnnnnnnnnnnnnnnnnnnnnnnnnnnnnnnnnnnnnnnnnnnnnnnnnnnnnnnnnnnnnnnnnnnnnnnnnnnnnnnnnnnnnnnnnnnnnnnnnnnnnnnnnnnnnnnnnnnnnnnnnnnnnnnnnnnnnnnnnnnnnnnnnnnnnnnnnnnnnnnnnnnnnnnnnnnnnnnnnnnnnnnnnnnnnnnnnnnnnnnnnnnnnnnnnnnnnnnnnnnnnnnnnnnnnnnnnnnnnnnnnnnnnnnnnnnnnnnnnnnnnnnnnnnnnnnnnnnnnnnnnnnnnnnnnnnnnnnnnnnnnnnnnnnnnnnnnnnnnnnnnnnnnnnnnnnnnnnnnnnnnnnnnnnnnnnnnnnnnnnnnnnnnnnnnnnnnnnnnnnnnnnnnnnnnnnnnnnnnnnnnnnnnnnnnnnnnnnnnnnnnnnnnnnnnnnnnnnnnnnnnnnnnnnnnnnnnnnnnnnnnnnnnnnnnnnnnnnnnnnnnnnnnnnnnnnnnnnnnnnnnnnnnnnnnnnnnnnnnnnnnnnnnnnnnnnnnnngagaagagaatcccaattacaatatcttactctaagtataaagaagacctgacagaggacaagaagatcctgttggctgccatgtgcctcgtcaccaaaggagagaagcttctggtggagaaggacattactctagaggacttcatcaccatcaaggt

SEQ ID NO: 25785 - DNA, 561 bp, Macaca Mulatta
ttaggagttaacagagcagtttcatcaagttgaatctcaactgaataagctaaatcatctcctcactgatattcttgctgatgtgaagacaaaaagaaaaactttggcaaataataaattacatcaaatggaaagagaattatatgtatattttttaaaagatgaagattatctgaaagatattgtggagaatttagaaactcaatcaaagattaaggctgttagtcttgaagattgaaaattactggaaaccgaatctttattacatgtgctcttttatttattaggaggagactgtatataataaacactactaaatttttaaaatttgaggtcaatgggacatttcatttgatgaattcaagtattaatttggcttttttctcatgtggtacattcagagtaccagtgctttttatgacttgagcatgttagtggtacttagtcctggtaattttttacttactgggaaaaagcattattacataatgcaaatatttttaaatatagttatctctctcctttactttctttttagaaatagaaattttctgctgttaa

SEQ ID NO: 25786 - DNA, 685 bp, Macaca Mulatta
ggcttgcagtcctcttggcagacatgaggcaacgattgctcccgttcttcaccagccttctccttgtggctctgctgtttccaggattgtcccaagccagacatgttaaccactcagccaccgaggctctcagagaactccgggaaggagccactgggcaaggcacaaacaggtctcagctgctacgccacccagtgaaacgggcccccataatacggcgcatcccctattacccagaagttgaatcagatttaagaattgtcgactgcaagagaagtgaaggcttctgtcaagaatacttgcacatctctcaccaggaggctcgaggaccctgatttaagagctgcattgtctttttagggtctagatgtttccaggggatgttccaccgggaattagaaataccatctgccttatgcagcaagggacctgcagactttttttctgccattctggtgagaaaaagcgtgacatttgctctgatccctggaataggtgttgcgtatcaaatagagatgaagaaggaaaagagaagccaaagaccgatggcagatctggaatctaaaatgtaagctcctggaaggcagggatcttgaagtatcccaagggcttaaaggaatgtgtggcttgtagtaggtgttcaataaatatttgttgaatgaatttagcaccaaaaaaaaaaaaa

SEQ ID NO: 25787 - DNA, 325 bp, Macaca Mulatta
tctgggtgccagacacgcagcagccaccccccaactctgagcgccacgtggcctggctctgctttccagggtctgggcagtgggcgcggccggggtcgggtctctgagttgacaaggaactgagggtgggcagactggagacaaggtggccccatgctggggaggcgggttgtccagagagagggccacacacagcctcggagctgtgtgcccggtggggaatgagacacgcaggtgaaatgacccagaagatagttctgagcgctgacattcaaagcctgagcccggaggcgtcgggaggagcggaggggtccgcaagagcacg

SEQ ID NO: 25788 - DNA, 130 bp, Macaca Mulatta
aaggtaacaactgattggttctcacagaggaaactgcactgcaaacaagatggggaagaagggactgaggaagacacagaggaaaaatgtactatctgtttgtctattttagaggaaggtgaagatgtga

SEQ ID NO: 25789 - DNA, 469 bp, Macaca Mulatta
  misc_feature (1)...(469): n = A,T,C or G
tcccaagaagcaaactccaaagtcttggacaccttatgtgcagagtgaacagaacaccaccaagtcatggaccactcccatgtgtgaagaacaggattcaaaacagccagagactccaaaatcctgggaaaacaatgacgagagtcaaaaatactcnnnnnnnnnnnnnnnnnnnnnnnnnnnnnnnnnnnnnnnnnnnnnnnnnnnnnnnnnnnnnnnnnnnnnnnnnnnnnnnnnnnnnnnnnnnnnnnnnnnnnnnnnnnnnnnnnnnnnnnnnnnnnnnnnnnnnnnnnnnnnnnnnnnnnnnnnnnnnnnnnntccagtattgaggaaagaaaaactgcaggatctgatgacccagattcaaggaacttgtaactttatgcaagagtctgttctggactttgacaaaccttcaagtgcaattccatcgtcacaaccgccttcagctactccaggtagccccgta

SEQ ID NO: 25790 - DNA, 434 bp, Macaca Mulatta
attccagagcggactggtgtactggccttttgtacaggtaagttccgcctactcagtaatattaactcagggctttggtttccatgtggccctaacgaactctctgtctctgttccagctgaccaacttcagccttgttcctgttcagtggagaacagcttacactggagtctgtggttttctctgggccatcttcgtctgtttttcccagcagagtggtgacggcacattgaagtcagctttcaccattttacgtacaaagtggaccagtgccatagaagggtccccggagaaatgagaagtcaaggactctcttaaagggaccatatatttgacctaaaatgcacagaactgcctgcagacaaaatacttgatgtgccaattatgcatttcattttgaggaattactgctatttgtagacccatttttaaaa

SEQ ID NO: 25791 - DNA, 230 bp, Macaca Mulatta
acaggtggcattgcagcaccctacaacaggctgcccagtgcctgtttgcagctctcgagttggtggggataccaggccagagcctggggttggttgggatgaagcctactctaggatgagaagcgtaggcaggatccagtgacctctgggttcctggccaagagggcagcacagtggaagaaacaagccatctctagctttgcccctttcttgtgtggctgggcccaccg

SEQ ID NO: 25792 - DNA, 92 bp, Macaca Mulatta
aggctttaggtgcttaacacccatgagttcttttacttcacaaagaagacaggattgctaactccatttcgtttgtttgttggttggttggt

SEQ ID NO: 25793 - DNA, 778 bp, Macaca Mulatta
  misc_feature (1)...(778): n = A,T,C or G
cctgcccttagctggaggtcgacaggtgggatcctggatgtgtacatcttcgggggcccggagcccannnnnnnnnnnnnnnnnnnnnnnnnnnnnnnngatacccgttcatgccgccatactggggcctgagcttccacctgtgccgctggggctactcctccaccgccatcacccgccaggtggtggagaacatgaccagggcccacttccccctggnnnnnnntggaacgacttggactacatggactcccggaggaacttcacgttcaacaaggatggcttccgggacttcccagccatggtgcaggatctgcaccaaggcggccggnnnnnnnnnnnnnnnnnnggatcctgccatcagcagctcgggccctgccgggagctacagaccctacgacgagggtctgcggaggggggttttcatcaccaacgagaccggccagccgctgatcgggaaggtnnnnnnnnnnnnnnnnnnnnnnnnnnnnnnnnnnnnnnnnnnnnnnnnnnnnnnnnnnnnnnnnnnnnnnnnnnnnnnnnnnnnnnnnnnnnnnnnnnnnnnnnnnnnnnnnnnnnnnnnnnnnnnnnnnnnnnnnnnnnnnnnnnnnnnnnnnnnnnnnnnnnnnnnnnnnnnnnnnnnnnnnnnnnnnnnnnnnggggtggttggggggaccctccaggcggccaccatctgtgcctccagccaccagttcctctctacacactacaacctgcacaacctctacggcctgactgaagccatcgcctcctacag

SEQ ID NO: 25794 - DNA, 483 bp, Macaca Mulatta
agcagaaaaatatgtagattattgtaaataaaaacaaccacatcagaatgtcacacatggctgttctggagagggcccctgagaaggcattgaatgaagcgagggacccttcctacattgtcaccatccccagtaaaccttggggtattattcatactgacaaggaaccgagtcaatttggtgaataggaaaagccttctcatgaaaacgacaatagaacactgttaccaaattcttcataagaaagatcatattatgttaatgataatcctatttactgtggattaggtatagtgccaacaaattgaatgataaagcaacataatacgtagttattttgatagtgatgaatcctaagttatgtaagttgttcgttgtggaacacattgtgtaacagactcgtgggtgtttttctttcttgttcaaatttaccacagttggtcatttccaaccctcattcaatatttctatcaagaaagagat

SEQ ID NO: 25795 - DNA, 3041 bp, Macaca Mulatta
  misc_feature (1)...(3041): n = A,T,C or G
ctggtctggctgcccgcctccgccgtgctccacgagcgctacctggctttcggctgtgtgcgccgggcgcggggccggtgggagggcagcgcgccnnnnnnnnnnnnnnnnnnnnnnnnnnnnnnnnnnnnnnnnnnnnnnnnnnnnnnnnnnnnacctcgcgtctgctcttccagcgcctgctgccctgcggtgtcatcaagttccgctacatctggatctgctggttcgcggcactggcggcaggggtcgcctacatcgccggcgtcagcccgcgcctgcggctgcccacgctgccgccgcccggcggccaggtcttccggcccagccaccccttcgagcgcttcgacgcagagtatcgccagctgttcctgttcgagcagctgccgcagggcgagggcggccacatgcccgtggttttggtgtggggcgtcctgcctgtggacactggcgaccctctggaccctcgtagcaacagcagcctggtgagggaccctgccttctcggccagtggccctgaggcccagcgctggctgctggcactctgccaccgggcccggaatcagagcttcttcgacacactgcaggaannnnnnnnnnnnnnnnnnnnnnnnnnnnnnnnnnnnnnnnnnnnnnnnnnnnnnnnnnnnnnnnnnnnnnnnnnnnnnnnnnnnnnnnnnnnnnnnnnnnnnnnnnnnnnnnnnnnnnnnnnnnnnnnnnnnnnnnnnnnnnnnnnnnnnnnnnnnnnnnnnnnnnnnnnnnnnnnnnnnnnnnnnnnnnnnnnnnnnnnnnnnnnnnnnnnnnnnnnnnnnnnnnnnnnnnnnnnnnnnnnnnnnnnnnnnnnnnnnnnnnnnnnnnnnnnnnnnnnnnnnnnnnnnnnnnnnnnnnnnnnnnnnnnnnnnnnnnnnnnnnnnnnnnnnnnnnnnnnnnnnnnnnnnnnnnnnnnnnnnnnnnnnnnnnnnnnnnnnnnnnnnnnnnnnnnnnnnnnnnnnnnnnnnnnnnnnnnnnnnnnnnnnnnnnnnnnnnnnnnnnnnnnnnnnnnnnnnnnnnnnnnnnnnnnnnnnnnnnnnnnnnnnnnnnnnnnnnnnnnnnnnnnnnnnnnnnnnnnnnnnnnnnnnnnnnnnnnnnnnnnnnnnnnnnnnnnnnnnnnnnnnnnnnnnnnnnnnnnnnnnnnnnnnnnnnnnnnnnnnnnnnnnnnnnnnnnnnnnnnnnnnnnnnnnnnnnnnnnnnnnnnnnnnnnnnnnnnnnnnnnnnnnnnnnnnnnnnnnnnnnnnnnnnnnnnnnnnnnnnnnnnnnnnnnnnnnnnnnnnnnnnnnnnnnnnnnnnnnnnnnnnnnnnnnnnnnnnnnnnnnnnnnnnnnnnnnnnnnnnnnnnnnnnnnnnnnnnnnnnnnnnnnnnnnnnnnnnnnnnnnnnnnnnnnnnnnnnnnnnnnnnnnnnnnnnnnnnnnnnnnnnnnnnnnnnnnnnnnnnnnnnnnnnnnnnnnnnnnnnnnnnnnnnnnnnnnnnnnnnnnnnnnnnnnnnnnnnnnnnnnnnnnnnnnnnnnnnnnnnnnnnnnnnnnnnnnnnnnnnnnnnnnnnnnnnnnnnnnnnnnnnnnnnnnnnnnnnnnnnnnnnnnnnnnnnnnnnnnnnnnnnnnnnnnnnnnnnnnnnnnnnnnnnnnnnnnnnnnnnnnnnnnnnnnnnnnnnnnnnnnnnnnnnnnnnnnnnnnnnnnnnnnnnnnnnnnnnnnnnnnnnnnnnnnnnnnnnnnnnnnnnnnnnnnnnnnnnnnnnnnnnnnnnnnnnnnnnnnnnnnnnnnnnnnnnnnnnnnnnnnnnnnnnnnnnnnnnnnnnnnnnnnnnnnnnnnnnnnnnnnnnnnnnnnnnnnnnnnnnnnnnnnnnnnnnnnnnnnnnnnnnnnnnnnnnnnnnnnnnnnnnnnnnnnnnnnnnnnnnnnnnnnnnnnnnnnnnnnnnnnnnnnnnnnnnnnnnnnnnnnnnnnnnnnnnnnnnnnnnnnnnnnnnnnnnnnnnnnnnnnnnnnnnnnnnnnnnnnnnnnnnnnnnnnnnnnnnnnnnnnnnnnnnnnnnnnnnnnnnnnnnnnnnnnnnnnnnnnnnnnnnnnnnnnnnnnnnnnnnnnnnnnnnnnnnnnnnnnnnnnnnnnnnnnnnnnnnnnnnnnnnnnnnnnnnnnnnnnnnnnnnnnnnnnnnnnnnnnnnnnnnnnnnnnnnnnnnnnnnnnnnnnnnnnnnnnnnnnnnnnnnnnnnnnnnnnnnnnnnnnnnnnnnnntggctgcgcaggcccagcacccctcgtcgggctatagcagctgagggggacccggggaggccagacagggcacggaaccctgtcagggatgacaaggcaagggcagcaataggctggagcctgaaggtatttctccagatccacagggagaggtctcaccctccagctgtggatgttaaaccctgccagatgtcccaggcttgatctgtctgctcttactcctcacacctggaggattccagcaggaggggttttggaggggacctgcttgtgacctgctgagggcttgtctgcccccacagcaccatctaaaacccctcctctagaagtggggaaggccggatgtgtagcttcgggtatcagaggaggctgacctggcccccatcccaagttacaagaacttcagtgagactaagggacccccatcctagggatcttgtcagggtttcttactgaccagaggagcccgcaggaatcttcgcagcctcctgagtctcacccctttcatacgctcttcatcaggacacttccctctctttccggagcttctctgggcagaattgggctggggcctctctccccaactgccctgctctcctcatactcaccggtttgaccagaaattctccaaatccagccatagatggctgctgggaatgcagcaggagaaggaggatggtcagcctcggagcatctctaaattacgggacagtccctctttggaagcaggctcgtgtgctctcctgtgttaataaacgataataatcctttccatctctgc

SEQ ID NO: 25796 - DNA, 787 bp, Macaca Mulatta
  misc_feature (1)...(787): n = A,T,C or G
atgggtgccaagaacaacgtgactgagttggttttatttggcctttttgagagcagagagatgcagcatgcatgctntgcggtattcttcctctttcatgtgctcactgtcctggggaaccttctggttatcatcaccatcaatgctagcaagactctgaagtctcccatgtatttcttcctgagccacttgtcttttgctgacgtatgttatccatctgctaccatacccaagatgattgctgacacttttgtggagcataagatgcttcacatccttcaatggctgcatgacccagctcttttctgcccacttctttggtggcactgagatcttcctccttacagccatggcttatgaccgctatgtggccatctgtaggcccctgcactacacagccatcatggatcgccggaagtgtggcctgctagcgggggcctcccggttagctggcttcctgcattccatcctgcagaccctcctcacggttcagctgcctttttgtgggcccaatgagatagacaacttcttctgtgatgttcatcccctgctcaagttggcctgtgcagacacctacatggtgggtctcattgtggtggccaacagtggtatgatttctttagtctccttctttatccttctcatttcctatgttatcatcttactgaagctaagaaaccagtcatctgagggccggtgtaaggctctctccacgtgtggctcacacataatcactgtccttttggttcacgtgccccccatgttcatgtacattcgtccctccacc

SEQ ID NO: 25797 - DNA, 286 bp, Macaca Mulatta
gttttttaaatgattctatattattctgagttgtcagcatatatttactgttttatgtcttttcacttccctttcaacacgtacagttttctacccagaaattttatggttaagtttctattttctttcccaaactttctcttgcttatggaattaggaagcttatttttctgatatgcacttcacctatcttgtgacttttccctagaatgccaactgggttgagggttcagtctgtggtcacggagcacagtgaatttaaccagcaccagattcacggttataa

SEQ ID NO: 25798 - DNA, 652 bp, Macaca Mulatta
  misc_feature (1)...(652): n = A,T,C or G
gtcacggacactaccagggnagctcggcgggcagccggatagcaggacgctgacagaagtcccgcagtcgctcggcgtcctcggcgccagcgcacgacccagcgaccaccctgctgcccaagcgtcccctggcggcgacgccggcccgttagcgcgacagatagtacaccaattccagctggacatcactgtgaaaatgggacgggataaagtccgagaaatgtttatgaagaatgcccacgtcacagaccccagggtggttgatcttctggtcattaagggaaagatggaactggaagaaacaattaaagtatggaagcagcggacacatgttatgcggttcttccatgaaacagaagcgccaaggccaaaggatttcctatccaagttctatgttggccatgacccatgaagtcactcagtggaaaggttcatgttgatattattttagagcacaaataaactcgctatacgatggnnnnnnnnnnnnnnnnnnnnnnnnnnnnnnnnnnnnnnnnnnnnnnnnnnnnnnnnnnnnnnnnnnnnnnnnnnnnnnnnnnnnnnnnnnnnnnnnnnnnnnnnnnnnnnnnnnnnnnnnnnnnnnnnnnnnnnnnnnnnnnnnnnnnnnnnnnnnnnnnnnnnnnnnnnnnnn

SEQ ID NO: 25799 - DNA, 466 bp, Macaca Mulatta
gaaataacttgtttatagtatccttccaaaactttttctatacacaaatatttatatataagaatgggatcatattgtgaccatctttccatgtcaataaatagacttcagcagcattctttttaatccagtgtccttttgtttcctcttctcccggccttgtccccaggatcgacgagaacgtgctgggagcccagctggacgttgaggccgcccattcagagatcctcaagtacttccagtcagtcacctccaaccggtggctcatggtcaaaatcttcctcatcctcattgtcttcttcatcatctttgtggtcttccttgcttgaaccctctccactctgaggcactccgttggggtttgggaccctcctaggaaggcaagtggccagtgctgccactgagcctgtgcagggtgcttgggagaaaggccctgtttccctggaactgcaaagaatggccactg

SEQ ID NO: 25800 - DNA, 1105 bp, Macaca Mulatta
  misc_feature (1)...(1105): n = A,T,C or G
atgctgtccttgccttgtggctggctatgtacagccataggattgcctacaatgtttggttatattatttgtggtgtacttctaggaccttcaggactgaatagtattaagnagtctattgtgcaagtggagacattaggagaatttggggtgttttttactctttttcttgttggcctagaattttctccagaaaagctaataaaggtnaaggtgtggaagatttccttacaagggccgtgttacatgacactgttgatgattgcgtttggcttgctatgggggcatctcctgcggatcaaacccacgcagagcgtcttcatttccacctgtctgtccttgtcgagcacacccctcgtgtccaggttcctcgtgggcagcgctcgagctgacagagaaggnaggcgacattgactacagcaccgtgctccttggcatgctggtgacgcaggacgtgcagctcgggctcttcatggccatcatgccgactctcatacaggcgggcgccagtgcatcttctagnnnnnnnnnnnnnnnnnnnnnnnnnnnnnnnnnnnnnnnnnnnnnnnnnnnnnnnnnnnnnnnnnnnnnnnnnnnnnnnnnnnnnnnnnnnnnnnnnnnnnnnnnnnnnnnnnnnnnnnnnnnnnnnnnnnnnnnnnnnnnnnnnnnnnnnnnnnnnnnnnnnnnnnnnnnnnnnnnnnnnnnnnnnnnnnnnnnnnnnnnnnnnnnnnnnnnnnnnnnnnnnnnnnnnnnnnnnnnnnnnnnnnnnnnnnnnnnnnnnnnnnnnnnnnnnnnnnnnnnnnnnnnnnnnnnnnnnnnnnnnnnnnnnnnnnnnnnnnnnnnnnnnnnnnnnnnnnnnnnnnnnnnagggctccacgtgttccccacatttgtggtgtacgagcttacggtgctggtgttcctcaccttgtcagtggtggtcatgaagnagtttctcctggcggtgctggtcctgtctctcattctgccgaggagcagccaatacatcaagtggatcgtctccgcggggcttgcccaggtcagcgagttttcctttgtcctggggagccgggcacgaagagcaggcgtcatctctcgggaggtg

SEQ ID NO: 25801 - DNA, 1054 bp, Macaca Mulatta
  misc_feature (1)...(1054): n = A,T,C or G
ggggggctttgcagacgctgccgccgaggaaagtcctgtactactagccatggtcaaccctaccgtgttcttcgacattgccgtcgacggcgagcctttgggccgcgtctccttcgagctgtttgcagacaaggttccaaagacagcagaaaattttcgtgctctgagcactggagagaaaggatttggttataagggttcctgctttcacagaattattccagggtttatgtgtcagggtggtgacttcacacgccataatggcactggtggcaagtccatctatggggagaaatttgaagatgagaacttcatcctaaagcatacaggtcctggcatcttgtccatggcaaatgctggacccaacacaaatggttcccagtttttcatctgcactgccaagactgagtggttggatggcaagcatgtggtctttggcaaagtgaaagaaggcatgaatattgtggaggccatggagcgctttgggtccaggaatggcaagaccagcaagaagatcaccattgctgactgtggacaactcgaataagtttgacttgtgttttatcttaaccaccagaccattccttctgtagctcaggagagcaccccctccaccccatttgctcgcaggtatccctagaatctttgtgcctcctcgctgcagttcccttttggggtcccgatgtttttcccttgttcctctcccatgccctagcctgggattggcaaaagttaaggtttatggattatgaaaatataaacttaagttaccattggcctataaataacatatttcaacagcgcaatacgcncggccccctcggccctaaaaaattttctaaacattcttttggccccgggcccaaaggaaataaaaagggccaaactttttcccaaaaaacccgggccaaaaaaagggtttgatnnnnnnnnnnnnnnnnnnngggggaaacaaaannnnnnnnnnnnnnnnnnggaggtttggaggttttttggtttttaaagggggcccaccggccttatttnnnnnnnnnnnnnnnnnnnnnnnnggttt

SEQ ID NO: 25802 - DNA, 289 bp, Macaca Mulatta
cactttttctgtaacgtcgtcttctccatgaatgtcatatgctgcacggcctggatcttgaccctgtacgtgatcagcatcgacaggtaccttgggatcaggaggccactcacgtaccctatgaggcagaatgggaaatgcatggcgaagatgattcttctgccttctctccgcctctgtgactttacctcccactctttggttgggctcagaatgtaaatgatgataaggtgtgcttggtcagtcaagactttggctacacgatttactccaccgcagtggcatccta

SEQ ID NO: 25803 - DNA, 667 bp, Macaca Mulatta
cctataggggatgtctttgaataacttcatgaacgtcaaatgttccagatggttattatgacttccttgtcaaagttgaaggtgacaagcgttacattgcaaataccgtagagctcagagtcaagatctccactgaagttggcatcacaaatgttgatctttccactgtggataaggatcagagcattgcacccaaaactacccgggtgacgtacccagccaaagccaagggcacattcatcgcagacagccaccagaactttgccttgttcttccagctggtagatgtgaacactggtgctgaactcactcctcaccagacattcgtccgactccataaccagaagactggccaggaagtggtgtttgttgccgagccagacaacaagaacgtgtacaagtttgaactggatacctctgaaagaaagatcgaatttgactctgcctctggcacctacactctctacttaatcattggagatgctactttgaagaacccaatcctctggaatgtggctgatgtggtcatcaagttccctgaggaagaagctccctcgactgtcttgtcccagaaccttttcactccaaaacaggaaatgcagcacctgttccgcgagcctgaaagaggcccccaccgtggtgtccatacgttcctgccctgatcctc

SEQ ID NO: 25804 - DNA, 920 bp, Macaca Mulatta
aaccaatgaggtggcttccgtatctggaatcgattcagagcgcaccgtggttcaacccaacccaggtctctcaaagtaatgctcgggtactaggagtgtgttctgataaccagctctccacaacatcgccagtgacagtcactgccaagaggctctaccatgttttagcagcctcagaagacaaagataagatgaaaaaggaagttttacaaagcgcaagggacattatgcaatccaaatcagcttgtgaaattaaacaaagtcactttttatgtagtacccaacaaacacaacagaatcagtatttggagcagttgcacttgccccaaagcaaaccaatttccccaaatttcaaagttaaaaccatcaagcttccaactctagatcatacattaaatgaaacagaccacagctatgaaagtcataaacagcaatctgaggttgatgttcaaacctttgccaaacaacaatatctggaaaccaagaaaactgaagcaagcactgaatgtagtcataagcaatctctggctgaaagacattaccagctacctaagaaggagaaaagagtgacaataaaattgcctacagaatccatacagaagaaccatgaagataagctccagatagttcctgggaagcaagaagaatttgtgggatctgacagagggaaacttccaggaagtgaagaaaaaaataagggaccatcaatgattagtcgaaaagaagagagattaataactgaaagaaaacaagaagttttgaagaataaatcagcaccaaaggtcattaagcaaaaggttattgatgcacatcttgattcacagactcaaaattttcagcaaacacaaatacagacctctgaaagtaaagctgaacataaaaaatggccccagccatataatagtctgcaggaagaaaaa

SEQ ID NO: 25805 - DNA, 1715 bp, Macaca Mulatta
  misc_feature (1)...(1715): n = A,T,C or G
gtttggtgaagctgtgaatggtaacctggtggtgggcacactggcctggccatctccatgggtaattgtcatcggatccttcttctccacatgtggggctgggctgcagagcctcacgggggccccacgtctgctgcaggccatctcgagggacggcatcgtgcccttcctgcaggtnnnnnnnnnnnnnnnnnnnnnnnnnnnnnnnnnnnnnnnnnnnnnnnnnnnnnnnnnnnnnnnnnnnnnnnnnnnnnnnnnnnnnnnnnnnnnnnnnnnnnnnnnnnnnnnnnnnnnnnnnnnnnnnnnnnnnnnnnnnnnnnnnnnnnnnnnnnnnnnnnnnnnnnnnnnnnnnnnnnnnnnnnnnnnnnnnnnnnnnnnnnnnnnnnnnnnnnnnnnnnnnnnnnnnnnnnnnnnnnnnnnnnnnnnnnnnnnnnnnnnnnnnnnnnnnnnnnnnnnnnnnnnnnnnnnnnnnnnnnnnnnnnnnnnnnnnnnnnnnnnnnnnnnnnnnnnnnnnnnnnnnnnnnnnnnnnnnnnnnnnnnnnnnnnnnnnnnnnnnnnnnnnnnnnnnnnnnnnnnnnnnnnnnnnnnnnnnnnnnnnnnnnnnnnnnnnnnnnnnnnnnnnnnnnnnnnnnnnnnnnnnnnnnnnnnnnnnnnnnnnnnnnnnnnnnnnnnnnnnnnnnnnnnnnnnnnnnnnnnnnnnnnnnnnnnnnnnnnnnnnnnnnnnnnnnnnnnnnnnnnnnnnnnnnnnnnnnnnnnnnnnnnnnnnnnnnnnnnnnnnnnnnnnnnnnnnnnnnnnnnnnnnnnnnnnnnnnnnnnnnnnnnnnnnnnnnnnnnnnnnnnnnnnnnnnnnnnnnnnnnnnnnnnnnnnnnnnnnnnnnnnnnnnnnnnnnnnnnnnnnnnnnnnnnnnnnnnnnnnnnnnnnnnnnnnnnnnnnnnnnnnnnnnnnnnnnnnnnnnnnnnnnnnnnnnnnnnnnnnnnnnnnnnnnnnnnnnnnnnnnnnnnnnnnnnnnnnnnnnnnnnnnnnnnnnnnnnnnnnnnnnnnnnnnnnnnnnnnnnnnnnnnnnnnnnnnnnnnnnnnnnnnnnnnnnnnnnnnnnnnnnnnnnnnnnnnnnnnnnnnnnnnnnnnnnnnnnnnnnnnnnnnnnnnnnnnnnnnnnnnnnnnnnnnnnnnnnnnnnnnnnnnnnnnnnnnnnnnnnnnnnnnnnnnnnnnnnnnnnnnnnnnnnnnnnnnnnnnnnnnnnnnnnnnnnnnnnnnnnnnnnnnnnnnnnnnnnnnnnnnnnnnnnnnnnnnnnnnnnnnnnnnnnnnnnnnnnnnnnnnnnnnnnnnnnnnnnnnnnnnnnnnnnnnnnnnnnnnnnnnnnnnnnnnnnnnnnnnnnnnnnnnnnnnnnnnnnnnnnnnnnnnnnnnnnnnnnnnnnnnnnnnnnnnnnnnnnnnnnnnnnnnnnnnnnnnnnnnnnnnnnnnnnnnnnnnnnnnnnnnnnnnnnnnnnnnnnnnnnnnnnnnnnnnnnnnnnnaggtgcagctgatccacgatcagagtgctcccagctgccctagcagctctccatccccaggcgaggagcctgagggggaaggggagacagatcctgagaaggtgcatctcacctggaccaaggacaagtcggtggcagagaagaataagggccccagtcctgtctcctctgagggcatcaaggacttcttcagcatgaagcc

SEQ ID NO: 25806 - DNA, 1019 bp, Macaca Mulatta
actggtgggcaggtacgtaccggttcccaccagaacccaatggaatcctgcatattggacatgccaaagccatcaatttcaactttggctatgccaaggccaacaatggcatctgttttctgcgttttgatgacaccaaccctgagaaggaggaagcaaagttcttcagtgccatctgtgatatggtggcctggctgggctacacaccttacaaagtgacgtatgcctctgactattttgaccagctatatgcgtgggctgtggagctcatccgcaggggtctggcttatgtgtgccaccagcgagtagaggagctcaaaggccataatactctgccctcaccctggagagaccgtcccacggaggagtcactgctactctttgaggcaatgcgcaagggcaagttttcagagggcgaggccacactacggatgaagctggtgatggaggatggcaagatggaccctgtagcctaccgagtcaagtatataccacaccaccgcacaggggacaaatggtgcatctatcccacctacgactacacacactgcctctgtgactccatcgagcacatcactcactcactctgcaccaaggaattccaggcccgacgctcttcctatttctggctttgcaatgcactggacatctattgccctgtgcagtgggagtatggccgtctcaacctgcactatgctgttgtctctaagaggaagatcctccagcttgtagcaactggtgctgtgcgggattgggacgacccacggctctttacactcacggccctgcgacggcggggcttcccacctgaagccatcaacagcttctgtgcccggctgggaatgactgtggcacaaaccacaatggaaccacatcttctaaaaacccgtgtgcgtgaattgctgaatgacacagccccacgagccatggctgtgctggaatcactaccggtcatcatcaccaactttcctgctgccaagtccctggaaaatccaggtgcccaaacttccaaactgaag

SEQ ID NO: 25807 - DNA, 517 bp, Macaca Mulatta
  misc_feature (1)...(517): n = A,T,C or G
agtgccaccagtggtacaagaagttcatgactgagtgcccctctggccaactcaccctctatgagttccgccagttcttcggcctcaagaacttgagcccgtcggccagccagtacgtggagcagatgtttgagacttttgacttcaacaaggnnnnnnnnnnnnnnnnnnnnnnnnnnnnnnnnnnnnnnnnnnnnnnnnnnnnnnnnnnnnnnnnnnnnnnnnnnnnnnnnnnnnnnnnnnnnnnnnnnnnnnnnnnnnnnnnnnnnnnnnnnnnnnnnnnnnnnnnnnnnnnnnncaggccattcgcgccattaacccctgcagcgataccgccatgactgcagaggagttcaccgatacagtgttctccaagattgacgtcaacggggatggnggggaactctccctggaagagtttatagagggcgtccagaaggaccagatgcttctggacacactgacacgaagcttggaccttacccgcattgtgcgcaggctccagaatggcgagcaa

SEQ ID NO: 25808 - DNA, 708 bp, Macaca Mulatta
  misc_feature (1)...(708): n = A,T,C or G
atgatcttactcacattcagcactggaagacggttggatttcgtgcatcattcgggggtgtttttcttgcaaaccttgctttggattttatgtgctacagtctgcggaacggagcagtatttcaatgtggaggnnnnnnnnnnnnnnnnnnnnnnnnnnnnnnnnnnnnnnnnnnnnnnnnnnnnnnnnnnnnnnnnnnnnnnnnnnnnnnnnnnnnnnnnnnnnnnnnnnnnnnnnnnnnnnnnnnnnnnnnnnnnnnnnnnnnnnnnnnnnnnnnnnnnnnnnnnnnnnnnnnnnnnnnnnnnnnnnnnnnnnnnnnnnnnnnnnnnnnnnnnnnnnnnnnnnnnnnnnnnnnnnnnnnnnnnnnnnnnnnnnnnnnnnnnnnnnnnnnnnnnnnnnnnnnnnnnnnnnnnnnnnnnnnnnnnnnnnnnnccctgagactcgtaaagctattcgccgtgccttcgatgtgtggcagaatgtaactcctctgacatttgaagaagctctctacagtgaattagaaaatggcaaacgtgatgtggatataaccattatttttgcatctggtttccatggggacagttctccctttgatggagagggaggatttttagcacatgcctacttccctggaccaggaattggaggagatactcattttgactcagatgagccatggacactaggaaatcctaatcatgatgg

SEQ ID NO: 25809 - DNA, 835 bp, Macaca Mulatta
gggaggaggtgtcggcgccgccactgtccggccacagcctagcgctcttcgctgttgctcgttgtctcgcgcagggcgaccccggttctggtgtttggcgccggaattaaacaaccaccatgtcgagcaaaaaggcaaagaccaagaccaccaagaagcgccctcagcgcgcaacatccaatgtgtttgccatgtttgaccagtcacagattcaggagttcaaagaggccttcaacatgattgatcagaatagagatggcttcatcgacaaggaagatttgcatgatatgcttgcttctctagggaagaatcccactgatgcataccttgatgccatgatgaatgaggcaccagggcccatcaatttcaccatgttcctcaccatgtttggtgagaagttaaatggcacagatcctgaagatgtcatcagaaatgcttttgcttgctttgatgaagaagcaacaggcaccattcaggaagattacctgagagagctgctgacaaccatgggggatcggtttacggatgaggaagtggatgagctgtacagagaagcacctattgacaaaaaggggaatttcaattacatcgagttcacgcgcatcctgaaacacggaagcaaaagacaaagatgactgaaagaacttttagctaaaaaccttccaaattacatttgtcttactctgtttttatttctcagacacttcccccaaccctcatagaaacctggttgcatgcagctttagtttcacagcctttgccctcctttttgatgtaatttattcccagaaccttttctggccactttaggcactttggtataattcggactgga

SEQ ID NO: 25810 - DNA, 790 bp, Macaca Mulatta
  misc_feature (1)...(790): n = A,T,C or G
gggatctgcaggtttgggcgtatgctttcatcattaaattatcttataaagttacaaatcacaaaggagaatgagaacttaatgattctattggatttaatatattaagcaagaaaacatactatttacatatgtgtagcttagtaaggcattatcataagtacaaaaactatgaaacagatgcatttttcctcaacatactgtgtcaggtatatactgttttataatttggttgttttagccttgttgcacaccaactcccaaaatataggttactcttgttnnnnnnnnnnnnnnnnnnnntgattttctttgagtggtatatgttattaattaccattagcatttgctcttataaagggcaatgattatagtagacaatattgtaactcagtagacttgttgaatatgcaaacttactgtcaagtgacctcaaaaaaaatgaaaagatagaatacactagtagttcttatcctcttttgtagtaaaccaataataaccattgtggcaataattcatcagttaattttaaagcttcatgttatgcgaaaaagaatcctgctgttatacatgtgacagtgactttgtgctgaaatttcagctattccagataaacattgtatatcttgtaaattaatgtttaaaggtagttttgttcttatagaaagtgttgattgccgggttgcttatagcacttttaagttattctaaaaatgaaattataaagccaaatattggctttaagtagaattttagttgtatagcaccttagaaaatttagtttcctttg

SEQ ID NO: 25811 - DNA, 172 bp, Macaca Mulatta
ctgaactaccagcagaaagtaggcatcatgtactgccaagctggaccgagcactgtataagagatgtactacaacgagtcacctggcccaccctttgaagaatctcctccaactattgggagagcgagttcggctcaaaggatttgagaagtaccgagcacagctcgatacc

SEQ ID NO: 25812 - DNA, 416 bp, Macaca Mulatta
  misc_feature (1)...(416): n = A,T,C or G
agtgtgcgaggcagcctgaagctggagcctgctccccgcagcctctggagcgtatctcagacctttgaagacctatgttgctggccccccagaacccggaacatggcagatggggcgcaggccaagcccaaagcgttcaaaaagaaggtgctggatagatgctcctctgggtggaggggcccacgcttccgagcctcctgtccttcaagaaccaccaggnnnnnnnnnnnnnnnnnnnnnnnnnnnnnnnnnnnnnnnnnnnnnnnnnnnnnnnnnnnnnnnnnnnnnnnnnnnnnnnnnnnnnnnnnnnnnnnnnnnnnnnnnnnnnnnnnnnnnnnnnnnnnnnnnnntcgagggttacggttgctactgtgggctggggggccgtggccagcccaaggatgaggtggactggt

SEQ ID NO: 25813 - DNA, 405 bp, Macaca Mulatta
atgaggatgcttctgcatttgagtttgctagctcttggagctgcctacgtgtatgccatccccacagaaattcccgcaagtgcattggtgaaagagaccttggcactgctttctactcatcgaactctgctgatagccaatgagactctgaggatccctgttcctgtacataaaaatcaccaactgtgcactgaagaaatctttcagggaataggcacactggagagtcaaactgtgcaagggggtactgtggaaagactattcaaaaacttgtccttaataaagaaatacattggcggccaaaaaaaaaagtgtggagaagaaaggcggagagtaaaccaattcctagactacctgcaagagtttcttggtgtaatgaacaccgagtggataatagaaagttga

SEQ ID NO: 25814 - DNA, 2385 bp, Macaca Mulatta
  misc_feature (1)...(2385): n = A,T,C or G
aggtacgcagcaagtggcggccgtgtcctctgtctccccagcgaccccctttcagagcgtgccccccactgtctcccagacgcctgtcatcgctgccacccctgtaccaaccatcactgcaaacgtcacgtcggtcccagtccccccagctgccgccccacctcctcctgccacacccatcgtccctgtggtccctcctacgccgcctgtcgtcaannnnnnnnnnnnnnnnnnnnnnnnnnnnnnnnnnnnnnnnnnnnnnnnnnnnnnnnnnnnnnnnnnnnnnnnnnnnnnnnnnnnnnnnnnnnnnnnnnnnnnnnnnnnnnnnnnnnnnnnnnnnnnnnnnnnnnnnnnnnnnnnnnnnnnnnnnnnnnnnnnnnnnnnnnnnnnnnnnnnnnnnnnnnnnnnnnnnnnnnnnnnnnnnnnnnnnnnnnnnnnnnnnnnnnnnnnnnnnnnnnnnnnnnnnnnnnnnnnnnnnnnnnnnnnnnnnnnnnnnnnnnnnnnnnnnnnnnnnnnnnnnnnnnnnnnnnnnnnnnnnnnnnnnnnnnnnnnnnnnnnnnnnnnnnnnnnnnnnnnnnnnnnnnnnnnnnnnnnnnnnnnnnnnnnnnnnnnnnnnnnnnnnnnnnnnnnnnnnnnnnnnnnnnnnnnnnnnnnnnnnnnnnnnnnnnnnnnnnnnnnnnnnnnnnnnnnnnnnnnnnnnnnnnnnnnnnnnnnnnnnnnnnnnnnnnnnnnnnnnnnnnnnnnnnnnnnnnnnnnnnnnnnnnnnnnnnnnnnnnnnnnnnnnnnnnnnnnnnnnnnnnnnnnnnnnnnnnnnnnnnnnnnnnnnnnnnnnnnnnnnnnnnnnnnnnnnnnnnnnnnnnnnnnnnnnnnnnnnnnnnnnnnnnnnnnnnnnnnnnnnnnnnnnnnagctgaaggccgtgcacgagcagctggccgccctgtctcaggcccccgtaaacaaaccannnnnnnnnnnnnnnnnnnnnnnnnnnnnnnnnnnnnnnnnnnnnnnnnnnnnnnnnnnnnnnnnnnnnnnnnnnnnnnnnnnnnnnnnnnnnnnnnnnnnnntggctccgcctgccaagcaggcccagcagaagaaggctcctgccaagaaggccaacagcacgaccgtggccggcannnnnnnnnnnnnnnnnnnnnnnnnnnnnnnnnnnnnnnnnnnnnnnnnnnnnnnnnnnnnnnnnnnnnnnnnnnnnnnnnnnnnnnnnnnnnnnnnnnnnnnnnnnnnnnnnnnnnnnnnnnnnnnnnnnnnnnnnnnnnnnnnnnnnnnnnnnnnnnnnnnnnnnnnnnnnnnnnnnnnnnnnnnnnnnnnnnnnnnnnnnnnnnnnnnnnnnnnnnnnnnnnnnnnnnnnnnnnnnnnnnnnnnnnnnnnnnnnnnnnnnnnnnnnnnnnnnnnnnnnnnnnnnnnnnnnnnnnnnnnnnnnnnnnnnnnnnnnnnnnnnnnnnnnnnnnnnnnnnnnnnnnnnnnnnnnnnnnnnnnnnnnnnnnnnnnnnnnnnnnnnnnnnnnnnnnnnnnnnnnnnnnnnnnnnnnnnnnnnnnnnnnnnnnnnnnnnnnnnnnnnnnnnnnnnnnnnnnnnnnnnnnnnnnnnnnnnnnnnnnnnnnnnnnnnnnnnnnnnnnnnnnnnnnnnnnnnnnnnnnnnnnnnnnnnnnnnnnnnnnnnnnnnnnnnnnnnnnnnnnnnnnnnnnnnnnnnnnnnnnnnnnnnnnnnnnnnnnnnnnnnnnnnnnnnnnnnnnnnnnnngttccatggtgtgcaggtctgcttcttaattcagtgttatgatatcttccagtttttgctttcataggtcagaggtctatcttgtgtgtgcgttagacttgatgagaaggtgtgaactctgcagaaagtctcttcttcatcactgaattcagtcacttggagatgacaacttcacatgctaacctgatgaccccagaaaactgtgtgagattcgtaccgaagaacctggtggaatccctttgcttagacccaacctggtcgacagctcgagaaagcattttttccaaggaaatgtctcggccatgggtactgtatttgaaagctgtnnnnnnnnnnnnnnnnnnngtccttgtcatgtgggccctgagctataaccctcgtgtctgacgcggccacctctttctggaggggctgaggacagatgtgcctgtttgtggggaccaggctgggcctaagcgaagggttgtcacagccccagcccggagcgtggagcccttgtgggggtcgggtgggatgtgcgttctccgatcgtggtgatgtcaggagctcctcggagggaacagagcggctgtgtgtgcagcctgcaggtttccgtacactgaagcttttacctcaactt

SEQ ID NO: 25815 - DNA, 135 bp, Macaca Mulatta
gttccaatattgaaaaatctgtaaaagacctccagcgctgcacagtgtctcttgcacggtatcgagttgtagttaaagaagagatggatgcttccattaagaaaatgaaacaagcctttgctgaattggagagct

SEQ ID NO: 25816 - DNA, 72 bp, Macaca Mulatta
tgcagctgtgccaggcgcacaggaagctcttaaaaggcaagctatcctccaggttcagctgacaaatatgtt

SEQ ID NO: 25817 - DNA, 572 bp, Macaca Mulatta
  misc_feature (1)...(572): n = A,T,C or G
aagaaggcttttttgctctgcaagctggacatattttgaagcccctccccacgatgctgtatgtgcacaatggttattaggcaatccatacatcaggagaagggacactcttccataagnnnnnnnnnnnnnnnnnnnnnnnnnnnnnnnnnnnnnnnnnnnnnnnnnnnnnnnnnnnnnnnnnnnnnnnnnnnnnnnnnnnnnnnnnnnnnnnnnnnnnnnnnnnnnnnnnnnnnnnnnnnnnnnnnnnnnnnnnnnnnnnnnnnnnnnnnnnnnnnnnnnnnnnnnnnnnnnnnnnnnnnnnnnnnnnnnnnnnnnnnnnnnnnnnnnnnnnnnnnnnnnnnnnnnnnnnnnnnnnnnnnnnnnnnnnnnnnnnnnnnnnagctgatcccacagttaaagacttaatcggaggcttcacggctcttcattatgcagccatgcatggccgggcccgtattgcacgcttgatgttagaatctgaatacaggagcgacatcattaatgcaaaaagcaatgacggctggactcccctgcatgtggctgcccactacggcagggactcatttgtc

SEQ ID NO: 25818 - DNA, 190 bp, Macaca Mulatta
ggccaccaggctgtggatgggggcctggggcaggttctgctggtctaggactctgggctatggagggtgaccctgcagtccgtggctgtctcacagggattgccgtgggccacatctactacttcctggaggatgtcttccccaaccagcctggaggcaagaggctcctgctgacccccggcttcctgtg

SEQ ID NO: 25819 - DNA, 1042 bp, Macaca Mulatta
  misc_feature (1)...(1042): n = A,T,C or G
tgtgtatgtactgaacctccctaccccagcaatnnnnnnnnnnnnnnnnnnnnnnnnnnnnnnnnnnnnnnnnnnnnnnnnnnnnnnnnnnnnnnnnnnnnnnnnnnnnnnnnnnnnnnnnnnnnnnnnnnnnnnnnnnnnnnnnnnnnnnnnnnnnnnnnnnnnnnnnnnnnnnnnnnnnnnnnnnnnnnnnnnnnnnnnnnnnnnnnnnnnnnnnnnnnnnnnnnnnnnnnnnnnnnnnnnnnnnnnnnnnnnnnnnnnnnnnnnnnnnnnnnnnnnnnnnnnnnnnnnnnnnnnnnnnnnnnnnnnnnnnnnnnnnnnnnnnnnnnnnnnnnnnnnnnnnnnnnnnnnnnnnnnnnnnnnnnnnnnnnnnnnnnnnnnnnnnnnnnnnnnnnnnnnnnnnnnnnnnnnnnnnnnnnnnnnnnnnnnnnnnnnnnnnnnnnnnnnnnnnnnnnnnnnnnnnnnnnnnnnnnnnnnnnnnnnnnnnnnnnnnnnnnnnnnnnnnnnnnnnnnnnnnnnnnnnnnnnnnnnnnnnnnnnnnnnnnnnnnnnnnnnnnnnnnnnnnnnnnnnnnnnnnnnnnnnnnnnnnnnnnnnnnnnnnnnnnnnnnnnnnnnnnnnnnnnnnnnnnnnnnnnnnnnnnnnnnnnnnnnnnnnnnnnnnnnnnnnnnnnnnnnnnnnnnnnnnnnnnnnnnnnnnnnnnnnnnnnnnnnnnnnnnnnnnnnnnnnnnnnnnnnnnnnnnnnnnnnnnnnnnnnnnnnnnnnnnnnnnnnnnnnnnnnnnnnnnnnnnnnnnnnnnnnnnnnnnnnnnnnnnnnnnnnnnnnnnnnnnnnnnnnnnnnnnnnnnnnnnnnnnnnnnnnnnnnnnnnnnntttgaccgtataaaattatttggaatgcctgctaaacatcagcctgatttgatatacctccgttacgtgccgctctggaaggtccatattttcacagtcattcagcttacttgtttggtccttttatgggtgataaaagtttcagctgctgcagtggtttttcctatgatgg

SEQ ID NO: 25820 - DNA, 286 bp, Macaca Mulatta
ccacgcgtgccgtggttggctctggctgcaggacactgggctgagcactgacccaggccaccccaattttcaaaagagggtagggaggggtggacaaaagtatttattttgcttattttcttgccagtgtccagattccaaggtactgcttttaaactatattagcactttctgccctgcggcctgcaatgatggtgctgtgattatacacttcataataataatgcagcattttcccatcgggtgtcagagtgagtggctgctccttacagccggagactctgga

SEQ ID NO: 25821 - DNA, 261 bp, Macaca Mulatta
gcctgtgggtctccatcacccagctcctgcccacgctcccggctgctgccctgaccagagtcatcatgtctcttgagcagaggagtccgcactgcaagcttgatgaagaccctgaagcccaaagagaggacttgggcctgatgggtgcacaggatcccacaggcgaggagcaggaggcttcctcctcctctgaaaaggaggaggaggtgtctgctgctgggtcatcaagtcctccccagagtcctcagggaggctcttcct

SEQ ID NO: 25822 - DNA, 542 bp, Macaca Mulatta
  misc_feature (1)...(542): n = A,T,C or G
gaaacatctnnnnnnnnnnnnnnnnnnnnncccacgaaggaaactcccagagaggcctaggaggtaccttggccattattcttgcctcaaatattataaacctccaactcactcagcaatcagggttgcttaatattagtctgtatttctggcctctgagagacctcggccccaaatataagtcagatacagactgaatttccattctgttccatttataatgtgaatgatattaatactcttgttagcttaatgtaatgttggaatttactgtttaatgtgcagtagagcaagatggagagccatctggaattgacttccttctgtctttcttctgtgttcgcttactacttggacccatgtgggaaaaaaactttaaaaggaaggaagtcttcttagggatccagttcaaagctatttgggggcatcagactgaaactcccctctacactactcaagacttcgtgcctcagtccaagtaggcaagagcaaaagggaaatgcatctctacacaatggcccatggtcagagccaccagagca

SEQ ID NO: 25823 - DNA, 1392 bp, Macaca Mulatta
  misc_feature (1)...(1392): n = A,T,C or G
aacgtgctggctaaagccctctatgacaacgtggccgagtccccagatgagctgtccttccgaaagggtgacatcatgacggtgctggagcaggacacgcagggcctggacggctggtggctctgctcactgcacgggcgccagggcatcgttcctgggaaccgcctcnnnnnnnnnnnnnnnnnnnnnnnnnnnnnnnnnnnnnnnnnnnnnnnnnnnnnnnnnnnnnnnnnnnnnnnnnnnnnnnnnnnnnnnnnnnnnnnnnnnnnnnnnnnnnnnnnnnnnnnnnnnnnnnnnnnnnnnnnnnnnnnnnnnnnnnnnnnnnnnnnnnnnnnnnnnnnnnnnnnnnnnnnnnnnnnnnnnnnnnnnnnnnnnnnnnnnnnnnnnnnnnnnnnnnnnnnnnnnnnnnnnnnnnnnnnnnnnnnnnnnnnnnnnnnnnnnnnnnnnnnnnnnnnnnnnnnnnnnnnnnnnnnnnnnnnnnnnnnnnnnnnnnnnnnnnnnnnnnnnnnnnnnnnnnnnnnnnnnnnnnnnnnnnnnnnnnnnnnnnnnnnnnnnnnnnnnnnnnnnnnnnnnnnnnnnnnnnnnnnnnnnnnnnnnnnnnnnnnnnnnnnnnnnnnnnnnnnnnnnnnnnnnnnnnnnnnnnnnnnnnnnnnnnnnnnnnnnnnnnnnnnnnnnnnnnnnnnnnnnnnnnnnnnnnnnnnnnnnnnnnnnnnnnnnnnnnnnnnnnnnnnnnnnnnnnnnnnnnnnnnnnnnnnnnnnnnnnnnnnnnnnnnnnnnnnnnnnnnnnnnnnnnnnnnnnnnnnnnnnnnnnnnnnnnnnnnnnnnnnnnnnnnnnnnnnnnnnnnnnnnnnnnnnnnnnnnnnnnnnnnnnnnnnnnnnnnnnnnnnnnnnnnnnnnnnnnnnnnnnnnnnnnnnnnnnnnnnnnnnnnnnnnnnnnnnnnnnnnnnnnnnnnnnnnnnnnnnnnnnnnnnnnnnnnnnnnnnnnnnnnnnnnnnnnnnnnnnnnnnnnnnnnnnnnnnnnnnnnnnnnnnnnnnnnnnncctccagactccccgccggccgaggacgtgtatgacgtgccgcccccggctcctgacctctacgacgtgccccctggcttgcggcggcctggcccaggcaccctgtatgatgtgccccgtgaacgggtgcttcctcctgagttggctgatggtggcacggttgacaacggtgtgtatgcggtgcctcccccagctgaacgtgaagccccggcggatggcaagcgcctttcggcctccagcaccagcagcacacgtagcagccagtccgcatcctccttggaggtggcgaaggccgggccgggaacccctggagctggaagttgccgttgaagggctggcacggctgcagcag

SEQ ID NO: 25824 - DNA, 171 bp, Macaca Mulatta
agataaagtcctgtttatgaccacagctgtagatttggtaataacagaagtacaggagcctgttcgatttctcctggagacaaaagtccgtgtttgctcacctaatgaaagattattctggcccttcagcaaacggagtactactgaaaatttctttttgaaactaaaaca

SEQ ID NO: 25825 - DNA, 656 bp, Macaca Mulatta
cggcacgaggctcccgctgaagaggtggcagacaagcacaaacctctctagagccctaccacgacaaggccagagaacaccccgatgacggaaagcatccagatggaggcctctacaacaagggaccctcctactcgagttattccgggtacataatgatgccaaatatgaataacgacccatacatgtcaaatggatctctttctccacccatcccgagaacatcaaataaagtgcccgtggtgcagccatcccatgcagtccatcctctcacccccctcatcacttacagtgacgagcacttttctccaggatcacacccgtcacacatcccatcagatgtcaactccaaacaaggcatgtccagacatcctccagctcctgatatccctactttttatcccctgtctccgggtggtgttggacagatcaccccacctcttggctggcaaggtcagcctgtatatcccatcacgggtggattcaggcaaccctacccatcctcactgtcagtcgacacttccatgtccaggttttctcatcatatgattcccggtcctcctggtccccacacaactggcatccctcatccagctattgtaacacctcaggtcaaacaggaacatccccacactgacagtgacctaatgcacgtc

SEQ ID NO: 25826 - DNA, 1443 bp, Macaca Mulatta
  misc_feature (1)...(1443): n = A,T,C or G
ccacacggcccgtgacactctggaccgcgagcacggagcagggtttctacagctgctccccactttctcggacccggccctggacccagcccccgactccgacacgggtccaccatggaggaggcggaccgaatcctcatccattccctgcgccaggccggcacgnggcagttcctccagatgtgcagaccttgcgcgccttcaccactgagctggttgtagaggctgtggtccgctgcctgcgtgtgatcaaccctgctgtgggctctggcctcagccccctgctgcctcttgccatgtctgcccggttccgcctggccatgagcctggctcaggcctgcatggnnnnnnnnnnnnnnnnnnnnnnnnnnnnnnnnnnnnnnnnnnnnnnnnnnnnnnnnnnnnnnnnnnnnnnnnnnnnnnnnnnnnnnnnnnnnnnnnnnnnnnnnnnnnnnnnnnnnnnnnnnnnnnnnnnggtgactcagctattctcctccgggccatcgggagccaaatccgggaccagctggcactgccttgggtcccgcccctccttcgcactcccaagctgcagcacctccaggnnnnnnnnnnnnnnnnnnnnnnnnnnnnnnnnnnnnnnnnnnnnnnnnnnnnnnnnnnnnnnnnnnnnnnnnnnnnnnnnnnnnnnnnnnnnnnnnnnnnnnnnnnnnnnnnnnnnnnnnnnnnnnnnnnnnnnnnnnnnnnnnnnnnnnnnnnnnnnnnnnnnnnnnnnnnnnnnnnnnnnnnnnnnnnnnnnnnnnnnnnnnnnnnnnnnnnnnnnnnnnnnnnnnnnnnnnnnnnnnnnnnnnnnnnnnnnnnnnnnnnnnnnnnnnnnnnnnnnnnnnnnnnnnnnnnnnnnnnnnnnnnnnnnnnnnnnnnnnnnnnnnnnnnnnnnnnnnnnnnnnnnnnnnnnnnnnnnnnnnnnnnnnnnnnnnnnnnnnnnnnnnnnnnnnnnnnnnnnnnnnnnnnnnnnnnnnnnnnnnnnnnnnnnnnnnnnnnnnnnnnnnnnnnnnnnnnnnnnnnnnnnnnnnnnnnnnnnnnnnnnnnnnnnnnnnnnnnnnnnnnnnnnnnnnnnnnnnnnnnnnnnnnnnnnnnnnnnnnnnnnnnnnnnnnnnnnnnnnnnnnnnnnnnnnnnnnnnnnnnnnnnnnnnnnnnnnnnnnnnnnnnnnnnnnnnnnnnnnnnnnnnnnnnnnnnnnnnnnnnnnnnnnnnnnnnnnnnnnnnnnnnnnnnnnnnnnnnnnnnnnnnnnnnnnnnnnnnnnnnnnnnnnnnnnnnnnnnnnnnnnnnnnnnnnnnnnnnnnnncagcttgtggtggagaatagtgcccagcgggtcatccacttggcgggtcagtgggagaagcaccgggtcccactcctggctgagtaccgccacctccgaaagctgcaggattgcagaga

SEQ ID NO: 25827 - DNA, 829 bp, Macaca Mulatta
cctggccatggtctccgtcttcctggtgtcctccatctacttagggattgactggttcctcttctgggtcttccagatcccggcccccttccccgagtacgtcaccgacctgtgcatttgcatcaacagcagcgccaaacccgtcgtctacttcctggccgggagggacaagtcgcagcggctgtgggagccgctcagggtggtcttccagcgggccctgcgggacggcgctgagctgggggaggccgggggcagcacgcccaacacggtcaccatggagatgcagtgccccccggggaacgcctcctgagagcccagcacctggaggaggcaggggcaggaagcggcctccgggaccctttgccttgggacagagatgggcacctgcctctgagtccacaaaggagaagaaacatgtgtttcctctcctcgggcctccttctccctgggctgaggactccatgggtggctggaagactgggcagccacctgcaaacagacgctgtggtccctgcccggctcccccagccattctgctcccctagagacccgttgtacagaagttgcccctaggtggtggggcccctccttgccccaggctggtcggtaaatgtgaggaggtggtcacccagcccagccacctctgcctcttgggtcagccctccttgaccgtgtcccagccagcgccaagccagcagctcgtccctgccattcgggattgttcccgaggttcgatcctctcaaggcagcatcggtgaacaaatccgaaggaaatggtgtctggaagaaggttctggttcacatgccttgtagctaagtctttctgcag

SEQ ID NO: 25828 - DNA, 1001 bp, Macaca Mulatta
  misc_feature (1)...(1001): n = A,T,C or G
acaggctatgacagcctgaggcaggacctcatggtgatctgtaacctgaccccagaggaggacagcagggaggacgaatggcaccccgggaggccagagcctggcgtcccaccctgttaccctcgtgctcagtgtccaggggctgcgggttagccatggcctgccgcggagccttaggagagaccctccagccattcggtggagcgtggagacccctcgtggccacacggaggactgcagctgcaccgcgtgacctctcgccagcagcggagctgctctacagccctggcagagctccgcaaacattgcttgagctcnnnnnnnnnnnnnnnnnnnnnnngagacaggatctcactctcgcccaggctggagtgcagtggcacagtctcagctcaacacagcctctgcctccagagttcaagcgattctcctgcctcagtctcctgagtagctgggattacagatgtgccccacgaagcccggctaattattgtatttttagtagagacgggtttttgccacgttggggcaagctggtctcaaactcctggcctcaagtgatccacccgcctcggcctcccaaagtgctgggattacaggcatgagccaccgcactcggctgcttgagctccttttaaggtgccagggtttatgcttggtgttatggacaaagaaaggaagtgattcccaccccagagaagctaccaccgggagagttacagaggctgggccgccctattcctacctcccacccctgtatacatccatatagaagagaactcagggttcaatcgggggacctagagcaagacacccattttcccataccttgctccccgtgttggccttatgggggtggtaccctgtagagtacctggaatagtcaagagctcaaaaattcttatgattattgaaggtataaaaggacaagtaaattgaagccaagtgcagtggcttatacctgcaatcccagcactttgggaggccaaggtaggaggatg

SEQ ID NO: 25829 - DNA, 742 bp, Macaca Mulatta
ggtgaatggctagtgtcattttgtttaattttgttttgcttttgatggtggataagatgaaattttagctgtttcagcatcaatccgagttaaaagcatcttggactttgttttcccttcctaactaaaagatcaaggcatgttttagacacaagcatatttgctgtctcaactcctctgacacccatattaggaaaaggcctgccaccaaagcaggaagctgcacactcctaacccttctcccagggtgtggggtcccttgacgccatgaaaagctattgcaaggtgcttctgtacttttccagcctggaaatggagggtgactagccctggttcctgctatgagaagataaccagcctcattttctcagtgccccagagatctaggataggatttctaaactggaatcatccttaatcagcttgaagatcccctaagaggcatttgactggtgctgccatctgtgtcctcaaagcaatgctggtggcagcgtcctgtgtacacgtgcagagctaatacccaaactaaaacctgggtaactggccctgaagtgcttgtaagcccacagggaaatgtttgaattttacgttttgttgggttttggatttgcttggcatatctaaaggtgccttttcttttattttattttatattataattctttctgcttatttttgcaggacttgttctaacattggaaacaagtccagaagactccttctgacttgtacctttgcccca

SEQ ID NO: 25830 - DNA, 616 bp, Macaca Mulatta
ggaggaagatcaagaagaaaagggtggggatggaatgaatagtggattgaagaccaactcagggagcccaagctgagctatgggtgaggaactgaagaactcagatccctaagcaggtggggtacccctgagaggactgccacatttcatcaagggagagggtgcctaatctattcctgacatgtctcctctcgtctccagctcactgacccaaagatttgcacagtgtgggtctgacctcatcatgtggagtgcagagggccccgatgacatgtgtgtgatgaggaccatgaccttgagctcccttacctaacgtaactaataaaatgaagctgagagctttggaatccatgaagcgagtctaggtgtttgcacagggactctggggctctgtcttttgtgcccacagcattgcagagacacaactaagaatggctttcaccatgtgttcaccggccctcaccccagccccaaaaaaacaagttatctctgtgggggtggggctggagcaggtacacagaaaaatggatctgaagatgcgggtgaggggtacagtcttgggattatgtgttggggaacttccccaccccctcagtcccaagaaaaaagaggacag

SEQ ID NO: 25831 - DNA, 90 bp, Macaca Mulatta
gtacctgtacaaactccgcgatcttcacctggactgtgacaattacacagaggctgcctacacgctccttctccacacttggcttctcaa

SEQ ID NO: 25832 - DNA, 550 bp, Macaca Mulatta
catttttattaaaataaagttctcttagcgtgtgtggaatctgctgagccattttgtagaaactttgatccatatctggagacacttcccaaggcctgccttacccccaccccctgcccaccttgatccatgcccctttgacctcctcgtgtgagaacccctttgccaaagtgagatgtgtgcagaatgaactaagccccagagggttttaatggcttgcctgctgtttcccacataaactacctcaggagtcattgtaaaataaactggccttgttgtctcttagtgtttttatttaaaatgttccctgtccagcggggccagcttcctaggttcaggtttctttagacaaaaccaagcaaagtcaagggtactttcagatgttaggggataacctctgggagagccctttctcccctgcccttccgaactaccagtggcaggggaccttagttcccttcaatttgtcttcacaagtctggatgaataaagtttttccagctaatttcaaaccagctagttagagcccatttgaaattattagtttagg

SEQ ID NO: 25833 - DNA, 537 bp, Macaca Mulatta
aatctaagggtttctttgtttatattcaggtaaggaacttttgtcatgatctggaaatgtttaaaacaatgtttgtaggcattctgtgagtagcaaaacttatagtgataaaaattgattgttgttaatatgatgtttaccatgtgcacatagtaatgaaaaggaacataaaagcccagcaggctcgtaccaaagtcacaccagtaatgctatgtactgcagagtctgattagatggcctttgtgcacacttttatattcatgggattgcatcttagctgtaaaaacttctaggttgaaatttgatagccagggttacatactggggacttttaaagtatctttccagagagatttcattaaccgtttagattagaatatctttcccaattgttacagtgacatatatgctgcaatatttaacaactggaatattagccacatgggctaattttcaatctgtgttttgaatttttttattatatgttatttaaaatattacatatgcagctgggagaactacacctttgtgcacata

SEQ ID NO: 25834 - DNA, 1082 bp, Macaca Mulatta
  misc_feature (1)...(1082): n = A,T,C or G
tctagacacgttttcttagtataaagtgacagaaacaaataaattaaactctaagatacattccactatattagactaaaacacttctgcataaatgaaactaggaggatatttttagaaacaactgctaaagagatgtgctggagagatatgtagaggagaacggggtttccgagtcaagacacacatcacagaacagccaatttcagggcaaggtaagggaacagtggaatgaaggttcatttttcattctcacaaaccaatgaaaccctgcttatcttaaaccaacctgctcactggagtagggaggacaggaccagcataaaagggagagcagagccaactgttgcttatacttgcttctgacataaccgtgttcactagcaacctcnnnnnnnnnnnnnnnnnnnnnnnnnnnnnnnnnnnnnnnnnnnnnnnnnnnnnnnnnnnnnnnnnnnnnnnnnnnnnnnnnnnnnnnnnnnnnnnnnnnnnnnnttggtatcaaggttctgagacatggaagctgagcatgtgtagacagggaagattcctgggtttctgataggcactgactctctctgtcccttgggctgttttcctaccctnnnnnnnnnnnnnnnnnnnnnnnnnnnnnnnnnnnnnnnnnnnnnnnnnnnnnnnnnnnnnnnnnnnnnnnnnnnnnnnnnnnnnnnnnnnnnnnnnnnnnnnnnnnnnnnnnnnnnnnnnnnnnnnnnnnnnnnnnnnnnnnnnnnnnnnnnnnnnnnnnnnnnnnnnnnnnnnnnnnnnnnnnnnnnnnnnnnnnnnnnnnnnnnnngatccnnnnnnnnnnnnnnnnnnnnnnnnnnnnnnnnnnnnnnnnnnnnnnnnnnnnnnnnnnnnnnnnnnnnnnnnnnnnnnnnnnnnnnnggattgtttcctgataatcataagtagaccctatttccctagattctattttctgaacttgggaacacaacgtctgcttcaagggtgtggcttctacctaataaagaacgttcagttcaacttcctgattaattgcacttgtttcatttttttgtccaggtatgtaagaaggttcc

SEQ ID NO: 25835 - DNA, 1288 bp, Macaca Mulatta
tcatcggaacagaattctataacttttgtgatcctccatgccagggcggacgagcacatcgccctgcgggtccgggagaagctggaggcccttggtgtgcccgacggggccaccttctgcgaggatttccaggtgcccgggcgtggggagctgagttgcctgcaggatgcgatagaccactcagctttcatcatcctacttctcacctccaacttcgactgtcacctgagcctgcaccaggtgaaccaagccatgatgagcaacctcacgcgacaggggtcgccagactgtgtcatccccttcctacccctggagagctccccggcccagctcagctcggacacggccagcctgctctctgggctggtgcggctggaagaacactcccagatcttcgctaggaaggtggccaacaccttcaggccccacaggcttcaggcccgaaaggccatgtggaggaaggaacaggacgcccgagccctgcgggaacagagccaacacctggacagtgagcggatgcaagcagcggccctgaacgcggcctactcggcctacctccagagctacctgtcctatcaggcacagatggagcagctccaggtggcttttgggagccacatgccatttgggactggggcaccctttggggctcgaatgccctttgggggccaggggcccctgggagcccctccatcctttcccacttggcaggggtgcccacagccgccgcccctgcacgcgtggcaggctggcaccccacccaccgccctccccacagccagcaaccttcccaccgtcactgcccttctcacagccaccagccttccctacggcctcacctgcaccccctcagagcccaggactgcaacccctcattatccaccatgcacagatggtacagctggggctgaacaatcacatgtggaaccagagagggtcccaggcgcccgaggacaaaacacaggaggcagaatgactgtgtgtcctttgacctgaccacctggggaacacacctggacccaggcatcagctttgggcaggaccccatagaccattccagtctgccctgcgccctgtggacagtggaagatgaggtcatctgccgctttcaggacattgcctgggagcccttcatttaggacaaaaggagcgcgataatgacctggctttcagggtggtcagaactggataccgtgtttccaattccaatctctatttttgggtgaggggtcttggtggtgggggtattgctacggtcttttaattataataatatttattgactgct

SEQ ID NO: 25836 - DNA, 777 bp, Macaca Mulatta
ttcgtggacaacccattccaaaaaccattattccaccagaagaactggtgccatattacactgatgcctagaatcgtgggtacctggcggatcctgccaaatttcctgaagcacgacttgaacttgccaggaagtatggttatatcttacctgatatcactaaagatgaactcttcaaaatgctctgtactaggaaggatccaagacagattttctttggtcttgctccaggatgggtggtgaatatgaccgataagaaaatcctaaaacctacagatgaaaatcttcttaagtattatagctcatgaattcctgcccaagaaagcagagttgttaaagagtactggaataggggctgaaggatctatattcctcattgcatttccttatgtataactttccagatggtggtgttacttttcagtgtactcatatgtctcattttcatctaaaattaaaatggcaggaaacaaggactgcatagagaaagtgagtctgtgtgggttctgtctcaaagatataaactccctgattgtctatggaaggaaaatgacaactattttataatatttctagtttgttttttcaatgatattttcatccagaccttgttactgttacagaccagaatgaatgcacaagtggaatgggattgacctgtaggcctgctctgccaagatgagagcatatggaatgagttggtgacccctctcttaatctgtaacctcagggaaacatggctacccagtgtcaagatggtaaaccctcaactcgaag

SEQ ID NO: 25837 - DNA, 345 bp, Macaca Mulatta
tgtgattttcaatcatagcgagcaagaaaggctccagtttatcaaagtagttcagcgcttatggcatataaaatagtccatacttgagataaaaacctacccaagtgatggaatgtgaagcaatgtcttcaaaattagtagacatttctggacataaaacacagatgaggaagggactttaattagaagttacataatcaccatcagaatgttcatgtttggtaaattctgttactagaaatgtaggaaattcaggtatagctttgaatcccaattacacattggtcagtgggaaaactgagaaaggcctccaacaggcaaattcagggagaggtaggtttcagg

SEQ ID NO: 25838 - DNA, 1202 bp, Macaca Mulatta
  misc_feature (1)...(1202): n = A,T,C or G
gctttaccaacagggacgattatgtcaactgggcagtgaattttgtgaattggaagtttttgctaaagtactgagagctttggataaaagnnnnnnnnnnnnnnnnnnnnnnnnnnnnnnnnnnnnnnnnnnnnnnnnnnnnnnnnnnnnnnnnnnnnnnnnnnnnnnnnnnnnnnnnnnnnnnnnnnnnnnnnnnnnnnnnnnnnnnnnnnnnnnnnnnnnnnnnnnnnnnnnnnnnnnnnnnnnnnnnnnnnnnnnnnnnnnnnnnnnnnnnnnnnnnnnnnnnnnnnnnnnnnnnnnnnnnnnnnnnnnnnnnnnnnnnnnnnnnnnnnnnnnnnnnnnnnnnnnnnnnnnnnnnnnnnnnnnnnnnnnnnnnnnnnnnnnnnnnnnnnnnnnnnnnnnnnnnnnnnnnnnnnnnnnnnnnnnnnnnnnnnnnnnnnnnnnnnnnnnnnnnnnnnnnnnnnnnnnnnnnnnnnnnnnnnnnnnnnnnnnnnnnnnnnnnnnnnnnnnnnnnnnnnnnnnnnnnnnnnnnnnnnnnnnnnnnnnnnnnnnnnnnnnnnnnnnnnnnnnnnnnnnnnnnnnnnnnnnnnnnnnnnnnnnnnnnnnnnnnnnnnnnnnnnnnnnnnnnnnnnnnnnnnnnnnnnnnnnnnnnnnnnnnnnnnnnnnnnnnnnnnnnnnnnnnnnnnnnnnnnnnnnnnnnnnnnnnnnnnnnnnnnnnnnnnnnnnnnnnnnnnnnnnnnnnnnnnnnnnnnnnnnnnnnnnnnnnnnnnnnnnnnnnnnnnnnnnnnnnnnnnnnnnnnnnnnnnnnnnnnnnnnnnnnnnnnnnnnnnnnnnnnnnnnnnnnnnnnnnnnnnnnnnnnnnnnnnnnnnnnnnnnnnnnnnnnnnnnnnnnnnnnnnnnnnnnnnnnnnnnnnnnnnnnnnnnnnnnnnnnnnnnnnnnnnnnnnnnnnnnnnnnnnnnnnnnnnnnnnnnnnnnnnnnnnnnnnnnnnnnnnnnnnnnnnnnnnnnnagcacttattttagaggagattgcaattgactgtcataataaggaaactgaacagaggctgcttcaagaagctcatgatttgcacctgtcttcactccaactagctaaaaaagcttttggggaatttaatgtacagactgcaaaacactatggaaaccttggaagactttatcagtcaatgagaaaatttaag

SEQ ID NO: 25839 - DNA, 268 bp, Macaca Mulatta
tgatggccacatccgtcaccgacgtggagatcttcatggggaaaatcttcatgctgctggtcatgggaatcaccagcgggatgtggatttgggcctccaagactctgcagtcctggcagcaggtgtgcagccgtaggttgaagaagaagagccggagaaaaccggccagcgtgatcaccagcggtgggatttacaaaaaagcccagcacccccagaaaactcaccacgggaaatatgagatccctgcccagccgcccacctgcgtgtg

SEQ ID NO: 25840 - DNA, 3211 bp, Macaca Mulatta
  misc_feature (1)...(3211): n = A,T,C or G
aggaacatctgctcagcaattggatgcaacatttagtaccaatgcttcccttgagatatttgaattagacctctcggatccatccttggacatgaaatcttgtgccactttctcctcttctcacaggtnnnnnnnnnnnnnnnnnnnnnnnnnnnnnnnnnnnnnnnnnnnnnnnnnnnnnnnnnnnnnnnnnnnnnnnnnnnnnnnnnnnnnnnnnnnnnnnnnnnnnnnnnnnnnnnnnnnnnnnnnnnnnnnnnnnnnnnnnnnnnnnnnnnnnnnnnnnnnnnnnnnnnnnnnnnnnnnnnnnnnnnnnnnnnnnnnnnnnnnnnnnnnnnnnnnnnnnnnnnnnnnnnnnnnnnnnnnnnnnnnnnnnnnnnnnnnnnnnnnnnnnnnnnnnnnnnnnnnnnnnnnnnnnnnnnnnnnnnnnnnnnnnnnnnnnnnnnnnnnnnnnnnnnnnnnnnnnnnnnnnnnnnnnnnnnnnnnnnnnnnnnnnnnnnnnnnnnnnnnnnnnnnnnnnnnnnnnnnnnnnnnnnnnnnnnnnnnnnnnnnnnnnnnnnnnnnnnnnnnnnnnnnnnnnnnnnnnnnnnnnnnnnnnnnnnnnnnnnnnnnnnnnnnnnnnnnnnnnnnnnnnnnnnnnnnnnnnnnnnnnnnnnnnnnnnnnnnnnnnnnnnnnnnnnnnnnnnnnnnnnnnnnnnnnnnnnnnnnnnnnnnnnnnnnnnnnnnnnnnnnnnnnnnnnnnnnnnnnnnnnnnnnnnnnnnnnnnnnnnnnnnnnnnnnnnnnnnnnnnnnnnnnnnnnnnnnnnaggtgttatatgaacttcccaccaacacacagtggtgcttcgatattcagtggtgtccccgaaatcctgctgtcttatcagctgcttcgtttgatgggcgtatcagtgtttattctatcatgggaggaagcacagacggtttaagacagaaacaagttgacaannnnnnnnnnnnnnnnnnnnnnnnnnnnnnnnnnnnnnnnnnnnnnnnnnnnnnnnnnnnnnnnnnnnnnnnnnnnnnnnnnnnnnnnnnnnnnnnnnnnnnnnnnnnnnnnnnnnnnnnnnnnnnnnnnnnnnnnnnnnnnnnnnnnnnnnnnnnnnnnnnnnnnnnnnnnnnnnnnnnnnnnnnnnnnnnnnnnnnnnnnnnnnnnnnnnnnnnnnnnnnnnnnnnnnccatgtgttcattagtcaggttgtaacagaaaaggagttcctcagccgttaagggcaacttcagcaggctgtgcagtcacaaggatttatcaannnnnnnnnnnnnnnnnnnnnnnnnnnnnnnnnnnnnnnnnnnnnnnnnnnnnnnnnnnnnnnnnnnnnnnnnnnnnnnnnnnnnnnnnnnnnnnnnnnnnnnnnnnnnnnnnnnnnnnnnnnnnnnnnnnnnnnnnnnnnnnnnnnnnnnnnnnnnnnnnnnnnnnnnnnnnnnnnnnnnnnnnnnnnnnnnnnnnnnnnnnnnnnnnnnnnnnnnnnnnnnnnnnnnnnnnnnnnnnnnnnnnnnnnnnnnnnnnnnnnnnnnnnnnnnnnnnnnnnnnnnnnnnnnnnnnnnnnnnnnnnnnnnnnnnnnnnnnnnnnnnnnnnnnnnnnnnnnnnnnnnnnnnnnnnnnnnnnnnnnnnnnnnnnnnnnnnnnnnnnnnnnnnnnnnnnnnnnnnnnnnnnnnnnnnnnnnnnnnnnnnnnnnnnnnnnnnnnnnnnnnnnnnnnnnnnnnnnnnnnnnnnnnnnnnnnnnnnnnnnnnnnnnnnnnnnnnnnnnnnnnnnnnnnnnnnnnnnnnnnnnnnnnnnnnnnnnnnnnnnnnnnnnnnnnnnnnnnnnnnnnnnnnnnnnnnnnnnnnnnnnnnnnnnnnnnnnnnnnnnnnnnnnnnnnnnnnnnnnnnnnnnnnnnnnnnnnnnnnnnnnnnnnnnnnnnnnnnnnnnnnnnnnnnnnnnnnnnnnnnnnnnnnnnnnnnnnnnnnnnnnnnnnnnnnnnnnnnnnnnnnnnnnnnnnnnnnnnnnnnnnnnnnnnnnnnnnnnnnnnnnnnnnnnnnnnnnnnnnnnnnnaggatctgattgagaaagttgtcatcctgagaaaagctgtgcaactcactcaagccatggacactagtactgtaggagttctcttggctgcgaagatgagtcagtatgccaatttgttggcagctcagggcagtattgctgcagccttggcttttcttcctgacaacaccaaccannnnnnnnnnnnnnnnnnnnnnnnnnnnnnnnnnnnnnnnnnnnnnnnnnnnnnnnnnnnnnnnnnnnnnnnnnnnnnnnnnnnnnnnnnnnnnnnnnnnnnnnnnnnnnnnnnnnnnnnnnnnnnnnnnnnnnnnnnnnnnnnnnnnnnnnnnnnnnnnnnnnnnnnnnnnnnnnnnnnnnnnnnnnnnnnnnnnnnnnnnnnnnnnnnnnnnnnnnnnnnnnnnnnnnnnnnnnnnnnnnnnnnnnnnnnnnnnnnnnnnnnnnnnnnnnnnnnnnnnnnnnnnnnnnnnnnnnnnnnnnnnnnnnnnnnnnnnnnnnnnnnnnnnnnnnnnnnnnnnnnnnnnnnnnnnnnnnnnnnnnnnnnnnnnnnnnnnnnnnnnnnnnnnnnnnnnnnnnnnnnnnnnnnnnnnnnnnnnnnnnnnnnnnnnnnnnnnnnnnnnnnnnnnnnnnnnnnnnnnnnnnnnnnnnnnnnnnnnnnnnnnnnnnnnnnnnnnnnnnnnnnnnnnnnnnnnnnnnnnnnnnnnnnnnnnnnnnnnnnnnnnnnnnnnnnnnnnnnnnnnnnnnnnnnnnnnnnnnnnnnnnnnnnnnnnnnnnnnnnnnnnnnnnnnnnnnnnnnnnnnnnnnnnnnnnnnnnnnnnnnnnnnnnnnnnnnnnnnnnnnnnnnnnnnnnnnnnnnnnnnnnnnnnnnnnnnnnnnnnnnnnnnnnnnnnnnnnnnnnnnnnnnnnnnnnnnncaccaatcatgaacccgttgggtgatccccagtcacagatgctgcagcaacagccttcagctccaataccactgtcaagccagtcttcattcccacagccacatctttcaggtggccagccattccatggcatacagcaacctcttggtcaaacaggcatgccaccatctttctcaaagcccaatattgaaggtgccccaggggctcctatcggaaataccttccagn

SEQ ID NO: 25841 - DNA, 809 bp, Macaca Mulatta
ggccccccgggttccctcagcccagcccggtccagcccggttcccgggaggatgaagttcgtgtacaaagaagagcatccgttcgagaagcgccgctctgagggcgagaaaatccgaaagaaatacccggaccgggtgccggtgatagtagaaaaggctcccaaagctcggataggagacctggacaaaaagaaatacctggtgccttctgatctcacagttggtcagttctacttcttgatccggaagcgaattcatctccgagctgaggatgccttgtttttctttgtcaacaatgtcattccacccaccagtgccacaatgggtcagctctaccaggaacaccatgaagaagacttctttctctacattgcctacagtgacgagagtgtctacggtctgtgaagctgctgtccctgagctggaggggggtctcattctacaaagagagaggtggcccccttttcttgacctcctcctccttcaagctcaaacaccacctcccttattcaggacgggcacttcttaatgtttgaaattttctctccagcctctcttcagaggggtaatggtggaattgggatccctgtaacctctcccttccccctttcttccccccttttctcttgcccggccctttccccatccctggcttttagaacattctttggatttgtcccaagttctcctttccccaatctcaaagtgggaatttttgtattatgtggggtttattcaagggttgcccccctttttttctagaaaacatgggtccccaaaaaggggggggccgcccctccaaaaaaaat

SEQ ID NO: 25842 - DNA, 278 bp, Macaca Mulatta
  misc_feature (1)...(278): n = A,T,C or G
gtttgtgctcatggaagaggaggtgctgaggaaatagggggccctggtgggctggagctcnnnnnnnnnnnnnnnnnnnnnnnnnnnnnnnnnnnnnnnnnnnnnnnnnnnnnnnnnnnnnnnnnnnnnnnnnnnnnnnnnnnnnnnnnnnnnnnnnnnnnnnnnnnnnnnnnnnnnnnnnnnnnnnnnnnnnnnnnagtgtcactactccatccagaagggagctgcgtttctgggacttggcaccgacagtgtccgagtagtcaaggctgatgaga

SEQ ID NO: 25843 - DNA, 532 bp, Macaca Mulatta
  misc_feature (1)...(532): n = A,T,C or G
gcaaaatttgtcactaaggcgtatcctgtctctgggtgttttgattacctcagtgaggnnnnnnnnnnnnnnnnnnnnnnnnnnnnnnnnnnnnnnnnnnnnnnnnnnnnnnnnnnnnnnnnnnnnnnnnnnnnnnnnnnnnnnnaggagctctgtctgatccgcttccaccccgccacagaggaagaggaggtcgcctatatctctctctactcctattttagcagccgtggccgctttggtgttgtagctaataacaacaggcacgtcaaggacctctacctgatcccactgagcgcccaggaccctgttccatccaaactcttgccctttgagggaccaggtncaggtcttgagtcaccacgtccgaatataattcttggattagtaatctgccaaaaaataaaacgtcccgcaaacactggagagttagacaagatggatgaaaagcgaacccgactttcacaagaagaagtggacgttccggcctatctaaaataaccacagccccccagtccgaaaagaagccctc

SEQ ID NO: 25844 - DNA, 189 bp, Macaca Mulatta
gtgtgtggctggaagctaaggcatctctttccagaggtgccaacgttaaaccccattttgatttggattttgtgtgtactattttggttggagggtttttcccatgtttttgaattgggaacttttatttttcctagtagtatatgtggaggaggcagaactgcatttttcttccccttgtatttatat

SEQ ID NO: 25845 - DNA, 221 bp, Macaca Mulatta
agatttctgcacctaatgaattcgatgtcatgtttaaactgcaagtccccagaattcagctagaagaatattctgacactggtgcatattactttgtgaaatttaaaagaaatccagaaggaaatcctctgagcctgtttttagaagatgaaatattatcagcttctaagatgctgtcaaagtttaggaaaatcattaaggaagaaattaacaacattaaa

SEQ ID NO: 25846 - DNA, 7387 bp, Macaca Mulatta
  misc_feature (1)...(7387): n = A,T,C or G
ttacaggtgacccacgggctgagcgcgtacgatggcttatctctgcctgaggacacggagaccgtcacagcaagccaaatgcgctggacacattcgtacctttctgatgatgaggacatgctggctgacagcacctccggannnnnnnnnnnnnnnnnnnnnnnnnnnnnnnnnnnnnnnnnnnnnnnnnnnnnnnnnnnnnnnnnnnnnnnnnnnnnnnnnnnnnnnnnnnnnnnnnnnnnnnnnnnnnnnnnnnnnnnnnnnnnnnnnnnnnnnnnnnnnnnnnnnnnnnnnnnnnnnnnnnnnnnnnnnnnnnnnnnnnnnnnnnnnnnnnnnnnnnnnnnnnnnnnnnnnnnnnnnnnnnnnnnnnnnnnnnnnnnnnnnnnnnnnnnnnnnnnnnnnnnnnnnnnnnnnnnnnnnnnnnnnnnnnnnnnnnnnnnnnnnnnnnnnnnnnnnnnnnnnnnnnnnnnnnnnnnnnnnnnnnnnnnnnnnnnnnnnnnnnnnnnnnnnnnnnnnnnnnnnnnnnnnnnnnnnnnnnnnnnnnnnnnnnnnnnnnnnnnnnnnnnnnnnnnnnnnnnnnnnnnnnnnnnnnnnnnnnnnnnnnnnnnnnnnnnnnnnnnnnnnnnnnnnnnnnnnnnnnnnnnnnnnnnnnnnnnnnnnnnnnnnnnnnnnnnnnnnnnnnnnnnnnnnnnnnnnnnnnnnnnnnnnnnnnnnnnnnnnnnnnnnnnngcgacagccaccagtcacccacgctcctcagcccctgcttcccggttccttcaggcccctgccctgtgggccccaggaggccgcatgccgcagtggtcactgcatccccggagactacctctgcgacggacaggaggactgcgaggacggcagcgatgagctggactgtggncccccaccaccctgtgagcccaatgagttcccctgtgggaatggacattgtgccctcaagctgtggcgctgtgatggtgattttgactgtgaggaccgaactgacgaagccaactgccnnnnnnnnnnnnnnnnnnnnnnnnnnnnnnnnnnnnnnnnnnnnnnnnnnnnnnnnnnnnnnnnnnnnnnnnnnnnnnnnnnnnnnnnnnnnnnnnnnnnnnnnnnnnnnnnnnnnnnnnnnnnnnnnnnnnnnnnnnnnnnnnnnnnnnnnnnnnnnnnnnnnnnnnnnnnnnnnnnnnnnnnnnnnnnnnnnnnnnnnnnnnnnnnnnnnnnnnnnnnnnnnnnnnnnnnnnnnnnnnnnnnnnnnnnnnnnnnnnnnnnnnnnnnnnnnnnnnnnnnnnnnnnnnnnnnnnnnnnnnnnnnnnnnnnnnnnnnnnnnnnnnnnnnnnnnnnnnnnnnnnnnnnnnnnnnnnnnnnnnnnnnnnnnnnnnnnnnnnnnnnnnnnnnnnnnnnnnnnnnnnnnnnnnnnnnnnnnnnnnnnnnnnnnnnnnnnnnnnnnnnnnnnnnnnnnnnnnnnnnnnnnnnnnnnnnnnnnnnnnnnnnnnnnnnnnnnnnnnnnnnnnnnnnnnnnnnnnnnnnnnnnnnnnnnnnnnnnnnnnnnnnnnnnnnnnnnnnnnnnnnnnnnnnnnnnnnnnnnnnnnnnnnnnnnnnnnnnnnnnnnnnnnnnnnnnnnnnnnnnnnnnnnnnnnnnnnnnnnnnnnnnnnnnnnnnnnnnnnnnnnnnnnnnnnnnnnnnnnnnnnnnnnnnnnnnnnnnnnnnnnnnnnnnnnnnnnnnnnnnnnnnnnnnnnnnnnnnnnnnnnnnnnnnnnnnnnnnnnnnnnnnnnnnnnnnnnnnnnnnnnnnnnnnnnnnnnnnnnnnnnnnnnnnnnnnnnnnnnnnnnnnnnnnnnnnnnnnnnnnnnnnnnnnnnnnnnnnnnnnnnnnnnnnnnnnnnnnnnnnnnnnnnnnnnnnnnnnnnnnnnnnnnnnnnnnnnnnnnnnnnnnnnnnnnnnnnnnnnnnnnnnnnnnnnnnnnnnnnnnnnnnnnnnnnnnnnnnnnnnnnnnnnnnnnnnnnnnnnnnnnnnnnnnnnnnnnnnnnnnnnnnnnnnnnnnnnnnnnnnnnnnnnnnnnnnnnnnnnnnnnnnnnnnnnnnnnnnnnnnnnnnnnnnnnnnnnnnnnnnnnnnnnnnnnnnnnnnnnnnnnnnnnnnnnnnnnnnnnnnnnnnnnnnnnnnnnnnnnnnnnnnnnnnnnnnnnnnnnnnnnnnnnnnnnnnnnnnnnnnnnnnnnnnnnnnnnnnnnnnnnnnnnnnnnnnnnnnnnnnnnnnnnnnnnnnnnnnnnnnnnnnnnnnnnnnnnnnnnnnnnnnnnnnnnnnnnnnnnnnnnnnnnnnnnnnnnnnnnnnnnnnnnnnnnnnnnnnnnnnnnnnnnnnnnnnnnnnnnnnnnnnnnnnnnnnnnnnnnnnnnnnnnnnnnnnnnnnnnnnnnnnnnnnnnnnnnnnnnnnnnnnnnnnnnnnnnnnnnnnnnnnnnnnnnnnnnnnnnnnnnnnnnnnnnnnnnnnnnnnnnnnnnnnnnnnnnnnnnnnnnnnnnnnnnnnnnnnnnnnnnnnnnnnnnnnnnnnnnnnnnnnnnnnnnnnnnnnnnnnnnnnnnnnnnnnnnnnnnnnnnnnnnnnnnnnnnnnnnnnnnnnnnnnnnnnnnnnnnnnnnnnnnnnnnnnnnnnnnnnnnnnnnnnnnnnnnnnnnnnnnnnnnnnnnnnnnnnnnnnnnnnnnnnnnnnnnnnnnnnnnnnnnnnnnnnnnnnnnnnnnnnnnnnnnnnnnnnnnnnnnnnnncccaggtgcatggggcgtctgaggagcctggtcacttcagcctgaccaacgctgcaagcacccacaccaccaacgagggcatcttctcccccacgcccggggaactgggattctcctccttccacagactcctatctggaccctacttctggagcctcnnnnnnnnnnnnnnnnnnnnnnnnnnnnnnnnnnnnnnnnnnnnnnnnnnnnnnnnnnnnnnnnnnnnnnnnnnnnnnnnnnnnnnnnnnnnnnnnnnnnnnnnnnnnnnnnnnnnnnnnnnnnnnnnnnnnnnnnnnnnnnnnnnnnnnnnnnnnnnnnnnnnnnnnnnnnnnnnnnnnnnnnnnnnnnnnnnnnnnnnnnnnnnnnnnnnnnnnnnnnnnnnnnnnnnnnnnnnnnnnnnnnnnnnnnnnnnnnnnnnnnnnnnnnnnnnnnnnnnnnnnnnnnnnnnnnnnnnnnnnnnnnnnnnnnnnnnnnnnnnnnnnnnnnnnnnnnnnnnnnnnnnnnnnnnnnnnnnnnnnnnnnnnnnnnnnnnnnnnnnnnnnnnnnnnnnnnnnnnnnnnnnnnnnnnnnnnnnnnnnnnnnnnnnnnnnnnnnnnnnnnnnnnnnnnnnnnnnnnnnnnnnnnnnnnnnnnnnnnnnnnnnnnnnnnnnnnnnnnnnnnnnnnnnnnnnnnnnnnnnnnnnnnnnnnnnnnnnnnnnnnnnnnnnnnnnnnnnnnnnnnnnnnnnnnnnnnnnnnnnnnnnnnnnnnnnnnnnnnnnnnnnnnnnnnnnnnnnnnnnnnnnnnnnnnnnnnnnnnnnnnnnnnnnnnnnnnnnnnnnnnnnnnnnnnnnnnnnnnnnnnnnnnnnnnnnnnnnnnnnnnnnnnnnnnnnnnnnnnnnnnnnnnnnnnnnnnnnnnnnnnnnnnnnnnnnnnnnnnnnnnnnnnnnnnnnnnnnnnnnnnnnnnnnnnnnnnnnnnnnnnnnnnnnnnnnnnnnnnnnnnnnnnnnnnnnnnnnnnnnnnnnnnnnnnnnnnnnnnnnnnnnnnnnnnnnnnnnnnnnnnnnnnnnnnnnnnnnnnnnnnnnnnnnnnnnnnnnnnnnnnnnnnnnnnnnnnnnnnnnnnnnnnnnnnnnnnnnnnnnnnnnnnnnnnnnnnnnnnnnnnnnnnnnnnnnnnnnnnnnnnnnnnnnnnnnnnnnnnnnnnnnnnnnnnnnnnnnnnnnnnnnnnnnnnnnnnnnnnnnnnnnnnnnnnnnnnnnnnnnnnnnnnnnnnnnnnnnnnnnnnnnnnnnnnnnnnnnnnnnnnnnnnnnnnnnnnnnnnnnnnnnnnnnnnnnnnnnnnnnnnnnnnnnnnnnnnnnnnnnnnnnnnnnnnnnnnnnnnnnnnnnnnnnnnnnnnnnnnnnnnnnnnnnnnnnnnnnnnnnnnnnnnnnnnnnnnnnnnnnnnnnnnnnnnnnnnnnnnnnnnnnnnnnnnnnnnnnnnnnnnnnnnnnnnnnnnnnnnnnnnnnnnnnnnnnnnnnnnnnnnnnnnnnnnnnnnnnnnnnnnnnnnnnnnnnnnnnnnnnnnnnnnnnnnnnnnnnnnnnnnnnnnnnnnnnnnnnnnnnnnnnnnnnnnnnnnnnnnnnnnnnnnnnnnnnnnnnnnnnnnnnnnnnnnnnnnnnnnnnnnnnnnnnnnnnnnnnnnnnnnnnnnnnnnnnnnnnnnnnnnnnnnnnnnnnnnnnnnnnnnnnnnnnnnnnnnnnnnnnnnnnnnnnnnnnnnnnnnnnnnnnnnnnnnnnnnnnnnnnnnnnnnnnnnnnnnnnnnnnnnnnnnnnnnnnnnnnnnnnnnnnnnnnnnnnnnnnnnnnnnnnnnnnnnnnnnnnnnnnnnnnnnnnnnnnnnnnnnnnnnnnnnnnnnnnnnnnnnnnnnnnnnnnnnnnnnnnnnnnnnnnnnnnnnnnnnnnnnnnnnnnnnnnnnnnnnnnnnnnnnnnnnnnnnnnnnnnnnnnnnnnnnnnnnnnnnnnnnnnnnnnnnnnnnnnnnnnnnnnnnnnnnnnnnnnnnnnnnnnnnnnnnnnnnnnnnnnnnnnnnnnnnnnnnnnnnnnnnnnnnnnnnnnnnnnnnnnnnnnnnnnnnnnnnnnnnnnnnnnnnnnnnnnnnnnnnnnnnnnnnnnnnnnnnnnnnnnnnnnnnnnnnnnnnnnnnnnnnnnnnnnnnnnnnnnnnnnnnnnnnnnnnnnnnnnnnnnnnnnnnnnnnnnnnnnnnnnnnnnnnnnnnnnnnnnnnnnnnnnnnnnnnnnnnnnnnnnnnnnnnnnnnnnnnnnnnnnnnnnnnnnnnnnnnnnnnnnnnnnnnnnnnnnnnnnnnnnnnnnnnnnnnnnnnnnnnnnnnnnnnnnnnnnnnnnnnnnnnnnnnnnnnnnnnnnnnnnnnnnnnnnnnnnnnnnnnnnnnnnnnnnnnnnnnnnnnnnnnnnnnnnnnnnnnnnnnnnnnnnnnnnnnnnnnnnnnnnnnnnnnnnnnnnnnnnnnnnnnnnnnnnnnnnnnnnnnnnnnnnnnnnnnnnnnnnnnnnnnnnnnnnnnnnnnnnnnnnnnnnnnnnnnnnnnnnnnnnnnnnnnnnnnnnnnnnnnnnnnnnnnnnnnnnnnnnnnnnnnnnnnnnnnnnnnnnnnnnnnnnnnnnnnnnnnnnnnnnnnnnnnnnnnnnnnnnnnnnnnnnnnnnnnnnnnnnnnnnnnnnnnnnnnnnnnnnnnnnnnnnnnnnnnnnnnnnnnnnnnnnnnnnnnnnnnnnnnnnnnnnnnnnnnnnnnnnnngcctcgggcacctcgtccgcccctgtggtctccatccacccgccacagctcacagtgcaacccgggcaactggcggagttccgctgcagcgccacagggagccccacgcccaccctcgnnnnnnnnnnnnnnnnnnnnnnnnnnnnnnnnnnnnnnnnnnnnnnnnnnnnnnnnnnnnnnnnnnnnnnnnnnnnnnnnnnnnnnnnnnnnnnnnnnnnnnnnnnnnnnnnnnnnnnnnnnnnnnnnnnnnnnnnnnnnnnnnnnnnnnnnnnnnnnnnnnnnnnnnnnnnnnnnnnnnnnnnnnnnnnnnnnnnnnnnnnnnnnnnnnnnnnnnnnnnnnnnnnnnnnnnnnnnnnnnnnnnnnnnnnnnnnnnnnnnnnnnnnnnnnnnnnnnnnnnnnnnnnnnnnnnnnnnnnnnnnnnnnnnnnnnnnnnnnnnnnnnnnnnnnnnnnnnnnnnnnnnnnnnnnnnnnnnnnnnnnnnnnnnnnnnnnnnnnnnnnnnnnnnnnnnnnnnnnnnnnnnnnnnnnnnnnnnnnnnnnnnnnnnnnnnnnnnnnnnnnnnnnnnnnnnnnnnnnnnnnnnnnnnnnnnnnnnnnnnnnnnnnnnnnnnnnnnnnnnnnnnnnnnnnnnnnnnnnnnnnnnnnnnnnnnnnnnnnnnnnnnnnnnnnnnnnnnnnnnnnnnnnnnnnnnnnnnnnnnnnnnnnnnnncccaggtccacggctcccgactgcggctcccccaggtctcaccagctgattctggagaatatgtgtgtcgcgtggagaatggatcgggccccaaggaggcctccattactgtctctgtcctccacggcacccattctggccccagctacaccccannnnnnnnnnnnnnnnnnnnnnnnnnnnnnnnnnnnnnnnnnnnnnnnnnnnnnnnnnnnnnnnnnnnnnnnnnnnnnnnnnnnnnnnnnnnnnnnnnnnnnnnnnnnnnnnnnnnnnnnnnnnnnnnnnnnnnnnnnnnnnnnnnnnncagacccatggctcccagctgcggctccaccaggtctcccctgctgactcaggcgagtatgtgtnnnnnnnnnnnnnnnnnnnnnnnnnnnnnnnnnnnnnnnnnnnnnnnnnnnnnnnnnnnnnnnnnnnnnnnnnnnnnnnnnnnnnnnnnnnnnnnnnnnnnnnnnnnnnnnnnnnnnnnnnnnnnnnnnnnnnnnnnnnnnnnnnnnnnnnnnnnnnnnnnnnnnnnnnnnnnnnnnnnnnnnnnnnnnnnnnnnnnnnnnnnnnnnnnnnnnnnnnnnnnnnnnnnnnnnnnnnnnnnnnnnnnnnnnnnnnnnnnnnnnnnnnnnnnnnnnnnnnnnnnnnnnnnnnnnnnnnnnnnnnnnnnnnnnnnnnnnnnnnnnnnnnnnnnnnnnnnnnnnnnnnnnnnnnnnnnnnnnnnnnnnnnnnnnnnnnnnnnnnnnnnnnnnnnnnnnnnnnnnnnnnnnnnnnnnnnnnnnnnnnnnnnnnnnnnnnnnnnnnnnnnnnnnnnnnnnnnnnnnnnnnnnnnnnnnnnnnnnnnnnnnnnnnnnnnnnnnnnnnnnnnnnnnnnnnnnnnnnnnnnnnnnnnnnnnnnnnnnnnnnnnnnnnnnnnnnnnnnnnnnnnnnnnnnnnnnnnnnnnnnnnnnnnnnnnnnnnnnnnnnnnnnnnnnnnnnnnnnnnnnnnnnnnnnnnnnnnnnnnncacttggggtcacccccacagtccggatcgagtcatcatcttcgcatgtggctgaagggcagaccctggatctgaactgcctcgttgccggtcaggcccatgcccaggttacatggcacaagcgcgggggcagcctcccggcccggcaccaggt

SEQ ID NO: 25847 - DNA, 295 bp, Macaca Mulatta
atgggcagctcccggctgagggtctttgaccctcatttggagaggaaagattccgccgcggcgctctcagaccgagagctgcccttgcctaccttcgatgtgccttatttcaaatacatcgacgaggaggatgaggacgatgaatggagcagccgctcgcagtcttccaccgaggatgactcagtggactctctgctctctgacagatatgtggtggtgtccgggaccccggagaagattttggagcaccttttgaatgacttgcacctggaagaagtccaggacaaagaaacag

SEQ ID NO: 25848 - DNA, 334 bp, Macaca Mulatta
gtgttggaagagggctctggccagggtcagatctgccacaaagcacttgggcctcctgcattcaggtgaccaccccttgcctccccttccccaggactattttttcttcgtggaggccgtggaacaaaacacgctgcattgatttcttgaagctggcctgagtcgagcctgtccagagttcccctgctggactccgtcaccacactcccccaagccttcacctggccatgaaggaccgtttgaacgactccctgtcattcctatcctaaccttagagtccctctcgcaatgcaggccacttctccggcctcctctctaagtggagtctcctctt

SEQ ID NO: 25849 - DNA, 770 bp, Macaca Mulatta
  misc_feature (1)...(770): n = A,T,C or G
gggggtaaacgggaagagaagccacagcacttcagaaaagagtgggactggacaagcgtatctaagaggccgaacatgaatccacagatcagaaacccgatgaaggcaatggatccaggcacattctacttccaatttaaaaacctatgggaagccaacaatcggaacgaaacctggctgtgcttcaccgtggaagttataaagcagcactcaactgtctcctgggagacgggcgtcttccgaaaccaggtcgatcttgagacccattgccatgcagaaaggtgcttcctctcctggttctgcgaggacatactgtctcctaacacagactaccaggtcacctggtacacatcttggagcccttgcctagattgtgcaggggaggtggccaagttccctggccaggcacaacaatgtgatgctcaccatctataccgcccgcctctactactcccagtattccgaattaccagcaggggctccgcagcctgagtgaaaaaggagtccctggaagattatgggccaccaagattttaaattttgttggggaaagtttgtgtcccaagatggtgagccattcaagccttggaagggacttaaaaccagctttttatttctgaaaagacccctacgggagattcttcagtgaggggtctcccccgggcctcatggtctgtctcctctagcctcctgctcatgctgcangggggcctcccctcaaccctgggaccnnagctctgtttctgccctgggtcatccctgaagccccc

SEQ ID NO: 25850 - DNA, 620 bp, Macaca Mulatta
  misc_feature (1)...(620): n = A,T,C or G
ggctctttggtggacaagagggggaacatcctgatccccggcattaacgaggccgtggccgccgtcacggaagaggagcacaagctgtacgacgacatcgactttgacatagaggagtttgccaaggacgtgggggcgcagatcctcctgcacnnnnnnnnnnnnnnnnnnnnnnnnnnnnnnnnnnnnnnnnnnnnnnnnnnnnnnnnnnnnnnnnnnnnnnnnnnnnnnnnnnnnnnnnnnnnnnnnnnnnnnnnnnnnnnnnnnnnnnnnnnnnnnnnnnnnnnnnnnnnnnnnnnnnnnnnnnnnnnnnnnnnnnnnnnnnnnnnnnnnnnnnnnnnnnnnnnnnnnnnnnnnnnnnnnnnnnnnnnnnnnnnnnnnnnnnnnnnnnnnnnnnnnnnnnnnnnnnnnnnnnnnnnnnnnnnnnnnnnnnnnnnnnnnnnnnnnnnnnnnnnnnnnnnnnnnnnnagtttttggtgttgaggcagacttgaccagggaaggcggcagtattcccgtgtccttgacctttcaggaggccacgggcaagaacatcatgctactgcctatggggtcggcggatgacggagcccactcccagaatgaaaagctcaacaggt

SEQ ID NO: 25851 - DNA, 785 bp, Macaca Mulatta
  misc_feature (1)...(785): n = A,T,C or G
gggacacgggaggttcacctcatcctctcctttgacttcagtgccggagatcctttcgagaccatccgggctaccactgactattgccgccgccacaagatcccctttccccacgtagaagaaggctagctggatttgtggtcnanggccccgncagctgctacatcccctgaaggagaaccggaccagtggtgatgcattttcccctggntcacacagatgcctgtggagatgatattgaggcatggagtgacccatacgaaccctttccagctcgctgaaaccctcccttctaaatgtggggagggccatccttggcattaccccaaatgaaccttcgggnnnnnnnnnnnnnnnnnnnnnnnnnnnnnnnnnggaaacccggccttggtcttttttcccccgaaactttttggccccaaagttgcctccctgggggggaaaaagacccccccctttttccgggggggatattggggcccttttggggtctccacagggccccccggttgtcccccgggggcctctcccggtgttttttacccccccctttttgccccccaacttttttgtgggggtccccccttgggggggtctccccaacaggggggggccttttccccccggggcgnnnnnnnnnnnnnnnnnnnnnnnnnnnnnnnnnnccctcctnnnnnnnnnnnnnnnnnnnntccaccaaaaaatccccctgggggggggggaaaaattgtttttccctcagggggcgcccttgtgggggaagacaacttccggcgggtggggat

SEQ ID NO: 25852 - DNA, 234 bp, Macaca Mulatta
  misc_feature (1)...(234): n = A,T,C or G
gaacttaaaaagagctgttaatgttctagctgtgcaaagcagtttgcctgtggataagatgacctgtgtaataatctttgttagtagtctcaaagctgctgccatagtcctccaagaagaaagcaccaagacaacatttcatatgactataaggcatgtactatataagctgttctgactangaaagaccgcagttggcaagttcctcccttagagtcattgtattccacctgt

SEQ ID NO: 25853 - DNA, 1599 bp, Macaca Mulatta
  misc_feature (1)...(1599): n = A,T,C or G
cagaacaagcagagcagtgagtcagccgtcagcagcaccgtcaaccctgtcgccattcacaagcgcagcaaggtcaagaccgagcctgagggcctgcggccggcctcccctctggcgctgacgcagnnnnnnnnnnnnnnnnnnnnnnnnnnnnnnnnnnnnnnnnnnnnnnnnnnnnnnnnnnnnnnnnnnnnnnnnnnnnnnnnnnnnnnnnnnnnnnnnnnnnnnnnnnnnnnnnnnnnnnnnnnnnnnnnnnnnnnncacatcaacaacgagcacatccacggggagaagaaggagttcgtgtgccgctggcaggcctgcacacgggagcagaagcccttcaaggcgcagtacatgctggtggtgcacatgcggcggcacacgggcgagaagcctcacaagtgcacnnnnnnnnnnnnnnnnnnnnnnnnnnnnnnnnnnnnnnnnnnnnnnnnnnnnnnnnnnnnnnnnnnnnnnnnnnnnnnnnnnnnnnnnnnnnnnnnnnnnnnnnnnnnnnnnnnnnnnnnnnnnnnnnnnnnnnnnnnnnnnnnnnnnnnnnnnnnnnnnnnnnnnnnnnnnnnnnnnnnnnnnnnnnnnnnnnnnnnnnnnnnnnnnnnnnnnnnnnnnnnnnnnnnnnnnnnnnnnnnnnnnnnnnnnnnnnnnnnnnnnnnnnnnnnnnnnnnnnnnnnnnnnnnnnnnnnnnnnnnnnnnnnnnnnnnnnnnnnnnnnnnnnnnnnnnnnnnnnnnnnnnnnnnnnnnnnnnnnnnnnnnnnnnnnnnnnnnnnnnnnnnnnnnnnnnnnnnnnnnnnnnnnnnnnnnnnnnnnnnnnnnnnnnnnnnnnnnnnnnnnnnnnnnnnnnnnnnnnnnnnnnnnnnnnnnnnnnnnnnnnnnnnnnnnnnnnnnnnnnnnnnnnnnnnnnnnnnnnnnnnnnnnnnnnnnnnnnnnnnnnnnnnnnnnnnnnnnnnnnnnnnnnnnnnnnnnnnnnnnnnnnnnnnnnnnnnnnnnnnnnnnnnnnnnnnnnnnnnnnnnnnnnnnnnnnnnnnnnnnnnnnnnnnnnnnnnnnnnnnnnnnnnnnnnnnnnnnnnnnnnnnnnnnnnnnnnnnnnnnnnnnnnnnnnnnnnnnnnnnnnnnnnnnnnnnnnnnnnnnnnnnnnnnnnnnnnnnnnnnnnnnnnnnnnnnnngctccatcctggaaaacttcagcggcagtgggggcggtgggcccgcggggctgctgcccaaccctcggctgtcggagctgtcctccggcgaggtgaccatgctgagccagctgcaggagcgccgcgacagctccaccagcaccgtcagctccgcctacaccgtgagccgccgctcctccggcatctccccctacttctccagccgccgctccagcgaggcctcgcccctgggcgctggccgcccgcacaacgccagctccgcggactcctacgaccccatctccacggacgcgtcgcggcgctcgagcgaggccagccagtgcagcggcggctctgggctgctcaacctcacgcccgcgcagcagtacagcctgcgggccaagtacgctgcggccacgggcggccccccgcccac

SEQ ID NO: 25854 - DNA, 2273 bp, Macaca Mulatta
  misc_feature (1)...(2273): n = A,T,C or G
gggagaactaatgcctcacaggacggccgcaagccccaaggagactgttgaggaaggtgtggaacacgattctgggatgcctgcctctaaaaaaatgcagggtgaacgcggtggaggagctgcactcaaggagaatgtttgtcagnnnnnnnnnnnnnnnnnnnnnnnnnnnnnnnnnnnnnnnnnnnnnnnnnnnnnnnnnnnnnnnnnnnnnnnnnnnnnnnnnnnnnnnnnnnnnnnnnnnnnnnnnnnnnnnnnnnnnnnnnnnnnnnnnnnnnnnnnnnnnnnnnnnnnnnnnnnnnnnnnnnnnnnnnnnnnnnnnnnnnnnnnnnnnnnnnnnnnnnnnnnnnnnnnnnnnnnnnnnnnnnnnnnnnnnnnnnnnnnnnnnnnnnnnnnnnnnnnnnnnnnnnnnnnnnnnnnnnnnnnnnnnnnnnnnnnnnnnnnnnnnnnnnnnnnnnnnnnnnnnnnnnnnnnnnnnnnnnnnnnnnnnnnnnnnnnnnnnnnnnnnnnnnnnnnnnnnnnnnnnnnnnnnnnnnnnnnnnnnnnnnnnnnnnnnnnnnnnnnnnnnnnnnnnnnnnnnnnnnnnnnnnnnnnnnnnnnnnnnnnnnnnnnnnnnnnnnnnnnnnnnnnnnnnnnnnnnnnnnnnnnnnnnnnnnnnnnnnnnnnnnnnnnnnnnnnnnnnnnnnnnnnnnnnnnnnnnnnnnnnnnnnnnnnnnnnnnnnnnnnnnnnnnnnnnnnnnnnnnnnnnnnnnnnnnnnnnnnnnnnnnnnnnnnnnnnnnnnnnnnnnnnnnnnnnnnnnnnnnnnnnnnnnnnnnnnnnnnnnnnnnnnnnnnnnnnnnnnnnnnnnnnnnnnnnnnnnnnnnnnnnnnnnnnnnnnnnnnnnnnnnnnnnnnnnnnnnnnnnnnnnnnnnnnnnnnnnnnnnnnnnnnnnnnnnnnnnnnnnnnnnnnnnnnnnnnnnnnnnnnnnnnnnnnnnnnnnnnnnnnnnnnnnnnnnnnnnnnnnnnnnnnnnnnnnnnnnnnnnnnnnnnnnnnnnnnnnnnnnnnnnnnnnnnnnnnnnnnnnnnnnnnnnnnnnnnnnnnnnnnnnnnnnnnnnnnnnnnnnnnnnnnnnnnnnnnnnnnnnnnnnnnnnnnnnnnnnnnnnnnnnnnnnnnnnnnnnnnnnnnnnnnnnnnnnnnnnnnnnnnnnnnnnnnnnnnnnnnnnnnnnnnnnnnnnnnnnnnnnnnnnnnnnnnnnnnnnnnnnnnnnnnnnnnnnnnnnnnnnnnnnnnnnnnnnnnnnnnnnnnnnnnnnnnnnnnnnnnnnnnnnnnnnnnnnnnnnnnnnnnnnnnnnnnnnnnnnnnnnnnnnnnnnnnnnnnnnnnnnnnnnnnnnnnnnnnnnnnnnnnnnnnnnnnnnnnnnnnnnnnnnnnnnnnnnnnnnnnnnnnnnnnnnnnnnnnnnnnnnnnnnnnnnnnnnnnnnnnnnnnnnnnnnnnnnnnnnnnnnnnnnnnnnnnnnnnnnnnnnnnnnnnnnnnnnnnnnnnnnnnnnnnnnnnnnnnnnnnnnnnnnnnnnnnnnnnnnnnnnnnnnnnnnnnnnnnnnnnnnnnnnnnnnnnnnnnnnnnnnnnnnnnnnnnnnnnnnnnnnnnnnnnnnnnnnnnnnnnnnnnnnnnnnnnnnnnnnnnnnnnnnnnnnnnnnnnnnnnnnnnnnnnnnnnnnnnnnnnnnnnnnnnnnnnnnnnnnnnnnnnnnnnnnnnnnnnnnnnnnnnnnnnnnnnnnnnnnnnnnnnnnnnnnnnnnnnnnnnnnnnnnnnnnnnnnnnnnnnnnnnnnnnnnnnnnnnnnnnnnnnnnnnnnnnnnnnnnnnnnnnnnnnnnnnnnnnnnnnnnnnnnnnnnnnnnnnnnnnnnnnnnnnnnnnnnnnnnnnnnnnnnnnnnnnnnnnnnnnnnnnnnnnnnnnnnnnnnnnnnnnnnnnnnnnnnnnnnnnnnagggaaatgggaatgtccgtggcatcagtgtgacatctgtgggaaggaagcagcctccttctgtgagatgtgccccagctccttttgtaagcagcatcgagaagggatgcttttcatttccaaactggatgggcgtctgtcttgtactgagcatgacccctgtgggcccaatcctctggaacctggggagatccgtgagtatgtgcctcccccagtaccgctgcctccagggccaagcactcacctggcagagcaatcaacaggaatggctgctcaggcacccaaaatgtcagataaacctcctgctga

SEQ ID NO: 25855 - DNA, 434 bp, Macaca Mulatta
tgaccaccctctttgcctcatcttcttgtcaaaaatataaaacattccacatctcattttcttagttcctatcatcttcatcatgagaagcacgcctcagacttctaataattctaatgttccttccaaaatgtttgaaatgaatcagctttgtgtttgataatatctcaataaggggacttctatcttgaaataatacaaatttttagataaacttagagacgttcatcctcagataacaccaaaacttgagaacatcttataaaaagtttccatttacagttcatggattacagcagttcctgggctccaatataagtagaccacgtgcctaggaagctaggaaaagtctcagagccaatatatctaaaaacgctttcctactggaaaatacagccccaaggttacatgaagctcagggttcacacgtaggt

SEQ ID NO: 25856 - DNA, 541 bp, Macaca Mulatta
  misc_feature (1)...(541): n = A,T,C or G
gggatccttctaaagtaaatattctggtacctggtgctggactaggaagactggcctgggaaatagctatgctaggttatgcttgtcaaggaaatgaatggagtttttttatgctcttttcttccaactttgtactcaacannnnnnnnnnnnnnnnnnnnnnnnnnnnnnnnnnnnnnnnnnnnnnnnnnnnnnnnnnnnnnnnnnnnnnnnnnnnnnnnnnnnnnnnnnnnnnnnnnnnnnnnnnnnnnnnnnnnnnnnnnnnnnnnnnnnnnnnnnnnnnnnnnnnnnnnnnnnnnnnnnnnnnnnnnnnnnnnnnntacctgggactgtattgctacctgtttcttcatagacacagctcacaatgtaattgattatattgatancatatggaaaatactcaagccaggtggaatttggataaatctantaggtcctctgctgtaccactttgaaaatctggcaaatgaactttccatagaattgagctatgaggatataaaaaacgttgttctgcagtatggattcaaggtagagg

SEQ ID NO: 25857 - DNA, 2002 bp, Macaca Mulatta
  misc_feature (1)...(2002): n = A,T,C or G
cctccattgaaggcgctccagaggtgaccatgagcagcctcttcaaacagatcctgcggaccgagggggccttcgggctgtacagggggctggcccccaacttcatgaaggtcatcccagccgtgagcatcagctacgtggtctacgagaacctgaagatcaccctgggcgtgcagtcgcggtgacggggggagggcggccccgccgtggactcgctgatcctgggccgcagcccggggtatgcagccatctcattctgtgaatgtgccaacactaagctgactcgagccaagctgtgaaaaccctagannnnnnnnnnnnnnnnnnnnnnnnnnnnnnnnnnnnnnnnnnnnnnnnnnnnnnnnnnnnnnnnnnnnnnnnnnnnnnnnnnnnnnnnnnnnnnnnnnnnnnnnnnnnnnnnnnnnnnnnnnnnnnnnnnnnnnnnnnnnnnnnnnnnnnnnnnnnnnnnnnnnnnnnnnnnnnnnnnnnnnnnnnnnnnnnnnnnnnnnnnnnnnnnnnnnnnnnnnnnnnnnnnnnnnnnnnnnnnnnnnnnnnnnnnnnnnnnnnnnnnnnnnnnnnnnnnnnnnnnnnnnnnnnnnnnnnnnnnnnnnnnnnnnnnnnnnnnnnnnnnnnnnnnnnnnnnnnnnnnnnnnnnnnnnnnnnnnnnnnnnnnnnnnnnnnnnnnnnnnnnnnnnnnnnnnnnnnnnnnnnnnnnnnnnnnnnnnnnnnnnnnnnnnnnnnnnnnnnnnnnnnnnnnnnnnnnnnnnnnnnnnnnnnnnnnnnnnnnnnnnnnnnnnnnnnnnnnnnnnnnnnnnnnnnnnnnnnnnnnnnnnnnnnnnnnnnnnnnnnnnnnnnnnnnnnnnnnnnnnnnnnnnnnnnnnnnnnnnnnnnnnnnnnnnnnnnnnnnnnnnnnnnnnnnnnnnnnnnnnnnnnnnnnnnnnnnnnnnnnnnnnnnnnnnnnnnnnnnnnnnnnnnnnnnnnnnnnnnnnnnnnnnnnnnnnnnnnnnnnnnnnnnnnnnnnnnnnnnnnnnnnnnnnnnnnnnnnnnnnnnnnnnnnnnnnnnnnnnnnnnnnnnnnnnnnnnnnnnnnnnnnnnnnnnnnnnnnnnnnnnnnnnnnnnnnnnnnnnnnnnnnnnnnnnnnnnnnnnnnnnnnnnnnnnnnnnnnnnnnnnnnnnnnnnnnnnnnnnnnnnnnnnnnnnnnnnnnnnnnnnnnnnnnnnnnnnnnnnnnnnnnnnnnnnnnnnnnnnnnnnnnnnnnnnnnnnnnnnnnnnnnnnnnnnnnnnnnnnnnnnnnnnnnnnnnnnnnnnnnnnnnnnnnnnnnnnnnnnnnnnnnnnnnnnnnnnnnnnnnnnnnnnnnnnnnnnnnnnnnnnnnnnnnnnnnnnnnnnnnnnnnnnnnnnnnnnnnnnnnnnnnnnnnnnnnnnnnnnnnnnnnnnnnnnnnnnnnnnnnnnnnnnnnnnnnnnnnnnnnnnnnnnnnnnnnnnnnnnnnnnnnnnnnnnnnnnnnnnnnnnnnnnnnnnnnnnnnnnnnnnnnnnnnnnnnnnnnnnnnnnnnnnnnnnnnnnnnnnnnnnnnnnnnnnnnnnnnnnnnnnnnnnnnnnnnnnnnnnnnnnnnnnnnnnnnnnnnnnnnnnnnnnnnnnnnnnnnnnnnnnnnnnnnnnntttctgaatgtcaaggcagtgaggtgcctctcactgtgaatctgtggtgggcgggggctggaggagagggtggggggctggctccctccctcccagccttctgccgcccttgcttaacaatgctggccaactggcgacgtcacagttgcacttccattccaccagaatgacctgatgaggaaatcttcactcttcaataggatgcaaagatcaatgcaaaaattattgttatatatgaacatatatagttataactggaatcgtcaaaaagcaaattaagaaagaaatggaagttggaagttgtcatttaaagcaaccttctaataaagttgtttcaaagct

SEQ ID NO: 25858 - DNA, 489 bp, Macaca Mulatta
gttgagttgaggcctcccagaagccacctgctcagcccttatctgtcccccatccccactataggcaccttcaagatccagaagacgaggctgcagcgagagggctttgacccacgccagacctcggaccagctcttcttcctggacctgaagcagggccactacctgcccttaaacgaggtggtctacactcgcatctgctcgggcgccttctccctctgaagctgtctccctactggccagaaacttcgggcctggtgggaaaggcaggcttgagccagacagccctgcctcggggtggccacctcctacacacccacttggccaagctgtacctggcagggcccatcctagactgagaaactggaacctcagaggaacccatgcctttctgctgccttggtgcccctgtgtctgtctcccctccctgctttccggcctctgtctccttccatccctgtccctatctggtcttaactcttccctctt

SEQ ID NO: 25859 - DNA, 5843 bp, Macaca Mulatta
  misc_feature (1)...(5843): n = A,T,C or G
gatcatggaggacacccaggctattgactgggatgttgaagaagaggaggagacagagcaatccagtgaatccttgaggtgtaatgtggagccagtagggcggctacatatctttagtggtgcccatggaccagaaaaagnnnnnnnnnnnnnnnnnnnnnnnnnnnnnnnnnnnnnnnnnnnnnnnnnnnnnnnnnnnnnnnnnnnnnnnnnnnnnnnnnnnnnnnnnnnnnnnnnnnnnnnnnnnnnnnnnnnnnnnnnnnnnnnnnnnnnnnnnnnnnnnnnnnnnnnnnnnnnnnnnnnnnnnnnnnnnnnnnnnnnnnnnnnnnnnnnnnnnnnnnnnnnnnnnnnnnnnnnnnnnnnnnnnnnnnnnnnnnnnnnnnnnnnnnnnnnnnnnnnnnnnnnnnnnnnnnnnnnnnnnnnnnnnnnnnnnnnnnnnnnnnnnnnnnnnnnnnnnnnnnnnnnnnnnnnnnnnnnnnnnnnnnnnnnnnnnnnnnnnnnnnnnnnnnnnnnnnnnnnnnnnnnnnnnnnnnnnnnnnnnnnnnnnnnnnnnnnnnnnnnnnnnnnnnnnnnnnnnnnnnnnnnnnnnnnnnnnnnnnnnnnnnttcccctgtcctaggtggccctgggccgccttttgccttcaatttgaacagtgacacagatgcggaagaaggtcagcaatcagccacagaggaggcctcctcagctgccagaagaggtgccactatagaggcagagcagtctgaagctgaagttgtaactgaaatccagcttgaaaaggatcagccttcggtgaaggagagggacaatgacacaaaagtcaagaggggtgcagggaatggggtggttccagctgggatgattctggagaggagccaacctcctggagaggacagtgacacagatgtggatgatgacagcaggcctcctggaaggccagctgaggtccatttggaaagggctcagccttttggcttcatcgacagcgacaccgatgcggaagaagaggggattccagcaaccccagttgtcgttcctatgaagaagaggaagatctttcatggagttggtacaaggggtcctggagcaccaggcctgtcccatctgcaggagagccaggctggtagtgatacagatgtggaggaaggcaaggccccannnnnnnnnnnnnnnnnnnnnnnnnnnnnnnnnnnnnnnnnnnnnnnnnnnnnnnnnnnnnnnnnnnnnnnnnnnnnnnnnnnnnnnnnnnnnnnnnnnnnnnnnnnnnnnnnnnnnnnnnnnnnnnnnnnnnnnnnnnnnnnnnnnnnnnnnnnnnnnnnnnnnnnnnnnnnnnnnnnnnnnnnnnnnnnnnnnnnnnnnnnnnnnnnnnnnnnnnnnnnnnnnnnnnnnnnnnnnnnnnnnnnnnnnnnnnnnnnnnnnnnnnnnnnnnnnnnnnnnnnnnnnnnnnnnnnnnnnnnnnnnnnnnnnnnnnnnnnnnnnnnnnnnnnnnnnnnnnnnnnnnnnnnnnnnnnnnnnnnnnnnnnnnnnnnnnnnnnnnnnnnnnnnnnnnnnnnnnnnnnnnnnnnnnnnnnnnnnnnnnnnnnnnnnnnnnnnnnnnnnnnnnnnnnnnnnnnnnnnnnnnnnnnnnnnnnnnnnnnnnnnnnnnnnnnnnnnnnnnnnnnnnnnnnnnnnnnnnnnnnnnnnnnnnnnnnnnnnnnnnnnnnnnnnnnnnnnnnnnnnnnnnnnnnnnnnnnnnnnnnnnnnnnnnnnnnnnnnnnnnnnnnnnnnnnnnnnnnnnnnnnnnnnnnnnnnnnnnnnnnnnnnnnnnnnnnnnnnnnnnnnnnnnnnnnnnnnnnnnnnnnnnnnnnnnnnnnnnnnnnnnnnnnnnnnnnnnnnnnnnnnnnnnnnnnnnnnnnnnnnnnnnnnnnnnnnnnnnnnnnnnnnnnnnnnnnnnnnnnnnnnnnnnnnnnnnnnnnnnnnnnnnnnnnnnnnnnnnnnnnnnnnnnnnnnnnnnnnnnnnnnnnnnnnnnnnnnnnnnnnnnnnnnnnnnnnnnnnnnnnnnnnnnnnnnnnnnnnnnnnnnnnnnnnnnnnnnnnnnnnnnnnnnnnnnnnnnnnnnnnnnnnnnnnnnnnnnnnnnnnnnnnnnnagcagtccagagcatggaggatgaacctacccaggccttcatgttgactccaccccaagaacttggctcttcccattgcagcttccagacaacaggtannnnnncaggtaccctagatgaaccatgggaggtcctggctacacagccattctgtctgagagagtctgaggactctgagacccggccttttgacacccaccttgaggcctatggaccttgcctgtctccgcctagggcaataccccgagaccgacatccagagagcccagttcacacggagccaatggggattcaaggcagagggaggcagactgtggataaaggcgtgggtataccaaaagaaacagcagagagggtgggccctgagagagggccactggagagagaaactgagaaactgctaccggaaagacagacagatgtgacgggagaggaagaattaaccagggggatacaggacagagaacaaaaacagttgttagctagagacacccagagacaagaatctgacaaaaatggggaaagtgcaagtcctgaaagagatagggagagtttgaaggtagaaattgagacatccaaggaaatacaagggaaacaagtacagaagcagacccttccaagcaaagcatttgagagagaagtagagagaccagtagcagacagagagtgtgagccagctgagttagaagagaaggtgcccaaagtgatcctggagagagacgcacagagaggggagccaaagggagggagccaggaccagaaagggcaggcctccagcccaacatcagagcctnnnnnnnnnnnnnnnnnnnnnnnnnnnnnnnnnnnnnnnnnnnnnnnnnnnnnnnnnnnnnnnnnnnnnnnnnnnnnnnnnnnnnnnnnnnnnnnnnnnnnnnnnnnnnnnnnnnnnnnnnnnnnnnnnnnnnnnnnnnnnnnnnnnnnnnnnnnnnnnnnnnnnnnnnnnnnnnnnnnnnnnnnnnnnnnnnnnnnnnnnnnnnnnnnnnnnnnnnnnnnnnnnnnnnnnnnnnnnnnnnnnnnnnnnnnnnnnnnnnnnnnnnnnnnnnnnnnnnnnnnnnnnnnnnnnnnnnnnnnnnnnnnnnnnnnnnnnnnnnnnnnnnnnnnnnnnnnnnnnnnnnnnnnnnnnnnnnnnnnnnnnnnnnnnnnnnnnnnnnnnnnnnnnnnnnnnnnnnnnnnnnnnnnnnnnnnnnnnnnnnnnnnnnnnnnnnnnnnnnnnnnnnnnnnnnnnnnnnnnnnnnnnnnnnnnnnnnnnnnnnnnnnnnnnnnnnnnnnnnnnnnnnnnnnnnnnnnnnnnnnnnnnnnnnnnnnnnnnnnnnnnnnnnnnnnnnnnnnnnnnnnnnnnnnnnnnnnnnnnnnnnnnnnnnnnnnnnnnnnnnnnnnnnnnnnnnnnnnnnnnnnnnnnnnnnnnnnnnnnnnnnnnnnnnnnnnnnnnnnnnnnnnnnnnnnnnnnnnnnnnnnnnnnnnnnnnnnnnnnnnnnnnnnnnnnnnnnnnnnnnnnnnnnnnnnnnnnnnnnnnnnnnnnnnnnnnnnnnnnccacatctcaggccactaggagcaggacaaatacgtcctctgtcaagacccctgaagcagttgtgcccacagcccttgagctccacccttccaactccacagatcaacctgtcacccccaagcccacatctgaggccattaggagcaggacaaataggtcctctgtcaagacccctgaaccagttgtccccacagtccctgagctccagccttccacctccacagaccagcctgtcgcctctgagcccacatctcaggctactaggggaagaaaaaatagatcctctgtcaagacccctgaagcagttgtgcccacagcccttgagctccacccttccaactccacagatcaacctgtcacccccaagcccacatctcggaccactaggagcaggacaaatatgtcctctgtcaagacccctgaatcaactgtccctatagcccctgagctcccaccttccacctccacagagcagcctgtcatcactgagcccacatatcagcctactaggggaagaaaaaacaggtcctctgtcaagacccctgaaacagttgtggccacagcccctaagctccagtcttccacctccacagaccagcctatcactcctgagcccacatctcaggccaccaggggtaggacaaataggtcctctgtcaagagccctgaaacagttctccgcacagcccctgagctccagccttccacctccacacaccagccannnnnnnnnnnnnnnnnnnnnnnnnnnnnnnnnnnnnnnnnnnnnnnnnnnnnnnnnnnnnnnnnnnnnnnnnnnnnnnnnnnnnnnnnnnnnnnnnnnnnnnnnnnnnnnnnnnnnnnnnnnnnnnnnnnnnnnnnnnnnnnnnnnnnnnnnnnnnnnnnnnnnnnnnnnnnnnnnnnnnnnnnnnnnnnnnnnnnnnnnnnnnnnnnnnnnnnnnnnnnnnnnnnnnnnnnnnnnnnnnnnnnnnnnnnnnnnnnnnnnnnnnnnnnnnnnnnnnnnnnnnnnnnnnnnnnnnnnnnnnnnnnnnnnnnnnnnnnnnnnnnnnnnnnnnnnnnnnnnnnnnnnnnnnnnnnnnnnnnnnnnnnnnnnnnnnnnnnnnnnnnnnnnnnnnnnnnnnnnnnnnnnnnnnnnnnnnnnnnnnnnnnnnnnnnnnnnnnnnnnnnnnnnnnnnnnnnnnnnnnnnnnnnnnnnnnnnnnnnnnnnnnnnnnnnnnnnnnnnnnnnnnnnnnnnnnnnnnnnnnnnnnnnnnnnnnnnnnnnnnnnnnnnnnnnnnnnnnnnnnnnnnnnnnnnnnnnnnnnnnnnnnnnnnnnnnnnnnnnnnnnnnnnnnnnnnnnnnnnnnnnnnnnnnnnnnnnnnnnnnnnnnnnnnnnnnnnnnnnnnnnnnnnnnnnnnnnnnnnnnnnnnnnnnnnnnnnnnnnnnnnnnnnnnnnnnnnnnnnnnnnnnnnnnnnnnnnnnnnnnnnnnnnnnnnnnnnnnnnnnnnnnnnnnnnnnnnnnnnnnnnnnnnnnnnnnnnnnnnnnnnnnnnnnnnnnnnnnnnnnnnnnnnnnnnnnnnnnnnnnnnnnnnnnnnnnnnnnnnnnnnnnnnnnnnnnnnnnnnnnnnnnnnnnnnnnnnnnnnnnnnncccttacagccattcctgagcctgcctctccccagcttcttgatataccaactcatgcctcccagatccaaaaagtggaaccagcaggtagatctaggttcaccccagagctccagcctaaggcctctcaaagccgcaagaggtctttagctatcatggattcaccaccacatcaaaaacagccccaaagaggggaagtctcccagaagacagtgattatcaaggaagaggaagaagatactgcagagaagccagggaaggaagaggnaggatgtcatgactccaaaaccaggcaagagaaagagagaccaggcagaggaggagcccaacagaataccgaaccgcagcctccgacggaccaaacttaaccaagagtcaacagcccccaaagtngtgctcttcacaggagtggtggatgctcagggagagcgggccgtgctggcactggggggaagtctggctggttcagcggcagaggcttcccacctggtcactgatcgcatccgccggacagtcaagttcctgtgtgccct

SEQ ID NO: 25860 - DNA, 762 bp, Macaca Mulatta
tactgtcagcacctcttctgtgtggtgagtggaccgctcacccctctaggtgaagatgtcggcccaggagagctgcctcagcctcagcagatacttcctcttcgttttcaacctcttcttcttcgtcctgggcagcctgatcttctgcttcggcatctggatcctcatcgacaagaccagcttcgtgtcctttgtgggcttggccttcgtgcccctgcagatctggtccaaagtcctggccatctctggagtcttcaccatgggcctcgccctcctgggttgtgtgggggccctcaaggagctccgctgcctcctgggcctgtattttgggatgctgctgctcctgtttgccacacagataacgctgggaatcctcatctccactcagcgggcccagctggagcgaagcttgcaggacatcgtagagaaaaccatccaaaggtaccacaccaaccccgaggagaccgcggccgaggagagctgggactatgtgcagttccagctgcgctgttgcggctggcactccccgcaggactggttccaggtcctcaccctgagaggtaacgggtcggaggcgcaccgcgtgccctgctcctgctacaacttgtcagcgaccaacgactccacaatcctggataaggtgatcttgccccagctcagcaggcttggacagctggcgcggtccagacacagtacagacatctgcgcggtccctgcaaacaggcaacatctaccgcgagggctgcgcgcggagcctccaga

SEQ ID NO: 25861 - DNA, 294 bp, Macaca Mulatta
atgaaggtctccgcagcacttctgtggctgctgctcgtagcagctgccttcagcccccaggggctcactgggccagattctgttgcaaccacctgctgctttaccctgaccaataagaagataccccttcagcgactggagagctacagaaggatcatcagtggcaaatgtccccagaaagctgtgatcttcaagaccaaactggccaaggatatctgtgccgaccccaagaagaagtgggtgcaggattccatgaagtatctggaccgaaaatctccaactccaaagccataa

SEQ ID NO: 25862 - DNA, 785 bp, Macaca Mulatta
gttttctgcaaaagtttttaatttcatgaattaaagagtatttcccctttgtcccattatgccaagggcaaatatggaagtttgatcatatactaatagtaataaagctggatatcttccaagagattgataaattaaaaggcaaaagctcatatatcatgtttagttatactgtgagtcttatgagaagctgggaggcaaccccattaactcaccagaatacagaactcagtgtcacaatttcttagacacaattccttataccttttcctcaaagattaaattctgaaaataatcttaagattaagattattaagagaaaaaggctgtccacaaatggacttatctgttatttcttccttattgtgagctgaatggcatgacaaagcagaggcaaagaggcatacatcaattcttcaaagtatgaagtcaaaaaggtcagagcttccacagcatggcaacagctttgcagatgcccacgtcgtgatagttgaaatagcaaagcccagcaaaggttaaagctgaaagtgccaaaagccctgccttggcagctttctgcgaggcatccccatgaacatagtcagtaacaacttgtccaaggcccaatggtgcctgggtgacaagtgaatgtgctgcactccacgccattctgggataggtcggtcctgaagaaatgctgagatatgagcaggtctgaccactggggttcgcagcaacagagctcggcctccttgggcaccgcaaagggcactcagcctccagacaaccgccatctcgttccaccc

SEQ ID NO: 25863 - DNA, 516 bp, Macaca Mulatta
gaagagacatcttcaagatctccaaaaatagataagaaaaaaagtccatatggactgtggatacctgtctgaaaggagaaaactaatggctaagtttgcatgaaaactgcactttattgcaagttagtgtttctagcattatcttatccctttgagccattcaggggtacttgtacatttaaaaaccaacacaaaaagatgtaaatacttaatactcaaatattaacattttaggtttctcttgcagatatgagaaatagcacagatggaccaaaggttatacacaggtgggagtcttttgtatatagttgtaaatattttcttggttatgtaaaaatgaaattttttagacacagtaattgaactgtattcctgttttgtatatttaataaatttcttgttttaattcttagtctctattctatgtgtaattacctaatgggtctttgtagagatacaaggaggcgtgtgttgattaaagccttgttaatctcaagtccaaggctcactggccca

SEQ ID NO: 25864 - DNA, 690 bp, Macaca Mulatta
ccattcttcgaattgatcatcttattaaattacatccagaaagtaaagatgataaacatctttgttatgaagatgctgttcactctggagcccttaatgattgatctgatgtctcttttatttataacaatgttaaatggaattgtcttgtaccttgacttaagtattacacattaaagtacaacaagctgtaaacttgggtttttgtgatacaggaaatggtttccatctgtgttttggtcctctgatttcacatataacaacctagtactttattagtttaaaaagaaattgaggttgttcaaagtttaagcaattcatcctctctgaacacacattgctattcccatcccacccccaatgcacagggccgcaacaccacgaattccgcccgttctctccagtgtgtgtaacagggtcacaagaattcgacagccagatgctccaagagggtggcccaaggctatagcccctccttcaatgttgacctaaggggaagaaaagatttagattgtttattcttctgtgggcacagtttaaaatcctaaacttgtcttttttctcttaatgtatcagcatgctaccctttcaaactcaaattttcattttaactgtttaggaataaatttacacctttgtgaaaattcatccctgcctatgttaccttattctttttatgccaagtaagct

SEQ ID NO: 25865 - DNA, 536 bp, Macaca Mulatta
  misc_feature (1)...(536): n = A,T,C or G
agcagagttctcccgcccagcctctgtcagcgagaaccacgatgcagggcctgacggtgacaagcgggaggaggatggcgagtctggggggcgacggtcagaggccgaggagggagaggtcaggactccgaccaagatcaaggagctaaagnnnnnnnnnnnnnnnnnnnnnnnnnnnnnnnnnnagttcttagacaagccagaggacgtcttgctgaagcaccaggccagcatcaatgagctcaagaggaccctgaaggagcccaacagcaaactcatccaccgggatcgagactgggaacgggagcgcaggctgnnnnnnnnnnnnnnnnnnnnnnnnnnnnnnnnnnnnnnnnnnnnnnnnnnnnagagagcaaggctgagggagggctccgaggagaaagtcaaaccaccacgtccccgggccccagagagtgacactggtgatgaggatcatgaccaggagagggacacggtgttactgaaagacaaccacctgggcattgagcgcaagtgctccagcatcgcggtcagct

SEQ ID NO: 25866 - DNA, 1893 bp, Macaca Mulatta
  misc_feature (1)...(1893): n = A,T,C or G
gattgtgtacgtgtacgtcaagaagcgcagcgagttcgggaagcagtgcaatttctctgaccgccaggccgagctgaacatcgacatcatgcccaaccctgagctggccgagcagttcgtggagcggaacccagtggacacaggcatccagtgttcggtcagcatgtcggaacatgagnnnnnnnnnnnnnnnnnnnnnnnnnnnnnnnnnnnnnnnnnnnnnnnnnnnnnnnnnnnnnnnnnnnnnnnnnnnnnnnnnnnnnnnnnnnnnnnnnnnnnnnnnnnnnnnnnnnnnnnnnnnnnnnnnnnnnnnnnnnnnnnnnnnnnnnnnnnnnnnnnnnnnnnnnnnnnnnnnnnnnnnnnnnnnnnnnnnnnnnnnnnnnnnnnnnnnnnnnnnnnnnnnnnnnnnnnnnnnnnnnnnnnnnnnnnnnnnnnnnnnnnnnnnnnnnnnnnnnnnnnnnnnnnnnnnnnnnnnnnnnnnnnnnnnnnnnnnnnnnnnnnnnnnnnnnnnnnnnnnnnnnnnnnnnnnnnnnnnnnnnnnnnnnnnnnnnnnnnnnnnnnnnnnnnnnnnnnnnnnnnnnnnnnnnnnnnnnnnnnnnnnnnnnnnnnnnnnnnnnnnnnnnnnnnnnnnnnnnnnnnnnnnnnnnnnnnnnnnnnnnnnnnnnnnnnnnnnnnnnnnnnnnnnnnnnnnnnnnnnnnnnnnnnnnnnnnnnnnngcctgctgggacacccgaaagggcagcctggtggcggagctatccaccattgagttcagccaccgagaccctgtgtatggcaccatctggctgcagtcgaagacgggcaccgagtgcttctcagcatccacggannnnnnnnnnnnnnnnnnnnnnnnnnnnnnnnnnnnnnnnnnnnnnnnnnnnnnnnnnnnnnnnnnnnnnnnnnnnnnnnnnnnnnnnnnnnnnnnnnnnnnnnnnnnnnnnnnnnnnnnnnnnnnnnngcccaccaagttcatggtggggactgagcagggcatcatcatctcctgcaaccgcaaggccaagacgtcagctgagaagattgtgtgcaccttcccgggccatcatggccccgtctacgccctccagaggaaccccttctacccgaagaacttcctgacagttggtgactggacagcccgcatctggtctgaagacagccgggaatcgtccatcatgtggaccaagtnnnnnnnnnnnnnnnnnnnnnnnnnnnnnnnnnnnnnnnnnnnnnnnnnnnnnnnnnnnnnnnnnnnnnnnnnnnnnnnnnnnnnnnnnnnnnnnnnnnnnnnnnnnnnnnnnnnnnnnnnnnnnnnnnnnnnnnnnnnnnnnnnnnnnnnnnnnnnnnnnnnnnnnnnnnnnnnnnnnnnnnnnnnnnnnnnnnnnnnnnnnnnnnnnnnnnnnnnnnnnnnnnnnnnnnnnnnnnnnnnnnnnnnnnnnnnnnnnnnnnnnnnnnnnnnnnnnnnnnnatgtttgagcgtgagacccggcgagagaagatcctggaggccaggcaccgggagatgcggctgaaggagaagggcaaggcggagggcagggacgaggagcagacggacgaggatctggacatagacctggaggtgctggtcagcagggctgaagaggagttcttcgacatcatcttcgcagagctgaagaagaaggaggcagacgccataaagctgacgccaatgccnnnnnnnnnnnnnnnnnnnnnnnnnnnnnnnnnnnnnnnnnnnnnnnnnnnnnnnnnnnnnnnnnnnnnnnnnnnnnnnnnnnnnnnnnnnnnnnnnnnnnnnnnnnnnnnnnnnnnnnnnnnnnnnnnnnnnnnnnnnnnnnnnnnnnngaccctcaaccagacttgcatgtccatggc

SEQ ID NO: 25867 - DNA, 176 bp, Macaca Mulatta
agatgacgtcagttgccaaggtgtattacagtcagaccactcagacagaaagccggcccctaatgggcccagggatacgacggcggagagtcctgacaaaagatggtcgcagcaatgtgagaatggagcacattgccgacaagcgcttcctctacctcaaggacctgtggacaacc

SEQ ID NO: 25868 - DNA, 390 bp, Macaca Mulatta
  misc_feature (1)...(390): n = A,T,C or G
gttggctgattctgaggggaagaatgtggccaccaaggttggagaggcctggcaggacaggcctagagccccaagaggtgaccaaggagacccagctgtacccactcagcaacctgcagatcccagcaccccagagcagcagaacagcaccagcggatctgagcagtttgttggacgagagagctgtgccagcaggnttggctgattctgaggggaagaatgtggccaccaaggttggagaggcctggcaggacaggcctagagccccaagaggtgaccaaggagacccagctgtacccactcagcaacctgcagatcccagcaccccagagcagcagaacagcaccagcggatctgagcagtttgttggacgagagagctgtgccagca

SEQ ID NO: 25869 - DNA, 2930 bp, Macaca Mulatta
  misc_feature (1)...(2930): n = A,T,C or G
atggagcaggcacccaacatggctgagccccgcggccctgtagaccatggagtccagattcgcttcatcacagagccagtgagtggtgcagagatgggcactctacgtcgcggtggacgacgcccagctaaggatgcaagagccagtacctatggggttgctgtgcgtgtgcagggcatcgctgggcagccctttgtggtgctcaccattagggagaaacggtggtgactcctttggggtccaaatcaagggaggcgatgatcaagaggcctcaggagctcnnnnnnnnnnnnnnnnnnnnnnnnnnnnnnnnnnnnnnnnnnnnnnnnnnnnnnnnnnnnnnnnnnnnnnnnnnnnnnnnnnnnnnnnnnnnnnnnnnnnnnnnnnnnnnnnnnnnnnnnnnnnnnnnnnnnnnnnnnnnnnnnnnnnnnnnnnnnnnnnnnnnnnnnnnnnnnnnnnnnnnnnnnnnnnnnnnnnnnnnnnnnnnnnnnnnnnnnnnnnnnnnnnnnnnnnnnnnnnnnnnnnnnnnnnnnnnnnnnnnnnnnnnnnnnnnnnnnnnnnnnnnnnnnnnnnnnnnnnnnnnnnnnnnnnnnnnnnnnnnnnnnnnnnnnnnnnnnnnnnnnnnnnnnnnnnnnnnnnnnnnnnnnnnnnnnnnnnnnnnnnnnnnnnnnnnnnnnnnnnnnnnnnnnnnnnnnnnnnnnnnnnnnnnnnnnnnnnnnnnnnnnnnnnnnnnnnnnnnnnnnnnnnnnnnnnnnnnnnnnnnnnnnnnnnnnnnnnnnnnnnnnnnnnnnnnnnnnnnnnnnnnnnnnnnnnnnnnnnnnnnnnnnnnnnnnnnnnnnnnnnnnnnnnnnnnnnnnnnnnnnnnnnnnnnnnnnnnnnnnnnnnnnnnnnnnnnnnnnnnnnnnnnnnnnnnnnnnnnnnnnnnnnnnnnnnnnnnnnnnnnnnnnnnnnnnnnnnnnnnnnnnnnnnnnnnnnnnnnnnnnnnnnnnnnnnnnnnnnnnnnnnnnnnnnnnnnnnnnnnnnnnnnnnnnnnnnnnnnnnnnnnnnnnnnnnnnnnnnnnnnnnnnnnnnnnnnnnnnnnnnnnnnnnnnnnnnnnnnnnnnnnnnnnnnnnnnnnnnnnnnnnnnnnnnnnnnnnnnnnnnnnnnnnnnnnnnnnnnnnnnnnnnnnnnnnnnnnnnnnnnnnnnnnnnnnnnnnnnnnnnnnnnnnnnnnnnnnnnnnnnnnnnnnnnnnnnnnnnnnnnnnnnnnnnnnnnnnnnnnnnnnnnngctccagaacatgaagcgcctcttggaccagggtgaaggtttacgacatgggctggaggcccaggtgatggagctgcagaacaagctgaaacaggtccagggtcctgagcctgctaaggaggtgttactgaagnnnnnnnnnnnnnnnnnnnnnnnnnnnnnnnnnnnnnnnnnnnnnnnnnnnnnnnnnnnnnnnnnnnnnnnnnnnnnnnnnnnnnnnnnnnnnnnnnnnnnnnnnnnnnnnnnnnnnnnnnnnnnnnnnnnnnnnnnnnnnnnnnnnnnnnnnnnnnnnnnnnnnnnnnnnnnnnnnnnnnnnnnnnnnnnnnnnnnnnnnnnnnnnnnnnnnnnnnnnnnnnnnnnnnnnnnnnnnnnnnnnnnnnnnnnnnnnnnnnnnnnnnnnnnnnnnnnnnnnnnnnnnnnnnnnnnnnnnnnnnnnnnnnnnnnnnnnnnnnnnnnnnnnnnnnnnnnnnnnnnnnnnnnnnnnnnnnnnnnnnnnnnnnnnnnnnnnnnnnnnnnnnnnnnnnnnnnnnnnnnnnnnnnnnnnnnnnnnnnnnnnnnnnnnnnnnnnnnnnnnnnnnnnnnnnnnnnnnnnnnnnnnnnnnnnnnnnnnnnnnnnnnnnnnnnnnnnnnnnnnnnnnnnnnnnnnnnnnnnnnnnnnnnnnnnnnnnnnnnnnnnnnnnnnnnnnnnnnnnnnnnnnnnnnnnnnnnnnnnnnnnnnnnnnnnnnnnnnnnnnnnnnnnnnnnnnnnnnnnnnnnnnnnnnnnnnnnnnnnnnnnnnnnnnnnnnnnnnnnnnnnnnnnnnnnnnnnnnnnnnnnnnnnnnnnnnnnnnnnnnnnnnnnnnnnnnnnnnnnnnnnnnnnnnnnnnnnnnnnnnnnnnnnnnnnnnnnnnnnnnnnnnnnnnnnnnnnnnnnnnnnnnnnnnnnnnnnnnnnnnnnnnnnnnnnnnnnnnnnnnnnnnnnnnnnnnnnnnnnnnnnnnnnnnnnnnnnnnnnnnnnnnnnnnnnnnnnnnnnnnnnnnnnnnnnnnnnnnnnnnnnnnnnnnnnnnnnnnnnnnnnnnnnnnnnnnnnnggcagagaaacagcaactggaggaggccctgaatgcgtcccaggaagaggaagggagtctggcagcagccaagcgggcactggaggcacgcctcgaggaggctcagcgggggctggcccgtctggggcaagagcagcagacactgaaccgggccctggaggaggaagggaagcagcgggaggtgctccggcgaggcaaggctgagctggaggagcagaagcgtttgctggataggactgtggaccgactgaacaaggagnnnnnnnnnnnnnnnnnnnnnnnnnnnnnnnnnnnnnnnnnnnnnnnnnnnnnnnnnnnnnnnnnnnnnnnnnnnnnnnnnnnnnnnnnnnnnnnnnnnnnnnnnnnnnnnnnnnnnnnnnnnnnnnnnnnnnnnnnnnnnnnnnnnnnnnnnnnnnnnnnnnnnnnnnnagatccagaggctgcggcaggccctgcaggcatcccaggctgagcgggacacagcccggctggacaaagagctactggcccagcgattgcaggggctggagcaagaggcagagaacaagaagcgctcccaggacgacagggcccggcagctgaagggcctcgag

SEQ ID NO: 25870 - DNA, 1054 bp, Macaca Mulatta
  misc_feature (1)...(1054): n = A,T,C or G
ggggtttgatgttgaaaatttgttacgggggagaagatccctttatctttgttttaaagtaaacattatcgctaagtatacttgtgcagtattaacagctacattatacagtaaatgtgggataaaatccatttagaaaatgttaaactgcttttccagacatggttgtagcatattttcaattagtgtgtgtatgttaatgtgtaattgatagtagaacaaagttacatttttaaaactgctacttgtataaaccttgcctctttccccaaataccgtgggttttgtgcatagtttttacaaactttggatttaccagactgtcttttcactgtttgtgggttttgtagaagttgagcatttttatggtagataaaatgttacttctatacaagtactcactccctttttatcaaaagtctgtatggtttgttttggtatgacaactagttaagtaactgacattgaactgacagaaatctacaaactataaaacatgatgttaatttttgaaggtaatttagttttgtggctggacattcagtgaagtcttaggacttctctgcagataactgactggctatatatagggatgaatctggctttagggttaaatcatttaaggtccttttataggcaggcactagtaattaaaactgaaaactaagttttattttttgagaaatgtttaaagatgtcttccaggaaatcacttagtaagtacttaattggaagaaaaaatcatgatgcttagacaataaatataaataaatgctatataaggaaactcacctatttgaaattatggctatattatttttattttctagattccaaaaatacaaacactagttcttccaacatagtactttgatagtctgtacattgacgtgtatggactaaatacagggtgaaatcaatgttacagaatttaagggtatgttaactaaatgatagcatttctaagatattttgaatattangtcatttgggcattttttcangtaagtagggatactttctcatggtttttgaaactataatgaaatatgga

SEQ ID NO: 25871 - DNA, 1976 bp, Macaca Mulatta
  misc_feature (1)...(1976): n = A,T,C or G
aggggcgtatcattcgaggagcttacagaatgcaagctatcatcaccacttttgaaatgattcttggagaatgtggagagcttaatgcaattgaannnnnnnnnnnnnnnnnnnnnnnnnnnnnnnnnnnnnnnnnnnnnnnnnnnnnnnnnnnnnnnnnnnnnnnnnnnnnnnnnnnnnnnnnnnnnnnnnnnnnnnnnnnnnnnnnnnnnnnnnnnnnnnnnnnnnnnnnnnnnnnnnnnnnnnnnnnnnnnnnnnnnnnnnnnnnnnnnnnnnnnnnnnnnnnnnnnnnnnnnnnnnnnnnnnnnnnnnnnnnnnncaggtacagaaacttcaggctatcctgaaaccaatgatgttgagacgattaaaagaagatgtggaaaagaagttggcacctaaagaagaaaccatcattgaagtagaacttactaatattcaaaagaaatactaccgggctatcttggaaaagaacttttcttttttatccaaaggagcaggacaaactaatgtacctaacttggtcaataccatgatggagctcaggaaatgctgtaatcatccatatcttatcaaaggnnnaggtgctgaggagaaaatacttggagaatttagagatgcgtataatccagctgcttctgattttcatcttcaagcaatgattcagtctgctggtaaattggtccttattgataaattgcttcccaaaatgaaagccggaggtcataaagtgctcatcttctctcagatggttcgctgccttgacatcctagaggactatctcatacataaaannnnnnnnnnnnnnnnnnnnnnnnnnnnnnnnnnnnnnnnnnnnnnnnnnnnnnnnnnnnnnnnnnnnnnnnnnnnnnnnnnnnnnnnnnnnnnnnnnnnnnnnnnnnnnnnnnnnnnnnnnnnnnnnnnnnnnnnnnnnnnnnnnnnnnnnnnnnnnnnnnnnnnnnnnnnnnnnnnnnnnnnnnnnnnnnnnnnnnnnnnnnnnnnnnnnnnnnnnnnnnnnnnnnnnnnnnnnnnnnnnnnnnnnnnnnnnnnnnnnnnnnnnnnnnnnnnnnnnnnnnnnnnnnnnnnnnnnnnnnnnnnnnnnnnnnnnnnnnnnnnnnnnnnnnnnnnnnnnnnnnnnnnnnnnnnnnnnnnnnnnnnnnnnnnnnnnnnnnnnnnnnnnnnnnnnnnnnnnnnnnnnnnnnnnnnnnnnnnnnnnnnnnnnnnnnnnnnnnnnnnnnnnnnnnnnnnnnnnnnnnnnnnnnnnnnnnnnnnnnnnnnnnnnnnnnnnnnnnnnnnnnnnnnnnnnnnnnnnnnnnnnnnnnnnnnnnnnnnnnnnnnnnnnnnnnnnnnnnnnnnnnnnnnnnnnnnnnnnnnnnnnnnnnnnnnnnnnnnnnnnnnnnnnnnnnnnnnnnnnnnnnnnnnnnnnnnnnnnnnnnnnnnnnnnnnnnnaacagcttggttattgacactccaagaattaggaagcaaacaagaccttttagtgccacaaaagatgaattggctgaattatctgaagctgaaagtgaaggagatgaaaagcccaaactccggagaccctgtgaccgttccaatggctatggaagaaccgaatgctttagagttgagaaaaacctgctagtttatgggtnnnnnnnnnnnnnnnnnnnnnnnnnnnnnnnnnnnnnnnnnnnnnnnnnnnnnnnnnnnnnnnnnnnnnnnnnnnnnnnnnnnnnnnnnnnnnnnnnnnnnnnnnnnnnnnnnnnnnnnnnnnnnnnnnnnnnnnnnnnnnnnnnnnnnnnnnnnnnnnnnnnnnnnnnnnnnnnnnnnnnnnnnnnnnnnnnnnnaggcctatcagctcctgtacccaggggtcgaaaagggaagaaagtaaaaactcaaacaagctcatttgatatacaaaaagcagaatggcttcgaaaatataatcccgagcagctgcttcaagatgaaggcta

SEQ ID NO: 25872 - DNA, 777 bp, Macaca Mulatta
ccaggacaactgggaaactgggaacttccagggccccaatggcccttttgttaaagaatggttgccaacgtgagattccttgagatagattgacttgttgaagatgaagagaaaaattgagagcttccgttacagttgttgaagagcaaccaccagccaacaccaacaagacaaggaagaagaagtccttctctcaaccgacgtccggaagcacgaagaagactcccaagacagcgaagaaaggaaaacaacttgaggagagccaggaagaaaaatgctccacaaaaatacgtggctttaagaagacttgaggaagggagcaggccaacaccctctgaccacagtgaccagctgaatgaggagctccaacagaatgagctgcagccagagcaacagagtgagggacacagccggagcaacagagataggggacacagccggagcaacagagttaggggacacagccggaacaacagagggggaggatgccaccatttcaactctctccctgagcagcgagtaatttcacggcaagcccagagacctaggatccatctgagaagtctgtagaggtctgacccagagaactcaacaacagggtacgccccatggtgatgaaaataaaatgaatcttgcattcaccgttgtattcctcaagacttagagttaaaaacccgatgaaaagtggttaatctccataatgggtgttagcgccatcgttttccaacgttagagataaccgaatgtcacctcaccccgtttagttccggaggcccc

SEQ ID NO: 25873 - DNA, 911 bp, Macaca Mulatta
  misc_feature (1)...(911): n = A,T,C or G
ggggcagttcggcggtcccgcgggtctgtctcttgcttcaacagtgtttggacggaacagatccggggactctttcttccagcctccgagcgccctccgatttcctctccacttgcaacctccgggaccatcttctcggccatctcctgcttctgggacctgccagcaccgtttttgtggttagctccgtcttgccgaccaaccatgagctcccagattcgtcagaattattccaccgacgtggaggcagccgtcaacagcctggtcaatatgtacctgcaggcctcctacacctacctctctctgggcttctatttcgaccgcgatgatgtggctctggaaggcgtgagccacttcttccgcgaattggccgaggagaagcgcgagggctacgagcgtctcctgaagatgcaaaaccagccgtgggcggacgcgcctcttttttcggacgtccagaaagccatcctcaagattgatgggggtaaaagccccgggatgccattgctatcccggccaggggccccccgggaggaacaaaaactggcaatccaccggcgcctttttttgggatactttccttggcccctgcgggtgttcttggccccgaccgggagttccccaatctttttggtggaatctgttcctggggagaaactctgccttccctccatgaagtcaccggacgggcgaaagcctgtccttcctatccccattacgcggtggtggaacggcctctgcgagcgcctctggccccccccactaatgcttcgccggtcgcggtgccggcgccacgggttttgtgggttttgggcctcccccgatctaccgcgtccccgctcgcgatacggggccgcgcccgcctcgcctctcgggtntccgagcagcgagagatacgccaatcgctttgttgg

SEQ ID NO: 25874 - DNA, 794 bp, Macaca Mulatta
agttttccttttctttaaagaaaaatgctatcctacaactcagtttttactgacccattttgatcagtcgcattggctcagtccaggatgtgagttggctccacccttccatctggaagatggagaggactcacgaggacccaggccgtgagatctgtgtgccaggaggccgggctgagactgtgagcacagtgggcagggctgcccaggactgtgagtttcatttgtaaccctggaggattttctttccttctgcagatggtggaagagagtgaagagcggctcacggaggagcagattgaagctcttctccacactgtcaccagcattctgcctgcagggccagaggctgagcagaagaagaagaccaacagcgacgtggcaatggacgaagaggacccagcgtagaagagcacagctggccctggcatttcatgacgtcagaaggcccagcagccgtttcctggatgttgagaggattgtttatttgattataccctctatcccggcaggcctggctggcttcgtggttagttgggtacatcacaaaaataagctaaaaagaaatatttgtgccttggggagaagaaacatggtgaagacaggctgaggttgtcagggcagagagctgaaggtggggacagtgaccgtggacccctctgtgcttgaaagatttcctccacagcctttgccccagttgtggggaggtctctatacacagcggggaaaatgcttgtgtcttctttggtgggccatgtcctaattagtttcatctgcttccctgggaacttact

SEQ ID NO: 25875 - DNA, 2383 bp, Macaca Mulatta
  misc_feature (1)...(2383): n = A,T,C or G
gtgggaacttcatgaggccctcgaacatctgaagaaagagcaagaagaggcctggaagctggaagttggtgaaaggaaacgaactgccacctggaaggcagnnnnnnnnnnnnnnnnnnnnnnnnnnnnnnnnnnnnnnnnnnnnnnnnnnnnnnnnnnnnnnnnnnnnnnnnnnnnnnnnnnnnnnnnnnnnnnnnnnnnnnnnnnnnnnnnnnnnnnnnnnnnnnnnnnnnnnnnnnnnnnnnnnnnnnnnnnnnnnnnnnnnnnnnnnnnnnnnnnnnnnnnnnnnnnnnnnnnnnnnnnnnnnnnnnnnnnnnnnnnnnnnnnnnnnnnnnnnnnnnnnnnnnnnnnnnnnnnnnnnnnnnnnnnnnnnnnnnnnnnnnnnngaggatattcaggaagtgttaaacagnnnnnntcttggagcttgcagcgaccagaaccaatctccctggagttgaagacagattgccgtgcgctggggctaagagagatcctgaagacctatgtagttgacgtgcgcctggatccagatattgcttactcccgtctcatcgtgtctgaggacagaaaacgtgtgcactatggagacaccaacgagaaactgccagacaatacctgagagattttaccgctataatattgtcctgggaagccagtgcatctcctcaggccggcactactgggaggtggagatgggagataggtctgagtggggcctgggaatatgtaagccaaatgtagactggaaggaggtggtctacttgtccctccgctatggattttgggtgataaggctgaggaagagaaatgagtacagagcaggcaccgatgagtaccccctcctgtccttgccagtccctcctcgccgggtgggaattttcgtggattatgaggtccatgacatttccttctaccatgtgactgactatggctcccacatcctcacttttccccgctatcccttccctgggtgcctcctggcctattttaatccttgcttcaggaattggatccaacaatactgctcctctgtccatccnnnnnnnnnnnnnnnnnnnnnnnnnnnnnnnnnnnnnnnnnnnnnnnnnnnnnnnnnnnnnnnnnnnnnnnnnnnnnnnnnnnnnnnnnnnnnnnnnnncaggtatctcctgaaacaaacctgagctcagaatccaaggattcctctgtctgataaaaaagtcattgctnccaggctgaagtctgtcaagaaaccacttattttaaaaagcagaggcccagtcaaatgagcactgcaccccatgagggaagtgtgacagggctgatggtgaggatcagaccagttctaaggtgacttgttggggtaaggatcaggactttgtccgtggagtagccaacccccctcttcccttattcctgtccggtgtcacagttaagtcagtgaggatgatgaagtagacacaatcttcannnnnnnnnnnnnnnnnnnnnnnnnnnnnnnnnnnnnnnnnnnnnnnnnnnnnnnnnnnnnnnnnnnnnnnnnnnnnnnnnnnnnnnnnnnnnnnnnnnnnnnnnnnnnnnnnnnnnnnnnnnnnnnnnnnnnnnnnntctgaccacctggcaagagaaattcagtgcagcagcgggacacagacctgcccaagccaccccactgccgttccctctctgagcacaacctgggcaaatcactgtcccttggactcccaggagaccagtgtcctagtcctgctttttttctctacgtggcaggatcagaaaacatgtgagccttagtttgtattttcactttatgaatgaggaaactgaaatgaccttaatggagcaagttatttnnnnnnnnnnnnnnggagtctcgctatgtcacccaggctggagtgcagtggcacaatctcggctcactgccagctccacctcctaggttcatgccattctcctgcctcagcctcccgagtagctgggactacaggcacctgccaccacgcccggttcatttttttgtatttttagtagagacggggtttcaccatgttagctaggatggtctccatctcctgacctnnnnnnnnnnnnnnnnnnnnnnnnnnnnnnnnnnnnnnnnnnnnnnnnnnnnnnnnnnnnnnnnnnnnnngcaagttatttcttacaaagctgctgaagataagattataaaaattataaagcatttttcacactcaaatgaaacaaggttgacaaattcacttcacaggtcacatgcctgtacatcatttattatatttgggtctgaaacttgtcacatgtttggaaggttttatgtgtcctcattgggaaaatgggtgtaattcagcataaaacctcatattattgtcctgcgtcatggagctgtgtatagatcccagat

SEQ ID NO: 25876 - DNA, 308 bp, Macaca Mulatta
tgggtctatataggcataggtccttagtagagtgtgtttggcactatctaaaccagattcaaatatcagcatctaaattaaatacctatcatgggaaaaatactcttccttgaaaatgttgatagaaacagcaaaagaatacaatagcattttcttcaagcctcctcctttgtatcttgagtgtattgttatagattgcagagtgttacatatttaatggttataattgataaatatataaaggaataaaggaaggaactttaatttctttggaatgattagttcttgggatcagttttactttgaat

SEQ ID NO: 25877 - DNA, 2322 bp, Macaca Mulatta
  misc_feature (1)...(2322): n = A,T,C or G
tcttgcaggagagagagttactgcctgtgaagaaatttgaaagtgagattctggaagcaatcagtcaaaattcagttgtcattattagaggtgctactgggtgtgggaaaaccacacaggttccccagttcattctagatgactttatccagaatgaccgagcagcagagtgtaacattgtagtaactcagnnnnnnnnnnnnnnnnnnnnnnnnnnnnnnnnnnnnnnnnnnnnnnnnnnnnnnnnnnnnnnnnnnnnnnnnnnnnnnnnnnnnnnnnnnnnnnnnnnnnnnnnnnnnnnnnnnnnnnnnnnnnnnnnnnnnnnnnnnnnnnnnnnnnnnnnnnnnnnnnnnnnnnnnnnnnnnnnnnnnnnnnnnnnnnnnnnnnnnnnnnnnnnnnnnnnnnnnnnnnnnnnnnnnnnnnnnnnnnnnnnnnnnnnnnnnnnnnnnnnnnnnnnnnnnnnnnnnnnnnnnnnnnnnnnnnnnnnnnnnnnnnnnnnnnnnnnnnnnnnnnnnnnnnnnnnnnnnnnnnnnnnnnnnnnnnnnnnnnnnnnnnnnnnnnnnnnnnnnnnnnnnnnnnnnnnnnnnnnnnnnnnnnnnnnnnnnnnnnnnnnnnnnnnnnnnnnnnnnnnnnnnnnnnnnnnnnnnnnnnnnnnnnnnnnnnnnnnnnnnnnnnnnnnnnnnnnnnnnnnnnnnnnnnnnnnnnnnnnnnnnnnnnnnnnnnnnnnnnnnnnnnnnnnnnnnnnnnnnnnnnnnnnnnnnnnnnnnnnnnnnnnnnnnnnnnnnnnnnnnnnnnnnnnnnnnnnnnnnnnnnnnnnnnnnnnnnnnnnnnnnnnnnnnnnnnnnnnnnnnnnnnnnnnnnnnnnnnnnnnnnnnnnnnnnnnnnnnnnnnnnnnnnnnnnnnnnnnnnnnnnnnnnnnnnnnnnnnnnnnnnnnnnnnnnnnnnnnnnnnnnnnnnnnnnnnnnnnnnnnnnnnnnnnnnnnnnnnnnnnnnnnnnnnnnnnnnnnnnnnnnnnnnnnnnnnnnnnnnnnnnnnnnnnnnnnnnnnnnnnnnnnnnnnnnnnnnnnnnnnnnnnnnnnnnnnnnnnnnnnnnnnnnnnnnnnnnnnnnnnnnnnnnnnnnnnnnnnnnnnnnnnnnnnnnnnnnnnnnnnnnnnnnnnnnnnnnnnnnnnnnnnnnnnnnnnnnnnnnnnnnnnnnnnnnnnnnnnnnnnnnnnnnnnnnnnnnnnnnnnnnnnnnnnnnnnnnnnnnnnnnnnnnnnnnnnnnnnnnnnnnnnnnnnnnnnnnnnnnnnnnnnnnnnnnnnnnnnnnnnnnnnnnnnnnnnnnnnnnnnnnnnnnnnnnnnnnnnnnnnnnnnnnnnnnnnnnnnnnnnnnnnnnnnnnnnnnnnnnnnnnnnnnnnnnnnnnnnnnnnnnnnnnnnnnnnnnnnnnnnnnnnnnnnnnnnnnnnnnnnnnnnnnnnnnnnnnnnnnnnnnnnnnnnnnnnnnnnnnnnnnnnnnnnnnnnnnnnnnnnnnnnnnnnnnnnnnnnnnnnnnnnnnnnnnnnnnnnnnnnnnnnnnnnnnnnnnnnnnnnnnnnnnnnnnnnnnnnnnnnnnnnnnnnnnnnnnnnnnnnnnnnnnnnnnnnnnnnnnnnnnnnnnnnnnnnnnnnnnnnnnnnnnnnnnnnnnnnnnnnnnnnnnnnnnnnnnnnnnnnnnnnnnnnnnnnnnnnnnnnnnnnnnnnnnnnnnnnnnnnnnnnnnnnnnnnnnnnnnnnnnnnnnnnnnnnnnnnnnnnnnnnnnnnnnnnnnnnnnnnnnnnnnnnnnnnnnnnnnnnnnnnnnnnnnnnnnnnnnnnnnnnnnnnnnnnnnnnnnnnnnnnnnnnnnnnnnnnnnnnnnnnnnnnnnnnnnnnnnnnnnnnnnnnnnnnnnnnnnnnnnnnnnnnnnnnnnnnnnnnnnnnnnnnnnnnnnnnnnnnnnnnnnnnnnnnnnnnnnnnnnnnnnnnnnnnnnnnnnnnnnnnnnnnnnnnnnnnnnnnnnnnnnnnnnnnnnnnnnnnnnnnnnnnnnnnnnnnnnnnnnnnnnnnnnnnnnnnnnnnnnnnnnnnnnnnnnnnnnnnnnnnnnnnnnnnnnnnnnnnnnnnnnngattaaactgcaaatatctcatgaagctgctgcctgtatcaccggtctccgggcagccatggaggctcttgttgttgaagtaaccaaacaacctgctatcatcagccagttggaccctgtaaatgaacgtatgctgaacatgatccgtcaaatctctagaccctcagctgctggtatcaaccttatgattggcagtacacggtn

SEQ ID NO: 25878 - DNA, 2859 bp, Macaca Mulatta
  misc_feature (1)...(2859): n = A,T,C or G
gacacaccatctcagcgtgttcagttcattcttggcaccgaggaagatgaagagcatgtgcctcatgagctgtttacagagctggatgagatctgtatgaaagagggagaagatgctgagtggaaggaaacagccaggnnnnnnnnnnnnnnnnnnnnnnnnnnnnnnnnnnnnnnnnnnnnnnnnnnnnnnnnnnnnnnnnnnnnnnnnnnnnnnnnnnnnnnnnnnnnnnnnnnnnnnnnnnnnnnnnnnnnnnnnnnnnnnnnnnnnnnnnnnnnnnnnnnnnnnnnnnnnnnnnnnnnnnnnnnnnnnnnnnnnnnnnnnnnnnnnnnnnnnnnnnnnnnnnnnnnnnnnnnnnnnnnnnnnnnnnnnnnnnnnnnnnnnnnnnnnnnnnnnnnnnnnnnnnnnnnnnnnnnnnnnnnnnnnnnnnnnnnnnnnnnnnnnnnnnnnnnnnnnnnnnnnnnnnnnnnnnnnnnnnnnnnnnnnnnnnnnnnnnnnnnnnnnnnnnnnnnnnnnnnnnnnnnnnnnnnnnnnnnnnnnnnnnnnnnnnnnnnnnnnnnnnnnnnnnnnnnnnnnaggtagaccttcatttcatgaaaaaaattcctactggggctgaggcctccaatgtcctggttggtgaggtggatattttggaccgtcccattgttgcctttgtgaggctgtctccagctgttcttctctcaggcctaacagaagtgccaatcccaacaannnnnnnnnnnnnnnnnnnnnnnnnnnnnnnnnnnnnnnnnnnnnnnnnnnnnnnnnnnnnnnnnnnnnnnnnnnnnnnnnnnnnnnnnnnnnnnnnnnnnnnnnnnnnnnnnnnnnnnnnnnnnnnnnnnnnnnnnnnnnnnnnnnnnnnnnnnnnnnnnnnnnnnnnnnnnnnnnnnnnnnnnnnnnnnnnnnnnnnnnnnnnnnnnnnnnnnnnnnnnnnnnnnnnnnnnnnnnnnnnnnnnnnnnnnnnnnnnnnnnnnnnnnnnnnnnnnnnnnnnnnnnnnnnnnnnnnnnnnnnnnnnnnnnnnnnnnnnnnnnnnnnnnnnnnnnnnggctatttgggggcttggtgctggacatcaagcggaaggccccctggtactggagtgactaccgggatgcactcagcttacagtgtttggcctcctttctgttcctgtactgtgcctgcatgtcacctgtcatcacctttgggggattgcttggagaagccactgagggacgcatnnnnnnnnnnnnnnnnnnnnnnnnnnnnnnnnnnnnnnnnnnnnnnnnnnnnnnnnnnnnnnnnnnnnnnnnnnnnnnnnnnnnnnnnnnnnnnnnnnnnnnnnnnnnnnnnnnnnnnnnnnnnnnnnnnnnnnnnnnnnnnnnnnnnnnnnnnnnnnnnnnnnnnnnnnnnnnnnnnnnnnnnnnnnnnnnnnnnnnnnnnnnnnnnnnnnnnnnnnnnnnnnnnnnnnnnnnnnnnnnnnnnnnnnnnnnnnnnnnnnnnnnnnnnnnnnnnnnnnnnnnnnnnnnnnnnnnnnnnnnnnnnnnnnnnnnnnnnnnnnnnnnnnnnnnnnnnnnnnnnnnnnnnnnnnnnnnnnnnnnnnnnnnnnnnnnnnnnnnnnnnnnnnnnnnnnnnnnnnnnnnnnnnnnnnnnnnnnnnnnnnnnnnnnnnnnnnnnnnnnnnnnnnnnnnnnnnnnnnnnnnnnnnnnnnnnnnnnnnnnnnnnnngaatgccaggagatgcatggagagttcatgggatctgcgtgtggccatcatggaccctacactcctgatgtcctcttttggtcctgtattctcttcttcaccaccttcatcctctcaagcaccttaaagacgtttaagacgagccgttatttcccaacccgagtnnggtacgctccatggtgagtgactttgctgttttcctcactatcttcacaatggtcattattgattttttgattggagttccatcaccaaagcttcaagttcccagtgtgttcaannnnnnnnnnnnnnnnnnnnnnnnnnnnnnnnnnnnnnnnnnnnnnnnnnnnnnnnnnnnnnnnnnnnnnnnnnnnnnnnnnnnnnnnnnnnnnnnnnnnnnnnnnnnnnnnnnnnnnnnnnnnnnnnnnnnnnnnnnnnnnnnnnnnnnnnnnnnnnnnnnnnnnnnnnnnnnnnnnnnnnnnnnnnnnnnnnnnnnnnnnnnnnnnnnnnnnnnnnnnnnnnnnnnnnnnnnnnnnnnnnnnnnnnnnnnnnnnnnnnnnnnnnnnnnnnnnnnnnnnnnnnnnnnnnnnnnnnnnnnnnnnnnnnnnnnnnnnnnnnnnnnnnnnnnnnnnnnnnnnnnnnnnnnnnnnnnnnnnnnnnnnnnnnnnnnnnnnnnnnnnnnnnnnnnnnnnnnnnnnnnnnnnnnnnnnnnnnnnnnnnnnnnnnnnnnnnnnnnnnnnnnnnnnnnnnnnnnnnnnnnnnnnnnnnnnnnnnnnnnnnnnnnnnnnnnnnnnnnnnnnnnnnnnnnnnnnnnnnnnnnnnnnnnnnnnnnnnnnnnnnnnnnnnnnnnnnnnnnnnnnnnnnnnnnnnnnnnnnnnnnnnnnnnnnnnnnnnnnnnnnnnnnnnnnnnnnnnnnnnnnnnnnnnnnnnnnnnnnnnnnnnnnnnnnnnnnnngttttggccttggtctttgtcaggaaagtcatggatctctgtttctctaagcgagagctgagctggttagatgatctcatgcctgaaagcaaaaagaagaagttggatgatgccaaaaagaaggccaaggaggaagaggtcatagtccttgcaccaactgtatacctgagggcctcaaattacagaacatag

SEQ ID NO: 25879 - DNA, 2178 bp, Macaca Mulatta
  misc_feature (1)...(2178): n = A,T,C or G
tttatctgctgaccctgagggaaaagaagatggggaaaggccaccgggcacatcacaagcatctcccgaagagttcacagacgcaaaacacgagtcactgttcagtctggaaaccaattttctggaagaggaaagtggagacaactcttctttgaaagcatctcaagnnnnnnnnnnnnnnnnnnnnnnnnnnnnnnnnnnnnnnnnnnnnnnnnnnnnnnnnnnnnnnnnnnnnnnnnnnnnnnnnnnnnnnnnnntggcctatcctgggccagcttgtcttttcctctaagtttcagaagttggaaacatttaaacccccaaaggatattgacttaaagtcacttcatctccagaagcctctggaatccacctggactaagaccaacagcccgttcctatctggtccccaaaaatcaagcagcccatttacccccctccagaaagaactcttcttaattatgaattcttaccgggacctgttctacccagaaagcactgccctgaagaacggggaagagatccgccatgtgtattgcctgcatgtgataaatcacgtcctcaaagccaatgcccaggtgcttggcaacaatagcagacaccgaagccagaagtttggagtgggtgatgatgatgactttagagaccaagggttaacaaggcccaaggnnnnnnnnnnnnnnnnnnnnnnnnnnnnnnnnnnnnnnnnnnnnnnnnnnnnnnnnnnnnnnnnnnnnnnnnnnnnnnnnnnnnnnnnnnnnnnnnnnnnnnnnnnnnnnnnnnnnnnnnnnnnnnnnnnnnnnnnnnnnnnnnnnnnnnnnnnnnnnnnnnnnnnnnnnnnnnnnnnnnnnnnnnnnnnnnnnnnnnnnnnnnnnnnnnnnnnnnnnnnnnnnnnnnnnnnnnnnnnnnnnnnnnnnnnnnnnnnnnnnnnnnnnnnnnnnnnnnnnnnnnnnnnnnnnnnnnnnnnnnnnnnnnnnnnnnnnnnnnnnnnnnnnnnnnnnnnnnnnnnnnnnnnnnnnnnnnnnnnnnnnnnnnnnnnnnnnnnnnnnnnnnnnnnnnnnnnnnnnnnnnnnnnnnnnnnnnnnnnnnnnnnnnnnnnnnnnnnnnnnnnnnnnnnnnnnnnnnnnnnnnnnnnnnnnnnnnnnnnnnnnnnnnnnnnnnnnnnnnnnnnnnnnnnnnnnnnnnnnnnnnnnnnnnnnnnnnnnnnnnnnnnnnnnnnnnnnnnnnnnnnnnnnnnnnnnnnnnnnnnnnnnnnnnnnnnnnnnnnnnnnnnnnnnnnnnnnnnnnnnnnnnnnnnnnnnnnnnnnnnnnnnnnnnnnnnnnnnnnnnnnnnnnnnnnnnnnnnnnnnnnnnnnnnnnnnnnnnnnnnnnnnnnnnnnnnnnnnnnnnnnnnnnnnnnnnnnnnnnnnnnnnnnnnnnnnnnnnnnnnnnnnnnnnnnnnnnnnnnnnnnnnnnnnnnnnnnnnnnnnnnnnnnnnnnnnnnnnnnnnnnnnnnnnnnnnnnnnnnnnnnnnnnnnnnnnnnnnnnnnnnnnnnnnnnnnnnnnnnnnnnnnnnnnnnnnnnnnnnnnnnnnnnnnnnnnnnnnnnnnnnnnnnnnnnnnnnnnnnnnnnnnnnnnnnnnnnnnnnnnnaggtatacaataaaaggcatcaggaacctgattttctatgaactgccgacatatccacacttntacagtgaaatctgtaatatgctgagagccaccaacagaggagaagaggccacgtggacctgcactgttctctactccaagtatgatgcccagaggttagctgccgtggttggtgtggagcgggcagcacagatgctacaatccaagaagaatgtccacctcttcattactggagaaaaatgaaattttgttggacaggaagtggtatttggcatgatacacaatgtttgattctatgccacttggacccaattctgattacttacagaagaaggattgatacaaagaaagtgcatgagtcaatgtcagtattatctgacatttctttcttttcaggttatgtgtccctgaaaagttaaatgtaaaccagattttggtaaatcacatttttcagaagtgaagagggggctagaaggactctgagaagttggtagaagaaaacttccacttgtgaatatttttatgagacataaattcttttatta

SEQ ID NO: 25880 - DNA, 103 bp, Macaca Mulatta
tcatcgagcatgtctttgtcactgacgtcactgccaacctcatcaccgtcacagtgaaggagtctcccaccagcgtgggcttcttcaacctgaggcattactg

SEQ ID NO: 25881 - DNA, 127 bp, Macaca Mulatta
aggagcaagtaggctctattaaggagagatatgaccacaggctcatgctgaaacatctccctccagaattcagcatctttctagaccatatctcttctttggattattttacaaaaccagactacca

SEQ ID NO: 25882 - DNA, 654 bp, Macaca Mulatta
  misc_feature (1)...(654): n = A,T,C or G
agaccgaagaacaaactaaattcatctcaaaatgattataaatcatcaagacggagtagcctgccacctgaactactcataggaaatgacattagaggaagacttcaaagaaacattaagaacttggatcccattcacctgaggcacccgaagaagagaccatccatatttccaggnggacgaaaacaccccctttccttaggcgtcccgtgtcccccgattcctcctccctggttgccgcgtccttggctggcgtcagaaaaatggctacaaacttcctagtacatgagaagatctggttcgataagttcaaacatgacgttgcagaaaggagattctatgaacagatgaacgggcctgtggcaggtgcttcccgccaggagaacggtgccagcgtgattctcctgatactgccagagccagagagaacatcccgaaatccctggccggaagctcaggccctggggcgtctagcagccccagtggagaccacagtgagctcgtcctccggatcgccagtctggaagtggagaaccagagaggcccggctgaacgtgctggagaagagcttgcccggccaccaggccacggccccgcagagccagcacgtgtctcccatgcgccaagtggagtccccgaccgagaagccagcca

SEQ ID NO: 25883 - DNA, 832 bp, Macaca Mulatta
tttgtctctgccactgtggaggggtccccagcctcccgtatccctagacccacccctcccccggtcctctcacctgttgcttttccttcccccaccaggcaaatcactgaagatgagctgtaacagcaggtatgctaggagggcccggggaaggtggcgggaggggagggcaggcttgggggcaaccgtgaagaattctggctcctggactgggtaggggagaattttagggtcacccacacatcagccaggtggtctgtcacctatcgtgtgtttcagatgattgccaagggcctggcgtgcagtgtgtgccacaggagatcacagaggagccctggagaaaagtgagatggacaaggaggaaataaaaccccaacctctgctgcaacctgcccagccccaacctgcctttgtcttctcagcctcggcagtgccacccactgcacaggggccagctgggaagccaggccctgcctctgctacctccccttcttccctgggctgtagacctttgtccccgtcactgccagcgcttgagcagaaggaagctccagactcaatgtgacccccaggtggtatcgccacctcctgccccttgccacctcatgctcataataaagttagcgtcacagaccgctgcttctctcgcctgcctgcctatctgcctcctctgtcaccaccagcctctccaagttcaagtacaaatacagccgggtctcatttgttttttcaagtaattgctcaggcacctgtctgcctgtaaaagcaagaagttcagtgttgtcatctgtaggccactccttgtaccccctgaactggcaggagccctggg

SEQ ID NO: 25884 - DNA, 571 bp, Macaca Mulatta
  misc_feature (1)...(571): n = A,T,C or G
caacagaccctttttctttctcattcatgaggcaaatactgaagtaacaaaagcaataacaatcagaaaatgtccaattttcttgttatctcaaatgtatctctgttctcaggaggaacaatccaatgtcaaccttgccaagttccgcaagctccagcacgagctggaggaggccgaggaacgggctgatattgctgagtcccaagtcaacaagctgagaatgaagagtcgggaggttcacacaaaagtcacaagtgaagagtaattcattctaatggaagaaaatgtggccaaagaaatgcacaaaatgtgaagtcctttgtcactgtcctgtatatcaaggaaataaaatctttagataattttgcatctaaaaatacatttgtcccttaattataagctctttgtgctattagaactaatgcctttattcaacatttgtggagctcctactatgtgcaatcagagatgacaacaaaaatgaatgtgggcagtgaactcaactttaatagaaggtaaatgaaatanagtattctgaggagacatgaaggtgacaaatgcactctcaatt

SEQ ID NO: 25885 - DNA, 1647 bp, Macaca Mulatta
  misc_feature (1)...(1647): n = A,T,C or G
ggaccttgtggggtgagtctggctttttggcggcaactctgtggccaagtgtgagcacctggaagccaaaggatggggacagaactctggtgctcgcaggtgccctctggtggccacagggagacgaggctgtgggcggcggcnnnnnnnnnnnnnnnnnnnnnnnnnnnnnnnnnnnnnnnnnnnnnnnnnacggcacaggtttgaagcggagccagcaggccttgccggggctggactttgaggcggcggcctctagtgaggccaggncaggtgtggtgcgggagcagggtggccactgcccatgttaccggtggaccctgagctccaagactgcctggcctgcctcagctggtnnnnnnnnnnnnnnnnnnnnnnnnnnnnnnnnnnnnnnnnnnnnnnnnnnnnnnnnnnnnnnnnnnnnnnnnnnnnnnnnnnnnnnnnnnnnnnnnnnnnnnnnnnnnnnnnnnnnnnnnnnnnnnnnnnnnnnnnnnnnnnnnnnnnnnnnnnnnnnnnnnnnnnnnnnnnnnnnnnnnnnnnnnnnnnnnnnnnnnnnnnnnnnnnnnnnnnnnnnnnnnnnnnnnnnnnnnnnnnnnnnnnnnnnnnnnnnnnnnnnnnnnnnnnnnnnnnnnnnnnnnnnnnnnnnnnnnnnnnnnnnnnnnnnnnnnnnnnnnnnnnnnnnnnnnnnnnnnnnnnnnnnnnnnnnnnnnnnnnnnnnnnnnnnnnnnnnnnnnnnnnnnnnnnnnnnnnnnnnnnnnnnnnnnnnnnnnnnnnnnnnnnnnnnnnnnnnnnnnnnnnnnnnnnnnnnnnnnnnnnnnnnnnnnnnnnnnnnnnnnnnnnnnnnnnnnnnnnnnnnnnnnnnnnnnnnnnnnnnnnnnnnnnnnnnnnnnnnnnnnnnnnnnnnnnnnnnnnnnnnnnnnnnnnnnnnnnnnnnnnnnnnnnnnnnnnnnnnnnnnnnnnnnnnnnnnnnnnnnnnnnnnnnnnnnnnnnnnnnnnnnnnnnnnnnnnnnnnnnnnnnnnnacactcagcttcttcacctgaagaggccacagcagggggtgggcaactgcatcgtggccaggcccgaggcctgcatcaagtgtctggggacagcaggtcacaggctggaggcctacagagcatacagcctggtgctggcggggctgggctgcggcctgccgctgctgctcacgctggcagcctatggcgccctcgggcgggctgtgctacgcagctcgagcatgactgtggccgagaaggtgcgtgtggcggcgctggtggccagtggcgtggccctctacgccagctcctatgtgccctaccacgtcatgcgtgtgctcaacgtggatgctcggcggcgctggagcacccgctgcccgagctttgcagacgtggcccaggccacagcagccctggagctgggaccctacgtgggctaccaggtgatgcggggcctcatgcccctggccttctgtgtccacccactgctctacatggccgcggtgcccagcctgggttgctgctgccgacactgccctggctacaaggacagctggaacccagaggacgccaagaacactggccaagccctgcccctcaatgccacagctgcctctaaaccgtcggagccccagtcccatgagctg

SEQ ID NO: 25886 - DNA, 272 bp, Macaca Mulatta
tgactgtgcgtgggggccggctgcggggcattcgtctgaagacccccgggggccccgtctctgctttcctgggcatcccctttgcggagccacccacaggacctcgtcgctttctgccaccggagcccaagcagccttggtcaggggtggtagatgctacaaccttccagagtgtctgctaccagtatgtggataccttatacccaggttttgagggcaccgagatgtggaaccccaaccgtgagctgagcgaggactgcctctacctcaac

SEQ ID NO: 25887 - DNA, 2262 bp, Macaca Mulatta
  misc_feature (1)...(2262): n = A,T,C or G
agctgcctcctggtgacctcagggttttcgttgtacctggggaacgtgttccctgccgagatggattacttgcgctgtgctgcaggctctnnnnnnnnnnnnnnnnnnnnnnnnnnnnnnnnnnnnnnnnnnnnnnnnnnnnnnnnnnnnnnnnnnnnnnnnnnnnnnnnnnnnnnnnnnnnnnnnnnnnnnnnnnnnnnnnnnnnnnnnnnnnnnnnnnnnnnnnnnnnnnnnnnnnnnnnnnnnnnnnnnnnnnnnnnnnnnnnnnnnnnnnnnnnnnnnnnnnnnnnnnnnnnnnnnnnnnnnnnnnnnnnnnnnnnnnnnnnnnnnnnnnnnnnnnnnnnnnnnnnnnnnnnnnnnnnnnnnnnnnnnnnnnnnnnnnnnnnnnnnnnnnnnnnnnnnnnnnnnnnnnnnnnnnnngtcgtcgaggtaatcgcaggcatctctgccgtcctcggggggatcattgccctgaacgtggatgactcagtctcaggcccacacctctcnagtgacgttcttttggatcctagnnnnnnnnnnnnnnnnnnnnnnnnnnnnnnnnnnnnnnnnnnnnnnnnnnnnnnnnnnnnnnnnnnnnnnnnnnnnnnnnnnnnnnnnnnnnnnnnnnnnnnnnnnnnnnnnnnnnnnnnnnnnnnnnnnnnnnnnnnnnnnnnnnnnnnnnnnnnnnnnnnnnnnnnnnnnnnnnnnnnnnnnnnnnnnnnnnnnnnnnnnnnnnnnnnnnnnnnnnnnnnnnnnnnnnnnnnnnnnnnnnnnnnnnnnnnnnnnnnnnnnnnnnnnnnnnnnnnnnnnnnnnnnnnnnnnnnnnnnnnnnnnnnnnnnnnnnnnnnnnnnnnnnnnnnnnnnnnnnnnnnnnnnnaggtggccaggagccccctgaaggagttgacaaggagaaagcctggagagccgtcgtggtgcagatggcccagtgacctctggacgcagaaactgggtggcagtgcccagcctggccccaagcacggaaacgcacaacctctaatcaccccgagctactgcttctaacacctcttttcccctgtgtgagggcagaccaggctgtagtggggttttcacttcctagggtagtttaattttaaaatgggccaatgttggctagtctgtgtttcagtcagatcagtcagtgccaagggctcccgtgtcctaacagcaggagcatggccgcagcttcccaggccgaggaagggccccctggttctgcctctgagagccccaccgctgagcaggccccagctccacgtcctgcctctctcatggcctgggctggagtgggctctctggacctgaccggggtcagactgtgggtccctgcgtctcctgccccctctgacccggcttcttccctccactcttcgggtctatcctgggtgctcagtcagcccagtgggatcttacctacttccctgcaaggtgcacctgccccaggctcagcctgcccagcggctcttcccggacagtgagaacaaggctgggcacctctgtcctggcccgggagccgtgggggcccctcctccagagcccaggtgcaagtgacacgggctgccactgctctcccaggtgaaatccacaccggtccacaccgggtcgcctgccttgtcttcctacgtagacccagtcattctagaggaatccgccgccacagtggctggcccannnnnnnnnnnnnnnnnnnnnnnnnnnnnnnnnnnnnnnnnnnnnnnnnnnnnnnnnnnnnnnnnnnnnnnnnnnnnnnnnnnnnnnnnnnnnnnnnnnnnnnnnnnnnnnnnnnnnnnnnnnnnnnnnnnnnnnnnnnnnnnnnnnnnnnnnnnnnnnnnnnnnnnnnnnnnnnnnnnnnnnnnnnnnnnnnnnnnnnnnnnnnnnnnnnnnntccctggccccagtgaccgggggaagctgagccgctcccttctatgtttgctcccattactcaaaatgtaggacagatcaggtcagagcccaggaatcctcacaggttcacccagccccctctacctcctagcaagtactttgtcttgatcctcactgagaagaccccagggccagtggtcttctccatctctgctgttttggggtcttagggtacagcccaggcagtcactgcccacctgccagactgcagggacagttgggtgtgagaataacacgggctttgggcagtgccatggccaggagtgggttccctgcgtctcctcttccccgagggcgcctggatcctcccag

SEQ ID NO: 25888 - DNA, 880 bp, Macaca Mulatta
  misc_feature (1)...(880): n = A,T,C or G
gggcttttttcccttttgcggccatcaccgaagtgggagcggccaaaatgaagtttaatccctttgtgacttccgaccgaagcaagaatcgcaaaaggcatttcaatgcaccttcccacattcgcaggaagattatgtcttcccctctttccaaagagctgagacagaagtacaacgtgcgatccatgcccatccgaaaggatgatgaagttcaggttgtacgaggacactataaaggtcagcaaattggcaaagtagtccaggtttacaggaagaagtatgttatctacattgaacgggtgcagcgggaaaaggctaatggcacaacggtccacgtaggcattcaccccagcaaggtggttatcactaggctaaaactggacaaagaccgcaaaaagatccttgaacggaaagcccaatctcgccaagtaagaaaagaaaagggcaaatacaaggaaagaaacaattgagtaagatgcagggaataagtaaacttatataaaaagctttgaataaaaccttgaaaccggttaaaaaaatgtggaatatataaaaaaaaacttgtcgggcccgcctcggcccctcaaaaaagcttttctaaaaacaattccttttgggccccgcggggccccataagggtaaaatgaaacatgggtccattaccctgtgttccttaagaaagaattctgggtccaagaactaagtggccttggaattccccaccccagtaaaaaaaaaggcccgggggggtaaaaccgaagggnnnnnnnnnnnnnnnnnnnngaatggggaatttctctagaggggctcttatatggggattcttttaccaccaggggagatttcataggcggagaggcctcctaaatatatcaaaaaa

SEQ ID NO: 25889 - DNA, 926 bp, Macaca Mulatta
  misc_feature (1)...(926): n = A,T,C or G
agctgctagcagaagccaagtactacctggtccaaggcctggtggaagagtgccaggcggccctacannnnnnnnnnnnnnnnnnnnnnnnnnnnnnnnnnnnnnnnnnnnnnnnnnnnnnnnnnnnnnnnnnnnnnnnnnnnnnnnnnnnnnnnnnnnnnnnnnnnnnnnnnnnnnnnnnnnnnnnnnnnnnnnnnnnnnnnnnnnnnnnnnnnnnnnnnnnnnnnnnnnnnnnnnnnnnnnnnnnnnnnnnnnnnnnnnnnnnnnnnnnnnnnnnnnnnnnnnnnnnnnnnnnnnnnnnnnnnnnnnnnnnnnnnnnnnnnnnnnnnnnnnnnnnnnnnnnnnnnnnnnnnnnnnnnnnnnnnnnnnnnnnnnnnnnnnnnnnnnnnnnnnnnnnnnnnaggtggagtttcctgaagcccggatttatgaggagaccctgaacattttgctatatgaggcccaggacggccggggacctgacaatgcgctcctggaggccacaggcggggcggcagggcgctcccaccacctggatgaggacgaggagcgggagcgggagcggatcgagcgcgtgcggcggatccacatcaagcgccccgacgaccgggcccacctccaccagtgagcaggcaagagaccgagccgcccttttctcaccgcccccactccctgccgtgctacacccagatcctgtgcaggctgccgggccccttctgcttcccttggagcctggagatacttttgtaacaagtcagatgattattttggtattgcttgacaaggcaaattgattgtcttgacccaggcgtatgacccctgtctttgaacaagctgtgtccaagatctctacttttcatgagaatctgagactctttggagccaggcatgctcggttctcagaggaaaagtatgaatgtgtgtga

SEQ ID NO: 25890 - DNA, 905 bp, Macaca Mulatta
  misc_feature (1)...(905): n = A,T,C or G
ggtctctagtatcaattcacgctttgccaaagtacacatcctatatgtggggtccatgccacttaagaactcttttcgaggaactatccgnnnnnnnnnnnnnnnnnnnnnnnnnnnnnnnnnnnnnnnnnnnnnnnnnnnnnnnnnnnnnnnnnnnnnnnnnnnnnnnnnnnnnnnnnnnnnnnnnnnnnnnnnnnnnnnnnnnnnnnnnnnnnnnnnnnnnnnnnnnnnnnnnnnnnnnnnnnnnnnnnnnnnncaggtatccagatggttcccatcagctggtgtgagacgtagtgccctaagacccacactaaagaattccggaaagtagcccgagtacaacctgaattcttgcagacctaagaagccactttttaccccatggaagggagtaagctcttcctgagtataacaccaagatgctgctgtctattcaaacacctggcgtcggccaacagcctcttccagaaaaatctgccagaaacttaggctatagatggaacacgtttctgtgaacctatcagtggatttcattctcttgagtaataaaacttatcttttcaaggcaccaacaaacaaaactgtgatattggaaatagcctatcccccctgacagtccttataaatacctattttttgttatgataaaacttttttactaaaaggatgttatagttgtcttaagcagagaaagacgtctaaatggtgtcaggacatttcagtacttctgcttattgagtactcactgtgctaggcactgagtcaagtgctttacatacgtccccttcattcaggtacattatggtctaatgaaaatttgaggacacatgtgatacagatagcatgtgaggcggacgtggtggctcatgcttgtaaatcccaacactttgggaggccgagtt

SEQ ID NO: 25891 - DNA, 89 bp, Macaca Mulatta
gtatttttgaataattaccaagcagccgaagaccacccacaaatggttatcttacgactgttgcgttacattgtccgcctggtgtggag

SEQ ID NO: 25892 - DNA, 2134 bp, Macaca Mulatta
  misc_feature (1)...(2134): n = A,T,C or G
gtgtggatgactacagctcagagtctgatgtgattattataccttcagccctggactttgtctcacaagatgaaatgttgacgcccctggggagattggacaagtatgctgcaagtgagaacgtatttaacagnnnnnnnnnnnnnnnnnnnnnnnnnnnnnnnnnnnnnnnnnnnnnnnnnnnnnnnnnnnnnnnnnnnnnnnnnnnnnnnnnnnnnnnnnnnnnnnnnnnnnnnnnnnnnnnnnnnnnnnnnnnnnnnnnnnnnnnnnnnnnnnnnnnnnnnnnnnnnnnnnnnnnnnnnnnnnnnnnnnnnnnnnnnnnnnnnnnnnnnnnnnnnnnnnnnnnnnnnnnnnnnnnnnnnnnnnnnnnnnnnnnnnnnnnaggtgaggaaaacaagtcaggcagctttgttggctctgctggagcaggagctcattgaacgatttgatgtggagaccaaagtgtgccctgtcctcatagagctgacagccccagatagcaatgatgacgtgaaaacagaagctgtggcnnnnnnnnnnnnnnnnnnnnnnnnnnnnnnnnnnnnnnnnnnnnnnnnnnnnnnnnnnnnnnnnnnnnnnnnnnnnnnnnnnnnnnnnnnnnnnnnnnnnnnnnnnnnnnnnnnnnnnnnnnnnnnnnnnnnnnnnnnnnnnnnnnnnnnnnnnnnnnnnnnnnnnnnnnnnnnnnnnnnnnnnnnnnnnnnnnnnnnnnnnnnnnnnnnnnnnnnnnnnnnnnnnnnnnnnnnnnnnnnnnnnnnnnnnnnnnnnnnnnnnnnnnnnnnnnnnnnnnnnnnnnnnnnnnnnnnnnnnnnnnnnnnnnnnnnnnnnnnnnnnnnnnnnnnnnnnnnnnnnnnnnnnnnnnnnnnnnnnnnnnnnnnnnnnnnnnnnnnnnnnnnnnnnnnnnnnnnnnnnnnnnnnnnnnnnnnnnnnnnnnnnnnnnnnnnnnnnnnnnnnnnnnnnnnnnnnnnnnnnnnnnnnnnnnnnnnnnnnnnnnnnnnnnnnnnnnnnnnnnnnnnnnnnnnnnnnnnnnnnnnnnnnnnnnnnnnnnnnnnnnnnnnnnnnnnnnnnnnnnnnnnnnnnnnnnnnnnnnnnnnnnnnnnnnnnnnnnnnnnnnnnnnnnnnnnnnnnnnnnnnnnnnnnnnnnnnnnnnnnnnnnnnnnnnnnnnnnnnnnnnnnnnnnnnnnnnnnnnnnnnnnnnnnnnnnnnnnnnnnnnnnnnnnnnnnnnnnnnnnnnnnnnnnnnnnnnnnnnnnnnnnnnnnnnnnnnnnnnnnnnnnnnnnnnnnnnnnnnnnnnnnnnnnnnnnnnnnnnnnnnnnnnnnnnnnnnnnnnnnnnnnnnnnnnnnnnnnnnnnnnnnnnnnnnnnnnnnnnnnnnnnnnnnnnnnnnnnnnnnnnnnnnnnnnnnnnnnnnnnnnnnnnnnnnnnnnnnnnnnnnnnnnnnnnnnnnnnnnnnnnnnnnnnnnnnnnnnnnnnnnnnnnnnnnnnnnnnnnnnnnnnnnnnnnnnnnnnnnnnnnnnnnnnnnnnnnnnnnnnnnnnnnnnnnnnnnnnnnnnnnnnnnnnnnnnnnnnnnnnnnnnnnnnnnnnnnnnnnnnnnnnnnnnnnnnnnnnnnnnnnnnnnnnnnnnnnnnnnnnnnnnnnnnnnnnnnnnnnnnnnnnnnnnnnnnnnnnnnnnnnnnnnnnnnnnnnnnnnnnnnnnnnnnnnnnnnnnnnnnnnnnnnnnnnnnnnnnnnnnnnnnnnnnnnnnnnnnnnnnnnnnnnnnnnnnnnnnnnnnnnnnnnnnnnnnnnnnnnnnnnnnnnnnnnnnnnnnnnnnnnnnnnnnnnnnnnnnnnnnnnnnnnnnnnnnnnnnnnnnnnnnnnnnnnnnnnnnnnnnnnnnnnnnnnnnnnnnnnnnnnnnnnnnnnnnnnnnnnnnnnnnnnnnnnnnnnnnnnnnnnnnnnnnnnnnnnnnnngcagtggaaagttcgacgaactctagcgttctccatccacgagcttgcagttattcttggagatcagttgacagctgcagatctggttccaatttttaatggatttttaaaagacctcgatgaagtcaggataggtgtccttaaacacttgcatgattttctgaag

SEQ ID NO: 25893 - DNA, 632 bp, Macaca Mulatta
  misc_feature (1)...(632): n = A,T,C or G
gggggccaggcactgtgtcctcattaaagaagaatgtgggtcagttcagtggctttccgtttgaaaaaggaagtgtccagtataaaaagaaggaagaaatgttgaaaaaatttagaaatgccatgttaaagagcatctgtgaggttcttgatttggagagatcaggtgtaaatagtgaactagtgaagaggatcttgaatttcttaatgcatccaaagccctctggcaaaccattgccaaaatctaaaaaaacttctagcaaaggcagtaaaaaggaacggaacagttctggaatggcaaggaaggctaagcgaaccaaatgtcctgaaattctgtcaaatgaatctagtagnnnnnnnnnnnnnnnnnnnnnnnaggaagaattctccgatgatgaccataaaaaaagtggagaaggaccaccaaaaaagacannnnnnnnnnnnnnnnnnaaccaaagctcttctaaaataaaaatctgtaaagtgccatgttaaagggaaacccccccccaaaaaatcaaacttcccaaaaaaaggtcaagaaatccaaaaaacctttttaaagtaaaaannnnnnnnnnnnnnnnnnnnnnnnnnnnggccggctttgaaaaaccaaaaatttaaagg

SEQ ID NO: 25894 - DNA, 853 bp, Macaca Mulatta
  misc_feature (1)...(853): n = A,T,C or G
ggggctgacgcctcgctcaatttcccacagggctgcgcaggggggccccttctgcgaatggaccactggaggggttcaaaggttcgcgtcccaatacgggaatgagcctctttgatctcttccggggctttttcggctttcctggacctcggagccacagagatcccttttttggagggatgactcgnnnnnnnnnnnnnnnnnnnnnnnnnnnnnnnnnnnggggttcatggggccgtgggaacccaaggttccatagtcctcagcacccccctgaggaatttggcttcggcttcagcttcagcccaggaggagggatacgtttccacgataacttcggctttgatgacctagtacgagatttcaatagcatcttcagcgatatgggggcctggaccttgccttcccatcctcctgaactcccaggtcctgagtcagagacacctggtgagagactgcgggagggacagacacttcgggactcaatgcttaagtatccagatagtcaccagcccaggatctttgggggggtcttggagagtgatggaagaagtgaatcccccaaaccagcaccagactggggctcccagaaaccaaattttataaattttttgaattgaaaaatatggggccctggtggaaacccccccattccttatgaaccccaagagaagggaaaaattgaaatcttgaaaatctcccaaggttttccccaaaggaaggggttctttgggcccacggattatataaaggcccccaaaacaccaaattcccaatatttacacaaacaccttctttcctttttccccaaggaatacagtatacaccccaaatcgggaaatacaggcgaaaa

SEQ ID NO: 25895 - DNA, 196 bp, Macaca Mulatta
atgagaaccatcaacaacctacaacaagagagtctgctcaaggctgtctttatcatgatttgaaagaccaaggaaaatgtagcgtgaccatccttgtttggggaatttttgagactcctatacaattatgataaagctagagtgatcatctaaagcaggctttaaaaataagtaaagatgtaaaccagcaaaatgc

SEQ ID NO: 25896 - DNA, 426 bp, Macaca Mulatta
acctgcccagaaagaagggccctgtggggctttgcctgtgcccgtccaccaaaaggctgtcaccgttcttgaaatcagcagccctccccatcccaatcccaggcagcttgtgtgtacaatcagcttctctagcaactctgtatctgttggcttcaagagagtattttgcctccacatatgtaccccttctcctttttttaaagatggatttaaaccaagatgcctccaggaaagagggcgaaatgagtatattcacagaggaatccaaaaaatacagtttgggggaaaatgcaataatttttgatgagatgggtgaaggacaagaagtgagttctgtcaattattgtagatacaatattctgattaaatctggaaaataaaaggcagcctgttttttctgcttttattgtattaacagctgaggta

SEQ ID NO: 25897 - DNA, 215 bp, Macaca Mulatta
aagattgagaacctagatccccgaggaattcagctatcagctctcttcatgagtggagtagacatggccttgtttgcaaatgatgcatgtggacaaccaatcccctgggaacactgttgtccttggatgtattttgatggcaagctcttccagtccaaactcctcaaagccagccggggaaaagacccccctcgtcgacctctgtgatggtcagg

SEQ ID NO: 25898 - DNA, 2814 bp, Macaca Mulatta
  misc_feature (1)...(2814): n = A,T,C or G
aggaactgggccagctccagtcccttccttctggggctctcactttggaggatggggtgnnnnnnnnnnnnnnnnnnnnnnnnnnnnnnnnnnnnnnnnnnnnnnnnnnnnnnnnnnnnnnnnnnnnnnnnnnnnnnnnnnnnnnnnnnnnnnnnnnnnnnnnnnnnnnnnnnnnnnnnnnnnnnnnnnnnnnnnnnnnnnnnnnnnnnnnnnnnnnnnnnnnnnnnnnnnnnnnnnnnnnnnnnnnnnnnnnnnnnnnnnnnnnnnnnnnnnnnnnnnnnnnnnnnnnnnnnnnnnnnnnnnnnnnnnnnnnnnnnnnnnnnnnnnnnnnnnnnnnnnnnnnnnnnnnnnnnnnnnnnnnnnnnnnnnnnnnnnnnnnnnnnnnnnnnnnnnnnnnnnnnnnnnnnnnnnnnnnnnnnnnnnnnnnnnnnnnnnnnnnnnnnnnnnnnnnnnnnnnnnnnnnnnnnnnnnnnnnnnnnnnnnnnnnnnnnnnnnnnnnnnnnnnnnnnnnnnnnnnnnnnnnnnnnnnnnnnnnnnnnnnnnnnnnnnnnnnnnnnnnnnnnnnnnnnnnnnnnnnnnnnnnnnnnnnnnnnnnnnnnnnnnnnnnnnnnnnnnnnnnnnnnnnnnnnnnnnnnnnnnnnnnnnnnnnnnnnnnnnnnnnnnnnnnnnnnnnnnnnnnnnnnnnnnnnnnnnnnnnnnnnnnnnnnnnnnnnnnnnnnnnnnnnnnnnnnnnnnnnnnnnnnnnnnnnnnnnnnnnnnnnnnnnnnnnnnnnnnnnnnnnnnnnnnnnnnnnnnnnnnnnnnnnnnnnnnnnnnnnnnnnnnnnnnnnnnnnnnnnnnnnnnnnnnnnnnnnnnnnnnnnnnnnnnnnnnnnnnnnnnnnnnnnnnnnnnnnnnnnnnnnnnnnnnnnnnnnnnnnnnnnnnnnnnnnnnnnnnnnnnnnnnnnnnnnnnnnnnnnnnnnnnnnnnnnnnnnnnnnnnnnnnnnnnnnnnnnnnnnnnnnnnnnnnnnnnnnnnnnnnnnnnnnnnnnnnnnnnnnnnnnnnnnnnnnnnnnnnnnnnnnnnnnnnnnnnnnnnnnnnnnnnnnnnnnnnnnnnnnnnnnnnnnnnnnnnnnnnnnnnnnnnnnnnnnnnnnnnnnnnnnnnnnnnnnnnnnnnnnnnnnnnnnnnnnnnnnnnnnnnnnnnnnnnnnnnnnnnnnnnnnnnnnnnnnnnnnnnnnnnnnnnnnnnnnnnnnnnnnnnnnnnnnnnnnnnnnnnnnnnnnnnnnnnnnnnnnnnnnnnnnnnnnnnnnnnnnnnnnnnnnnnnnnnnnnnnnnnnnnnnnnnnnnnnnnnnnnnnnnnnnnnnnnnnnnnnnnnnnnnnnnnnnnnnnnnnnnnnnnnnnnnnnnnnnnnnnnnnnnnnnnnnnnnnnnnnnnnntccagcgggtcctggagcgggtgctgaagnagaaatacgactacgacagcagctctgtgcgttttaggttcttccgggaggcgctgctgcaggtcagcatccctttcctgctcaagaagctggcccctacctgcaagtcggnggagctgccccggttccaggagctgatcttcgaggactttgccaagttcatcctggtggaaaacacgtacgaggaggtggtgctgcagaccgtcatgaaggacatcctgcaggnnnnnnnnnnnnnnnnnnnnnnnnnnnnnnnnnnnnnnnnnnnnnnnnnnnnnnnnnnnnnnnnnnnnnnnnnnnnnnnnnnnnnnnnnnnnnnnnnnnnnnnnnnnnnnnnnnnnnnnnnnnnnnnnnnnnnnnnnnnnnnnnnnnnnnnnnnnnnnnnnnnnnnnnnnnnnnnnnnnnnnnnnnnnnnnnnnnnnnnnnnnnnnnnnnnnnnnnnnnnnnnnnnnnnnnnnnnnnnnnnnnnnnnnnnnnnnnnnnnnnnnnnnnnnnnnnnnnnnnnnnnnnnnnnnnnnnnnnnnnnnnnnnnnnnnnnnnnnnnnnnnnnnnnnnnnnnnnnnnnnnnnnnnnnnnnnnnnnnnnnnnnnnnnnnnnnnnnnnnnnnnnnnnnnnnnnnnnnnnnnnnnnnnnncgaggtctcctcgccgcctgcctcacccctccagcatctcctgcctggaaaggctgtggaccttggaccccccaagcccagcgaccaggagactggagagcaggtgtccagccccagcagccaccccgccctccacaccaccaccgaggacagcgcaggggtgcagactgagttctaggccagtgggtccctggctgctgcacacggcacgggccgctcccgtctgggcccaggcaggcttggctctgaggaggataccctggtctgtgttgtgccttgtgggtggaggcggggcagggctgtgtggcaccaccagggagcgggcccacctgagtcactttattgggttcagtcaacactttcttgctcccaaaattctcttctgtgggatgatctcagatgcaggggctggttttgggggttttcctgcttgtgccgagggcgggacactgctggggggctggagagcccctcccttcctgtccttcttctgtggcctccatcccctcatgggtgctgccatccttcttggagagagggaggtgaaagctgctgtgaggccagtgggttcccgcccactcacccaggggctggctgggccaggannnnnnnnnnnnnnnnnnnnnnnnnnnggccctgctccttccgcagttaggggtggacccataagggccttccccactgctctggagagaaggggaaggagacaggggtcaggctggagccaggctggg

SEQ ID NO: 25899 - DNA, 1557 bp, Macaca Mulatta
  misc_feature (1)...(1557): n = A,T,C or G
gccctggctccgcgccaggaggggcggccaggcccagcctcggcaccgggagctccgggaccttttcggcgcccagcccggcaagaggcctcaggaggagtacgaggaggaagggctgcctcgccggggacccggccatggcgctggacttcctggctggatgcgctgggggtannnnnnnnnnnnnnnnnnnnnnnnnnnnnnnnnnnnnnnnnnnnnnnnnnnnnnnnnnnnnnnnnnnnnnnnnnnnnnnnnnnnnnnnnnnnnnnnnnnnnnnnnnnnnnnnnnnnnnnnnnnnnnnnnnnnnnnnnnnnnnnnnnnnnnnnnnnnnnnngcaacaccctccgggccctgggccacgactcgcctctcaaccagttcctggcaggcgcggcggcgggcgccatccagtgcgtcatctgctgccccatggagctggccaagacgcggctgcagctgcaggacgcgggcccggcacgcacctacaagggctcgctggactgcctcgtgcagatctacgggcacgagggtctgcgtggcgtcaaccggggcatggtgtccacgctgctgcgagagacgcccagcttcggcgtctacttcctaacctacgacgcgctcacacgggcgctgggctgcgagccgggcgaccgcctgctggtgcccaagctgctgctggcaggtggcacgtcgggtatcatgtcctggctctccacctaccctgtggacgtggtcaagtcacggctgcaggccgacgggctgcggggagccccgcgctactgcggcatcctggactgcgtgcgccagagctaccgcgctgagggctggcgcgtcttcacacggggactggcgtccacgctgctgcgcgccttccccgtcaacgccgccaccttcgccacggtcaccgtggtgctcacctacgcgcgcggcgaagaggccgggcccgagggcgaggctgtgcccgccgcnnnnnnnnnnnnnnnnnnnnnnnnnnnnnnnnnnnnnnnnnnnnnnnnnnnnnnnnnnnnnnnnnnnnnnnnnnnnnnnnnnnnnnnnnnnnnnnnnnnnnnnnnnnnnnnnnnnnnnnnnnnnnnnnnnnnnnnnnnnnnnnnnnnnnnnnnnnnnnnnnnnnnnnnnnnnnnnnnnnnnnnnnnnnnnnnnnnnnnnnnnnnnnnnnnnnnnnnnnnnnnnnnnnnnnnnnnnnnnnnnnnnnnnnnnnnnnnnnnnnnnnnnnnnnnnnnnnnnnnnnnnnnnnnnnnnnnnnnnnnnnnnnnnnnnnnnnnnnnnnnnnnnnnnnnnnnnnnnnnnnnnnnnnnnnnnnnnnnnnnnnnnnnnnnnnnnnnnnnnnnnnnnnnnnnnnnnnnnnnnnnnnnnnnnnnnnnggtctctgatggcccaccaaggggctgcccagggacctgactccactatatcctccacccgggaggctggtgggccacctctggtctgtgttagggacagaggaaaacttggtgtgcctcctggtgtcgcagaactgtatcctctgcataccccagcttctccacatgccactgctag

SEQ ID NO: 25900 - DNA, 924 bp, Macaca Mulatta
  misc_feature (1)...(924): n = A,T,C or G
gggcttttccggcggtgacgacctacccacacgagaacatgcctctcgcaaaggatctccttcatccctccccagaagaggagaagaggaaacacaagaagaaacgcctggtgcagagccccaattcctacttcatggatgtgaaatgcccaggatgctataaaatcaccacggtctttagccatgcacaaacggtagttttgtgtgttggctgctccactgtcctctgccagcctacaggaggaaaagcaaggcttacagaaggatgttcctttaggaggaagcagcactaaaggcactctgaatcaagatgagtgggaaaccatctcaataaacacattttggatganaaanatnaaanaataattatattaaaatcttctcnnnnnnnnnnnnnnnnngtcggccgcctcgggccctccaagaagctttcctagacccattctgtttggccgcgcggggcccaattagggtaaagtgaaaattgggtcataacctgctttccccaggaaaaaaacgtgtttcagaaccaatttgctttgggattcccccggccacctaaaaaaaacgcccgaggaggggggacccaaaccgttttttnnnnnnnnnnnnnnnnnnngggaatttcctgaaaaggtccctttgagcggttactccacacacaaaacaagaaaaatcccccagggcgggagccctccaaaaattctttattttaaaaccccaccccccctgagggaattttctttgggaaagtgacactggtgtggggaaatttcaatttaaaaaggagtttctcgcccacaaagttggggaaaaagccatatcacaaaataacaggcccccgggatgggaaaacccaataaaattttccccagggagggggggtgtgtanaaaacctttgtgttagccccctttgtgcggat

SEQ ID NO: 25901 - DNA, 190 bp, Macaca Mulatta
tggtaaaacctaaatatgacctggatagaacagatccattagaaaataattatactccagtctcttcggtacctagtatttcatctggccactaccctgtacctactttgagcagcactattacagtaattgctcctactcatcatggtaacaacactaccgaaagttggtctgaatttcatgaaaacca

SEQ ID NO: 25902 - DNA, 903 bp, Macaca Mulatta
tcaccgtgatcagcctagctgaaaccaaggacattccagcagctattctgcatgcatttctgaggttagaaaaaacggggcacatgcccaactaccagtttgtataccagaaccttcatgatgtatctgttcccggccccaggccaagagacaagagacagctcctagatccacctggtgacctgagcagggctgcagcccagatggagaaacagagcgacggcttccgggcactggcaggcctggccttctgtgaccctgagaagcagcacatctggcacatccctggcctgtggcacggagcacctcccatggccgcagtgagcttggcctacagtgaagccatatttgaattgaagagatgcctactcgaaaacatcaggaacggcctgtcgaaccaaaacaaaaacatccagcagctcattgagctggtgagacggctgtgagtgtgcagagaaacccagttcaggtgtaggaggctgctgtgggcagccctgtctgatggggcacccgtgtgggctgtgccctggtgcctgagaatggccggtgcccaatcgacatgagaagacaagcaaaagacagagggtttggagtctcctcaacagtgttaagagaggaagtgacctcacagaccagctcagagatgttaccaggaatatcacaacccccagggtagggagacacgcagcagtttgttctgtctcagctcctgtcaaggatcccacggggtgggccctctgtatagctgctctctgtcactggcccctggagtgggagcagtgtcctcagtcactgcaggcccaggcgggcaggtggtcccaggacagaggtggggaagttgtcttgaggaagcagaagtaggccttgctcccgcccagcccaagggcctccagtgaccagcat

SEQ ID NO: 25903 - DNA, 412 bp, Macaca Mulatta
gaactttccttatggtcatctttgggtggagccaccactttagttctgatttcctgcatctggttgagtacccgggcttgtcagtgcaccccagggacaccgcctcgtccagggctcccacatgtctcagactgacggccagactgggtcatatgaccagcactagccaatgagctgtgaggacacgggagcacagggagagctaggctgagtcgtgtgactggcactagccaataagctgtgagcacacgcgagcccaggcccacctaggctgggtcatatgaccagcactagccaatgagctgtgaggacatgtgagcacaggcccacctaggctgggtcatatgaccagcactagccaatgagctgtgaggacacaggagcacaggcccacctaggatgggtcatatga

SEQ ID NO: 25904 - DNA, 711 bp, Macaca Mulatta
gggtacagcgatgagtcttgatgtgttctgcagggacaggtctggatgatctagctcgtaccaaaggaccttgttcttccctgcaggagaagctgtcacatctcgagctgtgaggcaccgtttctctctcgcttgccaatctttttgtaaaggatgaggctcgtagagagcaggatcatgccagaaatagagatagaagtgcatcctctgggaaaaagataatgacttctgattcaacatagccagagtcctttgaagtaaatggctagaaacagcactctggttataactgccccagggcccgattcaggactgactctctaccataaaactgaaagctgcttcccttgtagtcagtctgcatctcagtaccagttctgccagccacagtgagcccgttactactttcacattgtctgtgacactcaagcccctctcatttttatctgtctacctccattctgaagagggaggttttggtgtccctgggcctctgggaatagaaggtccatttgtctcctttgtgtagagcaagcaagttttctgcctcactttctccatcctccacctctgagatggacacttagagacaggggcaatgtgggtccaagaaaccagggccctgaccggggtccactgtggagcagccatctatctaccccgactcctgaacccaggcttgccgtgggtggtcaatttctggtcaatccc

SEQ ID NO: 25905 - DNA, 1386 bp, Macaca Mulatta
  misc_feature (1)...(1386): n = A,T,C or G
tactgcaggaaggaacaatttacagcaatgagggatttgtacatgaaaaatggacaaggatttgcattagtttattccgtcacagcacagtccacttttaacgatttgtaagacctgagagagaacagattcttcgagttaaagacactgatgatgttccaatgattcttgttggtaataagtgtgacttggaagatgaaagagttgtagggaaggaacaaggtcaaaatctagcaagataatggaacaactgtgcattcttacaatcttctgcaaaatcaaaaggaaatgttaatgagatcttttatgatctagtgcggcaaattaacagaaaacctccagtgcctgggaagacttgcaaaaagtcatcatgtcagctgctttaatatactaaatgcattgtagctctgagccaggtctgaaaaactgttgcccaattcaacagtgccagcattccaactttgttaaacccatcaacatcttaaatggactttcccgtggtgggaccctttaagaggcggatgaaagctactatatcagtttgcacattctaatcactttccagtatcacaagagagatttttacttatataatagtcctagagtatgcagctggtaaaaccagaggctacatccagtattactgctaagagacattcttcatccaccaatgttgtacatgtatgaaaatggtgtactgtatactttaacatgccccatacttggtattggggagtacaataatgtaaatcctaaaagcaccactatttttagcataataaaagaaagtccgaagaactcctatattgactactccagataacttcgtgtctttgatactcgtagcttattgtaattttttgaagaaattcaaggtnnnnnnnnnnnnnnnnnnnnnnnnnnnnnnnnnnnnnnnnnnnnnnnnnnnnnnnnnnnnnnnnnnnnnnnnnnnnnnnnnnnnnnnnnnnnnnnnnnnnnnnnnnnnnnnnnnnnnnnnnnnnnnnnnnnnnnnnnnnnnnnnnnnnnnnnnnnnnnnnnnnnnnnnnnnnnnnnnnnnnnnnnnnnnnnnnnnnnnnnnnnnnnnnnnnnnnnnnnnnnnnnnnnnnnnnnnnnnnnnnnnnnnnnnnnnnnnnnnnnnnnnnnnnggggtctacaacaagaagtgtgtattttcaaacaattttttaatgatttaacaatttttgtaaatcattttcaggcttctgcagctgtagattctcattgtgaatcccttgcttgctcatgcataactgtatttgcaataccaaatatacagggttagtatttttgcctgttactgatgggttcacatgtgtaatgttttggctgagattttaaatggtggacgagtactatggatgtgaa

SEQ ID NO: 25906 - DNA, 234 bp, Macaca Mulatta
  misc_feature (1)...(234): n = A,T,C or G
ccaaacacacacgggtaatagtttgggancaaataactagtaaattgttgattcttggctatttcgctgactgcggcatgtcctcatgtcttctttaattttgtggtacatgaatgaatgcatttatctttcagtgacttactagttatgaacttgaattatcacctgtttgtaatacttaagtatcatttacataaagtataaaacatttttcacttttgaatctttccctac

SEQ ID NO: 25907 - DNA, 1904 bp, Macaca Mulatta
  misc_feature (1)...(1904): n = A,T,C or G
agggtggagttagtgggttgactggagagctagaatttggagaaaatggaggcaatcccaatgtccattttgaaatccttggaaccaactatggagaagagcttggcagaggtgttcgnnnnnnnnnnnnnnnnnnnnnnnnnnnnnnnnnnnnnnnnnnnnnnnnnnnnnnnnnnnnnnnnnnnnnnnnnnnnnnnnnnnnnnnnnnnnnnnnnnnnnnnnnggaagaaccttttgtgatggtctctgaaaatgtcttgggtaagccgaagaaataccagggcttctccattgatgttttggatgccttatctaactacctgggttttaactatgaaatttatgtagcaccggatcacaaatatggaagcccacaagaagatgggacatggaatggcttggtaggagagcttgtctttaagnagagagccgacatagggatttctgctttaaccatcactcctgaccgtgagaatgtggtggactttacaacacgttacatggactactcagtgggggtactacttcgaagggctgaaaagacagtggatatgtttgcctgtcttgcaccatttgatctctctctatgggcttgcattgctggcacagtccttctggtgggtctactggtctacctcttgaactggcttaatcccccacggttacaaatgggatcgatgacgtctaccactctctacaactccatgtggtttgtgtatggatcttttgtacaacaaggnnnnnnnnnnnnnnnnnnnnnnnnnnnnnnnnnnnnnnnnnnnnnnnnnnnnnnnnnnnnnnnnnnnnnnnnnnnnnnnnnnnnnnnnnnnnnnnnnnnnnnnnnnnnnnnnnnnnnnnnnnnnnnnnnnnnnnnnnnnnnnnnnnnnnnnnnnnnnnnnnnnnnnnnnnnnnnnnnnnnnnnnnnnnnnnnnnnnnnnnnnnnnnnnnnnnnnnnnnnnnnnnnnnnnnnnnnnnnnnnnnnnnnnnnnnnnnnnnnnnnnnnnnnnnnnnnnnnnnnnnnnnnnnnnnnnnnnnnnnnnnnnnnnnnnnnnnnnnnnnnnnnnnnnnnnnnnnnnnnnnnnnnnnnnnnnnnnnnnnnnnnnnnnnnnnnnnnnnnnnnnnnnnnnnnnnnnnnnnnnnnnnnnnnnnnnnnnnnnnnnnnnnnnnnnnnnnnnnnnnnnnnnnnnnnnnnnnnnnnnnnnnnnnnnnnnnnnnnnnnnnnnnnnnnnnnnnnnnnnnnnnnnnnnnnnnnnnnnnnnnnnnnnnnnnnnnnnnnnnnnnnnnnnnnnnnnnnnnnnnnnnnnnnnnnnnnnnnnnnnnnnnnnnnnnnnnnnnnnnnnnnnnnnnnnnnnnnnnnnnnnnnnnnnnnnnnnnnnnnnnnnnnnnnnnnnnnnnnnnnnnnnnnnnnnnnnnnnnnnnnnnnnnnnnnnnnnnnnnnnnnnnnnnnnnnnnnnnnnnnnnnnnnnnnnnnnnnnnnnnaggatgacaaggaaattgacctggagcacctccatagacgtgtaaatagcttgtgcacagatgacgacagcccccataaacagttttccacctcgtcaattgatttgacccctctggacattgacactttgccaacacgacaagcactggagcaaatcagtgatttcaggaacactcatattaccacaacaacctttatcccagagcagatccagactcttagccgcacactgtcagctaaagctgcttctggtttcgcttttggcaacgtgcctgagcaccgaactggcccttttaggcacagggcacctaatgggggctttttcaggagtcctataaaaacaatgtcatctattccttatcaaccaactcctaccctggggctcaatctgggtaatgatccagaccgaggcacctccatatga

SEQ ID NO: 25908 - DNA, 9212 bp, Macaca Mulatta
  misc_feature (1)...(9212): n = A,T,C or G
cacgagctccaattccatgagcaaatgtctcatgtcaacatttaggctgctctctaaagccttgtatcttgcacctcttcttctgtctcctctttcagagcagcaatttggggctgagtcttgcacttgcttgagttccggtggggaaagagcttcaccctgtcggaggggctgatggcttgccggaagaggctcctctcattcagcagtttctggatggaatcatactgccgcactttgttctcttctatgacctagggaaatggctgttagtgagatctgggacagaaggcaggtcagactacagcagggacagaaactgccacaggctccaagggaaataaaagtcaaagaatacacatatttttgaaaagaacttgtacattgttacagtttgcaggaactatcacacctgagattgttatcaagcattacaagggaaacaagatcttaagtaaagttataaagactcaccaaaaattgttggcattccagcattgcttctatcctgtgttcacagaggattactgtgcagtcagcaaatgcttgttttagagttcttctaattatctggtatgttctagaaaagaaagaaaataaatgattctgttcctattgtgctattaagtaacagaacttctgaaactcacactggatccaaatgagcactgggttcatcaagcagcaagatcttcgccttactaagaacagatctagccaaacacatcaactgcttgtggccatggcttaggacacagcccccatccacaaggacaaagtcaagcttcccaggaaactgttctatcacagatctgagcccaacctgcagttagagaaggtaccttacctcatctgcaactttccatatttcttgatcactccactgttcatagggatccaagttttttctaaatgttccagaaaagataaatactttctatatcaataaagaaaagaagaaaaaagtatgaataacctatatatctttttatttttcccttattgtattgtgcagagtaatatgaatttcttgagtacaagtatcaatagcagtaaaaaatataattcagttgcctttttttctgactaagtccttttgctcacctgtggtatcactccaaaggctttcctccactgttgcaaagttattgaatcccaagacacaccatcgatctggatttctccttcagtgttcagtagtctcaaaaaagctgataacaaagtactcttccctgatccagttcttcccaagaggcccacctataaggtaaaagtgatgggattactcctgtgacatatagataccatgcattaaacataattcagtattgtacttcaataaaaaccactggagtattttatcctgtcaccagtggaagatatttacttattcaatcaaacattttactgggattcacttacttgaacaaagtctaacaaagcaagcagtgttcaaatctcaccctctggccaggacttattgagaaggaaatgttctctaatatgggatttccaccttctgtgtattttgctgtgagatctttgacggtcatttggccccccgagggccagatgtcatctttcttcacgtgtgaattctcaataaccataactttcgagagttggccattcttgtatggtttggttgacctggtaggtttaccttcttctgttggcatgtcaatgaacttaaagactcggctcacagatcgcatctgaaataaaaataacaacatttttgtttttaagaatggcagacaatttcataatttcttcctcatgctattactcatacttttttacttgtctgaatttttttcattaaagttaaaaagatgataatgacttaccaagctatccacatctatgctggagtttacagcccactgcaatgtactcatgatattcatggctaaagtcaggataataccaactgttccttctccttctcctatagatgcacaaaagacataaatgaaactcatgttattaaatttacatttcaattttatgttgattttaacaatttttaagtcttttattcattgacaaagtttttactaaatgcttagctaaaattaatcagttcatagtacctgttgttaaaatggaaatgaaggtaacagcaatgaagaagatgacaaaaatcatttctattctcatttggaaccagcgcagtgttgataggtacaagaaccagttggcagtatgtaaattcagagctttgtggaacagagtttcaaagtaaggctgccgtccgaaggcacgaagtgtccatagtccttttaagcttgtaacaagatgagtgaaaattggactcctgcctgtgaaatatttccatagaaaacattgcaaataacataaacacagaatgcaatttcataacaccatgtacctgaaaaagactaaattagagtaatcatatcgcaaatgtcattggttaaaaagatttttttcataccttcagattccagttgtttgagttgctgtgaggtttggagaaaatatgctctcaacataataaaagccactatcactggcactgttgcaacaaagatgtagggttgtaaaaccgcgacaactgctatagctccaatcacaattaataacaacaggtctgggccagataaacagttctgacttgttattgaatttactaaacttacgtctattttgaaggctttggataatcacaaaattaattcaatagacaggacttcaactctcaatcaaataaaaattgaaaacgaaattgcatttgcttttgttattatttaaaaaacaacatggcaaaaagacatacttaacagtacttatttttacatacctggatgaagtcaaatatggtaagaggcagaagatcatccaaaattgctatatctttggagaatctattaagaatcccacctataatatacaagatgacaaattcctcaaaagatatatcaatatatacccattagaaaaccaaccgaaaccacaggccctattgatggtggatcagcagtttcatttcttagtcctagtaaagtacctgctttcaacgtgttgagggttgacataggtgcttgaagaacagaatgtaacattttgtggtgtaaaattttcgacactgtgattagagtatgcaccagtggtagacctctgaagaatcccatagcaagcaaagtgtcggctactcccacgtaaatgtaaaacacataatacgaactggttctggtgataatcactgcatagctgttatttctactataagtactattccctttgtcttgaggaggagtgctgtaaagcaaaagggaaattgttatttggcagccaaacttactaattgaatttccaatacatgtaaatggaactaaatttgagtctaaagaaatacaatatttagattacaatacatacaaacagtgatttacaatatttaatcaacagaaataaaacacaatctacacaataggacatggaatactcactttccaaggaaccacagcacaaccaaagaagcagccacctggaatggaacaagaaaacagttgatttttttctataatttaactttaaatcacagtatactttacaatagaacagtcttacctcagccagaaaaattaccaagcaccaaattagcacaaaaattaagctcttgtggacagtaatatatcgaaggtatgtgttccatgtagtcactgctggtatgctctccatatcatcaaaaaagcactcctgaataaaagaattatggctattacaataagacaatacagtttcatgccaccatggtggttttatttttaatatatgaaaataaaggaatagtattacttgaatctaagtgtattttaacaaatataaatcagtataaatgccatgtatgatgtcattttatagtcagaataatgtctactggagcaacacagctttattaaaactgagaaacaccgtaatttttcaaaattctaaaaatgtatccctgataatgttactgtattattattggacagtttaccattttgcattctactcaattgcaccctgtatggtgaaatacccacaagcaatttatacctacctttaagtcttcttcattaatttcttcacttatttccaagccagtttcttgagataaccttcttgaatatatatccagttcagtcaagtttgcctgaggggccagtgacacttttcgtgtggatgctgctgtctttctgtgaatgctctgaccttggttaactgagtgtgtcatcaggttcagaacagactgcctcctccgtgcctgaagcgtggggccagtgctgatcacgctgatgcgagggagtatcacctctccctgctcagaatatggaactaaggacagccttctctctaaaggctcatcagaatcctcttcgatgccattcatttgtaagggagtcttttggacaatggaaaattttcgtatagagttgattggattgagaatagaattcttccttttttccccaaactctccagtctgtttaaaagattgtttttttgtttcggtccaggagacaccagcatctccttctaatgagaaacggcgtaaggtctcagttaggattgaatttcttctttctgcactaaattggtcgaaagaatcatatcccatgagttttgagctaaagtctggccgtagattttggagttctgaaaatgttccataaaaatagctgctaccttcatgtaaaattaatattttgtcagctttctttaaatgttccattttagaagtgaccagaatcctagttttgttagccatcagtttacagacacagagccaatgagagaaactggtttagcatgaggtggtcagaaaaggttttaatgaaagcaatcttgactcttgaccaggtagggcagatcagatttgagttaataccatgctacattctgccataccaacaatggtgaacatatttctcaagaggtaaaatgcaatctatgatgggatagactttctttcttgtgttttagcataagcattataagcaagttattcaaagaacataccnnnnnnnnnnnnnnnnnnnnnttaaaacatctaggtatccaaaaggagagtctaataaatacaaatcagcatctttgtatactgctctaaaaagaaaaaggaaattaaattactatttcctgtgtctttctagtgtagatgatttgccttaaacagttcactacatgcattacaatatggtcattacatccattcactgaaataacgctattctcaaaagtggtgcagaagtagcacttttatacatgtttttactggggtagatgattttaaatgaggaataaaggaataagttgcagatttttatcacttttcacaacattccaagaactgctgaagtggttttgctaactgtaagcatttcagcaaatgcttgctagaccaataattattcaccttgctaaagaaattcttgctcgttgacctccactcagtgtgattccaccttctccaagaactatattgtctttctctgcaaacttggagatgtcctattagctaaaatagaaaattagagagtgacttttagtacgctcaatctgaatttgaaaggcacatcttatatcttcatatgcacaataaaaaattttcacatagtttcttacctcttctagttggcatgcgttgatgacacttctgtatctgtattcatcataggaaacaccaaagatgatattttctttaatggtgccaggcataatccaggaaaactgagaacagaatgaaattcttccactgtgcttaattttaccctctgaaggctccagttctcccataatcatcattagaagtgaagtctggaaatacaacccatcattatttggtcaaaatataaatatgtagaagaaaaagccacggaaaataatatgaggaaataaaaaaccagagtaaattatcagtggagtaatttctattatacgagacattatacccatacattctcctaatgctcatgcaagaatttctccaaaaatacttttcagcactacagacaaactacaaaaaaaaagagacatggatatcaaattaagttcttaatagtgaagaataaaaggactaccttgcctgctccagtggatccagcaaccgccaacaactgtcctctttctatcttgaaattaatatctttcaggacaggagtaccaagaagtgagaaattactgaagaagaggctgtcatcatcattagaagtttttctattgctattgttttgttttgctttctcaaataattccccaaatccctgttaaataannnnnnnnnnnnnnnnnnnnncaaaaataaaagatgagtttgtcagatattttcaataaatgcttgttttatgtatgattagtagattcaccaagaagaaaataggtctttagataaacaattttttaaaaattctgacctcctcccagaaggctgttacattctccatcactacttctgtagttgttaagttatattccaatgtcttatattcttgcttttgtaagaaatcctatttataaacaaaaacatgttatagaatcaggatagcattaatgcattattacatctactttatactctcattgtgctacatcttatacaagagagtgaattttaataatgaaatagtaattatttcttaatataataattttattacagtgttctaaagttaattattgactgattacttaaatcatagtatataatgcagcattatggtacattacctgtattttgtttattgctccaagagagtcataccatgtttgtacagcccagggaaattgccgagtgaccgccatgcgcagaacaatgcagaatgatatggttgtgaatatttttcggaggacgattcctttgattagtgcatagggaagcacagataaaaacacgacaaagaaccctgagaagaagaaggctgagctattgaagtatctcacataggctgccttccgagttagtttcagttctgttctataaaaaataataataaaattcaggatgttattttatttttcaaatatcagggatcttggaattgaaattactggaacaacttactgtcttaggttttcaatcattttttccattgcttcttcccagcagtatgccttcacagattggatattttcaatcatttctgaggtaatcacaagtctttcattgatcttcccagctctttgatccctataaatcaatcaatcaatcaatctaatagtaaaaacaagtcaaattatctactaagaactgctcaagggttttaagtcgttttactaaagtggactttttgaaaacataattttaaaaaccttcaagctatgaaaataggttgctacctgtacttcatcatcattctccctagcccagcctgaaaaagggcaaggactatcaggaaaccaagtccacagaaggcagacgcctgtaacaactcccagattagccccatgaggagtgccacttgcagaggaacgatccacacgaaatgtgccaatgcaagtccctggaaaataaaagcacagcaaaaacaggtgtcattttatcttccacccctagaaacaaacaatcatatatgaaaaaaagcaagtaaaaggagcttatatgatcaaacacttaccagaacccaggatggtgttctgctatacaactgacctttctcagttttcagaatagggaagctagagctgagcaagacttaaccacttatctgatacaggaaaactctacctttccagttgtataatttataacaatagtgcctaaaagattaaatcaataggtacatacttcatcaaatttgttcaggttgttggaaaggagactaacaagttgtccaatacttattttatctagaacacggcttgacagctttaaagtctacaagaaaaatgggaagttagataatttcaacaaacaaaatacaaatatattataagtaacattataatatgactaattcagttattgtgcattcattattaagtaaaggtaatgaaaattatgttctattcatctagcttactatcatcttagattcataaatatttcttttaacagtcaatactatactggaatgttctagatttatggcattaaaacatgtaccatacagaacatatgtaccacagggcctgtgcaaggaagtattaccttcttataaatcaaactaaacatagctattctcatctgcattccaatgtgatgaaggccaaaaatggctgggtgtaagagcagtgtcctcacgataaagagaaggcataagcctatgcctagataaatcgcaatagagcgttcctccttgttatccgggtcataggaagctatgattcttcccagtaagagaggctgtactgctttggtgacttcctttatatttttatacctattaaccagatttcctagtcctttaataatcacaaaaatgaatatagttatgtgatacataatgaatgtacaaatgagatccttacccctaaatataacaagattccatagaacataaatctccagaaaaagcatcgccgaagggcattaatgagtttgggatttttctttgaagccagctctctatcccattctctgcaaaagaataaaaagtgggaccaataagttacatgtgcaaatatttcagttgtcctgtttcccttaacatagtttgattcacacaagtatatccaaggagattaacccaaggatttatagagacaaaacctcatggagaccctcctcttggcctcccaagtagttgggattgcaggcattagtcagtaatgtcttctatttttaaatataagaattaaacctacaatatgtttcaatatgcttcctttcttttctctaaataataatatgaatttttctcttcaactaaacaatgtacatgaatatacctttccaatttttcagatagattgtcagcagaatcagcagaagggatttggtatatatctgacaattccaggcgctgtctgtatcctttcctcaaaattggtctggtccagctaaaataaagagaggaggaagagatattcacttgattggcacgtgtctttccgaagctcggttggccaccttctcacctgaaaaaaagtttggagacaacgctggccttttccagaggcgacctctgcatggtctctcgggcgctggggtccctgctagggccgactgggctcaagctcctaatgccaaaggacctattact

SEQ ID NO: 25909 - DNA, 153 bp, Macaca Mulatta
agccttctacactgccaagtatggctacaagttatgcctgcggctgtacctgaatggagatggcactggaaagaggacccacctgtcgcttttcatcgtgatcatgagaggggagtatgacgcgttgctgccatggcctttccggaacaaggt

SEQ ID NO: 25910 - DNA, 803 bp, Macaca Mulatta
gctgcagaaactggtgagtaaaaaggattttgcatattcttaattaattttatatttatgttggatgcctatttggactcagagatctaggcccaataattagtaggctcttgctgccaaaatgcccaggggaaaaaaaaggcaggcattgcgggggatgggggaagtggctcaataaattcatttctgttacaagcatcttttatacatattactaaagagaacatagtaagaaatgcaaataatagttctttattttattatgacagttaatctaatagcaacctgtgttaatgaataaagtcactcagagtccttcagcacttcctaagtagaggccagaatctgtagggcttcttttcaccccaattgtatagctcctaggactccaagcactatataggcccctgtatagaaatgctcactaatgaagagggagggctagaagcttgtctgcattctaagatcactggtgagtcattcagcaagaaaaggccccttaccaggaatagtcacagttccgtggcattgtactagcaaaagggtctgatcaaaggtctcctgtggagcttgcatggttccctttcatacgacgaccataattaaaaccactaattctcttttaaaatgctgcaggatgccatgtaggcatctgtctggagtgtcctttgtgatgtcataagctgttaaggaccagtgccgaggggctattgagtgaaatgccagtcatgaaggtgcttcaagacaagggtgcctcttaaagcttgacagggccttgattgcacaaatcgagctgaatttgc

SEQ ID NO: 25911 - DNA, 1871 bp, Macaca Mulatta
  misc_feature (1)...(1871): n = A,T,C or G
atcaggactttcaaaagccctcctggaaggtgatggtgctcagcttcttgacacacccccttcccctaccaggtggaagagtctgactccatgtgttatgcctaggaccaatggcagtggttcgtccactcctcccctttttcatctgcacagagttgagggaaatgggagaatctgtgctgagaagacttagacccaggagcccctttcacaggcccctagttgggaagactggatgagagtggagcctcccttttccctcttctatccttgttacttgaacaatctcaatctctaagtggtgggtggggatatgaagaggtgtggatccaggctaggcaggagagagaacttttttggtctcggagcttggggtctcaagaattcaagtggccccatctctctctcaggcaagcccaaagctcaggtcccatataccacccttagatcctgtccccagggctagggtgaaccatgccaaaggagggggccagcttnnnnnnnnnnnnnnnagcctgtctcctagtctgcctatgtctttctctgctatatgtttctgtcctgcggtctnnnnnnnnnnnnnnnnnnnnnnnnnnnnnnnnnnnnnnnnnnnnnnnnnnnnnnnnnnnnnnnnnnnnnnnnnnnnnnnnnnnnnnnnnnnnnnnnnnnnnnnnnnnnnnnnnnnnnnnnnnnnnnnnnnnnnnnnnnnnnnnnnnnnnnnnnnnnnnnnnnnnnnnnnnnnnnnnnnnnnnnnnnnnnnnnnnnnnnnnnnnnnnnnnnnnnnnnnnnnnnnnnnnnnnnnnnnnnnnnnnnnnnnnnnnnnnnnnnnnnnnnnnnnnnnnnnnnnnnnnnnnnnnnnnnnnnnnnnnnnnnnnnnnggcatcggggcatggtgccaggggctctggctgtcctcacagcctagtcacagtcctgggcagtgcatcttggtgccaggctggctccctggctctggtgacactgtgctggttggagtgtgtctcacttccctggtgtaggtgaggatgtggtttaggaggatgggggatgggtggtatttgtcactgtccaaatttgtccttgttgtactcccctgtgcacaggtgcccagcacccttggtgacctttagttatccagtgtcacctattgctgcccacctcctcccctcccgactcgagacctgctgcttccttcaaaatgatccagattcccttcaagcatctccctcatcttggactctgggcttagttgaatagctgggagcaatgggattagattgactgattcattcattagatgtaaagccctggcagaataatgtgtcactctgctccaggagcatttgcaacttaacaggcaatgccctaacccagaagtggaaagggaagccttcggtggtggttggatatgccatcagtagaggtgttgcacatttgtgggaatgtgatttaggagactcaagtgtcatgggtggttggatgaatcagtgatttccaaattagtttttacagagattcctggtaaggggttagtgaaggaataatgagagaaggcaggctcaaagaccccctatccttatttcaagtccagtagcttcttaggttnnnnnnnnnnnnnnnnnnnnnnnnnnggaaggagtccactgaaaaacgtaagtttgaaacttagtgagctggatgatcaatcctttctagctctgaaccctggacactaaagagggaagatcttgatcctttcaaacttcagaactctgaacacagacctacctagtgtgaagaaatgggagagagcaggatggggagaaggatgaagtcaacaggacttgcctccaagctctgaggggagggataaggtgccatgtccatgtgga

SEQ ID NO: 25912 - DNA, 174 bp, Macaca Mulatta
gctggacactgtgggactcctgagcccatcgtcaacggacacatcaatggggagaactacagctaccggggcagtgtggtgtaccagtgcaatgctggcttccgcctgaagggcatgtctgtgcgcatctgccagcaggatcatcactgatggggcaagacccctttctgtgtg

SEQ ID NO: 25913 - DNA, 706 bp, Macaca Mulatta
gggtggcgcacagcgaagctaaacccctacactcgagtgatgaatagccgaggcatctggctggcctacatcatcttggtaggactgctgcatgtggttctactcagcatccccttcttcagacattcctgttgtctggaccctgaccaacgtcatccataacctggctatgtatgtcttccttcatacgagtgaaagcggacaccactttgacgactcctgcaccaaggcaaaggctcggctactgacacactgggagcaaatggactatgggctccagtttacctcttcccgcaagttcctcagcatctctcctattgtgctctatctcctggccagcttctataccaagtatgatgctgctcacttcctcatcaacacagactcattgctcagtgtactgctgccgaagttgccccagttccatggggttcgtgtctttggcatcaacaaatactgagggatgggtttagggacagctccatgggccatagggaaggcagtgaaacagaggactataaaacatccttctcttattctccatactgtcttctacaccttgaaagtgtgagaactatacaaccttttccagactcccaagaagagaagagattggcaaatggggctcctgggcccagtcctgccagcggcaagtttctttgaatcaggaacgcacgtgacgtaagggccaaatcactctcctcca

SEQ ID NO: 25914 - DNA, 757 bp, Macaca Mulatta
gggttacctttgattttcttataaaggagtttattaaataggatttttaaataatgtagtaacactcctgatacaactctggttataagtgaattgagcattaatgtttcttttgtataaattcctatcctgaaatattttattcatgaaaataaggtaagcaaaaaccaactccattttgccaggattttcttgtgctgagattgccaatcacggttaaacacaaagtgtttttatggaacaaagaaacagtctttaacagaaaaaaggtattgaaatattaaattgccaccaagtttactttgaagcccatttttggctgtttagtcagcatgaagtgggcatgataattttttaatatttctttttgtgaaatttcctgtacagccttttgtaggattactacaggttaatgtgagttgaggaagagaatctttctcgaacaatactacataccttttattatattacaaacctaagtgttttatatcctggagtcaaggaacaaattaccttaggattatagtattacatgccataaaatactatgctttattggtcccatgttttgtgcaattttaaagagatggctttctattaagtataaactatgtatatataagaaccatattttccacaactaaaatgtgcattattttttccaaagttttatcattgctatttatttttacctttgtttttgaacattcaatccgttcattttgtatgtatgcttaatacatgtctgtcatataca

SEQ ID NO: 25915 - DNA, 724 bp, Macaca Mulatta
taaaatggtgatgcttacagcagtttgtacgagctcttagtgttgattccatggaactgacggctttgcttattttgattttttccccctacttttcctaatgtttaaattctggaattacactggggttcttttgccttttttagcagaacatccgtccgtccatctgcatctctgtcccatgactcaggggcgcccactctgctttgattctcctgtggaagaaaccattttgagcatgacttttcttgatgtctgagagttattttgggtaccttttagggaggaatgccttttgcaataatgtatcccttccctgattgagggtgggtgggtggacccaggctccctttgcacacggagcagctacttctaagccatatcgactgttctgcagaggattggtgtgtgctgcctcaggaggggagggctgagaggaggggaggggtctccgtcctactgttctccagagggcatttccccttgcgccttctcccacagggcccagcccctctcccctgccccagtccccaggggtactctggattgagcagtgctcctgtgggggagcctgtaaatgcaggctcagtggaccactggtgactgggctcatggctccaagtcagagtttccttggtgcccccagagacaggagcacaagtgggatctgacctggtgagattattctgatgacctcatcaaaaattgacaataccaatgttca

SEQ ID NO: 25916 - DNA, 168 bp, Macaca Mulatta
agggggacgaactcactctggccgcacacacctgcggttccaaggaatcttcccagggccactcctagcgctgccagacatgctggagccaggagcgttatcaacacaaggactgctgatgaggggagtggaggcgaggtgggccgtgattggtgggctcaggggaca

SEQ ID NO: 25917 - DNA, 921 bp, Macaca Mulatta
ctgtctttctgggcaagtgccaagcaactgatcgcctttgacccctaggaaagaaaaagaagaaaacccgaggtgatcattttaaacttcgcttccgaaaaaactttcaggccctgctggaggagcaggtgagaggagggtcggcctgggaggacctcacagggaaggggtgagcctggccccagcaggtgtttgctgcgcgggtgggtggaggagtcttagagccggccccttgtctctgcagaacttgagtgtggccgagggccccaactacctgacggcctgtgcgggtcccccatcgcggccccagcgccccttctgtgctgtctgcggcttcccttccccctacacctgtgtcagctgcggtgcccggtactgcaccgtgcgctgtctggggacccaccaggagaccaggtgagtgtgagacctgctgtccacacccactgcctccttcccacagcctccccagacctctctcccctcatcctggcttcctctctgtctgcaggtgtctgaagtggactgtgtgagcctgggcattcccagagaggaagcgccgctgtgcactgcctggccttcagaaggacagtttcatcacccagtggagggggagctcttcctggaccgagggaggagccgctcattcacccaacaaaactgtgtcttatctgccaggaaagagcaacctcactcctgggaacggtctggcaggtaggctgggcccccagtgctgttagaataaagagcctcgtgccggcagcctgcctgtttggtcgtggtgtgtttgaggtgatggcgatgggtcacctgtctctcctgctcatggctccatctcttcctcctgcctcccactcacccctgccactgtctgcccctctgtgtccctgatcatgagagattctgtcccattctcctgccacc

SEQ ID NO: 25918 - DNA, 507 bp, Macaca Mulatta
gagtcatccttaccaaatgcacacagccaaagccactcagatacaaacgtgtacgacatagcagtaaatggcaaagaggagaggctgtgcagctagacccacactcatatgagtcacttacctgtatccctgctgctctcacagcctcgatttcctctctctatgtcctgtatcagtgctgtcctgggacagaagatcaggttttatgaacaagcggaactgggtttcagtttcccagtgacagggtagataggtctgttaccaataactaacccctgcactcccccaggccttcctcctccactcaggccacatgtgactctcaccccccaccacttcccacctgcttccctgggacctgttggctatggtggtggctgccatgcaggcatggggtgccggggtcccagccacagtaggggtctcgggccaagattgcgtcttagcaggatcggtattgttaagcactggaaaatggtagctgaatgactccgctaagagcccccc

SEQ ID NO: 25919 - DNA, 1921 bp, Macaca Mulatta
gggacgcaaaacaaattgcaatataatgtgataagttctttaaaagaggtaagagcaacgtgctttgggagcagagaagagggagaaagcagtatcctgcctggatgagccaggggacacagaagacaagcccactatctcatttaatctttacaacactcttggcaaggttccctggttgtgaaaatacatgagataagtcatgaaggtcactatcatcctccttctgcttgcacaagtttcctgggccggaccgtttcaacagagaggcttatttgactttatgctagaagatgaggcttctgggataggcccgagaacttcctgatgaccgcgactatgagccccctctaggcccagtgtgccccttccgctgtcaatgccatcttcgagtggtccagtgttctgacttgggtctggacaaagtgccaaaggatcttccccctgacacaactctgctagacctgcaaaacaacaaaataactgaaatcaaagatggagactttaagaacctgaagaaccttcacgcattgattcttgtcaacaataaaattagcaaaattagccctggagcatttacacctttggtgaagttggaacgactttatctgtccaagaatcagctgaaggaattgccagaaaaaatgcccaaaactcttcaggagctgcgtgcccatgagaatgagatcaccaaagtgcgaaaaactactttcaatggactgaaccagatgattgtcatagaactgggcaccaatccgctgaagagctcaggaattgaaaatggggctttccagggaatgaagaagctctcctacatccgcattgctgataccaatatcaccagcattcctcaaggtcttcctccttcccttactgaattacatcttgatggcaacaaaatcagcagagttgatgcagctagcctgaaaggactgaataatttggctaagttgggattgagtttcaacagcatctctgttgtcgacaatggctctctggccaacacgcctcatctgagggagcttcacttggacaacaacaagcttaccagagtacctggtgggctggcagagcataagtacatccaggttgtctaccttcataacaacaatatctctgtagttggatcaagtgacttctgcccacctggacacaataccaaaaaggcttcttattcgggtgtgagtcttttcagcaacccggtccagtactgggagatacagccatccaccttcagatgtgtctacgtgcgctctgccattcaactcggaaactataagtaattctcaagaaagccctcatttttataacctggcaaaatcttgttaatgtcattgctaaaaaataaataaaagctagatactgggaaacctaactggcaatgtgggatgttttacccacatgacttttttatgcataaagcctcaaattttcccagttttaagtaaatttgccctacaataaaaaagaaaattttgggcctgcccattttttcaaaatacatcctttttgaaaacctttttcttgttggatggtttcaactggaggctatttagaagaataattaattatttttcctctaatcttttccacacctacaaaatggttataaaaacttttgggggaagcttaaaacaaataatctttggttcccaagttaatttctatttctcaaaagcctctttctcccttttttttgtaatttctccccgggaacaaaaaaatttcaataacgaaagttattggatagtccctccccggtaaaatgtccatttggagacccagctttaagccttcccctttgcgaagcataaaaggttcataaatggcgccaaaacaacatagacctccttggtaataaatcccccccaaattattaaacagggttaatacctccacttttaaaaaggttggggtaatc

SEQ ID NO: 25920 - DNA, 175 bp, Macaca Mulatta
agcaaaatgatgcttcaacacccaggccaggtctctgcctcggaagtgagtgcttctgccatcgtcccctgcctgtcccctcctgggtcactggtgtttgaggattttgccatcctgacgccctttgtcaaggaagagctgaggtttgccatccagaacaagcacctctgccacc

SEQ ID NO: 25921 - DNA, 493 bp, Macaca Mulatta
ttggggtccagataagaccatcagctatgtgggttgtgccatccagttgtactttgtcttggccctgggaggggtggagtgtgtcctcctggctgtcatggcatatgaccgctatgctgcagtctgcaaacccctgcactacgctgtcatcatgcacccatgtctctgtggacagctgacttcagtggcatggctgagtggctttggcaattctctcataatggcactccagacattgatgctaccccgctgtttttacagacgggtggaccactttctctgtgagatgccagcactaattggtatggcctgtgtagacaccacgatgcttgaggcactggcttttgccctggcaatctttatcatcctggcaccactcatcctcattctcatttcttatggttacattgcaggaacaatacttagaatcaagtcagctgctgggcaaaagaaagccttcaacacttgcagctcccatctaatttgtgtctct

SEQ ID NO: 25922 - DNA, 614 bp, Macaca Mulatta
atggtggacatgggggccctggacaacctgatcgccaacacggcctacctgcaggcccggaagccttcggactgcgacagcaaggagctgcagcggcggcggcgcagcctggccctgcctgggctgcagggctgcgcggagctccgccagaagctgtccccgaacttccacagcctgtgtgagcagcagcccattggtcgccgcctcttccgtgacttcctagccactgtgcccacgttccgtgaggcggcaaccttcctagaggacgtgcagaactgggagctggccgaggagggacctaccaaggacagcacgctgcaggggctggtggccgcttgtgcgagtggccctgccccagggaacccacaccccttcttcagccaggctatggccaccaagtgccaagcagccaccaccgaggaagaccgagtggccgcagtgacactggccaagtctgaggccatggccttcttgcaagagcagccctttaaggatttcctgaccagccccttctatgacaagtttttgcagtggaaactctttgagatgcaaccggtgtcagacaagtacttcaccgagttcagagtgctggggaaaggtggttttggggaggt

SEQ ID NO: 25923 - DNA, 1090 bp, Macaca Mulatta
  misc_feature (1)...(1090): n = A,T,C or G
ccagggaaccagggaggaggatgatgtagtgagcgaggatctggtacaacaggatgtccagnnnnnnnnnnnnnnnnnnnnnnnnnnnnnnnnnnnnnnnnnnnnnnnnnnnnnnnnnnnnnnnnnnnnnnnnnnnnnnnnnnnnnnnnnnnnnnnnnnnnnnnnnnnnnnnnnnnnnnnnnnnnnnnnnnnnnnnnnnnnnnnnnnnnnnnnnnnnnnnnnnnnnnnnnnnnnnnnnnnnnnnnnnnnnnnnnnnnnnnnnnnnnnnnnnnnnnnnnnnnnnnnnnnnnnnnnnnnnnnnnnnnnnnnnnnnnnnnnnnnnnnnnnnnnnnnnnnnnnnnnnnnnnnnnnnnnnnnnnnnnnnnnnnnnnnnnnnnnnnnnnnnnnnnnnnnnnnnnnnnnnnnnnnnnnnnnnnnnnnnnnnnnnnnnnnnnnnnnnnnnnnnnnnnnnnnnnnnnnnnnnnnnnnnnnnnnnnnnnnnnnnnnnnnnnnnnnnnnnnnnnnnnnnnnnnnnnnnnnnnnnnnnnnnnnnnnnnnnnnnnnnnnnnnnnnnnnnnnnnnnnnnnnnnnnnnnnnnnnnnnnnnnnnnnnnnnnnnnnnnnnnnnnnnnnnnnnnnnnnnnnnnnnnnnnnnnnnnnnnnnnnnnnnnnnnnnnnnnnnnnnnnnnnnnnnnnnnnnnnnnnnnnnnnnnnnnnnnnnnnnnnnnnnnnnnnnnnnnnnnnnnnnnnnnnnnnnnnnnnnnnnnnnnnnnnnnnnnnnnnnnnnnnnnnnnnnnnnnnnnnnnnnnnnnnnnnnnnnnnnnnnnnnnnnnnnnnnnnnnnnnnnnnnnnnnnnnnnnnnnnnnnnnnnnnnnnnnnnnnnnnnnnnnnnnnnnnnnnnnnnnnnnnnnnnnnnnnnnnnnnnnnnnnnnnnnnnnnnnnnnnnnnnnnnnnnnnnnnnnnnnnnnnnnnnngactatcacaagtccctggaggatgctctgagctcagacacatccggccacttcaggaggatcctcatttctctggccacgnggggaatcgtgaggagggaggagaaaacctggaccaggcacgggaagatgcccagg

SEQ ID NO: 25924 - DNA, 378 bp, Macaca Mulatta
  misc_feature (1)...(378): n = A,T,C or G
ggggggatggcgcatgcatgggaggaattcatcttcagtctaccagcccctgctgtgtcggatacacactcgaatcattgaagatccaagtgtgatttgaattctgtgatattttcacactggtaaatgttacctctattttaattactgctataaataggtttatattattgattcacttactgactttgcatttttgtttttaaaaggatgtataaatttttacctgtttaaataaaattttaatttcaaatgtagtggtggggcttctatttttgatgcactgaatttttgtgtaataaagaacgtaattgggctctaagccnnnnnnnnnnnnnnnnnnnnnnnnnnnnnnnnnnnnnnnnnnnnnnnnnnnnc

SEQ ID NO: 25925 - DNA, 799 bp, Macaca Mulatta
  misc_feature (1)...(799): n = A,T,C or G
gcttatcaaccatattcaaataccactgtttcagtctgttactccaaaaaaatggcatctcgtccagccagacaacccacctctttncacaggcccgaggtcctgagtggctctttggagtagctgtatcttggatcttgatgctccaagagtgaaacagtttcaactatggagttcagatcttgagccaaaaatctttcagcagctggtacaaaaaaatctgctgtaaaaccatttacaatggtaccagccagaaatgtgataacttgtgtacattcagatttctgggttaccttaatggaactcttacacttactacctagcacaaggcttggacaaacacaagtaccttacattatctgcataaaagaatgagtagaagtagaattctggagggaatccaacctgacccaaatgtactttttactggaaaacaaaagcatttgaggaaatgctgtgtctgtggatgatttacctgccaataatgaacggcagagtaaataatgtagttttatttcccatgtgacctgcaggtaaatgaagaaggcagtgaagcagctgcaagtaccgccattgggattgctggccgttcgctaaaccccaacagggtgaccttcaaggccaacaggcctttcctggtttttataagagaagttcctctgaacactattatcttcatgggcagagtagccaacccttgtgtgagctaaactgttcttattctttgtacctcttcatgttttggtttgtgaatagaagtaaaaataaatacaactaatgccatcttacattataaatg

SEQ ID NO: 25926 - DNA, 608 bp, Macaca Mulatta
  misc_feature (1)...(608): n = A,T,C or G
caggtgtattccaagcctgagcaccacgcagaaatgtgcttcctctctcggttctgtggcaaccagctgcctgcttacaagcgcttccagatcacctggtttgtatcctggaccccctgcacagactgtgtggcgaaggtggccgaattcctagctgagcaccctaatgtcaccctgaccatctctgccgcccgcctctactactactgggaaacagattatcgcagggcgctctgcaggctgcgtcaggcaggggcccgagtgaagatcatggannnnnnnnnnnnnnnnnnnnnnnnnnnnnnnnnnnnnnnnnnnnnnnnnnnnnnnnnnnnnnnnnnnnnnnnnnnnnnnnnnnnnnnnnnnnnnnnnnnnnnnnnnnnnnnnnnnnnnnnnnnnnnnnnnnnnnnnnnnnnnnnnnnnnnnnnnnnnnnnnnnnnnnnnnnnnnnnnnnnnnnnnnnnnnnnnnnnnnnnnnnnnnnnnnnnnnnnnnnnnnnnnnnnnnnnnnnnnnnnnnnnnnnnnnnnnnnnnnnnnnnnnnnnnnnnnnnnnnnnnnnnnnnnnnnnnnnnnnnnnnngcagaaatgtgcttcctctctcggttctgt

SEQ ID NO: 25927 - DNA, 206 bp, Macaca Mulatta
cctaagccaatgtacctaacctaaaaggaagtgaacgaaaataccacctaatcctgcctgccacggaactcctgtcccaccatctgaaggcaacaaagcctctcaccagggttacctgggtgtttacaactcctagaatccttttctgccttttggaccctatatctgttttcctttgtctgtcctttaagatttcaactcccttg

SEQ ID NO: 25928 - DNA, 827 bp, Macaca Mulatta
cccacacccccactccccaccttttaatgttaagcatttggcattcatccttccagccctttcttggtggaaatgcagcctgaatgcaccagtatgcaaagtttccagctctgtccatccagctggtggtgtggaagccccaccctgatttgtggggactccatcctgactggttggtgcttgcatctctcctgcctacatataacttaccattttactttctctttccatcaacaacgtatcctgtgcatctttccatgccagtgtgtataaatgtaccttgctggtattcactgctccatggtgtgccagtctgggtgcattgtcataccttacatgttgcgagacttcttgccccgggtgacaggtgtgtccttcctttcactaaaaggtcctgttgtccccttttcttctttagaatctgaaggcagctgatagtgaccccacggccccgccttatgattctctgctcgtgtttgactatgaaggaagcggttccgaagctgctagtctgagctccctgaactcttcagagtcagacaaagaccaggactatgattacttgaatgaatggggcaatcgcttcaagaagctggcagacatgtacggaggcggcgaggatgactaggggactcgagagaggcggaccctagacctctgtgctgggaaatgcagagatcatgttgctggtggtttttcagctcccttcccttgagatgagtttctgggaaaaaaagagactggtcagtgatgcagttagtatagctttatagtctttccactttatagctgtaatcgatgtgtgttagaaaagttttgacttattc

SEQ ID NO: 25929 - DNA, 892 bp, Macaca Mulatta
  misc_feature (1)...(892): n = A,T,C or G
gggacgttagggctctttcccatcttgcaagatggcgggtgaaaaagttgagaagccagatactaaagagaagaaacccgaagccaagaaggctgatgctggtggcaaggtgaaaaagggtaacctcaaggctaagaagcccaagaaggggaagccccattgcagccgcaaccctgtccttgtcagaggaattggcaggtattcccgatccgccatgtattccagaaaggccatgtacaagaggaagtactcagccgctaaatccaagnnnnnnnnnnnnnnnnnnnngaaggttcttgcaactcttacaaaaccagttggtggtgacaagaacggcggtacccgggtggttaaacttcgcaaaatgcctagatattatcctactgaagatgtgcctcgaaagctgttgagccacggcaaaaaacccttcagtcagcacgtgagaaaactgcgagccagcattacccccgggaccattctgatcatcctcactggacgccacagggggcaagagggtggttttcctgaaagcagctgggctagtgggcttgttacttggtgaactgggaccctctgggtcctcaaatcgaagtttcctcctaacgaaaaacacccccacgaaaattttgttcatttgcccacctcaacccaaaaattccgatatctagccagttggcccaaaaatcccccaaaaacattctttaaccggaatggctttaacgtttccaatggaaaagaaagaaagcctgccgggaaaagccccagaaaccccccgggaaaagggggaaaattctttcggaccccccggaaagaaagaaagaaattatcccgagaattcatccgaaacccaccgccgcaagaaattttttatctccagaaaagggctgttggt

SEQ ID NO: 25930 - DNA, 1889 bp, Macaca Mulatta
  misc_feature (1)...(1889): n = A,T,C or G
ttgcacacaagtgaactcaatgatggctatgattggggtcgtcttaatcttcagtcagtgaccgaagagagctcccttgatgacttccttgctactgcagaacttgcgggaacagagtttgtagcnnnnnnnnnnnnnnnnnnnnnnnnnnnnnnnnnnnnnnnnnnnnnnnnnnnnnnnnnnnnnnnnnnnnnnnnnnnnnnnnnnnnnnnnnnnnnnnnnnnnnnnnnnnnnnnnnnnnnnnnnnnnnnnnnnnnnnnnnnnnnnnnnnnnnnnnnnnnnnnnnnnnnnnnnnnnnnnnnnnnnnnnnnnnnnnnnnnnnnnnnnnnnnnnnnnnnnnnnnnnnnnnnnnnnnnnnnnnnnnnnnnnnnnnnnnnnnnnnnnnnnnnnnnnnnnnnnnnnnnnnnnnnnnnnnnnnnnnnnnnnnnnnnnnnnnnnnnnnnnnnnnnnnnnnnnnnnnnnnnnnnnnnnnnnnnnnnnnnnnnnnnnnnnnnnnnnnnnnnnnnnnnnnnnnnnnnnnnnnnnnnnnnnnnnnnnnnnnnnnnnnnnnnnnnnnnnnnnnnnnnnnnnnnnnnnnnnnnnnnnnnnnnnnnnnnnnnnnnnnnnnnnnnnnnnnnnnnnnnnnnnnnnnnnnnnnnnnnnnnnnnnnnnnnnnnnnaggaagaggcaaacaaagatgatagacaaagcaacacagctgagtttgaacactccagttttgacgaggctgaaatttctcacagtgagaccgaacatctcccagccagggattctccttcacttagtgaaaatctcacaactgatgaagatgacagtgagtatgaggactgtccagaggaggaggaagatgactggcagacatgctcagaagaagacggtcccgaggaagaggactgtggccaggactggaaggaaagctctgctgcagattctgaggctcagagcaggaagaccccacagaagaggcagatacacaattttagccatctcgtatccaagcaggagttactagagctctttaaggaactacatacggggagaaaggtgaaagatgggcaacttacgattggactggnnnnnnnnnnnnnnnnnnnnnnnnnnnnnnnnnnnnnnnnnnnnnnnnnnnnnnnnnnnnnnnnnnnnnnnnnnnnnnnnnnnnnnnnnnnnnnnnnnnnnnnnnnnnnnnnnnnnnnnnnnnnnnnnnnnnnnnnnnnnnnnnnnnnnnnnnnnnnnnnnnnnnnnnnnnnnnnnnnnnnnnnnnnnnnnnnnnnnnnnnnnnnnnnnnnnnnnnnnnnnnnnnnnnnnnnnnnnnnnnnnnnnnnnnnnnnnnnnnnnnnnnnnnnnnnnnnnnnnnnnnnnnnnnnnnnnnnnnnnnnnnnnnnnnnnnnnnnnnnnnnnnnnnnnnnnnnnnnnnnnnnnnnnnnnnnnnnnnnnnnnnnnnnnnnnnnnnnnnnnnnnnntgcggggattcatgacagcgcatggccagccagaccagcctcgatctgcgcgctacatcctgaaggactatgtcannnnnnnnnnnnnnnnnnnnnnnnnnnnnnnnnnnnnnnnnnnnnnnnnnnnnnnnnnnnnnnnnnnnnnnnnnnnnnnnnnnnnnnnnnnnnnnnnnnnnnnnnnnnnnnnnnnnnnnnnnnnnnnnnnnnnnnnnnnnnnnnnnnnnnnnnnnnnnnnnnnnnnnnnnnnnnnnnnnnnnnnnnnnnnnnnnnnnnnnnnnntccaggctgtgatgggttacaagcccgggagtggtgtagtgactgcagccactgtgagctctgagaatggggcggggaagccctggaaaaaacatggcaacagaaannnnnnnnnnnnngtcgcagactctacaagcacctggatctgtg

SEQ ID NO: 25931 - DNA, 2876 bp, Macaca Mulatta
  misc_feature (1)...(2876): n = A,T,C or G
ggagcttggaggagagagcacgaccccctcctgctgcaggatgttgcccttgttcgaggcagagacaggaggcctcagacagctgtgacagccctggagctctcctaccacatctgagccagagggaaaactttggagaagcagaagcccaaagacactgctgggagattggtctgtgctctgggagaaccctaggttgtgtttcccgtgtacaagtcacggatcttctggaaggtaccaccgctcccagccccgcttggctgagggctgagggccacaggttttcgggactgtgcctgtggttggaggctgtggactcaagtgcgtctggcccaggactttcacagggctcagggcgggctgggggaaggcccagctgtgaactattataagggggtttcacagtctaggccagcacttcttcccctttcacaggcaaacgtgacattccttttcagcacctatactcaccccagttacatcaaggcggaccnnnnnnnnnnnnnnnnnnnnnnnnnnnnnnnnnnnnnnnnnnnnnnnnnnnnnnnnnnnnnnnnnnnnnnnnnnnnnnnnnnnnnnnnnnnnnnnnnnnnnnnnnnnnnnnnnnnnnnnnnnnnnnnnnnnnnnnnnnnnnnnnnnnnnnnnnnnnnnnnnnnnnnnnnnnnnnnnnnnnnnnnnnnnnnnnnnnnnnnnnnnnnnnnnnnnnnnnnnnnnnnnnnnnnnnnnnnnnnnnnnnnnnnnnnnnnnnnnnnnnnnnnnnnnnnnnnnnnnnnnnnnnnnnnnnnnnnnnnnnnnnnnnnnnnnnnnnnnnnnnnnnnnnnnnnnnnnnnnnnnnnnnnnnnnnnnnnnnnnnnnnnnnnnnnnnnnnnnnnnnnnnnnnnnnnnnnnnnnnnnnnnnnnnnnnnnnnnnnnnnnnnnnnnnnnnnnnnnnnnnnnnnnnnnnnnnnnnnnnnnnnnnnnnnnnnnnnnnnnnnnnnnnnnnnnnnnnnnnnnnnnnnnnnnnnnnnnnnnnnnnnnnnnnnnnnnnnnnnnnnnnnnnnnnnnnnnnnnnnnnnnnnnnnnnnnnnnnnnnnnnnnnnnnnnnnnnnnnnnnnnnnnnnnnnnnnnnnnnnnnnnnnnnnnnnnnnnnnnnnnnnnnnnnnnnnnnnnnnnnnnnnnnnnnnnnnnnnnnnnnnnnnnnnnnnnnnnnnnnnnnnnnnnnnnnnnnnnnnnnnnnnnnnnnnnnnnnnnnnnnnnnnnnnnnnnnnnnnnnnnnnnnnnnnnnnnnnnnnnnnnnnnnnnnnnnnnnnnnnnnnnnnnnnnnnnnnnnnnnnnnnnnnnnnnnnnnnnnnnnnnnnnnnnnnnnnnnnnnnnnnnnnnnnnnnnnnnnnnnnnnnnnnnnnnnnnnnnnnnnnnnnnnnnnnnnnnnnnnnnnnnnnnnnnnnnnnnnnnnnnnnnnnnnnnnnnnnnnnnnnnnnnnnnnnnnnnnnnnnnnnnnnnnnnnnnnnnnnnnnnnnnnnnnnnnnnnnnnnnnnnnnnnnnnnnnnnnnnnnnnnnnnnnnnnnnnnnnnnnnnnnnnnnnnnnnnnnnnnnnnnnnnnnnnnnnnnnnnnnnnnnnnnnnnnnnnnnnnnnnnnnnnnnnnnnnnnnnnnnnnnnnnnnnnnnnnnnnnnnnnnnnnnnnnnnnnnnnnnnnnnnnnnnnnnnnnnnnnnnnnnnnnnnnnnnnnnnnnnnnnnnnnnnnnnnnnnnnnnnnnnnnnnnnnnnnnnnnnnnnnnnnnnnnnnnnnnnnnnnnnnnnnnnnnnnnnnnnnnnnnnnnnnnnnnnnnnnnnnnnnnnnnnnnnnnnnnnnnnnnnnnnnnnnnnnnnnnnnnnnnnnnnnnnnnnnnnnnnnnnnnnnnnnnnnnnnnnnnnnnnnnnnnnnnnnnnnnnnnnnnnnnnnnnnnnnnnnnnnnnnnnnnnnnnnnnnnnnnnnnnnnnnnnnnnnnnnnnnnnnnnnnnnnnnnnnnnnnnnnnnnnnnnnnnnnnnnnnnnnnnnnnnnnnnnnnnnnnnnnnnnnnnnnnnnnnnnnnnnnnnnnnnnnnnnnnnnnnnnnnnnnnnnnnnnnnnnnnnnnnnnnnnnnnnnnnnnnnnnnnnnnnnngctcactcctctaatctcctctgatcctactgcaccagagaaactaagccagaattcaacgaagtctcagtctagataaacaagacaaaagaaataagatttgaggagaagatctcaaagagaaagttgctgtgtttgtccaagacctttgtcccatccatgtatcatccctcaagtaaatgcttcttgttcacttgttcattagatttcaagtgcagtccctggcctgtaagtccctacaattacaagtttctcttatcattgcacattcttcatcaggaagatgccggaggagctcagccaacagttcctcatcagtagcagattcttcagaacttgggcactacacagatgcccttgagctctttgaatacaggttgatttttagaaaatacattaagacagaacttaaaaacaatagattgactaattgtagtccaaagacgagtgtacctctaaccacaattttcatttatttttaaatgtttccttcatggcctttcttgtggctccccctatgcagtttgtgtatttgttgaaaactttatgtgtttttaacatggtttttgccaaacttggtttttctgagaccgtcttttctcataggctcagttttaccgtcctatctgcagtcggctactttcggtggcagaagaggccacatctgcttcctgtaagccctctgggcagaagcatgcggtggtgtctcttcctgatctgggcccaggggctgaggcaggctcccctcgcctcaggn

SEQ ID NO: 25932 - DNA, 334 bp, Macaca Mulatta
ggtctctgaggttccaccaaaatatggaacttgattttggacactttgacgaaagagataagacatccaggaacatgcgaggctcccggatgaatgggttgcctagccccactcacagcgcccactgtagcttctaccgaaccagaaccttgcaggcactgagtaatgagaagaaagccaagaaggtacgttttctccgcaatgggggaccgctacctcaaggggaatgtgtacgctgtgtcctctgaccgttttcgcagctttgacgccttgctgggcgaactgacacgatctctgtctgaaaacctcaacctgcctcaggggagtgcgttac

SEQ ID NO: 25933 - DNA, 1128 bp, Macaca Mulatta
  misc_feature (1)...(1128): n = A,T,C or G
gggggatactacttcaatcatccctccagagtccgtcaccatttcaacagacacgtccaagaaccatttatccctgaaactgagctctgtgaacgccgcagacacggccgtctattattgtgcgagagatcgaggagcagcagatatnnnnnnnnnnnnnnnnnncnnnnnnnnnnnnnnngcctccaccaagggcccatcggtcttccccctggcgccctcctccaggagcacctccgagagcacagcggccctgggctgcctggtcaaggactacttccctgaacccgtgaccgtgtcgtggaactcaggctccctgaccagcggcgtgcacaccttcccggctgtcctacagtcctcagggctctactccctcagcagcgtggtgaccgtgccctccagcagcttgggcacccagacctacgtctgcaacgtagttcatagagcccagcaacaccaaggtggacaagagagttggtgagaggccagcgagggagggggggtgtctgctggaagccaggctcggccctcctgcctggacaaaccctggctgtgcagccccagcccagggcagcagggcaggccccgtctgtctcctcacccagaggcctctgcccaccccactcatgctcagggagacagtcttctggctttttccaccaggctctgagcaggcacaggctggatgcccctaccccaggccctgcacacacaggggcaggtgctgggctcagacctgccaagagccatatctgggaggaccctgctcctgacctaagcccaccccaaaggccaaactccactccctcagctcagacaccttctctcctcccacatcccagtaactcccaatcttctctctgcagagttcacaccatgatgtggtggcacaactcccacgtgcccaccgtgcccaggtaagccagcccaggcctcgccctccagctcaaggtgggacaagtgccctagagtggcctgtgtccagggacaggccccgcctgggtgctgacatgcccacctccatctcttcctcagcacctgaactcctggggggaccgtcagtcttcctcttccccccaaaacccaaggacaccctcatgatttcccggacccctgaggtcacatgcg

SEQ ID NO: 25934 - DNA, 124 bp, Macaca Mulatta
gatgcgaagcgcaagttcaacacagatccatacgtccgtgaatttggaatcatggtcaaagatgagatgacggacgtgactgggcgggtgctgcagccgccctcccatccttctacgggggcag

SEQ ID NO: 25935 - DNA, 864 bp, Macaca Mulatta
tggccagttccttaccttcatcctcctccccattctctgacgcccccctggaagacagcgcagcagacgcacttgcgtcaccaggaccataaccgtgcaaaccaccaaatcctctgtgtccccactcctccttcagggactggcctgagaccagggcacagggtaggggggatcccaacgctcctccctgtggaggaggcagttggggaaactaggatccagccaaggccttgggggagacccgcatgttgcttggtctgctcaaatcggagtcaagtttcagtgtcttttccctccctcagcccaaccctccaaggccttgtgtctccaaagcatgctgactgcatctgaaaggcccctactcaccatggtctgccctcaccccacatgtgcgtgcacgcctgtacatgcgctgccctcagacatgcaagtgaaaggaggaggcttctgtgtaaatgcactttcttcctcccctctttctccataagaccccaggcggaggtgggtgcctcccctctcctttgtcactttggtttcctataaatatgtatgtatcgtatgtgcatctttgctattgtaaataactttgaccttttttgttcctgttcctgaagtgctggaggcagttatatggaagaagctgcttagggaagagggggttcacttttatctcctagttaacaacccagctcgaggatcgagcctaaagggggagccaggcctgagtgtccctgtcgctgtgagtgggaaggtcttctggctccccgtcccacctggctccagagcctgccctccacagcttgctgccgggctactccctccctccctggacttctcatctgcacaagatggggaccatgggga

SEQ ID NO: 25936 - DNA, 228 bp, Macaca Mulatta
cacctgtctttccaggtttggtgcacctggacccactcggctgaggctgcggccaccccggctgtgttaatcttatgcctggaggtctgaggtcaccagcaggtggggaaaagaaggggctgtgacaggtgcagacagtcagggaagggctcagattccaaagggtaagtcagggacgccagaccagttcactcacactaggatggacactgacctggtggggaggtt

SEQ ID NO: 25937 - DNA, 419 bp, Macaca Mulatta
  misc_feature (1)...(419): n = A,T,C or G
gtggggacatgattttcgtcaagattacaaaagaatgaatatgcttcgccagaagtttccttctgttccggtgatggctcttacggccacagctaatcccagggtacagaaggacatcctcactcagctgaagattctcagacctcaggtgtnnnnnnnnnnnnnnnnnnnnnnnnnnnnnnnnnnnnnnnnnnnnnnnnnnnnnnnnnnnnnnnnnnnnnnnnnnnnnnnnnnnnnnnnnnnnnnnnnnnnnnnnnatgactcagggataatttactgcctctccaggcgagaatgtgacaccatggccgacacattacagagagatgggcttgctgctcttgcttaccatgctggcctcagtgattctgccagagatgaagtgcagcagaagtggattaatcaggatggctgtcagg

SEQ ID NO: 25938 - DNA, 818 bp, Macaca Mulatta
gggcctcaaaacagaagcagcttcttttgtctcccagcagtagtgagccactcagtcttttccacaggaagttaggagcctacattccttgagtcaggagctcattacagaaaaaccccgtttccctgaacttttggctaacaaaaattaatgtaactgacatgcatattgattctgaaattttttcgtaagttttttttcattttttttgaatgagttttaattaattttttagatgaccaatcttgcagggcaggggatgcccagaagagtggtgagatagtacaatacttattccctcatcctttcaggttttcaggttgcccatttatattcatttgcatatcatttgactgtctcactttttacccagaacagtaacaacccacaccatcttccttcaggaacttcccaactggcactctgtgggtgctacacagaatgcaatttaatggatatttctcagcctggttcaggataaattgaacctttgattccagaaagtatatattgaagtgtgggatagattatgattagggggaggtttggagacaaaagctgtaaattactatggctgatttatttctgctatatacatatatattttttgcttttgtgtaatcctttatagggaaactaagcattggaatttttttttaaccaatctaaaaaagcactatgaactgcagggtgtttgacttttcaaaaaaatatttttggaatggtggaaatctttccggttttggggaatactgggaaagcttgcaaatcttttgcttaggaccccaattaaaattataaaacctttttggaggggg

SEQ ID NO: 25939 - DNA, 901 bp, Macaca Mulatta
ggaagcattgtgtatctacgcatagtggccattacgccggggattccagcggcggacagcacccgggccgagatgtctcgctcagtggccttagccgtgctggcgctactctctctttctggcctggaggctatccagcgtactccaaagattcaggtttactcacgccatccaccagagaatggaaagccaaatttcctgaattgctatgtgtctggatttcatccatctgatattgaagttgacttactgaagaatggagagaaaatgggaaaagtggagcattcagacttgtctttcagcaaagactggtctttctatctcttgtactacactgaattcacccccaatgaaaaagatgagtatgcctgccgtgtgaaccatgtgactttgtcagggcccaggacagttaagtgggatcgagacatgtaagcagcatcatggaggtttgaagatgccgcatttggattggatgaattccaaattctgcttccttggttttttaatattgatatgcttaaccagttttagcaaaaaatgccgaagttttaataatggttaacacagggcatgaactttctttaaaaatctaaccttggaggggcatcccccccgtttggaaggtattcggggccagccttactttttaggaagggctgggcaaacttttcaaggtgggggaaccaaaaaaattcgtcaattattccaaaaattcaccattccttggggcagattctggaccctcgttataatccctttggaacacccaacagtcttgtgttaaaaatttatttgctgtgcgctttattgagatttacacctttccacagattttctccaaccgggcggcttttgaaatatttgagggggggataaaattttttgaagaatcagagcgggg

SEQ ID NO: 25940 - DNA, 177 bp, Macaca Mulatta
  misc_feature (1)...(177): n = A,T,C or G
tgcggaggaagcacatgtgggcgctgggctgggcgtgcggcggcctcctcttcttgagatgcagcannnnnngtgggccaagcgccgggacgtgctgcacatgcctggtttcctggcgggtcagtgcgacttgtccaagtaaatctcgctgctctccaagcaccgagggaccaagaa

SEQ ID NO: 25941 - DNA, 5048 bp, Macaca Mulatta
  misc_feature (1)...(5048): n = A,T,C or G
agaaaggaaataccgctcttcacattgcatctttggctggacaagcagaagttgtcaaagttcttgttaaggaaggagccaatattaatgcacagtctcagnnnnnnnnnnnnnnnnnnnnnnnnnnnnnnnnnnnnnnnnnnnnnnnnnnnnnnnnnnnnnnnnnnnnnnnnnnnnnnnnnnnnnnnnnnnnnnnnnnnnnnnnnnnnnnnnnnnnnnnnnnnnnnnnnnnnnnnnnnnnnnnnnnnnnnnnnnnnnnnnnnnnnnnnnnnnnnnnnnnnnnnnnnnnnnnnnnnnnnnnnnnnnnnnnnnnnnnnnnnnnnnnnnnnnnnnnnnnnnnnnnnnnnnnnnnnnnnnnnnnnnnnnnnnnnnnnnnnnnnnnnnagagtggttttacccctttgcacatagctgcacattatggaaatgtcaacgtggcaactcttcttctaaaccggggagctgctgtggacttcacagccaggnnnnnnnnnnnnnnnnnnnnnnnnnnnnnnnnnnnnnnnnnnnnnnnnnnnnnnnnnnnnnnnnnnnnnnnnnnnnnnnnnnnnnnnnnnnnnnnnnnnnnnnnnnnnnnnnnnnnnnnnnnnnnnnnnnnnnnnnnnnnnnnnnnnnnnnnnnnnnnnnnnnnnnnnnnnnnnnnnnnnnnnnnnnnnnnnnnnnnnnnnnnnnnnnnnnnnnnnnnnnnnnnnnnnnnnnnnnnnnnnnnnnnnnnnnnnnnnnnnnnnnnnnnnnnnnnnnnnnnnnnnnnnnnnnnnnnnnnnnnnnnnnnnnnnnnnnnnnnnnnnnnnnnnnnnnnnnnnnnnnnnnnnnnnnnnnnnnnnnnnnnnnnnnnnnnnnnnnnnnnnnnnnnnnnnnnnnnnnnnnnnnnnnnnnnnnnnnnnnnnnnnnnnnnnnnnnnnnnnnnnnnnnnnnnnnnnnnnnnnnnnnnnnnnnnnnnnnnnnnnnnnnnnnnnnnnnnnnnnnnnnnnnnnnnnnnnnnnnnnnnnnnnnnnnnnnnnnnnnnnnnnnnnnnnnnnnnnnnnnnnnnnnnnnnnnnnnnnnnnnnnnnnnnnnnnnnnnnnnnnnnnnnnnnnnnnnnnnnnnnnnnnnnnnnnnnnnnnnnnnnnnnnnnnnnnnnnnnnnnnnnnnnnnnnnnnnnnnnnnnnnnnnnnnnnnnnnnnnnnnnnnnnnnnnnnnnnnnnnnnnnnnnnnnnnnnnnnnnnnnnnnnnnnnnnnnnnnnnnnnnnnnnnnnnnnnnnnnnnnnnnnnnnnnnnnnnnnnnnnnnnnnnnnnnnnnnnnnnnnnnnnnnnnnnnnnnnnnnnnnnnnnnnnnnnnnnnnnnnnnnnnnnnnnnnnnnnnnnnnnnnnnnnnnnnnnnnnnnnnnnnnnnnnnnnnnnnnnnnnnnnnnnnnnnnnnnnnnnnnnnnnnnnnnnnnnnnnnnnnnnnnnnnnnnnnnnnnnnnnnnnnnnnnnagaatggccttaccccgctccatgttgctgctcattatgacaaccagaaggtggcgctgctgttactggagaagggtgcttcccctcatgccactgccaagnnnnnnnnnnnnnnnnnnnnnnnnnnnnnnnnnnnnnnnnnnnnnnnnnnnnnnnnnnnnnnnnnnnnnnnnnnnnnnnnnnnnnnnnnnnnnnnnnnnnnnnnnnnnnnnnnnnnnnnnnnnnnnnnnnnnnnnnnnnnnnnnnnnnnnnnnnnnnnnnnnnnnnnnnnnnnnnnnnnnnnnnnnnnnnnnnnnnnnnnnnnnnnnnnnnnnnnnnnnnnnnnnnnnnnnnnnnnnnnnnnnnnnnnnnnnnnnnnnnnnnnnnnnnnnnnnnnnnnnnnnnnnnnnnnnnnnnagcttggctacacacctttaaattgtggcctgtcactatggaaatgtgaaaatggtgaactttcttctgaagcagggagcaaatgttaacgcaaaaaccaagnnnnnnnnnnnnnnnnnnnnnnnnnnnnnnnnnnnnnnnnnnnnnnnnnnnnnnnnnnnnnnnnnnnnnnnnnnnnnnnnnnnnnnnnnnnnnnnnnnnnnnnnnnnnnnnnnnnnnnnnnnnnnnnnnnnnnnnnnnnnnnnnnnnnnnnnnnnnnnnnnnnnnnnnnnnnnnnnnnnnnnnnnnnnnnnnnnnnnnnnnnnnnnnnnnnnnnnnnnnnnnnnnnnnnnnnnnnnnnnnnnnnnnnnnnnnnnnnnnnnnnnnnnnnnnnnnnnnnnnnnnnnnnnnnnnnnnnnnnnnnnnnnnnnnnnnnnnnnnnnnnnnnnnnnnnnnnnnnnnnnnnnnnnnnnnnnnnnnnnnnnnnnnnnnnnnnnnnnnnnnnnnnnnnnnnnnnnnnnnnnnnnnnnnnnnnnnnnnnnnnnnnnnnnnnnnnnnnnnnnnnnnnnnnnnnnnnnnnnnnnnnnctacctgagggacaagtgccgtgatggatgactcagtggtgattcccagtcaccanaggtgtcaactctagccaaggaggcagaaaggaattcttatcgcctaagctggggcactgagaacttagacaacgtggctctttcttccagtcctattcattcaggnnnnnnnnnnnnnnnnnnnnnnnnnnnnnnnnnnnnnnnnnnnnnnnnnnnnnnnnnnnnnnnnnnnnnnnnnnnnnnnnnnnnnnnnnnnnnnnnnnnnnnnnnnnnnnnnnnnnnnnnnnnnnnnnnnnnnnnnnnnnnnnnnnnnnnnnnnnnnnnnnnnnnnnnnnnnnnnnnnnnnnnnnnnnnnnnnnnnnnnnnnnnnnnnnnnnnnnnnnnnnnnngtaaacttcacctgccaacggctcctcccccacttaatgagggagaaagtttggtcagccgcattcttcagctggggcctcctggaaccaaattccttgggnggcctgtgatcgtggagatccctcactttgcggctcttcgaggaaaggaaagggaactggtggtcctgcgcagtgagaatggggacagctggaaagagcatttctgtgactacactgaagatgagttgaatgaaattcttaatggcatggatgaagnnnnnnnnnnnnnnnnnnnnnnnnnnnnnnnnnnnnnnnnnnnnnnnnnnnnnnnnnnnnnnnnnnnnnnnnnnnnnnnnnnnnnnnnnnnnnnnnnnnnnnnnnnnnnnnnnnnnnnnnnnnnnnnnnnnnnnnnnnnnnnnnnnnnnnnnnnnnnnnnnnnnnnnnnnnnnnnnnnnnnnnnnnnnnnnnnnnnnnnnnnnnnnnnnnnnnnnnnnnnnnnnnnnnnnnnnnnnnnnnnnnnnnnnnnnnnnnnnnnnnnnnnnnnnnnnnnnnnnnnnnnnnnnnnnnnnnnnnnnnnnnnnnnnnnnnnnnnnnnnnnnnnnnnnnnnnnnnnnnnnnnnnnnnnnnnnnnnnnnnnnnnnnnnnnnnnnnnnnnnnnnnnnnnnnnnnnnnnnnnnnnnnnnnnnnnnncaggtggaaccacccctgctcagtgggaagatattacaggaactacgccattaacatttgtcaatgaatgtgtttcctttacaacaaacgtgtctgccaggtnnnnnnnnnnnnnnnnnnnnnnnnnnnnnnnnnnnnnnnnnnnnnnnnnnnnnnnnnnnnnnnnnnnnnnnnnnnnnnnnnnnnnnnnnnnnnnnnnnnnnnnnnnnnnnnnnnnnnnnnnnnnnnnnnnnnnnnnnnnnnnnnnnnnnnnnnnnnnnnnnnnnnnnnnnnnnnnnnnnnnnnnnnnnnnnnnnnnnnnnnnnnnnnnnnnnnnnnnnnnnnnnnnnnnnnnnnnnnnnnnnnnnnnnnnnnnnnnnnnnnnnnnnnnnnnnnnnnnnnnnnnnnnnnnnnnnnnnnnnnnnnnnnnnnnnnnnnnnnnnnnnnnnnnnnnnnnnnnnnnnnnnnnnnnnnnnnnnnnnnnnnnnnnnnnnnnnnnnnnnnnnnnnnnnnnnnnnnnnnnnnnnnnnnnnnnnnnnnnnnnnnnnnnnnnnnnnnnnnnnnnnnnnnnnnnnnnnnnnnnnnnnnnnnnnnnnnnnnnnnngctgacacagtcagagagggagcaggaactagtttcagacgatgaaagtannnnnnnnnnnnnnnnnnnnnnnnnnnnnnnnnnnnnnnnnnnnnnnnnnnnnnnnnnnnnnnnnnnnnnnnnnnnnnnnnnnnnnnnnnnnnnnnnnnnnnnnnnnnnnnnnnnnnnnnnnnnnnnnnnnnnnnnnnnnnnnnnnnnnnnnnnnnnnnnnnnnnnnnnnnnnnnnnnnnnnnnnnnnnnnnnnnnnnnnnnnnnnnnnnnnnnnnnnnnnnnnnnnnnnnnnnnnnnnnnnnnnnnnnnnnnnnnnnnnnnnnnnnnnnnnnnnnnnnnnnnnnnnnnnnnnnnnnnnnnnnnnnnnnnnnnnnnnnnnnnnnnnnnnnnnnnnnnnnnnnnnnnnnnnnnnnnnnnnnnnnnnnnnnnnnnnnnnnnnnnnnnnnnnnnnnnnnnnnnnnnnnnnnnnnnnnnnnnnnnnnnnnnnnnnnnnnnnnnnnnnnnnnnnnnnnnnnnnnnnnnnnnnnnnnnnnnnnnnnnnnnnnnnnnnnnnnnnnnnnnnnnnnnnnnnnnnnnnnnnnnnnnnnnnnnnnnnnnnnnnnnnnnnnnnnnnnnnnnnnnnnnnnnnnnnnnnnnnnnnnnnnnnnnnnnnnnnnnnnnnnnnnnnnnnnnnnnnnnnnnnnnnnnnnnnnnnnntgtgacaactccaggaacagaagcatcagagactcagaaggctacgacagtacctggctctcccagcaagacacctgaggaagttagcacccctccagaggaggacaggctgtacctccagaccccaacatccagtgagcggggaggctctcccatcatacaagaacccgaagagccctcagagcacagagaggagagctctccgcggaaaaccagcctcgtaatagtggagtctgccgataaccagccagagacccgtgaaagactcgatgaagatgcagcttt

SEQ ID NO: 25942 - DNA, 1394 bp, Macaca Mulatta
  misc_feature (1)...(1394): n = A,T,C or G
tgtcactcggcccgctcggcgcgccccttcccagccgcccttccgtaccggctctcgggctcttccggtctccggccgccacttacctacaggcccttctccggccgcggcccggcgctttccgagtcgcccctacggactggacttgcgcagtgcccgggcaccgggcgcccaacagacactggccatgacgagcggcgccaccaggtaccggctgagctgctcgctccggggccacgagctggacgtacggggcctggtgtgctgcccctttccgccgggggcctttgtgtccgtgtcccgagaccgcaccacccgcctctgggccccagacagnncagtccaaacaggggctttacagaaatgcactgtatgagtggccattccaattttgtatcttgtgtatgcatcataccctcaagtgacatctaccctcatggcctaattgccactggtggaaatgaccacaatatatgcattttctcactggacagtccaatgccactttatattctaaaaggccacaaaaatactnnnnnnnnnnnnnnnnnnnnnnnnnnnnnnnnnnnnnnnnnnnnnnnnnnnnnnnnnnnnnnnnnnnnnnnnnnnnnnnnnnnnnnnnnnnnnnnnnnnnnnnnnnnnnnnnnnnnnnnnnnnnnnnnnnnnnnnnnnnnnnnnnnnnnnnnnnnnnnnnnnnnnnnnnnnnnnnnnnnnnnnnnnnnnnnnnnnnnnnnnnnnnnnnnnnnnnnnnnnnnnnnnnnnnnnnnnnnnnnnnnnnnnnnnnnnnnnnnnnnnnnnnnnnnnnnnnnnnnnnnnnnnnnnnnnnnnnnnnnnnnnnnnnnnnnnnnnnnnnnnnnnnnnnnnnnnnnnnnnnnnnnnnnnnnnnnnnnnnnnnnnnnnnnnnnnnnnnnnnnnnnnnnnnnnnnnnnnnnnnnnnnnnnnnnnnnnnnnnnnnnnnnnnnnnnnnnnnnnnnnnnnnnnnnnnnnnnnnnnnnnnnnnnnnnnnnnnnnnnnnnnnnnnnnnnnnnnnnnnnnnnnnnnnnnnnnnnnnnnnnnnngtgatggcattattagagtgtttacagaatcagaagatcgaacagcaagtgctgaagaaatcaaggcttttgaaaaagagctgtctcatgcaaccattgattctaaaactggcgatttaggggacatcaatgctgagcagcttcctgggagggaacatcttaatgaacctggtannngtactagagaaggacagactcgtctaatcagagatggggagaaagtcgaagcctatcagtggagtgttagtgaagggaggtggataaaaattggtgatgttgttggctcatctggtgctaatcagcaaacatctggaaaagttttatatgaagggaaag

SEQ ID NO: 25943 - DNA, 468 bp, Macaca Mulatta
ccttttcttagctatgagctgatcattgttcctcctcacctcctgccatgatactgtcagttaccttagttagtaagctgaatatttagtagaatatgatgcttctgctcaggaatggcccacaaatctgtaatttgaaatttagcaggaaatgacctttaatgacactacattttcaggaactgaaatcattaaaattttatttgaataattatgtgctgaaatttgagtatctgattttctagaccttccctcctacccctgcccaacctagataagaattatgacatgttctgtgtctattgctattgctatataatgtgatggtcagggaccattttgatgcaaaaatgatctttcagcagtacatttgatgttattttgcacaggctataggtttttgtttgatgagtctttccaaggaactatttttctctgttagacagtatatcaagtataaggtaaacg

SEQ ID NO: 25944 - DNA, 2637 bp, Macaca Mulatta
  misc_feature (1)...(2637): n = A,T,C or G
gttctccttatttttctactcttttgtgggaatgagttgccaagcttttacttcggctgatacctttatacccctgaattctgacgcctctgcaactctgcctctgataatgcatcacagtgctgccgagtgtctaccagtctccaaccatgccaccaatgtgatgtctacagtcccatctattttgtctttgatccaaactcctaaatgtttgtgcacgcatttcttggtgacaacgttgggaaacacagcaacgggacttcattattctgttccttcctgtcattatggaaaccagccatcaacctatggagtgatggcaggtagtttaacccttgtcttttataaatttcctgaccacactttgagtcatggatttcctcctatacaccagcctctcctggcagaggaccccacagctgctgatttcaagcaggaactcaggcggaaaagtaaattggtggaagagccaatagacatggattctccagaaatcagagaactcgaaaagtttgccaacgaatttaaagtgagaagaattaagttaggatacacccaaacaaatgttggggaggccctggcagctgtgcatggctctgaattcagtcaaacaacaatctgccgatttgaaaatctgcagctcagctttaaaaatgcatgcaaactgaaagcaatattatccaaatggctggaggaagctgagcaagtaggagctttgtacaatgaaaaagtgggagcaaatgaaaggaaaagaaaacgaagaacaactataagcattgctgctaaagatgctctggagcgacactttggagaacagaataaaccttcttctcaagagatcatgcggatggctgaagaactgaatctggagaaagaagtagtaagagtttggttttgcaaccggaggcaaagagaaaaacgggtgaaaacaagtctgaatcagagtttattttctatttctaaggagcatcttgagtgcagataagatttttctactgtataatagcctttttttcctgtttcattcctttctcttcctcaagaaaaacagaaattacttggttgacttaaaatcattttatatcaatagcttttacagaagcattgcttttccnnnnnnnnnnnnnnnnnnnnnnaacaatttaaattatagtgatgttatttacttgaaataattattctcagaagccagattatacattttaagccaaatatattaacagtaataaaacgatctctctctgtnnnnnnnnnnnnnnnnnnnnnnnnnnnntgacatatgagtgtgcatatgagtttatagattccttttccaaatatgtgtattagttttttaacatttaagtcagtaatgacacatatgtaaagcacatcgccagaaatatccaattcgaaaattaattagccaatgttctgctttctaccaactctactagtttgtctgaactaaaagttttgaacttagagccagaggtgtcttatagttttattactacctttaaggaataagcctcaatcagaattgatactttgaagtagaactgtttcaaaagagatttgtagaaacattaatttttgatctttttattcttcctaaatattagctttttgatgtgtagccatagaaaagaatgctttatggatccttgagcctcaaaccattagtctataagctgcaacgggacaggaagagatctggcttgtttggtgttatttctccgggacttgggaaagttcttgctcatattaggcatgcaatatttgttaaatgaaggagtgcaatgttaacaatagctacaaatgtgtaacggcatcacctaattttaaattataatgttttgaaatctcacaatctcggaaaatcatccaggtttctataaccaagacatgatcaccttttggtataatgattagaatctgatttactatttgtaaaaatgttgacatattgagaattttaattttaattcctgagaattgtatcaaaaaggacatatttatttaaattttaagaatgcattaccttgaaacatgctagtagaagcaaactgtaatgtgatattaacttataatagtgacttttttttacatttggaatgtaaatctgctggctatgtttatctaacttattttaatataacaaaagtggtaacaattagaccaaattttattgttgaattagaatgcttagaaaataaatgatactgtccagtctcttttttatgatattattaaagacccagtattttttataggtcataatctacgtagactatatatgtatgttcatacataatcaccatcaattggatgggtaaaaatttgatatattactaacaagatagacatttaactaacaaacagcttcagtgcctaatcatccatgcttaagcacacattagcatccaaagatatgaatacacatctattaagagtaatcaatattcagccacacagccattcaagttccttctctcgataactcaatatttcttcgcctacttaaacacattaactggggaaggaattctttagtttgctaaaagccagatcatgtatacatacatgtatatgtatatatgcaaaaaaatgtatatatgcactttgaaacttgcaaatagaaataaaacgtcatgc

SEQ ID NO: 25945 - DNA, 769 bp, Macaca Mulatta
cactccagaacaaacctctttatgttgctgaaacacataggccatttcattgagggaaaacacaatatcttgaagaatattgttaaaacattacttaaagcttgtttgtttagttagcaggaaatagtgttctttttaaaaaagttgcacattaggaacagtatatatgtacagttatacatacctctctctatatatacatgtatagtgagtgtggcttagtaatagaccacagcatgtttcccgctccaagagaattcacctcaccttcagcagttaccgaggagctaaacatgctgccaaccagcttgtccaataactccaggaaagctgtttttcaaaacgccatgtcctaggggccaagggaaatgctgttggtgagaatcgacctcactgtcagcgtttctccacctgaagtgctgatggatgagaaaaaccaccaccagatgacaagtcacaccctccccattagcattctgttaagggaaaatagtagcagagtcattgttgtactatggctgtatttttagggattaatttgtgtagattgtgtaaatcaccgttgtctgaccttggtggcgggagggggagattatgtgtcatgatttcaatgattgtttaattgtaggtcaatgaaatatttgcttatttatattcagagatgtaccatgttaaagaggtgtcttgtattttcttcttatttgtaatgtatcttatttatatattaatgaagtaagttctgaaaacgtttatggtattttcgtgcatt

SEQ ID NO: 25946 - DNA, 492 bp, Macaca Mulatta
ggcagggatccctcttccccactccctgtggggctgggctgaggcagggatccctgggccacagagcaagtctccttatcagacagctgccttggctcttgggatgtgtgatttcagctcctgttttttcgtgcagaggcatggagaccagtagaggtgtggaggccaggcagagggaggagccggctctgggaggtcccagctcatgggcactgcccctagagctagcctgcctctgtcccctgagtccaacagtgggagccctagcagggaagttctgatccccaaagccacagcaggggactgatggctacggcagaatgaggccaggtcaggaccctcaaacatcatctgggcgtaccaagcaccctgaagccagactgcaggagccctgcagggtgagactctattggagatacactgctggccacaggtgtcccctctcggtcccaccttttcaggctgtcccatgtctatctcaggggcccatta

SEQ ID NO: 25947 - DNA, 749 bp, Macaca Mulatta
  misc_feature (1)...(749): n = A,T,C or G
gggaaaccagagtgacttctttaaaccacagtcttcaagactgtggtttagacacggactataaaaatctccaagcttgtgcttacacatgaagcctgacttaactgtatgtgcaacagcaatgaaattaactcagaagccttctacctggatcacccaggccgggagggttccttcgttccagtgcctgtcccctgcctttatgttgactgatggggatacaagatgtgacacacccttctttatttgaaacacttagctagacctttgcttccttcttgccagctctcccaacatacccaatcctggtgattagggaactaaaagtctgagggggacacaaatgtcacacctgagaggactatcattttatatgattttgtaagtaaatgacagaatgcttttaggtacattcagtggaaggaggagctgtaggtctgtatatgttaccctgaaaagagaatgagactttaaaaaatgaattatgacctgttaggccgagctcaggaattgtccaaaaatgaaaaagcaaaatagagtattttttagtgagtgtaatgtataatgtacgtatgcagagttgaactncatangttgttgatcaccatgaagtattgatcattttctatctcaaaagtgtaagcccataaagctgtttttacagaaatagcactttctgaataaactggtattaaatagcccatgaagcttcanctggcttaanaggggagccagaaaagggttcaaca

SEQ ID NO: 25948 - DNA, 2807 bp, Macaca Mulatta
  misc_feature (1)...(2807): n = A,T,C or G
cagctctgtgcacctagaggaggctggcattctacgggctggtccaggagggcctgatcagcagtggccaacagtatccagtgcaacaccannnnnnnnnnnnnnnnnnnnnnnnnnnnnnnnnnnnnnnnnnnnnnnnnnnnnnnnnnnnnnnnnnnnnnnnnnnnnnnnnnnnnnnnnnnnnnnnnnnnnnnnnnnnnnnnnnnnnnnnnnnnnnnnnnnnnnnnnnnnnnnnnnnnnnnnnnnnnnnnnnnnnnnnnnnnnnnnnnnnnnnnnnnnnnnnnnnnnnnnnnnnnnnnnnnnnnnnnnnnnnnnnnnnnnnnnnnnnnnnnnnnnnnnnnnnnnnnnnnnnnnnnnnnnnnnnnnnnnnnnnnnnnnnnnnnnnnnnnnnnnnnnnnnnnnnnnnnnnnnnnnnnnnnnnnnnnnnnnnnnnnnnnnnnnnnnnnnnnnnnnnnnnnnnnnnnnnnnnnnnnnnnnnnnnnnnnnnnnnnnnnnnnnnnnnnnnnnnnnnnnnnnnnnnnnnnnnnnnnnnnnnnnnnnnnnnnnnnnnnnnnnnnnnnnnnnnnnnnnnnnnnnnnnnnnnnnnnnnnnnnnnnnnnnnnnnnnnnnnnnnnnnnnnnnnnnnnnnnnnnnnnnnnnnnnnnnnnnnnnnnnnnnnnnnnnnnnnnnnnnnnnnnnnnnnnnnnnnnnnnnnnnnnnnnnnnnnnnnnnnnnnnnnnnnnnnnnnnnnnnnnnnnnnnnnnnnnnnnnnnnnnnnnnnnnnnnnnnnnnnnnnnnnnnnnnnnnnnnnnnnnnnnnnnnnnnnnnnnnnnnnnnnnnnnnnnnnnnnnnnnnnnnnnnnnnnnnnnnnnnnnnnnnnnnnnnnnnnnnnnnnnnnnnnnnnnnnnnnnnnnnnnnnnnnnnnnnnnnnnnnnnnnnnnnnnnnnnnnnnnnnnnnnnnnnnnnnnnnnnnnnnnnnnnnnnnnnnnnnnnnnnnnnnnnnnnnnnnnnnnnnnnnnnnnnnnnnnnnnnnnnnnnnnnnnnnnnnnnnnnnnnnnnnnnnnnnnnnnnnnnnnnnnnnnnnnnnnnnnnnnnnnnnnnnnnnnnnnnnnnnnnnnnnnnnnnnnnnnnnnnnnnnnnnnnnnnnnnnnnnnnnnnnnnnnnnnnnnnnnnnnnnnnnnnnnnnnnnnnnnnnnnnnnnnnnnnnnnnnnnnnnnnnnnnnnnnnnnnnnnnnnnnnnnnnnnnnnnnnnnnnnnnnnnnnnnnnnnnnnnnnnnnnnnnnnnnnnnnnnnnnnnnnnnnnnnnnnnnnnnnnnnnnnnnnnnnnnnnnnnnnnnnnnnnnnnnnnnnnnnnnnnnnnnnnnnnnnnnnnnnnnnnnnnnnnnnnnnnnnnnnnnnnnnnnnnnnnnnnnnnnnnnnnnnnnnnnnnnnnnnnnnnnnnnnnnnnnnnnnnnnnnnnnnnnnnnnnnnnnnnnnnnnnnnnnnnnnnnnnnnnnnnnnnnnnnnnnnnnnnnnnnnnnnnnnnnnnnnnnnnnnnnnnnnnnnnnnnnnnnnnnnnnnnnnnnnnnnnnnnnnnnnnnnnnnnnnnnnnnnnnnnnnnnnnnnnnnnnnnnnnnnnnnnnnnnnnnnnnnnnnnnnnnnnnnnnnnnnnnnnnnnnnnnnnnnnnnnnnnnnnnnnnnnnnnnnnnnnnnnnnnnnnnnnnnnnnnnnnnnnnnnnnnnnnnnnnnnnnnnnnnnnnnnnnnnnnnnnnnnnnnnnnnnnnnnnnnnnnnnnnnnnnnnnnnnnnnnnnnnnnnnnnnnnnnnnnnnnnnnnnnnnnnnnnnnnnnnnnnnnnnnnnnnnnnnnnnnnnnnnnnnnnnnnnnnnnnnnnnnnnnnnnnnnnnnnnnnnnnnnnnnnnnnnnnnnnnnnnnnnnnnnnnnnnnnnnnnnnnnnnnnnnnnnnnnnnnnnnnnnnnnnnnnnnnnnnnnnnnnnnnnnnnnnnnnnnnnnnnnnnnnnnnnnnnnnnnnnnnnnnnnnnnnnnnnnnnnnnnnnnnnnnnnnnnnnnnnnnnnnnnnnnnnnnnnnnnnnnnnnnnnnnnnnnnnnnnnnnnnnnnnnnnnnnnnnnnnnnnnnnnnnnnnnnnnnnnnnnnnnnnnnnnnnnnnnnnnnnnnnnnnnnnnnnnnnnnnnnnnnnnnnnnnnnnnnnnnnnnnnnnnnnnnnnnnnnnnnnnnnnnnnnnnnnnnnnnnnnnnnnnnnnnnnnnnnnnnnnnnnnnnnnnnnnnnnnnnnnnnnnnnnnnnnnnnnnnnnnnnnnnnnnnnnnnnnnnnnnnnnnnnnnnnnnnnnnnnnnnnnnnnnnnnnnnnnnnnnnnnnnnnnnnnnngtttgattaattatattatctatttaggcattaatataaaagaagtaggagtctgttattnnnnnnnnnnnnnnnnnnnnnnnnnnnctgtcttgtctacttttagcttcattctcccatattttgaagggtgtgtaacttcagctctgcaggattgcatggggtaaaacttgttgccaacacatgtgaaccattgccacattgtaggttgtgatcattttgccccactgaagcccatgtatctgaccttacgtgccttttgaactaggagaatcgggctaatttgttaatgatgataattataatgtatctgtacagcactttttacatttgcgaagtgctttccaatccatgttagttactagttattacagctgtaaggataaaacacgtcatgtggattcattttgaattggagctattggtatttcctctgttattgctaataaatgaaaatggtggtat

SEQ ID NO: 25949 - DNA, 2752 bp, Macaca Mulatta
  misc_feature (1)...(2752): n = A,T,C or G
aagcaaagatttcattcccctgttcacagagatgaaaagggctcagagacccaggagaggcttggtatactaacctctgtaccaaagaccttgggcatcaggcatgaccggacttggttggcgccacttgcagaggaggaagatgatgctgaattttctggtgaagataatgcacagcccatcacacaacctgaggcagaacaacaggnaggcctatgagctccatcaggagaacaagaagcccaccagccagggagttcaaaatgtggaaattgacatgttccctgaagatgagcctcatctgaccatacaggatccccgaaagnnnnnnnnnnnnnnnnnnnnnnnnnnnnnnnnnnnnnnnnnnnnnnnnnnnnnnnnnnnnnnnnnnnnnnnnnnnnnnnnnnnnnnnnnnnnnnnnnnnnnnnnnnnnnnnnnnnnnnnnnnnnnnnnnnnnnnnnnnnnnnnnnnnnnnnnnnnnnnnnnnnnnnnnnnnnnnnnnnnnnnnnnnnnnnnnnnnnnnnnnnnnnnnnnnnnnnnnnnnnnnnnnnnnnnnnnnnnnnnnnnnnnnnnnnnnnnnnnnnnnnnnnnnnnnnnnnnnnnnnnnnnnnnnnnnnnnnnnnnnnnnnnnnnnnnnnnnnnnnnnnnnnnnnnnnnnnnnnnnnnnnnnnnnnnnnnnnnnnnnnnnnnnnnnnnnnnnnnnnnnnnnnnnnnnnnnnnnnnnnnnnnnnnnnnnnnnnnnnnnnnnnnnnnnnnnnnnnnnnnnnnnnnnnnnnnnnnnnnnnnnnnnnnnnnnnnnnnnnnnnnnnnnnnnnnnnnnnnnnnnnnnnnnnnnnnnnnnnnnnnnnnnnnnnnnnnnnnnnnnnnnnnnnnnnnnnnnnnnnnnnnnnnnnnnnnnnnnnnnnnnnnnnnnnnnnnnnnnnnnnnnnnnnnnnnnnnnnnnnnnnnnnnnnnnnnnnnnnnnnnnnnnnnnnnnnnnnnnnnnnnnnnnnnnnnnnnnnnnnnnnnnnnnnnnnnnnnnnnnnnnnnnnnnnnnnnnnnnnnnnnnnnnnnnnnnnnnnnnnnnnnnnnnnnnnnnnnnnnnnnnnnnnnnnnnnnnnnnnnnnnnnnnnnnnnnnnnnnnnnnnnnnnnnnnnnnnnnnnnnnnnnnnnnnnnnnnnnnnnnnnnnnnnnnnnnnnnnnnnnnnagaaagaacagcagccaaaagttgagagcaattcactcggttacatttacttcgtagtttttatcgtctttggctcattcttcactctgaatctcttcattggtgttattattgacaacttcaaccaacagcagaaaaagataagtnnnnnnnnnnnnnnnnnnnnnnnnnnnnnnnnnnnnnnnnnnnnnnnnnnnnnnnnnnnnnnnnnnnnnnnnnnnnnnnnnnnnnnnnnnnnnnnnnnnnnnnnnnnnnnnnnnnnnnnnnnnnnnnnnnnnnnnnnnnnnnnnnnnnnnnnnnnnnnnnnnnnnnnnnnnnnnnnnnnnnnnnnnnnnnnnnnnnnnnnnnnnnnnnnnnnnnnnnnnnnnnnnnnnnnnnnnnnnnnnnnnnnnnnnnnnnnnnnnnnnnnnnnnnnnnnnnnnnnnnnnnnnnnnnnnnnnnnnnnnnnnnnnnnnnnnnnnnnnnnnnnnnnnnnnnnnnnnnnnnnnnnnnnnnnnnnnnnnnnnnnnnnnnnnnnnnnnnnnnnnnnnnnnnnnnnnnnnnnnnnnnnnnnnnnnnnnnnnnnnnnnnnnnnnnnnnnnnnnnnnnnnnnnnnnnnnnnnnnnnnnnnnnnnnnnnnnnnnnnnnnnnnnnnnnnnnnnnnnnnnnnnnnnnnnnnnnnnnnnnnnnnnnnnnnnnnnnnnnnnnnnnnnnnnnnnnnnnnnnnnnnnnnnnnnnnnnnnnnnnnnnnnnnnnnnnnnnnnnnnnnnnnnnnnnnnnnnnnnnnnnnnnnnnnnnnnnnnnnnnnnnnnnnnnnnnnnnnnnnnnnnnnnnnnnnnnnnnnnnnnnnnnnnnnnnnnnnnnnnnnnnnnnnnnnnnnnnnnnnnnnnnnnnnnnnnnnnnnnnnnnnnnnnnnnnnnnnnnnnnnnnnnnnnnnnnnnnnnnnnnnnnnnnnnnnnnnnnnnnnnnnnnnnnnnnnnnnnnnnnnnnnnnnnnnnnnnnnnnnnnnnnnnnnnnnnnnnnnnnnnnnnnnnnnnnnnnnnnnnnnnnnnnnnnnnnnnnnnnnnnnnnnnnnnnnnnnnnnnnnnnnnnnnnnnnnnnnnnnnnnnnnnnnnnnnnnnnnnnnnnnnnnnnnnnnnnnnnnnnnnnnnnnnnnnnnnnnnnnnnnnnnnnnncctttgcgtgtggcaaagccaaataaatatcaatttctagtaatggacttgcccatggtgagtggagatcgcctccactgcatggatattcttttcgccttcaccgctagggtacttggtgggtctgatggcctggatagcatgaaagcaatgatggaagagaagttcatggaaaccaatcctctcaagaagttgtatgaacccatagtcaccaccactaagagaaaggaagaggaaagatgtgctgcagttattcaaaaggcctttcgaaagtacatgatgaaggtgaccaagggtgaccaaggtgaccaaagtgacttggaaaacaggcctcattcaccactccagactctttgcaatggagacttacctagctttggggtggtcaagggcaaggtccactatgactga

SEQ ID NO: 25950 - DNA, 2910 bp, Macaca Mulatta
  misc_feature (1)...(2910): n = A,T,C or G
ggcgtgggctcttgggagcgggacttctgctcaaatcctgttcaggagcttggaaaggaggagaattgggggtggttgccaggaagaccagcacctccggttactagagggtttataggggccttctcctttccgtccccctttactagggagtatcccttgcagataaatgagattttttgatttcttaaaaagccagctgcagaaagaagaactgctgcaggtcgaggggaagagagnnnnnnnnnnnnnnnnnnnnnnnnnnnnnnnnnnnnnnnnnnnnnnnnnnnnnnnnnnnnnnnnnnnnnnnnnnnnnnnnnnnnnnnnnnnnnnnnnnnnnnnnnnnnnnnnnnnnnnnnnnnnnnnnnnnnnnnnnnnnnnnnnnnnnnnnnnnnntgcggaagttgcatcacttaatgacattcagccaacttaccgaatcctgaaaccatggtgggatgtgtttatggattacctggctgttgttatgttaatggtagccatctttgcaggaaccatgcaacttaccaaagatcaggtggtctgtttgccagtattgccatctcctgtaaattcaaaggcacatacatcaccaggaaatgccgaggtcaccaccaacatcccgaagatggaagcagccaccaaccaagaccaagatgggcggacaacaaatgacatttcctttgggacatctgctgtgacacctgacatacctctcagagccacatatcctcgcacagatttcgcacttccaagtcaggaggcaaagaaagagaagaaagatccaacaggtcgaaaaacaaacttggattttcagcaatatgtatttattaatcagatgtgttaccatctggcccttccatggtattctaagtactttccataccttgctcttatacatactattattctcatggtcagtagcaacttttggttcaaatatcccaaaacatgctcaaaagtagaacattttgtttcaatattaggaaagtgctttgaatccccttggactacaaaagcattgtctgagacagcatgcgaagactcagaggaaaacaagcagagaataacaggtgcccagactctaccaaagcatgtgtctaccagcagtgatgaagggagccccagtgccagtacaccaatgatcaataaaaccggctttaaattttcagctgagaaacctgtgattgaagttcccagcatgaccatcctagataaaaaggatggagagcaagcgaaagccctgtttgagaaagtgaggaagttccgtgcccatgtggaagatagtgacttgatctataaactctatgtcgtccaaacagttatcaaaacagccaagttcatttttattctctgctatacagcgaactttgtcaacgcaatcagctttgaacatgtctgcaagcccaaagttgagcatctgactggttatgaggtatttgagtgcacccacaatatggcttacatgttgaaaaagcttctcatcagttacatatccattatttgtgtttatggctttatctgcctctacactctcttctggttattcaggatacctttgaaggaatattctttcgaaaaagtcagagaagagagcagttttagtgacattccagatgtcaaaaacgattttgcgttccttctccacatggtggaccagtatgaccagctatattccaagcgttttggtgtgttcttgtcagaagttagtgaaaataaacttagggaaattagtttgaaccatgagtggacatttgaaaaactcaggcagcacgtttcacgcaatgcccaggacaagcaggagttgcatctgttcatgctatcgggggtgcccgatgctgtctttgacctcacagacctggatgtgctaaagcttgaactaattccagaagctaaaattcctgctaagatttctcaaatgactaacctccaagagctccacctctgccactgccctgcaaaagttgaacagactgcttttagctttcttcgcgatcacttgagatgccnnnnnnnnnnnnnnnnnnnnnnnnnnnnnnnnnnnnnnnnnnnnnnnnnnnnnnnnnnnnnnnnnnnnnnnnnnnnnnnnnnnnnnnnnnnnnnnnnnnnnnnnnnnnnnnnnnnnnnnnnnnnnnnnnnnnnnnnnnnnnnnnnnnnnnnnnnnnnnnnnnnnnnnnnnnnnnnnnnnnnnnnnnnnnnnnnnnnnnnnnnnnnnnnnnnnnnnnnnnnnnnnnnnnnnnnnnnnnnnnnnnnnnnnnnnnnnnnnnnnnnnnnnnnnnnnnnnnnnnnnnnnnnnnnnnnnnnnnnnnnnnnnnnnnnnnnnnnnnnnnnnnnnnnnnnnnnnnnnnnnnnnnnnnnaatttacaggaactggatttaaagtcaaataacattcgcacaattgaggaaatcatcagtttccagcatttaaaacgactgacttgtttaaaattatggcataacaagattgttactattcctccctctattacccatgtcaaaaacttggagtcactttatttctctaacaacaagctcgaatccttaccagtggcagtatttagtttacagaaactcagatgcttagatgtaagctacaacaacatttcaatgattccaatagaaataggattgcttcagaacctgcagcatatgcatatcactgggaacaaagtggacagtctgccaaaacaattgtttaaatgcataaagttgaggactttgaatctgggacaaaactgcatcacctcactcccagagaaagttggtcagctctcccagctcactcagctggagctgaaggggaactgcttggaccgcctgccagcccagctgggccagtgtcggatgctcaagaaaagcgggcttgttgtggaagatcacctttttgacaccctgccacttgaagtc

SEQ ID NO: 25951 - DNA, 272 bp, Macaca Mulatta
  misc_feature (1)...(272): n = A,T,C or G
attagaaaggctagccatgatcctttacgacatccctgatatccgtctcttctggagtgaggacgagcgcttcctgaagcagttccgcgtatccaacatgaatcagaaggtgaagtttcannnnnnnnnnnnnnnnnnnnnnnnnnnnnnnnnnnnnnnnnnnnnnnnnnnnnnnnnnnnnnnnnnnnnnnnnnnnnnnnnacttagtccgaacgattggaggagacctggtggaaaaggttgatctcatagacaagtttgaacatccaaag

SEQ ID NO: 25952 - DNA, 500 bp, Macaca Mulatta
  misc_feature (1)...(500): n = A,T,C or G
tacgtttccatccacagctctggcttccgggactttctgctgaagccggagctcctgcgggccatcgtggactgtggctttgagcatccgtctgaggngtccagcacgagtgcattccccaggccatcctgggcatggacgtcctgtgccaagccaagtctgggatgggcaagacagcggtcttcgtgctggccaccctacagcagattgagcctgttaacggacaggtgnnnnnnnnnnnnnnnnnnnnnnnnnnnnnnnnnnnnnnnnnnnnnnnnnnnnnnnnnnnnnnnnnnnnnnnnnnnnnnnnnnnnnnnnaggtgtctgtgttcttcgggggtctctccatcaagaaggatgaagaagtgttgaagaagaactgtccccatgtcgtggtggggaccccgggccgcatcctggcgctcgtgcggaacaggagcttcagcctaaagaatgtgaagcactttgtgctggacgagtgagacaagatgctggagcag

SEQ ID NO: 25953 - DNA, 3656 bp, Macaca Mulatta
  misc_feature (1)...(3656): n = A,T,C or G
tgcctgggataccagacttgctcccctggaaccaggagccctctgaggggctgcggcatggcgtcctgacgccccatcttggacccgttgcctgcctttgccctggactcctgagcgcagagctcagcccaggagccaggatgggtcgtgaacaggacctgatccttgctgtcaagaatggagatgtgaccggtgtgcagaaactggtggcaaaggtcaaggccacaaagacaannnnnnnnnnnnnnnnnnnnnnnnnnnnnnnnnnnnnnnnnnnnnnnnnnngattctctgccctccaccatgctgctttggggggcagcctggagctcatagccttgctgctagaggctcaggccactgttgacatcaaggacagcaatgnnnnnnnnnnnnnnnnnnnnnnnnnnnnnnnnnnnnnnnnnnnnnnnnnnnnnnnnnnnnnnnnnnnnnnnnnnnnnnnnnnnnnnnnnnnnnnnnnnnnnnnnnnnnnnnnnnnnnnnnnnnnnnnnnnnnnnnnnnnnnnnnnnnnnnnnnnnnnnnnnnnnnnnnnnnnnnnnnnnnnnnnnnnnnnnnnnnnnnnnnnnnnnnnnnnnnnnnnnnnnnnnnnnnnnnnnnnnnnnnnnnnnnnnnnnnnnnnnnnnnnnnnnnnnnnnnnnnnnnnnnnnnnnnnnnnnnnnnnnnnnnnnnnnnnnnnnnnnnnnnnnnnnnnnnnnnnnnnnnnnnnnnnnnnnnnnnnnnnnnnnnnnnnnnnnnnnnnnnnnnnnnnnnnnnnnnnnnnnnnnnnnnnnnnnnnnnnnnnnnnnnnnnnnnnnnnnnnnnnnnnnnnnnnnnnnnnnnnnnnnnnnnnnnnnnnnnnnnnnnnnnnnnnnnnnnnnnnnnnnnnnnnnnnnnnnnnnnnnnnnnnnnnnnnnnnnnnnnnnnnnnnnnnnnnnnnnnnnnnnnnnnnnnnnnnnnnnnnnnnnnnnnnnnnnnnnnnnnnnnnnnnnnnnnnnnnnnnnnnnnnnnnnnnnnnnnnnnnnnnnnnnnnnnnnnnnnnnnnnnnnnnnnnnnnnnnnnnnnnnnnnnnnnnnnnnnnnnnnnnnnnnnnnnnnnnnnnnnnnnnnnnnnnnnnnnnnnnnnnnnnnnnnnnnnnnnnnnnnnnnnnnnnnnnnnnnnnnnnnnnnnnnnnnnnnnnnnnnnnnnnnnnnnnnnnnnnnnnnnnnnnnnnnnnnnnnnnnnnnnnnnnnnnnnnnnnnnnnnnnnnnnnnnnnnnnnnnnnnnnnnnnnnnnnnnnnnnnnnnnnnnnnnnnnnnnnnnnnnnnnnnnnnnnnnnnnnnnnnnnnnnnnnnnnnnnnnnnnnnnnnnnnnnnnnnnnnnnnnnnnnnnnnnnnnnnnnnnnnnnnnnnnnnnnnnnnnnnnnnnnnnnnnnnnnnnnnnnnnnnnnnnnnnnnnnnnnnnnnnnnnnnnnnnnnnnnnnnnnnnnnnnnnnnnnnnnnnnnnnnnnnnnnnnnnnnnnnnnnnnnnnnnnnnnnnnnnnnnnnnnnnnnnnnnnnnnnnnnnnnnnnnnnnnnnnnnnnnnnnnnnnnnnnnnnnnnnnnnnnnnnnnnnnnnnnnnnnnnnnnnnnnnnnnnnnnnnnnnnnnnnnnnnnnnnnnnnnnnnnnnnnnnnnnnnnnnnnnnnnnnnnnnnnnnnnnnnnnnnnnnnnnnnnnnnnnnnnnnnnnnnnnnnnnnnnnnnnnnnnnnnnnnnnnnnnnnnnnnnnnnnnnnnnnnnnnnnnnnnnnnnnnnnnnnnnnnnnnnnnnnnnnnnnnnnnnnnnnnnnnnnnnnnnnnnnnnnnnnnnnnnnnnnnnnnnnnnnnnnnnnnnnnnnnnnnnnnnnnnnnnnnnnnnnnnnnnnnnnnnnnnnnnnnnnnnnnnnnnnnnnnnnnnnnnnnnnnnnnnnnnnnnnnnnnnnnnnnnnnnnnnnnnnnnnnnnnnnnnnnnnnnnnnnnnnnnnnnnnnnnnnnnnnnnnnnnnnnnnnnnnnnnnnnnnnnnnnnnnnnnnnnnnnnnnnnnnnnnnnnnnnnnnnnnnnnnnnnnnnnnnnnnnnnnnnnnnnnnnnnnnnnnnnnnnnnnnnnnnnnnnnnnnnnnnnnnnnnnnnnnnnnnnnnnnnnnnnnnnnnnnnnnnnnnnnnnnnnnnnnnnnnnnnnnnnnnnnnnnnnnnnnnnnnnnnnnnnnnnnnnnnnnnnnnnnnnnnnnnnnnnnnnnnnnnnnnnnnnnnnnnnnnnnnnnnnnnnnnnnnnnnnnnnnnnnnnnnnnnnnnnnnnnnnnnnnnnnnnnnnnnnnnnnnnnnnnnnnnnnnnnnnnnnnnnnnnnnnnnnnnnnnnnnnnnnnnnnnnnnnnnnnnnnnnnnnnnnnnnnnnnnnnnnnnnnnnnnnnnnnnnnnnnnnnnnnnnnnnnnnnnnnnnnnnnnnnnnnnnnnnnnnnnnnnnnnnnnnnnnnnnnnnnnnnnnnnnnnnnnnnnnnnnnnnnnnnnnnnnnnnnnnnnnnnnnnnnnnnnnnnnnnnnnnnnnnnnnnnnnnnnnnnnnnnnnnnnnnnnnnnnnnnnnnnnnnnnnnnnnnnnnnnnnnnnnnnnnnnnnnnnnnnnnnnnnnnnnnnnnnnnnnnnnnnnnnnnnnnnnnnnnnnnnnnnnnnnnnnnnnnnnnnnnnnnnnnnnnnnnnnnnnnnnnnnnnnnnnnnnnnnnnnnnnnnnnnnnnnnnnnnnnnnnnnnnnnnnnnnnnnnnnnnnnnnnnnnnnnnnnnnnnnnnnnnnnnnnnnnnnnnnnnnnnnnnnnnnnnnnnnnnnnnnnnnnnnnnnnnnnnnnnnnnnnnnnnnnnnnnnnnnnnnnnnnnnnnnnnnnnnnnnnnnnnnnnnnnnnnnnnnnnnnnnnnnnnnnnnnnnnnnnnnnnnnnnnnnnnnnnnnnnnnnnnnnnnnnnnnnnnnnnnnnnnnnnnnnnnnnnnnnnnnnnnnnnnnnnnnnnnnnnnnnnnnnnnnnnnnnnnnnnnnnnnnnnnnnnnnnnnnnnnnnnnnnnnnnnnnnnnnnnnnnnnnnnnnnnnnnnnnnnnnnnnnnnnnnnnnnnnnnnnnnnnnnnnnnnnnnnnnnnnnnnnnnnnnnnnnnnnnnnnnnnnnnnnnnnnnnnnnnnnnnnnnnnnnnnnnnnnnnnnnnnnnnnnnnnnnnnnnnnnnnnnnnnnnnnnnnnnnnnnnnnnnnnnnnnnnnnnnnnnnnnnnnnnnnnnnnnnnnnnnnnnnnnnnnnnnnnnnnnnnnnnnnnnnnnnnnnnnnnnnnnnnnnnnnnnnnnnnnnnnnnnnnnnnnnnnnnnnnnnnnnnnnnnnnnnnnnnnnnnnnnnnnnnnnnnnnnnnnnnnnnnnnnnnnnnnnnnnnnnnnnnnnnnnnnnnnnnnnnnnnnnnnnnnnnnnnnnnnnnnngcaggaacagcccccaagcctgtgtcagtggcctgcacccagctggcattttctggccctaagctagcgtcccggctcggcccccgcccggtgcctcctccacggcctgagagcactgggactgtgggcccaggccaggcccagcagagactagagcagaccagctcgtccctggcagctgcactgagagccgcagagaagagcattggcacggaggagcaagagg

SEQ ID NO: 25954 - DNA, 1085 bp, Macaca Mulatta
  misc_feature (1)...(1085): n = A,T,C or G
ttttcaatggttcttgttcaattttattggcattgcgttcatctctttacagaagaactcagcccacaccctagaaagtagactttggaaaaaggagaagtgctccattaagcaagctacaatgcgggggcagatcctaggaagggagcagaactgccagggttccaaccaaagaaacaggttaattaataatgggcaatatcggggagatgggtggggaaaaggagaaaaagctccgctaacctaaggataccacaaccctgaaaggagcgccttctagaacaaaggtaaaaatcactaggacagatctgtgagggttttcctttcgctctcatagtaggatgttgatctaacaggggagttttgaagtgtggagcnnnnnnnnnnnnnnnnnnnnnnntgagaattttaatttttgaaataacggcaatttatccattgcacataccactgtattatgcaaatcaaccttttggaaaatttagacacagaagggaactagacagttttccccctggagagatgaaaagctttttggctcttaagtctttgataaaaggcgtacataattcttgtgtctactgtacagaatactgccgctagctggatttcccaattctgagtaacactctgcaatccaaacagggttcaaccctccatcttacatgcctgcattacaggacttaaacacataatccaagaatttcttacactaatttatacattttaattggttgcatatattaacatgtactataagattcttttctaagaagcattacataataaatggatactgtaaaaagatctgattagttaaaagtaacaagcattaacagatagatacatacaaaactcagcctgatcagactgggtgtgagcctgtaatggggcatggggcaccagccttcccaaggggtagccttcaaggagggaggggaaaggggaggtaaaaagaccacaagaccgttaaaaaaaaattagacacagcttaactgtaaacagttctctctctctccagtggacaaaaagaataagcttccaatgccaactccatatcagaatgacatccanccgctggcctg

SEQ ID NO: 25955 - DNA, 402 bp, Macaca Mulatta
atttatttatttttgatatggagtttcgctgttgtcgcccaggctggagtgcagtcgtgcgatctcggctcactgcaacctccacctcccgggttcaagtgattctccagcctcagcctcctaagtagctgggattataggcacacaccaccatgcccagctaatttttgtatttttggtggagacagggtttcaccatgttggccaggctggtcttgaactcctgacctcaagtgatctgcctgcctcagtctcccaaagtgttgggattatagacgtgagccaccgcacccagcttgtattttagaaagagcacttggcaaccactatgtgaagggtgattggagaaggacaagactgtggaatggggaataaggaaggaggagtttgtataatgactcc

SEQ ID NO: 25956 - DNA, 835 bp, Macaca Mulatta
  misc_feature (1)...(835): n = A,T,C or G
atgagtgctgaggggtaccaggacagagcgctgtatgattatnnnnnnnnnnnnnnnnnnnnnnnnnnnnnnnnnnnnnnnnnnnnnnnnnnnnnnnnnnnnnnnnnnnnnnnnnnnnnnnnnnnnnnnnnnnnnnnnnnnnnnnnnnnnnnnnnnnnnnnnnnnnnnnnnnnnnnnnnnnnnnnnnnnnnnnnnnnnnnnnnnnnnnnnnnnnnnnnnnnnnnnnnnnnnnnnnnnnnnnnnnnnnnnnnnnnnnnnnnnnnnnnnnnnnnnnnnnnnnnnnnnnnnnnnnnnnnnnnnnnnnnnnnnnnnnnnnnnnnnnnnnnnnnnnnnnnnnnnnnnnnnnnnnnnnnnnnnnnnnnnnnnnnnnnnnnnnnnnnnnnnnnnnnnnnnnnnnnnnnnnnnnnnnnnnnnnnnnnnnnnnnnnnnnnnnnnnnnnnnnnnnnnnnnnnnnnnnnnnnnnnnnnnnnnnnnnnnnnnnnnnnnnnnnnnnnnnnnnnnnnnnnnnnnnnnnnnnnnnnnnnnnnnnnnnnnnnnnnnnnnnnnnnnnnnnnnnnnnnnnnnnnnnnnnnnnnnnnnnnnnnnnnnnnnnnnnnnnnnnnnnnnnnnnnnnnnnnnnnnnnnnnnnnnnnagaagtacaaagctccgaagaatatattcagctactgaagaagcttattaggtcgcctagcatacctcatcagtattggcttacgcttcagtatttgttaaaacatttcttcaagctctctcaaacctccagcaaaaatctgttgaatgcaagagtactctctgaaattttcagccctatgcttttcagattctcagcagcca

SEQ ID NO: 25957 - DNA, 282 bp, Macaca Mulatta
accatggcctttggccttgcttattcgtttaagcccaaggacctcctcaccaggcttgagggtgcagtcatctttgtcacccagtgcctatcacacagtacacactggcgggcttagaacatacttggggagttacagtacatcaaagcaccagaaagttactggtaagcccctgttacagatttaacacatgacaattcacaattaccttgattccagtgtgttgatgccgtttcttcactttgcaggttgagtgctgtactttaaaaatcagaggattca

SEQ ID NO: 25958 - DNA, 788 bp, Macaca Mulatta
  misc_feature (1)...(788): n = A,T,C or G
ggggcgttcagtcgggtcccggcagcgtctgcagcgctcttgtctactgcggctctcggtgcccgctccttttcgtttccggaaacatggcctccggtgtggctgtctctgatggtgtcatcaaggtgttcaacgacatgaaggtgcgtaagtcttcaacgccagaggaggtgaagaagcgcaagaaggcggtgctcttctgcctgagtgaggacaagaagaacatcatcctggaggagggcaaggagatcttggtgggcgatgtgggccagactgtcgacgacccctatgccacctttgtcaagatgctgccagacaaggactgccgctacgccctctatgatgcaacctatgagaccaaggagagcaagaaggaggacctggtgtttatcttctgggcccctgagtgtgcgccccttaagagcaaaatgatctatgccagttccaaggatgccatcaagaagaagctgacagggatcaagcatgaattgcaagcaaactgctacgaggaagtcaaggaccgctgcaccctggcagagaagttggggggcagtgctgtcatctccctggagggcaagcctttgtgagccccttctggccccctgcctggagcatctggcagccccacacctgccctcgggggttgcaggctgcccccttcctgccagaccgaaaggggctggggggggatccccaaccaagggggaagggcaattccccttccccccaattggccaaacaagaacccccccaccccccggggannnnnnnnnnnnnnnnnnnnatcc

SEQ ID NO: 25959 - DNA, 789 bp, Macaca Mulatta
  misc_feature (1)...(789): n = A,T,C or G
gggctctaaaccctctgtgcgctgtgtgtgcgcccagtgcccgcctcgtaggacgccacctcacactcacttcccgcctctctttagtggctctttagagagaaactctgtctccctttgcaaaagtgggctagaatgaaaaggagatgccttggggttcgtgcacaacatagtttctgttgactctaacttccaaatcaaaatcacttggttgaaacagactgtcgcttgattttagaaaatccacaaaaacccatatttctgaaataatgctgattcctgagataagaaagcggatttgatccccagtctcattgcttagtagaataaatcctgcaccagcaacaacacttgtaaatttgtgaaaatgaattttatctttccttaaaaaaagaaattttttaatccatcacacttttcttccctaccctttagtttttgataaatgataaaaatgagccagttatcaaagaagaactagttcttacttcaaaagaaaaataaacataaaaaataagttgctggttcctaacaggaaaaattttaataattgtgtggagaggaactgcttacatacacattgcagatcaaatatttggagttaaaatgttagtctacatagatggggtgattgtaactttattgccattaaaagatttcaaatcgcattcatgcttctgtgtacacataatgaaaactgggcaaaataatgaagatctctccttcagnnctgttctgttttaattcctgctggctggctcttcctctgaagctgccgcccctaattgc

SEQ ID NO: 25960 - DNA, 789 bp, Macaca Mulatta
  misc_feature (1)...(789): n = A,T,C or G
gggacaacagtagctatggaagtgacataacctaaaccatgtggctctgacctgtgctgacggtgtgcagtcattcatattccagctgaatgcaaaaggcaccactctgtggatcacagagtgtaacaatggacctaaatggactatagtatattggatgttaaatccatatatgatgtatattttgtaaaattgggaaaatcactaccttgtaaaatagtttatttgtatcatcaatattatttctgttacttgaatagtagatattcatcatcatgcttttgcacttgaatttgcaactgaatggattttaaaaaataattctttaatgggatcatgagcatgaaatgggatcctgcatcacttgttttaactatttattttgccatgtttacattttgtatcttgtaaaaataaatccaactttgtgtctaaaaagttaaagattcatagctaggaaatgaaattcttgtaatttttttctaaaggaaactgtaaagttttcacttggttcattttgtttcacaatttgactagatggactttttggtaaatactttagtggcatttcactgtcaaatacgaagttcaaggcaaaatagtaatttctattactgggccagggggaaagggaatggatcgatacatggcaaatttaaatgaagtaacctcccctttttccatgtatttttggaagggataatttccaatttaaaaataaccnnnnnnnnnnnnnnnnnnnnnnnnnnnnnnnnnnnnnnnnnnntacggggaaaaaatatatgccca

SEQ ID NO: 25961 - DNA, 480 bp, Macaca Mulatta
cctggaaaatgagtcctatcttttgaggaaaattgaaaaaaacatggagtggtttgaaggctactcttcatttaagactgctctccgcaagcaagacacgttgcctggaaattcagttcttagcttaaagactaaaatgcaagaaaaccctgcaattcctggacctgacaattattttcatgagtgaaattgtggggagtccaggcatttgggaggcaatgactctctgctggcccatgtttcagttgacagtaagcatctcacatttaataaagtgtacaaaaaagaacatttggatagagatgaatgaattccattatcaccaatatgcttccatttcacttagaagagaccaaaacccaacctggtaagttccaccgatgaccacagttattcccactgatgctaaaaaaagaaaacaggtgggcaggttcagaggcttacctgattaaggccaatggaggggaaggtcagatggaa

SEQ ID NO: 25962 - DNA, 850 bp, Macaca Mulatta
  misc_feature (1)...(850): n = A,T,C or G
gaatgcacggatctttcggggagaaatgtgtggagttcccacggcctttttataagcacttctggccgggggataataaaatttggagttatctctcttttttcgggggtggaaagattctcacccttcctggggtttctgggctttccgccagtcttctttcttcttggaagtaagccattcggtaaggatgttttgggaattttgacactgctgatatcgattttgggttgaggtggcaaatgacaaatttctgggtgtgttcttcgtagaggaactcgattgaggaccagaggtccagtcacaagtaacaagccactagccagctgcttcaggaaaaccaccctcttgcccctgtggcgtccagtgaggatgatcagaatggtcccgggggtaatgctggctcgcagttttctcacgtgctgactgaagggtttttttgccgtggctcaacagctttcgaggtacatcttcagtaggataatatctaggcattttgcgaagtttaaccacccgggtaccgccgttcttgtcaccaccaactggttttgtaagagttgcaagaaccttcnnnnnnnnnnnnnnnnnnnncttggatttagcggctgagtacttcctcttgtacatggcctttctggaatacatggcagatcgggaatacctgccaattcctctgacaaggacagggttgcggctgcaatggggcttccccttcttgggcttcttagccttgaggttaccctttttcaccttgccaccagcatcagccttcttggcttcgggtttcttctctttagtatctggcttctcaactttttcacccgccatcttgcaagatgggaaagagccc

SEQ ID NO: 25963 - DNA, 689 bp, Macaca Mulatta
  misc_feature (1)...(689): n = A,T,C or G
cagtcaaagaggtaagacctccagctggctcacaagagaagcgtccactccttggcccaggttttgggattttgccagccttgagctcatcaataatttcttcaatatccttaggtgtcaaatcctcatagtaattgtcatttatttgaaccattggtgcgttcacacaggcccctaaacattccacttctataagagtaaaaagtttgtcaggtgtagtctccccaacctttattccaagctttttctgaatggcctccagtatgctgtcagagttgcgaagcatgcagggtgtagtagtgcagacctgaatgtgatactttccaactggctttcgattatacattgtataaaaagttgctacttcatatactctcattggaggtacttgtaaaacttctgcaaccttgttcatagcagagatgggcaaccacccattctgcctttgggctaaatccaggactggaagaacagctgctgctttatggccttctggatagttttttactattgcctctatcctcttatagttttctggtgtgaaatcaaatggagtatcagggttattttcaggagtatctctgtgcacaaataaagctcctccagctccattttgcatagctgtcttatgtaattccttacatgtcttccccagtgggcggtgagacaccgnccgctggcccggagcg

SEQ ID NO: 25964 - DNA, 686 bp, Macaca Mulatta
  misc_feature (1)...(686): n = A,T,C or G
ttcctctgtgacgagggagcaggtatttctggggacacatccatagagtggacgagcccgtgtcctgctcatatgagctgccttttaaaactcctcggctctgcccgcaccatactcggcggcccctgcccggtgatggagcgcaggacatcatctgtaaagcttccctgcagactgaggagtacatggcctacgttcagaggcaagcnnnnnnnnnnnnnnnnnnnnnnnnnnnnnnnnnnnnnnnnnnnnnnnnnnnnnnnnnnnnnnnnnnnnnnnnnnnnnnnnnnnnnnnnnnnnnnnnnnnnnnnnnnnnnnnnnnnnnnnnnnnnnnnnnnnnnnnnnnnnnnnnnnnnnnnnnnnnnnnnnnnnnnnnnnnnnnnnnnnnnnnnnnnnnnnnnnnnnnnnnnnnnnnnnnnnnnnnnnnnnnnnnnnnnnnnnnnnnnnnnnnnnnnnnnnnnnnnnnnnnnnnnnnnnnnnnnnnnnnnnnnnnnnnnnnnnnnnnnnnnnnnnnnnnnnnnnnnnnnnnnnnnnnnnnnnnnnnnnnnnnnnnnnaggggaagccaaatataggccaagagcagcctgtggatatatatgagaagtccctcagagggaaccagaggagaaggaaataagnaatccagaacggcagagagaaatgaagaagaggaggacgaggatga

SEQ ID NO: 25965 - DNA, 2074 bp, Macaca Mulatta
  misc_feature (1)...(2074): n = A,T,C or G
gcttgcttgcatttattaagaccaatcagcttagtgtttatttcttctacagcacagattcactggctggggctccagtctcaaattgccaatcatttgcaaagtgaggaaggatctttgttgacaggttgaatgctttgaatctctggnnnnnnnnnnnnnnnnnnnnnnnnnnnnnnnnnnnnnnnnnnnnnnnnnnnnnnnnnnnnnnnnnnnnnnnnnnnnnnnnnnnnnnnnnnnnnnnnnnnnnnnnnnnnnnnnnnnnnnnnnnnnnnnnnnnnnnnnnnnnnnnnnnnnnnnnnnnnnnnnnnnnnnnnnnnnnnnnnnnnnnnnnnnnnnnnnnnnnnnnnnnnnnnnnnnnnnnnnnnnnnnnnnnnnnnnnnnnnnnnnnnnnnnnnnnnnnnnnnnnnnnnnnnnnnnnnnnnnnnnnnnnnnnnnnnnnnnnnnnnnnnnnnnnnnnnnnnnnnnnnnnnnnnnnnnnnnnnnnnnnnnnnnnnnnnnnnnnnnnnnnnnnnnnnnnnnnnnnnnnnnnnnnnnnnnnnnnnnnnnnnnnnnnnnnnnnnnnnnnnnnnnnnnnnnnnnnnnnnnnnnnnnnnnnnnnnnnnnnnnnnnnnnnnnnnnnnnnnnnnnnnnnnnnnnnnnnnnnnnnnnnnnnnnnnnnnnnnnnnnnnnnnnnnnnnnnnnnnnnnnnnnnnnnnnnnnnnnnnnnnnnnnnnnnnnnnnnnnnnnnnnnnnnnnnnnnnnnnnnnnnnnnnnnnnnnnnnnnnnnnnnnnnnnnnnnnnnnnnnnnnnnnnnnnnnnnnnnnnnnnnnnnnnnnnnnnnnnnnnnnnnnnnnnnnnnnnnnnnnnnnnnnnnnnnnnnnnnnnnnnnnnnnnnnnnnnnnnnnnnnnnnnnnnnnnnnnnnnnnnnnnnnnnnnnnnnnnnnnnnnnnnnnnnnnnnnnnnnnnnnnnnnnnnnnnnnnnnnnnnnnnnnnnnnnnnnnnnnnnnnnnnnnnnnnnnnnnnnnnnnnnnnnnnnnnnnnnnnnnnnnnnnnnnnnnnnnnnnnnnnnnnnnnnnnnnnnnnnnnnnnnnnnnnnnnnnnnnnnnnnnnnnnnnnnnnnnnnnnnnnnnnnnnnnnnnnnnnnnnnnnnnnnnnnnnnnnnnnnnnnnnnnnnnnnnnnnnnnnnnnnnnnnnnnnnnnnnnnnnnnnnnnnnnnnnnnnnnnnnnnnnnnnnnnnnnnnnnnnnnnnnnnnnnnnnnnnnnnnnnnnnnnnnnnnnnnnnnnnnnnnnnnnnnnnnnnnnnnnnnnnnnnnnnnnnnnnnnnnnnnnnnnnnnnnnnnnnnnnnnnnnnnnnnnnnnnnnnnnnnnnnnnnnnnnnnnnnnnnnnnnnnnnnnnnnnnnnnnnnnnnnnnnnnnnnnnnnnnnnnnnnnnnnnnnnnnnnnnnnnnnnnnnnnnnnnnnnnnnnnnnnnnnnnnnnnnnnnnnnnnnnnnnnnnnnnnnnnnnnnnnnnnnnnnnnnnnnnnnnnnnnnnnnnnnnnnnnnnnnnnnnnnnnnnnnnnnnnnnnnnnnnnnnnnnnnnnnnnnnnnnnnnnnnnnnnnnnnnnnnnnnnnnnnnnnnnnnnnnnnnnnnnnnnnnnnnnnnnnnnnnnnnnnnnnnnnnnnnnnnnnnnnnnnnnnnnnnnnnnnnnnnnnnnnnnnnnnnnnnnnnnnnnnnnnnnnnnnnnnnnnnnnnnnnnnnnnnnnnnnnnnnnnnnnnnnnnnnnnnnnnnnnnnnnnnnnnnnnnnnnnnnnnnnnnnnnnnnnnnnnnnnnnnnnnnnnnnnnnnnnnnnnnnnnnnnctttctggactcctacctatctgtgcattttactggcacctcaggaaaggagggtgaccaggttgtcttagcttgtactgcttggtggtctctgaggaccttctaagtcagttgtaccccaatgttccatgtatagaaaaacttcattagaacaaactttacttgatatgaaactcctattaacagtcttttttgaaataaaagtagcttgagctttcttttaaaatcatgtatcttgattgttgatttaatg

SEQ ID NO: 25966 - DNA, 538 bp, Macaca Mulatta
cacccgggctgcctgcccctgctgctttggatgtgtacagcacagaatgggtattatttaaataaaggagaaaagtgggctgcagcagccggaatagagcctcgtctggcaagtcggggcctgggacacttccctgggcctcaacaaggaatcaggctgccggaaacacagtcacttgggagctgctgggctaggtccagatcgctccagcgtcaaggtggcatccgagggtgactctggtcttccagtgcggtgggagaggcctcatccagggcccagcggtcccggcagaagccagaaggtgcaggggccaggggtgggagcatcggagggagtcccagagccctgggccttgggcctggaccgcgtgagaaaactgggttgagggatgctggagccagttacacgactgaagtcagtgtagacctgagctgggagggaacctgttagtccccccacttcttccccaagagacaggcacctcatcccagccctgggtcagcggagggagtagcacttctgccttgagtccccaggg

SEQ ID NO: 25967 - DNA, 713 bp, Macaca Mulatta
  misc_feature (1)...(713): n = A,T,C or G
ccgcaatagtgacctgtgcttgtctgtttagttctgtgtataaatggaatgttgtggagatgacccctccctgtgccggctggttcctctcccttttcccctggtcactgctactcatggaagcaggaccagtaagggaccttcgattaaaaaagacaatnnnnnnnnnnnnnnnnnnnnnnnnnnnnnnnnnnnnnnnnnnnnnnnnnnnnnnnnnnnnnnnnnnnnnnnnnnnnnnnnnnnnnnnnnnnnnnnnnnnnnnnnnnnnnnnnnnnnnnnnnnnnnnnnnnnnnnnnnnnnnnnnnnnnnnnnnnnnnnnnnnnnnnnnnnnnnnnnnnnnnnnnnnnnnnnnnnnnnnnnnnnnnnnnnnnnnnnnnnnnnnnnnnnnnnnnnnnnnnnnnnnnnnnnnnnnnnnnnnnnnnnnnnnnnnnnnnnnnnnnnnnnnnnnnnnnnnnnnnnnnnnnnnnnnnnnnnnnnnnnnnnnnnnnnnnnnnnnnnnnnnnnnnnnnnnnnnnnnnnnnnnnnnnnnnnnnnnnnnnnnnnnnnnnnnnnnnnnnnnnnnnnnnnnnnnnnnnnnnnnnnnnnnnnnnnnnnnnnnnnnnnnnnnnnnnnnnnnnnnnnnnnnnnnnnnnnnnnnnnnnnnnnnnnnnnnnnnnnnnnnnnnnnnnnnnnnnnnnnnnnnnnnnnnnnnnnnnnnnnnnnnnnnnnnnnnn

SEQ ID NO: 25968 - DNA, 656 bp, Macaca Mulatta
caaaatgcccggcgaatccacagaaaccgtccccggtatagagcaggagttgctgcagccccaggctgagacagggtctggaacagaatctgacggtaatgagtcagtaccagagcttgaagaacaggattccacccaggtaaccacacaacaagcccagctggcggtagcagctgaaattaatgaagaactagtcagtaaagcaaaacagaggcggagtgaaaagaaggcacgggaagctgtgttcaaactgggtctttgacaggtgacaggagttactagagtcactatccggaaatctaagaatatcttctctgtcatcacaaaaccagatgtctacaagaaccctgctttggatacctgcatagcttttggggaagccaagatcaaagatttatctcagcaagcacaactagcagttgctgagaaattcaaagttcaaggtgaagctatctcaaacattcaggaaaacacacagactccaactgtacaagaggagagtgacgaggaagaggtcgatgaaacaggcgtggaaattaaggacatagaattggtcatgtcacaagcaaatgtgtctagagcaaaggcagtcggagccctgaagaaagtaatgatattgtaaatgctattatggaattaacaatataaccatctga

SEQ ID NO: 25969 - DNA, 432 bp, Macaca Mulatta
  misc_feature (1)...(432): n = A,T,C or G
agatccagaccagctcctcccaaacctctccagaagaagccatgggaacccctcgtatccagtatttgctgatcctcctggtcctaggaccctccctcctgacctncgggcctagaactgtattgtcaaaagggtctggccatgactgtggaagcggatccagccaatatgtttaactggaccacagaggaagttgagatttgtgacaaaggggcactttgccaggaaaccgtactaatnnnnnnnncagggactgagacagccattttggccatgaagggctgcatcccagatggggaggaggccataacaattgtccagcactctccacaccccggcctgattgtgatctcctacagtaactactgcgaggattccttctgtaatgacaaagacagcctgtctcagttttgggagttcagtgagaccaca

SEQ ID NO: 25970 - DNA, 170 bp, Macaca Mulatta
agtgcgccttcctgttgttctgcatggcccccaggccctggaacggggctctcatgctgtatcagcgcgtcgtgcgcccgctgttcctaaggcaccacggggccgtggacagaatcgtcaacaacctcagcgggcgagcccaggacgcggcggccggaataaccaggaac

SEQ ID NO: 25971 - DNA, 643 bp, Macaca Mulatta
aattgatgatcaacgtggaaatcttagtgggaacgcataagcataaaggtgaggctaaagaacaagagaggaaaaaggagaggagtcgaagtatagataaagatcaggaaaaagaaagacaaagaaagggaacgtgaacaggataaaagaaaagagaaacaaaaaagggaagacaaagattttaagttcagtagtcaggatgatagattaaaaaggaaacgagaaagtgaaagaacattctctaggagtggttctatatctgttaaaatcataagacatgattctagacaagatagtaagaaaagtactaccaaagatagtaaaaaacattcaggctctgattctagtggaaggagcagttctgagtctccaggaagtagcaaagaaaagaaggctaagaagcctaaacatagtcgatcgcgatccatggagaaatctcaaaggtctggtaagaaggcaagccgcaaacacaagtctaagtcccgatcaaggtagtatactttttaaagtattttgtctgatttcttaaaaaatttgactgaatttattcaaagttgaaagtgtcctttctctctctctttaataaactcagtttggtacttgataaataatcatagtcttaaatgttagaaatcctatataa

SEQ ID NO: 25972 - DNA, 1892 bp, Macaca Mulatta
  misc_feature (1)...(1892): n = A,T,C or G
gggatcttaatgagggaatggattttgacaccatggatatagatttgccaccatcaaagaacagacgagagagaacagaactgaagcctgatttctttgatccagcttcaattatggatgaatcagttcttggagtgtcaatgttttaataccagtacacaattaaatctgtggtgaagtcattttctaagtggaagaggaaattttaaagtgtggtagatacagtgaaattctgtacagatttttctctaaggagaatatgacatgcttatgcttaccaagatcaagtgcattgaggggcagttttgtttgcctgaataaaagtaaaggacaagtaaacaatttgatgataagctacagtttttcttagaaagtaaatattttatttatgcgctgttagttggcttttgaatcaattatttcatgnnnnnnnnnnnnnnnnnnnnnnnnnnnnnnnnacaatctgaagaggcatttggtacagatacgaattctcttacatttatttactggttgtactaaataatgatgacctctgctggatttttgtttacatccagaaaacaatgttaaggatgtatttattcccctaccctgaaggaagtgtaggatagaattgtttttagcattctaaatttaaatgcttaaaacatcaatcaacaaaacctttgttttaaatattgtaattgtggagaaaaagtaaacttataagcggaacttttacaatttttttcatctaaaagtattttaagatatttttaaaatccaagagcttctctatacttttcagaaatatccagatgcagtgaactgccagaaggtaaccagtctcaaacatgcttatcccattatcaaccctgaaagtttgcttgtcctttaagataaaaatgtaatgttgtgatattccttccagtagtgccactgtattttgtctccaaataaaagaagcttattgtagtatgtttgcagaaaaattctaaacaaaaattatacagcttattagagtgtgggaatagggatctaaannnnnnnnnnnnnnnnnnnnnnnnnnnnnttggtgctgattttataattgcgcagtttgtttagttttttcttacttttaaattccaacttaaaattatgaggtttcagacatatattgaaagtttaacaatgtctaaaaatagaaaagcatgagtgttcatgctttaaaatgatttttaaatttgtattttatattgttttatctatctgtctttgcaagcagtcttcaggttaaagatacttctaacaggttacagtacatttccgctgtatgtaaattagatgggataatagaattcataacccataatattctttgaaagctaagctttaaacttcattttatgtcctttcacaaataaattagtttaaaacagaaagtggctacttgccattttgacatcaactcattttgcgaggcttaggcagctagacatcgtttaaaacaaaatattaacttatattacatgtgtatctatcttttgtcagtcgtctctcagttcttgaggtatattattttaatcattccatgccttaatatgcttgcaatacaagaatatcttcagatgggtgaataccaaaaggctttcagtttttagtcagaaatcaagcattgggctgtggtagccaaaaaccataggttagctaaaaagatcatgatacaattattttattacgtcatggttaataaccaatgaatccagacttgtctaacaggattttccatcaacaaatattgttatgtgcaaaagtattgcctatagtagtgtaacacaccactgcattaactagaactgctgagaggaatgtatatatgattttaaacctaacgttgatttttttcctcactcttgaaaggagtactt

SEQ ID NO: 25973 - DNA, 675 bp, Macaca Mulatta
atggcattttatcccttgcaaattgctgggctggttcttgggttccttggcatggtggggactcttgccacgacgcttctgcctcagtggagagtatcagcttttgttggcagcaacattattgtctttgagaggctctgggaagggctctggatgaactgcatccgacaagccagggcccggttgcaatgcaagttctatagttcattgttggctcttccgcctgtcctggaaacagcccgggcactcatgtgtgtggctgttgctctctccttgatcgccctacttattggcatctgtggcatgaagcaggtccagtgcacgggctctaatgagagggccaaagcatatcttctgggaacttcaggagtcctcttcatcctgacgggcatcttcgttctgattccggtgagctggacagccaatgtaatcatcagagatttctacaacccagctgtccacataggtcagaaacgagagctgggagcagcacttttccttggctgggcaagcgctgctgtcctcttcattggaggcggtctgctttgtggattttgctgctgcaacagaaagaagcaaaggtacagatatccagtgcctggccactgtgtgccacacacagataagcgaagaaacatgaaaatgcctagtaatacctccacccagttatgtcta

SEQ ID NO: 25974 - DNA, 721 bp, Macaca Mulatta
gcctatgggtggggcaaggcatcaatgacagcctcagtgaagtcatggcaagtagcatagccacccatgtcagaggttcgaacctgtgggggagaatcatcatcatccatgtggcctgggttccagcctaacaattcccatcaccacccaacagtctcccctaaggaagcgggccaggacaacctaggctctacccagcaaggtgaccatggtccactgcctagaggcacaaggtctcttccctggtgcactgcactgaagggtatggggagtgtggtccttgcaaggctggaagaaataaagggctctagctcccatgggggtgcaggtgaccgatgacagacttgatgaagtcggttgtggtgctgtagccgcccatgtctcgagtccgcacctacagccaccaccggcaacagccgtggggagggagaaaagagagcccatgaagggagatagggcaatgtgattgaggaaatggaatccaagaatgcgtgacagccagaaaaaagaggcaatgcacaggaatggaaggaggagccaggttgggaagcacatggacctgcccactcctcttaagccactattagctgtgctgcagccagagcaggacaggaggctgagcaggcaaagatgatgggaaatgcagatcagaggcgcaatgtggctaccttccttggaagaaatagagacaagaccaggtggaaggaaagaatcgcagcgg

SEQ ID NO: 25975 - DNA, 527 bp, Macaca Mulatta
aggaacaatgaggtgaaaaatgccatgaggaagctgtttagcatcaagaagagcttaggggagaagtgacactccagagaatctcaatccagccaggaaattgggagactttccatcttgtagcatctaacacagcctttgtatttccagtctgatgtttgcaatggcaattatcctcctagctcttgttgttctaataaccccacatattctttcaatcctttattcattaaatatttattgaatgtttacagtgagtgagaatacaaatgaaagtaagatatagtctttccctcaaggagagtagactccagaaggttcttagtgtgatatttaagagctcattcaagaaacttgtgagggcctgtgaatgagggagtgtctgggaagtccaggtatctcattgataaatgaataaaatcactacataattcatttgcgttggctaacacagtgctcagtgaaattcatttttcttttaagagtaaagagccactttactcttatccctccatactctcagcagg

SEQ ID NO: 25976 - DNA, 580 bp, Macaca Mulatta
atgcagtcccgggaagacgccccgcgctctcgccgcctcgccagcccccgcggtgggaggcggcccaagaggatttccaagccctcggtttcggcctttttcacgggtccagaggaattaaaggacacggcccattctgcagccctgctggcacagctcaagtctttctacgacgcgcggctgctgtgtgatgtgaccatcgaggtggtgacgcctggcagcgggcctggcacgggtcgcctcttttcctgcaatcgcaacgtgctagcagctgcgtgtccctacttcaagagcatgttcacaggtggcatgtacgagagccagcaggccagcgtgaccatgcacgatgtggacgccgagtccttcgaggtgttggtcgactactgctacacgggtcgtgtgtctctcagcgaggccaatgtgcagcgcctgtacgcagcctccgacatgctgcaactggagtatgtgcgggaagcctgtgcctccttcttagcccgacgtcttgacctgaccaactgcaccgccatcctcaagtttgcagacacggtcgaccatcacaagcttcgatctcaggcccagt

SEQ ID NO: 25977 - DNA, 661 bp, Macaca Mulatta
ggaccacgcggcgccagtcctcccgcgggaaggaaaacccggcagagaggcagcaatgaatgtggatcatgaggttaacctcttagtggaggaaattcatcgtttgggttcaaaaaatgctgatggaaagttaagcgtgaaatttggggtcctcttccgagacgataaatgtgccaacctctttgaagcattggtaggaactctcaaagctgcaaaacgaaggaagattgtaacgtattcaggagagctgcttctgcaaggtgttcatgatgatgttgacattgtattactgcaagattaatgtggttcacatatcttttatgtaccaccattttttgtttctggtaaactggaatataaagtgaaagaacaaacatttgaacatacttaatgtatttttatagaactttgtaaacaaaaggagattaatgtattagaagtctgtccttttttatatcttgaaagaaaatttatgtatgatgctataaaataaacaaatcctattatttttctcaggaatctggttgggaattgtaggcaatgaggtttaatgggaggcggggacaggggaatgtttgtgtcataaatcattagacattttctatagatatctgacattctgcgaaagcgacaagcaaattgaagaccaactcctatgaga

SEQ ID NO: 25978 - DNA, 2100 bp, Macaca Mulatta
  misc_feature (1)...(2100): n = A,T,C or G
gttcctgtgggtcagcagcctggacacagcttacctgggtccactgctcgggaggatctcacaaggcttcaatcaagatgtcagcccaggctgtggtctccactgaggctccaagggaaagaccctgcttccaagctcacctaagttgtttgcaaaatttggttcttcgcagctgtagaatggagggcttcagtttatttctagctatgtggtggggcggggtgagggagctgccctcagatcctagaggtcacccacaattccttgccccttgtctatgctgcacagaggcggcccacgcatttcagcttgctttgccaaagctagcaacgaaagactccagcaagacacattctatcatcttatgtatgcaatcctgtgcaggcaatcacggacatgtccatcacatacgtaaccacgtccactccatcacctttgctgtattcttttggcccactcaaagggtgtggactagttagggagtgagaatcagccctcttaagtcagccttcgctatttcatgtgccagctttctagaatattgatccttttggtattttaagtcatatctgttgtcattggaaatcctctttgaagtagaaaggacagagctcacaaaatataaaccgcaccactattcctgcctgtcatttagacgtttgccagggtagcaggttgatttcagtcttttnnnnnnnnnnnnnnnnnnnnnnnnnnnnnnnnnnnnnnnnnnnnnnnnnnnnnnnnnnnnnnnnnnnnnnnnnnnnnnnnnnnnnnnnnnnnnnnnnnnnnnnnnnnnnnnnnnnnnnnnnnnnnnnnnnnnnnnnnnnnnnnnnnnnnnnnnnnnnnnnnnnnnnnnnnnnnnnnnnnnnnnnnnnnnnnnnnnnnnnnnnnnnnnnnnnnnnnnnnnnnnnnnnnnnnnnnnnnnnnnnnnnnnnnnnnnnnnnnnnnnnnnnnnnnnnnnnnnnnnnnnnnnnnnnnnnnnnnnnnnnnnnnnnnnnnnnnnnnnnnnnnnnnnnnnnnnnnnnnnnnnnnnnnnnnnnnnnnnnnnnnnnnnnnnnnnnnnnnnnnnnnnnnnnnnnnnnnnnnnnnnnnnnnnnnnnnnnnnnnnnnnnnnnnnnnnnnnnnnnnnnnnnnnnnnnnnnnnnnnnnnnnnnnnnnnnnnnnnnnnnnnnnnnnnnnnnnnnnnnnnnnnnnnnnnnnnnnnnnnnnnnnnnnnnnnnnnnnnnnnnnnnnnnnnnnnnnnnnnnnnnnnnnnnnnnnnnnnnnnnnnnnnnnnnnnnnnnnnnnnnnnnnnnnnnnnnnnnnnnnnnnnnnnnnnnnnnnnnnnnnnnnnnnnnnnnnnnnnnnnnnnnnnnnnnnnnnnnnnnnnnnnnnnnnnnnnnnnnnnnnnnnnnnnnnnnnnnnnnnnnnnnnnnnnnnnnnnnnnnnnnnnnnnnnnnnnnnnnnnnnnnnnnnnnnnnnnnnnnnnnnnnnnnnnnnnnnnnnnnnnnnnnnnnnnnnnnnnnnnnnnnnnnnnnnnnnnnnnnnnnnnnnnnnnnnnnnnnnnnnnnnnnnnnnnnnnnnnnnnnnnntttacaattttggcccagttaggtacttgggattcatctgaagggactggcttntgaaggatttgttctgtgagcacttgtgaacctgagaggccgggaaggcagagtgaaaaccagaacccttggcacccatcagttagcacaggatcatntcctggatcatcaggatcccttataaatgtgtctaatggccaacttgcagagagagctgttgttgatacactcttctgagtttccctctgtgaacaccttcatctggttcatacaggaaaattaaggaagccgaatttttgggagagtgattgaaattgtggaataatcaaagcaaaccaatggcagcttgtgtttaaaattaaagaccaactgtaaagcacggcatttacctatagtaatttctaaaagttatcaacagagtgaaacaacacccagtgggccatgaccatgtcaactttggctcattcctcagaaactagatggtgtcagggctccatgttcatggacaccatgaggggagcctcctagcaat

SEQ ID NO: 25979 - DNA, 663 bp, Macaca Mulatta
cctatgatcgctatgtggccatctgctcacccctggtgtactccacctacttgtcccccagagtctgcatcctcttagtggtggcttgctacctgggtggatgtgtgaatgcctcaacatttactagttgtttattgaatctgtctttctgtggaccaaatcatatagatcattttttctgtgatttctctcctttgttgaaactttcctgctcagatatctccattcctgaaatgataccttccatctcttctggatctatcattgtggtcacagtatttgttatagccatctcctacatctacatcctcatcaccatcctgaagatgcgctccaacgaggggcgccacaaggctttctccacctgcacctcccacctcacagcggttactctctactatggaacgattaccttcatttatgtgatgcccaagtccagctactcaactagccagaacacattgatatctctgtcctacacagtggtaatccccataacgaacccctttatctatagtctgaggaacagagatgtaaaggaggcactaagaaaggcagctgtcagaatatattcttaggattaattcacagcatttcagacaacctataaagttttcattatcggtatcacacttaggacctaccaaatactgcttagctgac

SEQ ID NO: 25980 - DNA, 395 bp, Macaca Mulatta
  misc_feature (1)...(395): n = A,T,C or G
aggccaaggcaaaggccaaaacttacgagttccgaagtgactcagccaggggcatccggatcccctaccctggccgctcgccccaggacctggcttccacttcccgggcccgggagggccttcgaaacatgggtttgtccccaccagcaagcagtaccagcaccagcagcacctgccgcgcagagccccctcgggaccnnnnnnnnnnnnnnnnnnggaccgggagcgggatcgagaaagggagagggagcgagagaggcagcggtaacgtgagagggaacgagagcggggtaccagccgagtggatgacaagcccagctcgccgggggacagctctaagaagcgaggccccaagccgtgtaaggagctcccggacccctcacagaggcccttag

SEQ ID NO: 25981 - DNA, 3391 bp, Macaca Mulatta
  misc_feature (1)...(3391): n = A,T,C or G
gtgatgtcttggcattgcccattttcaagcaggaagattccagccttccattggatggtgaaacagagcacccaccctttcagtatgtgatgtgtgccgcaacgtcgccagcagtaaaactgcatgatgaaacgcttacttatttgaaccaaggtnnnnnnnnnnnnnnnnnnnnnnnnnnnnnnnnnnnnnnnnnnnnnnnnnnnnnnnnnnnnnnnnnnnnnnnnnnnnnnnnnnnnnnnnnnnnnnnnnnnnnnnnnnnnnnnnnnnnnnnnnnnnnnnnnnnnnnnnnnnnnnnnnnnnnnnnnnnnnnnnnnnnnnnnnnnnnnnnnnnnnnnnnnnnnnnnnnnnnnnnnnnnnnnnnnnnnnnnnnnnnnnnnnnnnnnnnnnnnnnnnnnnnnnnnnnnnnnnnnnnnnnnnnnnnnnnnnnnnnnnnnnnnnnnnnnnnnnnnnnnnnnnnnnnnnnnnnnnnnnnnnnnnnnnnnnnnnnnnnnnnnnnnnnnnnnnnnnnnnnnnnnnnnnnnnnnnnnnnnnnnnnnnnnnnnnnnnnnnnnnnnnnnnnnnnnnnnnnnnnnnnnnnnnnnnnnnnnnnnnnnnnnnnnnnnnnnnnnnnnnnnnnnnnnnnnnnnnnnnnnnnnnnnnnnnnnnnnnnnnnnnnnnnnnnnnnnnnnnnnnnnnnnnnnnnnnnnnnnnnnnnnnnnnnnnnnnnnnnnnnnnnnnnnnnnnnnnnnnnnnnnnnnnnnnnnnnnnnnnnnnnnnnnnnnnnnnnnnnnnnnnnnnnnnnnnnnnnnnnnnnnnnnnnnnnnnnnnnnnnnnnnnnnnnnnnnnnnnnnnnnnnnnnnnnnnnnnnnnnnnnnnnnnnnnnnnnnnnnnnnnnnnnnnnnnnnnnnnnnnnnnnnnnnnnnnnnnnnnnnnnnnnnnnnnnnnnnnnnnnnnnnnnnnnnnnnnnnnnnnnnnnnnnnnnnnnnnnnnnnnnnnnnnnnnnnnnnnnnnnnnnnnnnnnnnnnnnnnnnnnnnnnnnnnnnnnnnnnnnnnnnnnnnnnnnnnnnnnnnnnnnnnnnnnnnnnnnnnnnnnnnnnnnnnnnnnnnnnnnnnnnnnnnnnnnnnnnnnnnnnnnnnnnnnnnnnnnnnnnnnnnnnnnnnnnnnnnnnnnnnnnnnnnnnnnnnnnnnnnnnnnnnnnnnnnnnnnnnnnnnnnnnnnnnnnnnnnnnnnnnnnnnnnnnnnnnnnnnnnnnnnnnnnnnnnnnnnnnnnnnnnnnnnnnnnnnnnnnnnnnnnnnnnnnnnnnnnnnnnnnnnnnnnnnnnnnnnnnnnnnnnnnnnnnnnnnnnnnnnnnnnnnnnnnnnnnnnnnnnnnnnnnnnnnagctgaaaatagtgatggcatccacataattttgaagtgatgtcttatatagactgaactatattcagtactaaatagtcacgcttaaaagtgtgtgaagactgaatccaagaagtcttgggattggattttaccatatgaaatgtttcatattgaaaacacaagatgacctttctaacgagctgtatgagaggtgaatctcctcactgtcactgccatagccaagcaccctcatgagagtgagcacatcggcacagcatgcatccagctctggaggccacagtgcaggcatagctgcccgctgctctggcagaggccagtaaatacagttcctagaagcagcctttgctgtctttttacactgtatgcggtttggaaatgaatgtagaaacttactgtgggcatttacctttctgtgccagtttggcttttattgcctgaaccttatgctgacctggagaggagatgggggacagtgctgttttggggccagcagtgaatctgtatgcggaaagatgtgttgtgctgatgtggccgttggtggtcaggtaaaaggctcggcaccttcttggaagaaatcatgtctaagggtgtacgtttgatatgatcatgccagattggagaagatccaagccaggaagatgggcttgaagcaaactgacagtatcaggagtaccttggtgagaggatcagtgtaaatcatagtaggtacaaagacttttgtgttnnnnnnnnnnnnnnnnnnnnnnnnnnnnnnnnnnnnnnnnnnnnnnnnnnnnnnnnnnnnnnnnnnnnnnnnnnnnnnnnnnnnnnnnnnnnnnnnnnnnnnnnnnnnnnnnnnnnnnnnnnnnnnnnnnnnnnnnnnnnnnnnnnnnnnnnnnnnnnnnnnnnnnnnnnnncccaccatcctgttaaacattttttaaagccctaccccagacattggaaataggtgacccaagtagggggagaaagtattattgttgatagcttctgaataggtgttaaggaatcttcattatgaacaagatgaatttttttgtggaaacactagatgttatcaaacactaaaatgtaccatacaaatcccttaagcctctcctcaaatattgagctttagtacaatcatggatagacattctggtgatgatttaggggctttttatacaccacataatagcttctttctctataaaaagagtgcctctttcataaaaccaaatgcttgtctgctagcatacttttcaaagggaatccactgtttcctcactttcctcccatatctatctccgtccttcatccaaaaccttcccagaatccatcagcaagcatgtttgaggcctatggtgtaggggactgaattttttttttaaacttctattccattttaattgtaggatctctgtccatatacccaggtgtccttatttgaatgtactatttggtcctcatctgtgttcaggcaaaaaataggaaatgagtaattttgagtttgtaatctctcccggaagacaaactgcttcagtttgtaaaagctttgacatgttttattcataaagggggttaattatttgctacaaagaagcacggtctgttttcatcatcgatttgaaagtatctgtaactcctatagatcctataggcagagctttcctttctgactttttgcctttgcttttgtgtgaccacatgtttcctgtaccagtcactggggaaagaagtgagtttatctcttgttttaaaagttttgcttgtctatttagcattcctttttgggtctcaagatttatggaacaataaatgtcatttaatgctgtgtgcttattttgaattcctcatcaggttttagaagcggggtaaaaatacttagacgcttatgagacttaaattttactgcgtggcattgaacatgagtttgtcccagtgaaacaggctaaataaatcttggcaccagcaaatttgttactttgtttttttaatagtaggatgtacacatttcagtataataaatgttttctgattgttttg

SEQ ID NO: 25982 - DNA, 926 bp, Macaca Mulatta
  misc_feature (1)...(926): n = A,T,C or G
gcttcagctctgagaaactacgtgtgcagtcctacgagtcctcagaggacttgctccgaggcagcaggcagccctgcccgaaaggtgaagatgcggcggcactgaggtctacccgccgccctcctgggaactctggctcatccttatgtagttgcccctccttttgttttgagnnnnnnnnnnnnnnnnannnnnnnnnnnnnnnnnnnnnnnctatatatttttccttggttttgttgcctgttaaggctgaagaatagaattggccaggacctgggttctcatattcttggtatttctcctggatgaaaaggttgttggcatctataggggacagaggctgatgctggagtggccagtagaggtggtggagcagagcagccatcttttaagtggggctgtatcaggatgggtttatttaaaagcaacaaaatgttttggttaagaaaattattttgctttccatgtaaatctccgcagtgttctaaacaaagttcagtcttctgcctgccccttttctccactggatgtctgtacttggttgaggtctcctggagcctcacaggctctacatgggggctgctgttctccacttctcacctgccatccacgccctgcaagctcatgcaaacaccctttcttcctcctgcggcagagttgttcaggttgcctgggcaggggcttaaacagtgccagcccctgccatcccaaagctattgttaagccccccaggcttcctccacccacgccctctagcctactctgtccacagttccttgggctgctgaggggctagtgcagtggtcctgacctctcttatcaagagcacacttttttgctggttgctccttttgagcatatgcgtgtgattatttggaacagttagacttgccacgttgggtcagttttagaaattgtttctagct

SEQ ID NO: 25983 - DNA, 133 bp, Macaca Mulatta
gagaaatccaacccacacagtgaattcagccaccggaacctcatcatcaacacgctctcgctcttctttgctggcactgagaccaccagcaccactctccgctacggcttcctgctcatgctcaaataccctc

SEQ ID NO: 25984 - DNA, 279 bp, Macaca Mulatta
tcaggcactcagctctaggtcgctgacgtatttctggacccactccttactggggtcagcacagacctgccggcctctcttggttaggaagatgacaccgggcttggagcactggctgttggtctcaaagtagtcagctatgaaattctgtggaatctgccgggagatgtagctgaagcagcaggaggtcggggtgtcagcagcaaatgttgctgagatccggttgcagagagccacggtgcagaggaggacagcaagggcagcagtggagacctgcat

SEQ ID NO: 25985 - DNA, 1673 bp, Macaca Mulatta
  misc_feature (1)...(1673): n = A,T,C or G
ctagcaaaaaagatgatccgggtataataatgaagttaaaagagcagcactccaagnnnnnnnnnnnnnnnnnnnnnnnnnnnnnnnnnnnnnnnnnnnnnnnnnnnnnnnnnnnnnnnnnnnnnnnnnnnnnnnnnnnnnnnnnnnnnnnnnnnnnnnnnnnnnnnnnnnnnnnnnnnnnnnnnnnnnnnnnnnnnnnnnnnnnnnnnnnnnnnnnnnnnnnnnnnnnnnnnnnnnnnnnnnnnnnnnnnnnnnnnnnnnnnnnnnnnnnnnnnnnnnnnnnnnnnnnnnnnnnnnnnnnnnnnnnnnnnnnnnnnnnnnnnnnnnnnnnnnnnnnnnnnnnnnnnnnnnnnnnnnnnnnnnnnnnnnnnnnnnnnnnnnnnnnnnnnnnnnnnnnnnnnnnnnnnnnnnnnnnnnnnnnnnnnnnnnnnnnnnnnnnnnnnnnnnnnnnnnnnnnnnnnnnnnnnnnnnnnnnnnnnnnnnnnnnnnnnnnnnnnnnnnnnnnnnnnnnnnnnnnnnnnnnnnnnnnnnnnnnnnnnnnnnnnnnnnnnnnnnnnnnnnnnnnnnnnnnnnnnnnnnnnnnnnnnnnnnnnnnnnnnnnnnnnnnnnnnnnnnnnnnnnnnnnnnnnnnnnnnnnnnnnnnnnnnnnnnnnnnnnnnnnnnnnnnnnnnnnnnnnnnnnnnnnnnnnnnnnnnnnnnnnnnnnnnnnnnnnnnnnnnnnnnnnnnnnnnnnnnnnnnnnnnnnnnnnnnnnnnnnnnnnnnnnnnnnnnnnnnnnnnnnnnnnnnnnnnnnnnnnnnnnnnnnnnnnnnnnnnnnnnnnnnnnnnnnnnnnnnnnnnnnnnnnnnnnnnnnnnnnnnnnnnnnnnnnnnnnnnnnnnnnnnnnnnnnnnnnnnnnnnnnnnnnnnnnnnnnnnnnnnnnnnnnnnnnnnnnnnnnnnnnnnnnnnnnnnnnnnnnnnnnnnnnnnnnnnnnnnnnnnnnnnnnnnnnnnnnnnnnnnnnnnnnnnnnnnnnnnnnnnnnnnnnnnnnnnnnnnnnnnnnnnnnnnnnnnnnnnnnnnnnnnnnnnnnnnnnnnnnnnnnnnnnnnnnnnnnnnnnnnnnnnnnnnnnnnnnnnnnnnnnnnnnnnnnnnnnnnnnnnnnnnnnnnnnnnnnnnnnnnnnnnnnnnnnnnnnnnnnnnnnnnnnnnnnnnnnnnnnnnnnnnnnnnnnnnnnnnnnnnnnnnnnnnnnnnnnnnnnnnnnnnnnnnnnnnnnnnnnnnnnnnnnnnnnnnnnnnnnnnnnnnnnnnnnnnnnnnnnnnnnnnnnnnnnnnnnnnnnnnnnnnnnnnnnnnnnnnnnnnnnnnnnnnnnnnnnnnnnnnnnnnnnnnnnnnnnnnnnnnnnnnnnnnnnnnatctgtttttaagctccatctggtcctcataacctgtaacttttttcttaaaacctttcagctgaaagtggggtagaggtggagtaatctgtggatttgtttctgttgtcttttaaaatgtcaaatatgtaaatttttaaaaaaaccaccagatgcagaaatgtgctttgacatcatttgaaacctaaattttcttatgttgtgattatattaaaaagggataaaagaagagtgtcaaacatgattaaatatattgtacttatttatgttgaatacatatta

SEQ ID NO: 25986 - DNA, 242 bp, Macaca Mulatta
ctgcaagacatttccattccatttcatgtttgacaaagatatggcaattctgcaatttggcaacggcatcagaaggctgatgaacaggagagactttcaaggaaagcctaattttgaagaatactttgaaattctgactcccaaaatcaaccagacatttagcgggatcatgactatgttgaatatgcagtttgttgtacgggtgaggagatgggacaactctgtgaagaaatcttcaaggg

SEQ ID NO: 25987 - DNA, 395 bp, Macaca Mulatta
  misc_feature (1)...(395): n = A,T,C or G
gacctgaaggctgaaattgacaagttggccactgagtatatgagtagcgcccgcagcctgagctccgaggaaaaattggcccttctcaaacagatccaggaagcctatggcaagtgcaaggaatttggtgacgacaaggtgcagcttgccatgcagacctatgagatggtnggtggacaaacacattcggcggctggacacagacctggcccgttttgaggctgatctcaaggagaaacagattgagtcaagtgactatgacagctcttccagcaaaggcaaaaagagngccggactcaaaaggagaagaaagctgctcgtgctcgttccaaagggaaaaactcagatgaagaagcccccaagactgcccagaagaagttaaagctcgtgcgcac

SEQ ID NO: 25988 - DNA, 80 bp, Macaca Mulatta
tacttttactcttcagctctagttatatttctagattcaacagtttgcaattctctgggccttatccttgtttattaact

SEQ ID NO: 25989 - DNA, 71 bp, Macaca Mulatta
ccagatggctacctgtatgagcgtgaggccatcctggagtacattctgcaccagaagaaggagatcgcccg

SEQ ID NO: 25990 - DNA, 1162 bp, Macaca Mulatta
gggggacatgctccggaagcagttttttggccctgtgacacgtagcaacggggctgtttcagggtctgaaacagagtttgggggttgtttgggactactgaagctactgccttcgccgccagcgcagcctgagagtttgattatttgcaatgtcaggctttgaaaacttaaacacggatttctaccagacaagttacagcatcgatgatcagtcacagcagtcctatgattatggaggaagtggaggaccctatagcaaacagtatgctggctatgactattcgcagcaaggccgatttgtccctccagacatgatgcagccacaacagccatacactgggcagatttaccagccaactcaggcatatactccagcttcacctcagcccttctatggaaacagctttgaggatgagccacctttattagaagagttaggtatcaattttgaccacatctggcgaaaaacactaacagtattacatccattaaaagtagcagatggcagcatcatgaatgaaactgatttggcaggaccaatggttttttgccttgcttttggagccacattgctactggctggcaaaatccagtttggctatgtatacgggatcagtgcaatcggatgtctaggaatgttttgtttattaaacttaatgagtatgacaggtgtttcatttgggttgtgtggcaagtgtcccttggatattgtcttctgcctatgatccttctttccagctttgcagcgatattttctttgcaaggaatggtaggaatcattctcactgctgggattattggatggtgtagtttttctgcttccagaatatttatttctgcattagccatggaaggaccgcagcttttactagcatatccttgcgctttgttatatggagtctttgccctgatatctgtcttttgagaatttctctgggatgtgaacatcagtgggccggatgtacaccaaggacctttgaactcttgtattgggaccgggtgaactgctgccgcgcaactctcatgcagatttaccttttgactgttggagcaatggggagtaaatgtgtatctcttggtcattttttcattgaacttttgattactggtattggatcttccctgccaactgtgacctagcgtttaaatggttccgggttta

SEQ ID NO: 25991 - DNA, 866 bp, Macaca Mulatta
  misc_feature (1)...(866): n = A,T,C or G
taacattgccaccagaaggaaggaatcaggcaggtgaaggcaacatgatgccagattngagaaaggatctgcaaaataaagataccacaactcatctcaaaactgcagagatttaatgtttcagggaatagatgtgaaacaagggatcataggaaaaggggaaagagaaatgatctgtttttcagttatgacatagaaaaccaaactgcaagtgtggactatgacaaaaaatatgctaatacctttgcaatctcaatgagaatttgaccgtttgcgtgtgccctctacccttaaattcagaaataaagacaatcaaaaattaaaataattgcccagctgaaaactgctatgagggatgaattgtcaggttgctgaagtataaaaataaactcttggttgtcctgtgcttatatttattgaaatttatgttttttactgagtaaagatatttgcatatgaatctccatttttttttcattaccctgggcaatttaaagaaatcatatcatagcttagttcagatactaaaatttgaagttttcttagaccttagaacatctcttttcctggttcctttttctcctcaaagctcaattagaatagcaaaatttataagctagtaaacttatactatagcaagtgttgctatcaagtgtttttctccataggaagtgtgaactgtgtattgtctattgttagtaatttttaaaatgcctttatgtacataatcttgatggagctattagctgaactataaaatatactcttggtaaaaatcactaatttcaaagatcagggtaaccttaacagagatgtgtcatttctgcctttgtttgggacagggagacaggctggggaagttacca

SEQ ID NO: 25992 - DNA, 283 bp, Macaca Mulatta
ggcgtgcgcccaatccggaaaggccttcagccagcgctccaacctgctcagccaccagcgcacgcactcgggcgccaagcccttcgtctgcgccgactgcggtagggcctttcgcggcagctcgggcctggcgcaccaccggctcacgcacacgggcgagcggcccttcgcctgcgcagaatgtggcaagacattccgcggcagctccgagctgcgccagcaccagcgcctgcactctgttgagggaccgttcgtctgcgcccactgcagcaagtacttcgtg

SEQ ID NO: 25993 - DNA, 874 bp, Macaca Mulatta
tccctagtcaatgctcccagccacaagctgatattataaacaatgtgagttttcactttcatttagaatccatgatgaatttggatactttccctctccagctttatcactaaaattatgaaatgtaaagcagttttagtttaactgctttttttccccatgatccaatggtaaatcctcactagactgagataatcaaaatcctcatgcttgatactctaacaatatataacttgcctatgtttgcccccataactttgttttttatccaatccagcactaatgtatgcaagcatttttgggaatgtatctgcaattatccaaagactatactcgggaactgccaggtaccacatgcagatgctgcgagtaaaagaattcattcgctttcaccaaatccccaaccctctgaggcaacgtcttgaagaatatttccagcacgcatggacttacaccaatggcattgacatgaacatggtatgtatgtctgttttccaaaatgaaagtgccacaggcattatagtgatagccaaaatggaataaaagccagaatcaccagctttgaaccccttgcttttgttttcttctctcggatgtgtattttctcccctggagatagtctctcattctcaattcatggcattgcatggtgctatatctagttacactgtgtggcaaaggcattataacatgatgcaaactgatataactgtgtgtagtagagttcccacttctggtgagagagagcattgctttagctgggacttgggtttttactgcatggcctcattgccaacaccccccaaaaatagttggatccagtcgcaataaggtttggcaagtaaacggtaacaattatgatgcccccaaacag

SEQ ID NO: 25994 - DNA, 291 bp, Macaca Mulatta
tcattttcctattggtctgatttcacaggaacattttacctgtttgtgaggcattttttctcctggaagagaggtgctgattggccccaagtgactgacaatctggtgtaacgaaaatttccaatgtaaactcattttccctcggtttcagcaattttaaatctatatatagagatatctttgtcagcattgcatcgttagcttctcctgataaactaattgtctcacattgtcattgcaaattgacacctattaatgggtctcacctcccaactgcttccccctctgttc

SEQ ID NO: 25995 - DNA, 422 bp, Macaca Mulatta
ccagagaggtttaagatacttagagctgatgtttatttaatttgtaggaaatagtcttgactatagctgggtaggactccatttcggaatgtaagttaaatatgaaaacttatgactgactaaattttctgtttttttctcctatgtaggcaattgattgaaggaacagaagtgcttaaacaactagaattagttccaacagagaatgaaagaccaatacatatgtgtagaattactgacagtggagatccttatgcttgattttcatatcaatattttctgtgataatttattactgtgtatctgatcagctgtttgtagatttaattaaacagtacttgataaattgtaatttgaaagccatggcagacactgtaggttgcctcatcgacacccaatacctccccatcttcctttcctgt

SEQ ID NO: 25996 - DNA, 445 bp, Macaca Mulatta
cagttatccacagtcacatttcagagtcctgactctcaaggaactactggtttttgggatagaacttgggccagggctagggacacaggctccacagtgacctgttatttgattgtaaattaagtgttctgattagtaagaagtaagcagggggccacatgctctcaatggagacaataaagtgttgtctatttcttattgttcctgtaggtatatttcctatatgggcatttttgggtggattgggagggtaggtgggggtacttcctccaacaggatgcctatctctctgccccaccagaccccgtctaacaagaagtgaacagaactgagaccaaacagaacatattgaataaacatttaaatcctgatacttcaggtggcatggagggccacaaaattgaagttatcctgtttcctggcatggggtcaaactttcaaagac

SEQ ID NO: 25997 - DNA, 229 bp, Macaca Mulatta
tcctcaggtagttggaattcctgactcaggacttggggttgggtccaaggtgcttacatcccaggggcctcatgcctaagatagagggtgggagcgaacccacatgaaccaatacagcccatctccaactagatcccagatttcttgcttctttcttgggttcctcagttctcttctgggttccccaacgtcctctgccaccacaccaagccagcagtgatgcatcccc

SEQ ID NO: 25998 - DNA, 467 bp, Macaca Mulatta
  misc_feature (1)...(467): n = A,T,C or G
ggacaacctgcagatatatctcaagagcacccaagggcccattgaagtctacctgtgcccagaggaggtgcaggagccggacagtccttccgaggagcccctcccctctacctccaccctctgccccagccctgactctgcccagcccagcagcagcaccgaccctagcatcatggagcccacagcatcctcagncagtgccagcgccagcgccaaccccccagcaggccccaccgcctccatccctggtccccttggaggctactgacagcatgctggagctgccgcacccactcctgcagcagactgaggaccagttcctgtccccgaccctggcgtgcagctcccctctgatcagcttctccccgtccttggaccaggacgactacctgtggggcttggaggcgggtgagggcatcagcgacctcttcgactcctacgacctcggggacctgttgattaattga

SEQ ID NO: 25999 - DNA, 5477 bp, Macaca Mulatta
  misc_feature (1)...(5477): n = A,T,C or G
caggtattctagaaggatttgacccccctcacccgtgtggcgtgcagggctgcccagctggttatgaatgcaaggactggatcggccccaatgatgggatcacccagtttgataacatcctttttgctgtgctgactgtcttccagtgcatcaccatggaagggtggaccaccgtgctgtacaatnaccaatgatgccttaggagccacctggaaatggctgtacttcatccccctcatcatcattggatccttctttgttctcaaactagtccttgggagtgcttnnnnnnnnnnnnnnnnnnnnnnnnnnnnnnntggagaaccgaagggctttcatgaaactgcggcgccagcagcagattgagcgtgagctgaatggctaccgtgcctggatagacaaagcagnnnnnnnnnnnnnnnnnnnnnnnnnnnnnnnnnnnnnnnnnnnnnnnnnnnnnnnnnnnnnnnnnnnnnnnnnnnnnnnnnnnnnnnnnnnnnnnnnnnnnnnnnnnnnnnnnnnnnnnnnnnnnnnnnnnnnnnnnnnnnnnggcacacctctggcccgagccagtatcaaaagtgcaaaggtagatggggtctcttatttccggcacaaggaaaggcttctgcgcatctccattcgccacatggttaaatcccaggtgttttactggattgtgctgagccttgtagcactcaacactgcctgtgtggccattgtccatcacaaccagccccagtggctcacccacctcctctnnnnnnnnnnnnnnnnnnnnnnnnnnnnnnnnnnnnnnnnnnnnnnnnnnnnnnnnnnnnnnnnnnnnnnnnnnnnnnnnnnnnnnnnnnnnnnnnnnnnnnnnnnnnnnnnnnnnnnnnnnnnnnnnnnnnnnnnnnnnnnnnnnnnnnnnnnnnnnnnnnnnnnnnnnnnnnnnnnnnnnnnnnnnnnnnnnnnnnnnnnnnnnnnnnnnnnnnnnnnnnnnnnnnnnnnnnnnnnnnnnnnnnnnnnnnnnnnnnnnnnnnnnnnnnnnnnnnnnnnnnnnnnnnnnnnnnnnnnnnnnnnnnnnnnnnnnnnnnnnnnnnnnnnnnnnnnnnnnnnnnnnnnnnnnnnnnnnnnnnnnnnnnnnnnnnnnnnnnnnnnnnnnnnnnnnnnnnnnnnnnnnnnnnnnnnnnnnnnnnnnnnnnnnnagatcctgacgggtgaggactggaatgaggtgatgtacaatgggatcccgctccagggcggggtcagctcaggcatgtggtctgccatctacttcattgtnnnnnnnnnnnnnnnnnnnnnnnnnnnnnnnnnnnnnnnnnnggctattgctgtagataatctagccaacgcccaggagctgaccaaggnnnnnnnnnnnnnnnnnnnnnnnnnnnnnnnnnnnnnnnnnnnnnnnnnnnnnnnnnnnnnnnnnnnnnnnnnnnnnnnnnnnnnnnnnnnnnnnnnnnnnnnnnnnnnnnnnnnnnnnnnnnnnnnnnnnnnnnnnnnnnnnnnnnnnnnnnnnnnnnnnnnnnnnnnnnnnnnnnnnnnnnnnnnnnnnnnnnnnnnnnnnnnnnnnnnnnnnnnnnnnnnnnnnnnnnnnnnnnnnnnnnnnnnnnnnnnnnnnnnnnnnnnnnnnnnnnnnnnnnnnnnnnnnnnnnnnnnnnnnnnnnnnnnnnnnnnnnnnnnnnnnnnnnnnnnnnnnnnnnnnnnnnnnnnnnnnnnngagggcctggccctgggcctggccctggagaagttcgaggaggagcgcatcagccgtggggggtccctcaagggggatggaggtgaccgatccagtgccctggacaaccagaggacccccttgtccctgggccagcgggagccgccgtggctggccaggccctgtcatgggaactgtgacccgactcagcaggaggcggggggaggagaggctgtggtgacctttgaggaccgggccaggcacaggcagagccagcggcgcagccggcatcgccgcgtcaggacggaaggcaaggagtcctcctcagcctctcggagcaggtctgctagccaggaacgcagtctggatgaagccatgcccactgaaggggagaaggaccctgagctcaggggcaaccatggtgccaaggagccaacgatccaagaagagagagcccaggatttaaggaggnaggaccaacagtctgatggtgtccagaggctccgggctggcaggaggccttgatgaggctaatgcccccttagtcctgccccatcctgagctggaagtggggaagnnnnnnnnnnnnnnnnnnnnnnnnnnnnnnnnnnnnnnnnnnnnnnnnnnnnnnnnnnnnnnnnnnnnnnnnnnnnnnnnnnnnnnnnnnnnnnnnnnnnnnnnnnnnnnnnnnnnnnnnnnnnnnnnnnnnnnnnnnnnnnnnnnnnnnnnnnnnnnnnnnnnnnnnnnnnnnnnnnnnnnnnnnnnnnnnnnnnnnnnnnnnnnnnnnnnnnnnnnnnnnnnnnnnnnnnnnnnnnnnnnnnnnnnnnnnnnnnnnnnnnnnnnnnnnnnnnnnnnnnnnnnnnnnnnnnnnnnnnnnnnnnnnnnnnnnnnnnnnnnnnnnnnnnnnnnnnnnnnnnnnnnnnnnnnnnnnnnnnnnnnnnnnnnnnnnnnnnnnnnnnnnnnnnnnnnnnnnnnnnnnnnnnnnnnnnnnnnnnnnnnnnnnnnnnnnnnnnnnnnnnnnnnnnnnnnnnnnnnnnnnnnnnnnnnnnnnnnnnnnnnnnnnnnnnnnnnnnnnnnnnnnnnnnnnnnnnnnnnnnnnnnnnnnnnnnnnnnnnnnnnnnnnnnnnnnnnnnnnnnnnnnnnnnnnnnnnnnnnnnnnnnnnnnnnnnnnnnnnnnnnnnnnnnnnnnnnnnnnnnnnnnnnnnnnnnnnnnnnnnnnnnnnnnnnnnnnnnnnnnnnnnnnnnnnnnnnnnnnnnnnnnnnnnnnnnnnnnnnnnnnnnnnnnnnnnnnnnnnnnnnnnnnnnnnnnnnnnnnnnnnnnnnnnnnnnnnnnnnnnnnnnnnnnnnnnnnnnnnnnnnnnnnnnnnnnnnnnnnnnnnnnnnnnnnnnnnnnnnnnnnnnnnnnnnnnnnnnnnnnnnnnnnnnnnnnnnnnnnnnnnnnnnnnnnnnnnnnnnnnnnnnnnnnnnnnnnnnnnnnnnnnagttctgcagcactctgtagatgtgacagaggaagaccgaggcccaagccgcagcaaccgcatggagatgtctatcttttatgtggtctactttgtggtcttccctttcttctttgtcaatatctttgtggctctcatcatcatcaccttccaggagcaaggggataagatgatggaggagtgcagcctggagaagaatgagnnnnnnnnnnnnnnnnnnnnnnnnnnnnnnnnnnnnnnnnnnnnnnnnnnnnnnnnnnnnnnnnnnnnnnnnnnnnnnnnnnnnnnnnnnnnnnnnnnnnnnnnnnnnnnnnnnnnnnnnnnnnnnnnnnnnnnnnnnnnnnnnnnnnnnnnnnnnnnnnnnnagtattactctgctccctgtacctatgagctggccctgaagtatctgaatatcgccttcaccatggtgttttccctggaatgcgtcctgaaggtcatcgcttttggctttttgngaactatttccgagacacctggaatatctttgacttcatcactgtgattggcagtataacagaaattatcctgacagacagcaagnnnnnnnnnnnnnnnnnnnnnnnnnnnnnnnnnnnnnnnnnnnnnnnnnnnnnnnnnnnnnnnnnnnnnnnnnnnnnnnnnnnnnnnnnnnnnnnnnnnnnnnnnnnnnnnnnnnnnnnnnnnnnnnnnnnnnnnnnnnnnnnnnnnnnnnnnnnnnnnnnnnnnnnnnnnnnnnnnnnnnnnnnnnnnnnnnnnnnnnnnnnnnnnnnnnnnnnnnnnnnnnnnnnnnnnnnnnnnnnnnnnnnnnnnnnnnnnnnnnnnnnnnnnnnnnnnnnnnnnntcaggagtgccacaggtgaggcctggcaggagattatgctgtcatgcctcggggagaagggctgtgagcctgacaccaccgcaccatcagggcagaacgagaacgagcgctgcggcaccgatctggcctacgtgtactttgtctccttcatcttcttctgctccttcttgnnnnnnnnnnnnnnnnnnnnnnnnnnnnnnnnnnnnnnnnnnnnnnnnnnnnnnnnnnnnnnnnnnnnnnnnnnnnnnnnnnnnnnnnnnnnnnnnnnnnnnnnnnnnnnnnnnnnnnnnnnnnnnngtggccgcatccattacactgagatgtatgaaatgctgactctcatgtcacctccgctaggcctcggcaagagatgtccctccaaagtggcatataagnnnnnnnnnnnnnnnnnnnnnnnnnnnnnnnnnnnnnnnnnnnnnnnnnnnnnnnnnnnnnnnnnnnnnnnnnnnnnnnnnnnnnnnnnnnnnnnnnnnnnnnnaggtggtgcagacaggcagcagctagactctgagctacaaaaggagaccctagccatctggcctcacctatcccagaagatgctggatctgcttgtgcccatgcccaaagnagcctctgacctgactgtgggcaaaatctatgcagcaatgatgatcatggactactataagcagagtaaggtgaagaagcagaggcagcagctggaggaacagncagaaaaatgcccccatgttccaacgcatggagccctcatctctgcctcaggagatcatcgctaatgccaaagccctgccttacctccagcaggaccccgtttcaggcctgnnnnnnnnnnnnnnnnnnnnnnnnnnnnnnnnnnnnnnnnnnnnnnnnnnnnnnnnnnnnnnnnnnnnnnnnnnnnnnnnnnnnnnnnnnnnnnnnnnnnnnnnnnnnnnnnnnnnnnnnnnnnnnnnnnnnnnnnnnnnnnnnnnnnnnnnnnnnnnnnnnnnnnnnnnnnnnnnnnnnnnnnnnnnnnnnnnnnnnnnnnnnnnnnnnnnnnnnnnnnnnnnnnnnnnnnnnnnnnnnnnnnnnnnnnnnnnnnnnnnnnnnnnnnnnnnnnnnnnnnnnnnnnnnnnnnnnnnnnnnnnnnnnnnnnnnnnnnnnnnnnnnnnnnnnnnnnnnnnnnnnnnnnnnnnnnnnnnnnnnnnnnnnnnnnnnnnnnnnnnnnnnnnnnnnnnnnnnnnnnnnnnnnnnnnnnnnnnnncaggccacaagtctgacactcaccgctcagggggcagggagcgaggacgatcaaaagagcgaaagcatcttctctctcctgatgtctcccgctgcaattcagaagagcgagggacccaggctgactgggagtccccagagcgccgtcaatccaggtcacccagtgagggcaggtcacagacgcccaacagacagg

SEQ ID NO: 26000 - DNA, 215 bp, Macaca Mulatta
aggacaatttggggggcaacagccaaacctctatgatagccacaatcagcccagccgcagacaactatgaagagaccctctccacattaagatatgcagaccgagcaaaaaggattgtgaaccatgctgttgtgaatgaggaccccaacgcaaaagtgatccgagaactgcgggaggaagtcgagaaactgagagagcagctctctcaggcagag

SEQ ID NO: 26001 - DNA, 145 bp, Macaca Mulatta
  misc_feature (1)...(145): n = A,T,C or G
gtctgcaaccatccctctgttcatgcgaaacaaagatgtcgctgcagaagcggtnggtcacaggtagtggcaaaacactcgcttttgtcatccccatcctggaaattcttctgagaagagaagagaagttaaagaagagtcaggt

SEQ ID NO: 26002 - DNA, 1445 bp, Macaca Mulatta
  misc_feature (1)...(1445): n = A,T,C or G
gacattccagaagaagacaaaggaaatgtaaaacagtgtgaaatcaattatgtgtatgtattcttttccttttagacctacagatttgacagtgaagtgcttctcaaagtgctttcaaaataaattacctaattagttggggatggtggtgcatgcctgtaggccannnnnnnnnnnnnnnnnnnacaggaggattgtnnnnnnnnnnnnnnccnnnnnnnnnnnnnnntctgatgactactgcattccagcctgggtgacggagcaagaccctctctgacaaaattaaattaaaactgatggacggccggaagaagacaaaggaaatgtaaatccctgtgaaatcaattatgtgtatgggcgtattcttttccttttagacctacagatttgacagtgaagtgcttctcaaagtactttcaaaatacattacctaattagttgggggtggtggtggatgcctgtaggccgnnnnnnnnnnnnnnnnnnnacaggaggattgtttgagctcgggagtcgcaaggctgcagtgagctctgataaccactgcattccagcctgggtgatggagcaagaccctctctgacaaaattaaattaaaactgatgtggacaagaagaggcaacacaatgtagcctctgggacagagcactgagctcaatgcttttctcaaggcttcagttttcctaatcatcatgccagctctcaaagctaacgtcatgcgtgttagtcgatctccctgttcattcatagaatgggtgtgatgccagtcaaaggctgtgctatggccaggacacggaggactccagccggcatgccctaatagaagtgtggccttgtggttcttcccagtcaatgagtggccctccttttgaggggtcatggaggtcatctttgttgttgagaatctccagcttattaaaaaaatacaattcannnnnnnnnnnnnnnnnctccgcttagatggagtctctctctgtcacccagactggtgtgcagtggcttgatcttggctcatcgtagccttcgcttcccaggttcatgtnnnnnnnnnnnnnnnnnnnnnnnnnnaannnnnnnnnnnnnnacgtgccactatgctcagctannnnnnnnnnnnnnnnnnnnaacagggtttcaccatgttgaataggctgttatcannnnnnnnnnnnnnnnnnnnntgctnnnnnnnnnnnnnnnnnnnngtgggattgcaggcatgagccactgtgcctggcctacagttagacttttttaataagtgaaaaataaattagcagtatttataaatttaatagtaaatatgtataatcagagtttgaggtatttttcaatgaagacattttctttgcagaaataaatttcagagcttccatgaccacaaacttaaaataagtaaagaagacagtaaaattcttaaaaaggctcggaaagatggattt

SEQ ID NO: 26003 - DNA, 200 bp, Macaca Mulatta
  misc_feature (1)...(200): n = A,T,C or G
nccagggagggaagcttggttcagggncccaggactcacaggactggtctctcctctgaagcaggttgctgggcccaaagggaaggcgcttcctgtgcctgcncctgcaagggagtcaggtaacaggtaggtatctgggccagggcatgctagagaaaacacccaattcccctctcagccccacctggacagtttcccac

SEQ ID NO: 26004 - DNA, 804 bp, Macaca Mulatta
  misc_feature (1)...(804): n = A,T,C or G
ggggagactgtagtcgaaggccctgagtcagccataatggcaggtgaagaaattaatgaagactatccagtagaaattcatgagtatttgtcagcgtttgagaattccattggtgctgtggatgagatgctgaagaccatgatgtctgtttctagaaatgagttgttgcagaagttggacccacttgaacaagcaaaagtggatttggtttctgcatacacattaaattcaatgttttgggtttatttggcaactcaaggagttaatcctaaggaacatccagtaaaacaggaattggaaagaatcagagtatatatgaacagagtcaaggaaataacagacaagaaaaaggctggcaagctggacagaggtgcagcttcaagatttgtaaaaaatgccctctgggaaccaaaaccaagaaatgcatcaaaagttgccaataaaggaaaaagtaaaagttaacttttttggttttgatgtacacatatttcaaaaagtacatnnnnnnnnnnnnnnnnnnncacaaaataattctgtggcaggacaagggttaaatgtattttcttatgaataatatgtaaatttacagaaatatgtaaagctaaatactttcctttccaagatgtactatgatgccgagattactggaaataaattaattactccttgagaacatcttaaagcactgcaacatatacgctgattannnnnnnnnnnnnnnnnnnnnnnnnnnnnnnnnnnnnnnnnnnnnnnnnnnnnnnnnnnnnnnnnnnnnnnnnnnnnnnnnnnnnnnnnnaccnngaa

SEQ ID NO: 26005 - DNA, 552 bp, Macaca Mulatta
  misc_feature (1)...(552): n = A,T,C or G
ggtatgcagggagttccagcgaggaaactgtgcccggggagagaccgactgccgctttgcacaccccgcagacagcaccatgatcgacacaagtgacaacaccgtaaccgtttgtatggattacataaaggggcgttgcatgagggagaaatgcaaatattttcaccctcctgcacacttgcaggccaaaatcaaagctgcgcagcaccaagccaaccaagctgcggtggccgcccaggcagccgcggccgcggccacagtcatggnnnnnnnnnnnnnnnnnnnnnnnnnnnnnnnnnnnnnnnnnnnnnnnnnnnnnnnnnnnnnnnnnnnnnnnnnnnnnnnnnnnnnnnnnnnnnnnnnnnnnnnnnnnnnnnnnnnnnnnnnnnnnnnnnnnnnnnnnnnnnnnnnnnnnnnnnnnnnnnnnnnnnnnnnnnnnnnnnnnnnnnnnnnngtacccatgatgcacagcgctacgtccgccactgtctctgcagcaacaactcctgcaacaagtgtccccttcgcagcaacagccacagccaatcaggt

SEQ ID NO: 26006 - DNA, 637 bp, Macaca Mulatta
gatcggccgagggaaagtctcacttataaacctctgtacacacacacacatacacacacactcacagacccacacacatacacactgtcatgcactcaactatatttaaaatgtatacgtctattctttatgccttgccctagccagacggaagaagatgaagaaggaaaccaggtgaactcagcaaggcagactggctgcttacttcagcaccattggaattatttcccgctgttgccaatggaaatcaaagaaaatggatgtgacgtctctgcaggtggacggcagtccgaggggcttatttaacttgcttctcagtgcaacttgataggagaatccagcatcttaaagtcgcatatgtgtagcactaatgtttctttttaaatagttgggggaaaatgacctagaaaaccaaattgcagtttggtagccaaaattaactcttggtttatttgtcctttgtgtgtgaaaagtcctactattccgtgcgtcagacttcctcacagaactgttgactggttttggttcttcttagtactattgagatctttcgcgtcgatcccaacggccttagcggcggcagactctggaataacaccttacacctttctggcctgcatttctgtagacttcactc

SEQ ID NO: 26007 - DNA, 835 bp, Macaca Mulatta
ttaaaagcccaaggagtacgcttgtgtgtgtttgtgggcccttagagactcagagacctcatctctggcataccccaccaccttctcttttcctgactgtggagccttggggatctaggctcaatggacatggtggcccttgcccagagaaaaaggagtgttcctgcctgcctgcagcaatagcactgctccccacagcgccccagccacttccagctcctggtctgggagccagcactgggctatcatcatggctacatggccctcaggaaggcctgtggtcacctggggagaagctgagctggcagaagtcacagagcagggtgccccctaagagaccagccgagcctgttagctgcaccaaaggcatctcctagctttattaacgggcccgcgctgcagagtcaatataaaaacacaaaaagtcccatcagtttaataacaataaaaaaccccaaaagtggaaaactgagggggcaggggaagagacccctgggccaggggcacgaggagccctgctcatggcaccaggcctggccgcagggtcccccggtattgctgttgctacgaggtcagggggcagcgattgtcctgtgggagccgccgttcgcctgggtcggggaccctcacttcttctgcggtgtgctcagcttctgcatgccccggatcttgtccagcaggccagagatgaaggcctgggtgggaggataaacattaaggagaccaaacccctagatgacaggagccaggctcccctcaccccacccccgccccagggaaatctcttacctctgtgggtttgtaacagtcaaccagcagctcctagcaggggata

SEQ ID NO: 26008 - DNA, 710 bp, Macaca Mulatta
ttctgcagttttgcaaagctacattgacaagacactggtttaatttgtacttattaaccatctattgaatatacagcattatattaggtgctgcaggattatgactctgtagcgattgatgttagttgtcacccagatcccctggaaaagcacactaccagtgttgtgggcacatttagttccacccattagacccttgatgctattcacatgaataatttattttcctcgagtgtcattacattcttcaggctaggtggacttggaagcacctaaaggccatttgcatgaaattcacatgcacctaaatcctcactttgacagaaactcatgcttcagtttataacctattacctattttgtatgcgactctgcctctgcatgtttattttaataaaaggcaatgataatattcacattatttttctttatatgctgtggttcacaagttttactccttcacaagaaaaactctttagattggtgcaattgcttctgattttggtaaaagtttccctggtagggaaactttgaagataagagtacacacatgcattttgtctgttgtgtcatagaggtaactaggctagaaaatttgtgtttaaatggtccctttttatataatcaccacttcgtgtatcttcttcttggagcatgtccttgttcaaagagaagtcctttctcagtgatatgatgtcttcactgaggaa

SEQ ID NO: 26009 - DNA, 123 bp, Macaca Mulatta
gtctccttcagatggagcctgtgaactacgaacgagtgagagaatatagtcagaaagtcctggaacgacagcctgataatgccaaggccttgtatcgggccggagtggcctttttccatctgc

SEQ ID NO: 26010 - DNA, 153 bp, Macaca Mulatta
acaggggtcttgggaggaattccaaatgggcactgcaaggcctgtgagtggggaggagagctgctgcccccctgccacccaggcggccccagggctgatgccaccacatcctgactgatagtggtaccttaaaaggtggcctccctacaggag

SEQ ID NO: 26011 - DNA, 627 bp, Macaca Mulatta
  misc_feature (1)...(627): n = A,T,C or G
gagtttctttgagaacatcagtcacctttggggttgccgtgtacatgagatttataatcatgatactcttcggtggtagtttcaaaagacactactaatacgcaggaagcgttccagctatttaatgctggcaactactgtttaatggtcagttaaatctgtgataatggttggaagtgggtggggttatgaaattgtagatgtttttanaanaacttgtgaatgaaaatgaatccaagtgtttcatgtgaagaagttgagccattgctatcatgcattcctgtctcatggcagaagattttgaagattaaaaaataaaataatcaaaatgtttcctctttctaagtgcgtcttaactctttcttcttttatactgctagtttccatgactatgcgggtatcagaaggcaggacaattctgaagacaatatttatcagtgggctactgctgctgctgtggatgaaatcattctggtagtaataaactcccatctcataatgttagaggaaattacttctgatttatgttcctattgaatatggggatagctttgttttcatttatatcatgtcaacactttctctcatgtttaatattggatcaatcctgatgatcttggttacccg

SEQ ID NO: 26012 - DNA, 2185 bp, Macaca Mulatta
  misc_feature (1)...(2185): n = A,T,C or G
aaccaattttcataaaagaaagattgaagctttttgaaatactgaagaaagaccatcagctcctactttccatttatggaaaaaaaggggatacaaacaatatcatcacagtgagagtgactgatgggcaaacagtgcaaggagaagtctggaaaacaacaccttaccaagtggctgctgaaattagnnnnnnnnnnnnnnnnnnnnnnnnnnnnnnnnnnnnnnnnnnnnnnnnnnnnnnnnnnnnnnnnnnnnnnnnnnnnnnnnnnnnnnnnnnnnnnnnnnnnnnnnnnnnnnnnnnnnnnnnnnnngtgtactggcactccagtgctcacattcttggggaggccatggaactttattatggaggccacctgtgctacggtccgcccattgaaaatggattttattatgacatgttcattgaagacannnnnnnnnnnnnnnnnnnnnnnnnnnnnnnnnnnnnnnnnnnnnnnnnnnnnnnnnnnnnnnnnnnnnnnnnnnnnnnnnnnnnnnnnnnnnnnnnnnnnnnnnnnnnnnnnnnnnnnnnnnnnnnnnnnnnnnnnnnnnnnnnnnnnnnnnnnnnnnnnnnnnnnnnnnnnnnnnnnnnnnnnnnnnnnnnnnnnnnnnnnnnnnnnnnnnnnnnnnnnnnnnnnnnnnnnnnnnnnnnnnnnnnnnnnnnnnnnnnnnnnnnnnnnnnnnnnnnnnnnnnnnnnnnnnnnnnnnnnnnnnnnnnnnnnnnnnnnnnnnnnnnnnnnnnnnnnnnnnnnnnnnnnnnnnnnnnnnnnnnnnnnnnnnnnnnnnnnnnnnnnnnnnnnnnnnnnnnnnnnnnnnnnnnnnnnnnnnnnnnnnnnnnnnnnnnnnnnnnnnnnnnnnnnnnnnnnnnnnnnnnnnnnnnnnnnnnnnnnnnnnnnnnnnnnnnnnnnnnnnnnnnnnngaggaatatcacaaacgtgacttcacggaggtgctctctcccaacatgtacaacagtaaactctgggaagcctcgggccactggcagcattacagcgagaatatgtttacctttgagattgaaaaggacacttttgccctcaaacccatgaattgtccaggtcactnnnnnnnnnnnnnnnnnnnnnnnnnnnnnnnnnnnnnnnnnnnnnnnnnnnnnnnnnnnnnnnnnnnnnnnnnnnnnnnnnnnnnnnnnnnnnnnnnnnnnnnnnnnnnnnnnnnnnnnnnnnnnnnnnnnnnnnnnnnnnnnnnnnnnnnnnnnnnnnnnnnnnnnnnnnnnnnnnnnnnnnnnnnnnnnnnnnnnnnnnnnnnnnnnnnnnnnnnnnnnnnnnnnnnnnnnnnnnnnnnnnnnnnnnnnnnnnnnnnnnnnnnnnnnnnnnnnnnnnnnnnnnnnnnnnnnnnnnnnnnnnnnnnnnnnnnnnnnnnnnnnnnnnnnnnnnnnnnnnnnnnnnnnnnnnnnnnnnnnnnnnnnnnnnnnnnnnnnnnnnnnnnnnnnnnnnnnnnnnnnnnnnnnnnnnnnnnnnnnnnnnnnnnnnnnnnnnnnnnnnnnnnnnnnnnnnnnnnnnnnnnnnnnnnnnnnnnnnnnnnnnnnnnnnnnnnnnnnnnnnnnnnnnnnnnnnnnnnnnnnnnnnnnnnnnnnnnnnnnnnnnnnnnnnnnnnnnnnnnnnnnnnnnnnnnnnnnnnnnnnnnnnnnnnnnnnnnnnnnnnnnnnnnnnnnnnnnnnnnnnnnnnnnnnnnnnnnnnnnnnnnnnnnnnnnnnnnnnnnnnnnnnnnnnnnnnnnnnnnnnnnnnnnnnnnnnnnnnnnnnnnnnnnnnnnnnnnnnnnnnnnnnnnnnnnnnnnnnnnnnnnnnnnnnnnnnnnnnnnnnnnnnnnnnnnnngtggttggagaaaaggaaaagataaataatgctgtaaacgtgcgaacaagagacaacaaaattcatggagagattttagtaacttctgccattgttaaactgaagaatctcaagaagtcacggacactcattgctgaggaggacttttgaagtccttgcctgatatttgcttctgtgtaactttgttttgacccttaaaaatgtatttttcttaacatattagtacttctaagactttggagcctttgatgggggttcattcacaagctcagctgagaaaggagacaatgaatgtgtagttgacat

SEQ ID NO: 26013 - DNA, 1473 bp, Macaca Mulatta
  misc_feature (1)...(1473): n = A,T,C or G
ctggccgctcgactgtggcgctttctgccattgcgacgtggagccgccccggggcctcggctccctgcggggacttcgggcagccgtgggcattgcggccgctgtcgattccgtggcttcgaggtnnnnaggtaatgggaaacccaggaactttcaaaagaggccttttactctcagctttgtcttattggggttttgaaacttaccaggttatctctcaggctgctgtggttcatgccgcagccaaannnnnnnnnnnnnnnnnnnnnnnnnnnnnnnnnnnnnnnnnnnnnnnnnnnnnnnnnnnnnnnnnnnnnnnnnnnnnnnnnnnnnnnnnnnnnnnnnnnnnnnnnnnnnnnnnnnnnnnnnnnnnnnnnnnnnnnnnnnnnnnnnnnnnnnnnnnnnnnnnnnnnnnnnnnnnnnnnnnnnnnnnnnnnnnnnnnnnnnnnnnnnnnnnnnnnnnnnnnnnnnnnnnnnnnnnnnnnnnnnnnnnnnnnnnnnnnnnnnnnnnnnnnnnnnnnnnnnnnnnnnnnnnnnnnnnnnnnnnnnnnnnnnnnnnnnnnnnnnnnnnnnnnnnnnnnnnnagaaagcaattgaactgaaccctaaagatgcgacttcaattcaccttatgggtatttggnnnnnnnnnnnnnnnnnnnnnnnnnnnnnnnnnnnnnnnnnnnnnnnnnnnnnnnnnnnnnnnnnnnnnnnnnnnnnnnnnnnnnnnnnnnnnnnnnnnnnnnnnnnnnnnnnnnnnnnnnnnnnnnnnnnnnnnnnnnnnnnnnnnnnnnnnnnnnnnnnnnnnnnnnnnnnnnnnnnnnnnnnnnnnnnnnnnnnnnnnnnnnnnnnnnnnnnnnnnnnnnnnnnnnnnnnnnnnnnnnnnnnnnnnnnnnnnnnnnnnnnnnnnnnnnnnnnnnnnnnnnnnnnnnnnnnnnnnnnnnnnnnnnnnnnnnnnnnnnnnnnnnnnnnnnnnnnnnnnnnnnnnnnnnnnnnnnnnnnnnnnnnnnnnnnnnnnnnnnnnnnnnnnnnnnnnnnnnnnnnnnnnnnnnnnnnnnnnnnnnnnnnnnnnnnnnnnnnnnnnnnnnnnnnnnnnnnnnnnnnnnnnnnnnnnnnnnnnnnnnnnnnnnnnnnnnnnnnnnnnnnnnnnnnnnnnnnnnnnnnnnnnnnnnnnnnnnnnnnnnnnnnnnnnnnnnnnnnnnnnnnnnnnnnnnnnnnnnnnnnnnnnnnnnnnnnnnnnnnnnnnnnnnnnnnnnnnnnnnnnnnnnnnnnnnnnnnnnnnnnnnnnnnnnnnnnnnnnnnnnattttcaagtcggatcgattctaagtcgagatcttcgcagagaaggtgtggtgaaagaggttaggattttgtggtttcctgacataaagtagttaaatgatgtatcttggagctaacctgtataaggaaagaattaagtcaggagacgactaaaaattgagtggtttcc

SEQ ID NO: 26014 - DNA, 445 bp, Macaca Mulatta
  misc_feature (1)...(445): n = A,T,C or G
ggtccacgaatcctcctcgcagggctcgcagccttcgccggccgccagctccggctacgaatcctccacgcctcccaccatcgtgtctccctccacagacaacccgaccaccagctccttatctccctcctcctccgcagtccaccacacagccggccacagcgcgctctcttccaattttaacgaatggtacgtttaaaatcagaaacaaaacaccgaacaaaaccctatttaagagactgatcacacacgtatacacaacattactgaaagaaccctgcgaatcaaaacaaccccccacacagaccccgcaatcctttttaaaaaatctgccaatagacccaggacgagtaacagaggaagtatcaacctttaaaaatttcctttcgctttcattannnnnnnnnnnnnnnnnaggcttggtacccaaggtggcggtaggggg

SEQ ID NO: 26015 - DNA, 3273 bp, Macaca Mulatta
  misc_feature (1)...(3273): n = A,T,C or G
agagtggacgcacagtgacatgggcaacttgaagagcgtggcccaggaacctgggccaccctgtggcctgggggctggggctgggccttgggctgtgcggcaagcagggcccagccacctcagcccctgagcccagccgggcccnnnnnnnnnnnnnnnnnnnnnnnnnnnnnnnnnnnnnnnnnnnnnnnnnnnnnnnnnnnnnnnnnnnnnnnnnnnnnnnnnnnnnnnnnnnnnnnnnnnnnnnnnnnnnnnnnnnnnnnnnnnnnnnnnnnnnnnnnnnnnnnnnnnnnnnnnnnnnnnnnnnnnnnnnnnnnnnnnnnnnnnnnnnnnnnnnnnnnnnnnnnnnnnnnnnnnnnnnnnnnnnnnnnnnnnnnnnnnnnnnnnnnnnnnnnnnnnnnnnnnnnnnnnnnnnnnnnnnnnnnnnnnnnnnnnnnnnnnnnnnnnnnnnnnnnnnnnnnnnnnnnnnnnnnnnnnnnnnnnnnnnnnnnnnnnnnnnnnnnnnnnnnnnnnnnnnnnnnnnnnnnnnnnnnnnnnnnnnnnnnnnnnnnnnnnnnnnnnnnnnnnnnnnnnnnnnnnnnnnnnnnnnnnnnnnnnnnnnnnnnnnnnnnnnnnnnnnnnnnnnnnnnnnnnnnnnnnnnnnnnnnnnnnnnnnnnnnnnnnnnnnnnnnnnnnnnnnnnnnnnnnnnnnnnnnnnnnnnnnnnnnnnnnnnnnnnnnnnnnnnnnnnnnnnnnnnnnnnnnnnnnnnnnnnnnnnnnnnnnnnnnnnnnnnnnnnnnnnnnnnnnnnnnnnnnnnnnnnnnnnnnnnnnnnnnnnnnnnnnnnnnnnnnnnnnnnnnnnnnnnnnnnnnnnnnnnnnnnnnnnnnnnnnnnnnnnnnnnnnnnnnnnnnnnnnnnnnnnnnnnnnnnnnnnnnnnnnnnnnnnnnnnnnnnnnnnnnnnnnnnnnnnnnnnnnnnnnnnnnnnnnnnnnnnnnnnnnnnnnnnnnnnnnnnnnnnnnnnnnnnnnnnnnnnnnnnnnnnnnnnnnnnnnnnnnnnnnnnnnnnnnnnnnnnnnnnnnnnnnnnnnnnnnnnnnnnnnnnnnnnnnnnnnnnnnnnnnnnnnnnnnnnnnnnnnnnnnnnnnnnnnnnnnnnnnnnnnnnnnnnnnnnnnnnnnnnnnnnnnnnnnnnnnnnnnnnnnnnnnnnnnnnnnnnnnnnnnnnnnnnnnnnnnnnnnnnnnnnnnnnnnnnnnnnnnnnnnnnnnnnnnnnnnnnnnnnnnnnnnnnnnnnnnnnnnnnnnnnnnnnnnnnnnnnnnnnnnnnnnnnnnnnnnnnnnnnnnnnnnnnnnnnnnnnnnnnnnnnnnnnnnnnnnnnnnnnnnnnnnnnnnnnnnnnnnnnnnnnnnnnnnnnnnnnnnnnnnnnnnnnnnnnnnnnnnnnnnnnnnnnnnnnnnnnnnnnnnnnnnnnnnnnnnnnnnnnnnnnnnnnnnnnnnnnnnnnnnnnnnnnnnnnnnnnnnnnnnnnnnnnnnnnnnnnnnnnnnnnnnnnnnnnnnnnnnnnnnnnnnnnnnnnnnnnnnnnnnnnnnnnnnnnnnnnnnnnnnnnnnnnnnnnnnnnnnnnnnnnnnnnnnnnnnnnnnnnnnnnnnnnnnnnnnnnnnnnnnnnnnnnnnnnnnnnnnnnnnnnnnnnnnnnnnnnnnnnnnnnnnnnnnnnnnnnnnnnnnnnnnnnnnnnnnnnnnnnnnnnnnnnnnnnnnnnnnnnnnnnnnnnnnnnnnnnnnnnnnnnnnnnnnnnnagagctttgcagctgccctgatggagatgtccggtcgctacaacagctcccctcggccggaacagcacaagnnnnnnnnnnnnnnnnnnnnnnnnnnnnnnnnnnnnnnnnnnnnnnnnnnnnnnnnnnnnnnnnnnnnnnnnnnnnnnnnnnnnnnnnnnnnnnnnnnnnnnnnnnnnnnnnnnnnnnnnnnnnnnnnnnnnnnnnnnnnnnnnnnnacccccacttctgcgcctttgctcgtgcggtggacacgcggctggaggaactgggcggggagcggctgctgcagctgggccagggcgacgagctgtgtggccaggaggaggccttccgcggctgggcccaggctgccttccaggnnnnnnnnnnnnnnnnnnnnnnnnnnnnnnnnnnnnnnnnnnnnnnnnnnnnnnnnnnnnnnnnnnnnnnnnnnnnnnnnnnnnnnnnnnnnnnnnnnnnnnnnnnnnnnnnnnnnnnnnnnnnnnnnnnnnnnnnnnnnnnnnnnnnnnnnnnnnnnnnnnnnnnnnnnnnnnnnnnnnnnnnnnnnnnnnnnnnnnnnnnnnnnnnnnnnnnnnnnnnnnnnnnnnnnnnnnnnnnnnnnnnnnnnnnnnnnnnnnnnnnnnnnnnnnnnnnnnnnnnnnnnnnnnnnnnnnnnnnnnnnnnnnnnnnnnnnnnnnnnnnnnnnnnnnnnnnnnnnnnnnnnnnnnnnnnnnnnnnnnnnnnnnnnnnnnnnnnnnnnnnnnnnnnnnnnnnnnnnnnnnnnnnnnnnnnnnnnnnnnnnnnnnnnnnnnnnnnnnnnnnnnnnnnnnnnnnnnnnnnnnnnnnnnnnnnnnnnnnnnnnnnnnnnnnnnnnnnnnnnnnnnnnnnnnnnnnnnnnnnnnnnnnnnnnnnnnnnnnnnnnnnnnnnnnnnnnnnnnnnnnnnnnnngccaggatccccgacgctacgaggagtggaagtggttccgctgccccacgctgctggaggtgctggagcagttcccgtcggtggcactgcctgccccactgctcctcacccagctgcctctgctccaaccccggtactattcagtcagctcagcacccagcacccacccaggagagatccacctcactgtagctgtgctggcatacaggacccagnnnnnnnnnnnnnnnnnnnnnnnnnnnnnnnnnnnnnnnnnnnnnnnnnnnnnnnnnnnnnnnnnnnnnnnnnnnnnnnnnnnnnnnnnnnnnnnnnnnnnnnnnnnnnnnnnnnnnnnnnnnnnnnnnnnnnnnnnnnnnnnnnnnnnnnnnnnnnnnnnnnnnnnnnnnnnnnnnnnnnnnnnnnnnnnnnnnnnnnnnnnnnnnngggctgcagcccactcccatgactttggtgtttggctgccgatgctcccaactcgaccatctctaccgcgacgaggtgcagaacgcccagcagcgcggggtgtttggccgagtcctcaccgccttctcccgggaacctgacaaccccaag

SEQ ID NO: 26016 - DNA, 307 bp, Macaca Mulatta
tcttcttatatgaaaattctaatgaaataattatgacgattattttgttataaaaattggagtctatagccaaaataacgttaacactttttaacagtaaaattattatcctcccctttaggattccatcaaaccctcaaaacaagtttgaaaactatgtatcaaaatcataggtgaaacttgagctatgccattttatcatctctctcaattgaatgtatgtaactattcaccaggttcataaatattcactacaaaagactattaccaaatgctataaacaggtgcagaataggaggcagcttca

SEQ ID NO: 26017 - DNA, 669 bp, Macaca Mulatta
  misc_feature (1)...(669): n = A,T,C or G
ttttttttttcttttagataacaaaatcaaaatatttattttgttctttttcatatgacactgttaaaacattcctactacagcaatactgttctccaggagcttacaatctaaaacagtcaacattaattgtagacccagtaattaaggcattatatcaaatgcagactttgtnnnnnnnnnnnnnnnnnnnnnnnnntttgctcttgttgcccaggttggagtgcaatggcgccnnnnnnnnnnnnnnnnnnnnnnccctcccgnnnnnnnnnnnnnnnnnnnnnnnnnnnnnngnnnnnnnnnnnnnnnnnnnnnnnnnnnnnnacacccnnnnnnnnnnnnnnnnnnnnnnnnnnnnnnnnnnnnnnnncgtcnnnnnnnnnnnnnnnnnnnnnnnnaccttaggtgatccgcgccccnnnnnnnnnnnnnnnnnntgtgagccactgtgcccggccgagtttgtatcttttgatgtatcttttgaaggagcagctggagagggcaggatcaaaattaaatgatatgaaagtgtactcccctcctcgtgctccttataaggaaccccttctgactagaacctaagaccagtacccacagcctgaaagggaatttcagacaaccctaccatagaagtagtgaagaaaccttaattttctaatttcc

SEQ ID NO: 26018 - DNA, 1214 bp, Macaca Mulatta
tactaaggatgcaggtgtgattgctggacttaatgtgctacgaatcatcaatgagcccacagctgctgccattgcctatggtttagataaaggaggtcgaggagaacgacatgtcctgatttttgatctgggtggaggcacatttgatgtgtcaattctgaccatagatgatgggatttttgaggtaaaggccactgctggggacactcacctgggtggggaggactttgacaacaggcttgtgagccacttcgtggaagagttcaagcggaagcacaagaaggacatcagccagaacaagcgagccgtgaggcggctgcgcacagcctgcgagagggccaagaggaccctgtcgtccagcacccaggccaacctagaaattgattcactttatgaaggcattgacttctacacatccatcaccagagctcgatttgaagagttgtgtgcagacctttttaggggtaccctggagcctgtagaaaaagcacttcgggatgccaagatggataaggctaaaatccatgacattgttttagtagggggctccacccgcatccccaaggtgcagcggctgcttcaggactactttaatggacgtgatctcaacaagagcatcaaccctgatgaggcagtagcatatggggctgcggtacaggcggccatcctgatgggggacaagtctgagaaggtgcaggacctgctggtgctggacgtggctcccctgtcgctggggctggagacggccgggggtgtgatgactgccctgatcaagtcgtaaatgccaccatccccaccaagcagacacagatcttcaccacctactccgacaaccaacccggggtgctgatccaggtatacgaaggtgagagggccatgacgaaggacaacaacctgctagggcgctttgacctgactggaatccctccagcacccaggggagttcctcagatcgaggtgacgtttgacattgatgccaatggtattctcaatgtcacagccatggacaagagcacagggaaggccaacaagatcaccatcaccaatgacaagggccgcctgagcaaggaggagattgagcgcatggttctggatgctgagaaatataaagctgaagatgaggtccagagggagaaaattgctgcaaagaatgccttagaatcctatgcttttaacatgaagagtgttgtgagtgatgaagggttgaagggcaa

SEQ ID NO: 26019 - DNA, 207 bp, Macaca Mulatta
ctggaaacagaatatgacagttttcctgggatcatgggcctgtttagtaccacagggatgaccaataaacatcactgtttcatgtttttaaacataaggcactaatgcacagtagtgggaattggggagaaaactatatctaaacacggaccacattgtatggaccataatatggaccaactataagcctataattatatggttcat

SEQ ID NO: 26020 - DNA, 737 bp, Macaca Mulatta
aatcagagtccactggtgaccattatcctgggggatgcaggatggaaagggaaaagtgctattgagcaaggattgatggtcagtccttaggcagaatggaaatgaagtttattgtgtgtgtgaaagcaacaggagatgaactttcaaatgggttggcaggattcctgccttaaatcaacattagaaccactttgtagttgacagtttgatttcattgactcctgctgggtaaactgaatggtggcaaaatggcatttcaagccttcagtgtgaggatgagaggatagatggagtcagttttcacaggctatggctgatttatagtactcattaaattctcagggaagacagttatcaaaatcattgactcccctgaatatttagtactccatgaccttgttctctttcccacagatgagatggcgaactgatgtcctttctccctttcctttacagaatcacttcctacacaaccaccaacttttccaccaaccattccaccagcaaaagaaggtaaaataataatagaataatgatctgattttaggtttaggatttgtgttggttttgtttgcctgttcatttaaaaccagggtattaataaagtatatttattgtgctacctaattttctccttaatacaaatgcttatcaaccatgatgggcttaaataatatccatttaatatcagttctgcacacaaagagtggatttactaacagaatgcttaatactaa

SEQ ID NO: 26021 - DNA, 324 bp, Macaca Mulatta
  misc_feature (1)...(324): n = A,T,C or G
gaaaaacaacctaagacagagtcctcaacaactgcttcctctggctgcggcagcgacagcggcgatggcaacagctctgaaagtctggaagagaaagatattcaaatggagcttcaaggatctgaactgtggaagagattccatgacatcnnnnnnnnnnnnnnnnnnnnnnnnnnnnnnnnnnnnnnnnnnnnnnnnnnnnnnnnnnnnnnnnnnnnnnnnnnnnnnnnnnnnnnnnnnnnnnnnnnnnnnnnnnnnnnnnnnnnnnnnnnnnnnnnnnnaggtatgtgtatcacagctcacagtggatggtagccgggaata

SEQ ID NO: 26022 - DNA, 441 bp, Macaca Mulatta
  misc_feature (1)...(441): n = A,T,C or G
gcgtcccagatccttcaatctgactggctcgccaaacgtcagcatccaggcannnnnnnnnnnnnnnnnnnnnnnnnnnnnnnnnnnnnnnnnnnnnnnnnnngggggctgtgggaccccacaaacggcagcgccgtggccgaaaaagaagatgaggcttcatggtcagtcgatgtaacccagcacaagcggcagcatcctggccggcgctccccctggcttgggtatgctgtcacaaagcggcagcacccaggcagaaggctggcagatcccaaggctcaaaggagctnnnnnnnnnnnnnnnnnnnnnnnnnnnnnnnnnnnnnctgatgcctgagaaacgccagcatccgggcaagagggccctgggaggaccctgtgggcggccaaagagcctgtggtcaggcgggcctcctactggggctcctggatgacctgagt

SEQ ID NO: 26023 - DNA, 246 bp, Macaca Mulatta
agatctgcttccggctaagaacggggaggagcaaaccgtgcaattcctcctggaagtggtggacatactcctcaactatgtccgcaagacatttgatcgctccaccaaggtgctggacttccatcacccacaccagttgctggaaggcatggagggcttcaacttggagctctctgaccaccccgagtccctggagcagatcctggttgactgcagagagacattgaagtatggggttcgcacagg

SEQ ID NO: 26024 - DNA, 272 bp, Macaca Mulatta
  misc_feature (1)...(272): n = A,T,C or G
gcaanacggaaacgaggtgaaaagggagaagtggtggaaactgttgaagatgtcattgttcggaaactgactgctgagagagttgaggaactaaagaaagtgataaaggaaactcaggagagatatannnnnnnnnnnnnnnnnnnnnnnnnnnnnnnnnnnnnnnnnnnnnnnnnnnnnnnnnnnnnnnnnnnnnnnnnnnnnnnnngaaaaagaaattggaagaagaggaggctgaagtaaagaggaaggctacagatgctgcatatcag

SEQ ID NO: 26025 - DNA, 846 bp, Macaca Mulatta
  misc_feature (1)...(846): n = A,T,C or G
tcctgaggaggcggttgagaaggcggggaaaatggaggaggcggcggcgggggcgacgaaggcgtcttcgggacgggaagctgaggagatgaagctggagccattacaggagcctaagcccgtgccggaggagaacttgacgtggaccagcagcggcggcgacgagaaggaacaaacattcaatcccccttcgctgtcacagcagctccnnnnnnnnnnnnnnnnnnnnnnnnnnnnnnnnnnnnnnnnnnnnnnnnnnnnnnnnnnncagccagcctgggctgtcggccccacgctcgcctctgggccgggcctgcggcctggccgccaccgccgccgccatctgcaccgcggcccagggcctggcgtggatcccggcgcagatcccgacctgggtccaggcctcagacacggagaagctgctctggtgacctagaggggtcgggggatcctggcggcttaggggactggttgctggaggtcgactttggtcagggtcccacaggctgctctcatgtggagagctttaaagtaggtaagaactggcagaagaacctgaggctgatctaccagcgtttcgtttggagtgggaccccagagactaggaaacgtaaagcaaagtcatgcatctgtcatgtatgtagtacccatatgaatagactccactcttgtctctccatgtgtcttttttggctgcttcactgagaaacatattcacaaacatgcagaaacaaagcagcaccatttagctgtagacgtttatcatggggtcatatattgcttcatgtgtaaggattatgtatatgacaaagacatagaacagattgccaaagaaacaaaagaaaa

SEQ ID NO: 26026 - DNA, 809 bp, Macaca Mulatta
  misc_feature (1)...(809): n = A,T,C or G
gtactagaaggaaggagtatggagttaaagactgtggcgtgaactgaggaaccctggacaggccacttgctgcaggggacccagtccagatcccaggaaagccccgctgccccttcggaccccgtctcccatctacaaaacgtggagactggcccagttgacgtgtctctacaaaaaggtgcatatannnnnnnnnnnngcaggctgatctggggaagcctctggcccaggacagataccgccatggccttcctgatgcacctgctggtctgcgtcttcggaatgggctcctgggtgaccatcaatgggctctgggtagagctgcccttgctggtgacggagctgcctgagagctggtacctgccctcctacctcacggtggttatccagctggccaacatcgggcccctcctggtcaccctgctccatcgcttccggcccagctgtctttctgaagtgcccatcatcttcaccctgctgggcgtgggaactgtcacctgcatcatttttgccttcctctggaatacgacctcctgggtgctggatggccaacacagcatcgccttcttggtcctcaccttcttcctggccctggtagactgcacctcttcggtgaccttcctgcccttcatgagccggctgcccacctactacctcaccacctaagttgtgggtgaaggactcnnnnnctcttgcctgccctggtggctcttgcccagggctcgggtcttactacctgcgtcaatgtcactgagctatcagacagcataccaagcccagtacccacgcaggaaactgacatcgcacag

SEQ ID NO: 26027 - DNA, 67 bp, Macaca Mulatta
acttatacagccatgtcctgattccttgatcatccaaagtacctgcagagtccagtgaaatgatatt

SEQ ID NO: 26028 - DNA, 1499 bp, Macaca Mulatta
  misc_feature (1)...(1499): n = A,T,C or G
ggaaaacaccataattttgcagcagctactcccactgcgggccaaggtagccaaactactcggttatagcacacatgctgacttcgtccttgaaatgaacactgcaaagagcacaagctgcgtaacagcctttctagnnnnnnnnnnnnnnnnnnnnnnnnnnnnnnnnnnnnnnnnnnnnnnnnnnnnnnnnnnnnnnnnnnnnnnnnnnnnnnnnnnnnnnnnnnnnnnnnnnnnnnnnnnnnnnnnnnnnnnnnnnnnnnnnnnnnnnnnnnnnnnnnnnnnnnnnnnnnnnnnnnnnnnnnnnnnnnnnnnnnnnnnnnnnnnnnnnnnnnnnnnnnnnnnnnnnnnnnnnnnnnnnnnnnnnnnnnnnnnnnnnnnnnnnnnnnnnnnnnnnnnnnnnnnnnnnnnnnnnnnnnnnnnnnnnnnnnnnnnnnnnnnnnnnnnnnnnnnnnnnnnnnnnnnnnnnnnnnnnnnnnnnnnnnnnnnnnnnnnnnnnnnnnnnnnnnnnnnnnnnnnnnnnnnnnnnnnnnnnnnnnnnnnnnnnnnnnnnnnnnnnnnnnnnnnnnnnnnnnnnnnnnnnnnnnnnnnnnnnnnnnnnnnnnnnnnnnnnnnnnnnnnnnnnnnnnnnnnnnnnnngagacacgacgaggtgaggacttacttccatgagtttggtcacgtgatgcatcagatttgtgcacaggtgagtttttttcccccagtaaacctgccagttggttttttaagaaaactttttgactgctgtcaggtttctgctcctaacatgtttttttcagaagctgaatgtgttcaagaattttataggcctcctgcaaaaccaaaattttccttatcctgtcctctttcacaacatatttttacttggaggttcatctaccagtgaaagaggtttcttgaataacggcctatggaaaaagaataagactatctataaggaaaggttacagatactttgctctttccttgtaatccttttccataggaatttggtataaatttctcagaaacactgcgctgtaatctctgtcttctgcttatcaatgctttgtttactttagtgatttttcaatcctcttagactctttactcatttttaaataataattttgtaacatttcgctttactaacttcaaattaaaatcatagataatataactatacaaagaatttggcagagtggaggtgtatgtgtacagtagattaaaactgattttttatttctgaaaataaaaagtacatttattctcaactttgtaatacaatccatttaattaggctcagactattctggcatgaaccatatgaacctgctaacatttaaccattattaacatgggaaaatgtctagttcagcaattcaacctaatagttgaaatatactattattggccaggcatggtggctcatgcctgtaatcccagcactttgggaggccaaggtggaaggagtgcctgggtctaggagttgagaacag

SEQ ID NO: 26029 - DNA, 70 bp, Macaca Mulatta
gcatgaatacaactgtgtctgagagccccttcaagtgtgatcctgatgctgccagagccattgtggatgc

SEQ ID NO: 26030 - DNA, 196 bp, Macaca Mulatta
ggtgcttcctgggtgagttggggtttaatcaaaggtgctgagtttactggcaaagcaatccagaaaggtgcttctaaactccgagagcggattcaaccagaagaaaaacctgtggaagttagtccagctgtcaccaagggactttatatagcgaagcaagctacaggaggagcagcaaaagtcagtcagttcctgg

SEQ ID NO: 26031 - DNA, 2648 bp, Macaca Mulatta
  misc_feature (1)...(2648): n = A,T,C or G
cgctagccagcacacagagggagccgcccgccccgccgcgcactccgcggagaccccgcggggctgaggcgtcgcggctgcccgcagcgtgagcgcagagccggcctccaccggagctaggagccccgcgggccgcgcccgccaccggctccacccatccgggtccaggaggccgaggccatggccgcgatagacgagcggagcctgcacaacttctttgccaactgggacaaggagaagaagaaggagccgagcaaccaggcggcgagttctgagggcgccgccggcagggcggcgggagcagtggagccgccgggggtgtagcggacggcggggagcgagcgggaacccggctgggccaaggcagcacagcgaccgcgggggctgtggacccaggggccgccaccaaggctgtgaagaaggacgaagatgaatggaaaggattggagcaaaaaggttgattacagcggccgcagggttcaggcaatgcaaataagtgaaaaggaagaagataatgaagagacaaggtccaggtgataactggaaagaaggtggagatggtggtggtatagaaaaatcttcaggtccctggaataaaacaactccagtacaagcacctcctgctccagtanttgtnnnnnnnnnnnnnnnnnnnnnnnnnnnnnnnnnnnnnataggccccctagggccaggttaaccacaacaaggaaaaacgacaaggaccaccagaaannnnnnnnnnnnnnnnnnnnnnnnnnnnnnnnnnnnnnnnnnnnnnnnnnnnnnnnnnnngataaagaaatggagaagagctttgaagtagtaagacacaaaaatagaggtagggatgaggtttcaaaaaaccaggcccttaaacttcagctagacaaccagtatgctgtgcttgaaaatcagaaaagcagccactcacaatacaattaaggaatgggctttgctaacccttctgaggtaactagactgcagctaaccaccaccaacagtcagtcatcatctgatctctgctggacctacagacaccgatgcagaccactcaatttcctgaccggccctattgcactatggaagttaaaagtgtcgcgactgctctatacatattggatttaggggaattttcattgttatataaatgtgtgaactagtttcaacagtgttctttcatatttactctgcaaatacaaaaaaccaaaacctgcagccagtggtcatttcaaaatctttttatgttcagatactgagccttcataagggttgactacctcagatctgctgcactcattgtggacttcatgtggatcacaacttctggataagaaggttacaactattaagtgttgatgtgannnnnnnnnnnnnnnnnnnnnnnnnnnnnnnnnnnnnnnnnnnnnnnnnnnnnnnnnnnnnnnnnnnnnnnnnnnnnnnnnnnnnnnnnnnnnnnnnnnnnnnnnnnnnnnnnnnnnnnnnnnnnnnnnnnnnnnnnnnnnnnnnnnnnnnnnnnnnnnnnnnnnnnnnnnnnnnnnnnnnnnnnnnnnnnnnnnnnnnnnnnnnnnnnnnnnnnnnnnnnnnnnnnnnnnnnnnnnnnnnnnnnnnnnnnnnnnnnnnnnnnnnnnnnnnnnnnnnnnnnnnnnnnnnnnnnnnnnnnnnnnnnnnnnnnnnnnnnnnnnnnnnnnnnnnnnnnnnnnnnnnnnnnnnnnnnnnnnnnnnnnnnnnnnnnnnnnnnnnnnnnnnnnnnnnnnnnnnnnnnnnnnnnnnnnnnnnnnnnnnnnnnnnnnnnnnnnnnnnnnnnnnnnnnnnnnnnnnnnnnnnnnnnnnnnnnnnnnnnnnnnnnnnnnnnnnnnnngtgagtatgccagtcctgagggtggaaccaaatcgcctttgatgtaaagggcagtggattctggaggctctacttcaggtgctgctaatgcctcttctaatcaggtctaaattgtgtagtaaactgcagtgggaagaaaatgctttctactcaggctaaggggttcactgatctgtccttacaaattcagagcaacatgagcaaaacctcagttaaaatccatttaagtgtcatggattgtgcatgatctttgataagaattcctcatgtacttgtgcccagtttttcaaggtattggctgttgtatagatgcagtgattgtcccagctagctctgttttcaaccttttggtgtgtctttatgttcatttggagagtcagggcgaaagacaggtgatgtagcccttctgtttttaataattacagcttcaaatacctattaatagtttgaggtcctttagatggacttgaggaagccacccaggattgcggaagagtgtccacctaacaagatggtctggcagtttcctagttttgtatctttggttcaatagaaatatctgaaagtggtaatgtgaccacttgatgcagagtccgggtttctctataataaatccctttgccaaatgcatgagttgcagacttgatattggcaagagtgaagcaagtgggtgagtaaaactattttgatgtgggagcattttcagataggagtttagtcttgatgaaagtgtccgtgcaggaattggactccaaagagggttacagtatctcctgatgggatctgccac

SEQ ID NO: 26032 - DNA, 133 bp, Macaca Mulatta
agtgctcctgatatggaagatatattgactgaatcagaaattaaattggatggtgtcagacaaaagatattccaggtagcccaagagctgtcaggggaagatatgcatcaattccatcgagccattactacag

SEQ ID NO: 26033 - DNA, 119 bp, Macaca Mulatta
aggctgagtttgagaaagctgcagaggaggttaagcgccttaagaccaagccagccgatgatgagatgctgttcatctatggccgctacaaacaagcaaccgtgggcgacataaataca

SEQ ID NO: 26034 - DNA, 100 bp, Macaca Mulatta
aggatggagatattctagcgtccagcttctctgttgacacacaagtcgcgtacatcctcagtctgggcgtcgtaaaagagttcaggaagcacggcatagg

SEQ ID NO: 26035 - DNA, 1014 bp, Macaca Mulatta
  misc_feature (1)...(1014): n = A,T,C or G
ggcgctgcgcggcgaggccaaaatggcggcttccagctgggcgcgcaaggccgtggtcttgctttgggcctctgannnnnnnnnnnnnnnnnnnnnnnaccaccgcctgggtcctgcgcggccgaaggctcgcccgggacgcccgacaagtctaccccccctccccggaagaagaagaaggatattcgcgattacaatgatgcagacatggcgcgtcttctggagcagtggganagaaagatgatgaaattgaagaaggagatcttccagaacacaagagaccctcagcaccggtcgacttctcaaagatagacccaagcaagcctgaaagcatattgaaaatgacgaaaaaagggaagactctcatgatgtttgtcactgtatcaggaagccccactgagaaggagacagaggaaattacgagcctctggcagggcagccttttcaatgccaactatgacgtccagaggtnnnnnnnnnnnnnnnnnnnnnnnnnnnnnnnnnnnnnnnnnnnnnnnnnnnnnnnnnnnnnnnnnnnnnnnnnnnnnnnnnnnnnnnnnnnnnnnnnnnnnnnnnnnnnnnnnnnnnnnnnnnnnnnnnnnnnnnnnnnnnnnnnnnnnnnnnnnnnnnnnnnnnnnnnnnnnnnnnnnnnnnnnnnnnnnaggagatctgaaatctcgggcttccaaggaagacaatcgagctgggaataaaagagaagacctgtgatggtgcagcagtggcgcactgtggagagacaggtggatgtggagagctgtttgcccagcttgtggggtgggagtggtatcaggaaactgcactccggttgacattctagtttcttctagaaagtggtctgccacatgaccagtttgtggtcaaagaattcctgtctaataggcttcaagtaagaagacaggtgttttctaattaattctggacactgacaaagtcatgtttactgtaaaattacctaacacggaaatatgactgtgttgctttttcccatttaca

SEQ ID NO: 26036 - DNA, 933 bp, Macaca Mulatta
caccacctcacccttgtggagcccatcaagaaagtcaaagaccaccgaggcatcatccccaaccggggcttcctgaggcagctcctggccctggaccgcaggctgcggcagggtctagaagcatgaggggagggggagagaggtcaggccaggcctgtgggtgggaccctggctcccagctggagataggaggcccagatggcaggtagcaggaggcccagatcacccatcctcccctggggtcaggagaggccgagtcccaggccactgtcactctttgtgggaggggacggggagtgaggttgggcagtgtggtggatgggcacccaggaagggttgaccagggaaggaggcagctaggctgtagatgaaacatggtcctgggattcaaacaccgctgggatctggccagggtgctccccgggattcacagtcccttcccctctttgtgcccaagtgttcccctctctccctcaccaaaacaaaagggccatctctgccctgcacttgtgcagaaagtcagggatgcagcaggcatgaatgcaatggtgtagagttgtgtgaaacccctagcatagagacagacagcgaagagatggtgtgaaaagcttgcagaaccagagagagaaccccacagactttccactccaagcgcaggaggaggtagctagcgtgtgagggttggcactaggcccacggctgctgcttggggccaaaaatgtacagaggtgcatggctggcagtcttgagatggtcactcgcttactggatccaagtgtctcgaggaaaaataaagatcatgaaaaagaagagagtttcttgaagtcattaacagtttgaaagagttctaggcctctctcctgggaaccccagccttgctggagaaaaggacagttcctgactcccttgtatcctccaccagccttcaaacct

SEQ ID NO: 26037 - DNA, 1253 bp, Macaca Mulatta
  misc_feature (1)...(1253): n = A,T,C or G
gggggctctctcgcgcgtggtgtggtggcagcaggctcagcctcgggatgcagaacgacgccggcgagttcgtggacctgtacgtgccgcggaaatgctccgctagcaaccgcatcatcggtgccaaggaccacgcatccatccagatgaacgtggccgaggttgacaaggtcacaggcaggtttaatggccagtttaaaacttatgctatctgcggggccattcgtaggatgggtgagtcagatgattccattcttcgattggccagggccgacggcatcgtctcaaagaacttttgactggagagaatcatggaagtggaatatttgtcataaataaagagtgaaaaccccttcggacgaaactcgagataaactnnnnnnnnnnncnnnnnnntttgtggccccgcgaagtaactttggggccggagaggtgatttttaagttttatggtttgtacaaaacgcggccgctaaacggaggagttttggtagaaagccgctccacccccccccccgcttttttataataggaaaggagaaagggacaacgnggncttcttcgccgtggccgtgatagagatgggatggtgtgtttgttgaatataaataatcnaggatacttacgttgcaagtaatataagcgtcctcatgntcctcacactaatcgcatctgatatagttgttggggccgcggacacgacgtgcgtcattcgagttctccgtccatgaccatcactatcttcagtatagtcgagagtgcatgtaagngagcgtcttatgactcttagcatgtcagtttcgtacgtctagatctagtgatcagcgaacatcgtgatgtgtgatgtgtagtctgtcgctagnggtaggacatagcggaccgctcgtccttctgatgtnagagcgctgtatgatgcgccactatacgtcactatgagtgtcgctgcgtanatcattcgatatgtggtgtactgttgctctctgacacgtgcacgaggagcgacgagcagtgtgcctcctgtgcattgtataccaggcgnagatatgatgttcgcactacatcacgancctatcatacgagacgtatcgattacattatagtgacaactcgatgatatatanatgactcgcacacatgaatctctatatgcttgagtctcgtatactcangncngcaccagcccagcgatatatgtgctcgatncgtccgtatactgcggataagatctgacgtggcgcacaatgtcgtgtattg

SEQ ID NO: 26038 - DNA, 222 bp, Macaca Mulatta
  misc_feature (1)...(222): n = A,T,C or G
aaggtcctcctggacctccaggtgaaaaaggagatcgaggtccaactggagaaagtggtccacgaggatttccaggtccagtaggtnnnnnnnnnnnnnnnnnnnnnnnnnnnnnnnnnnnnnnnnnnnnnnnnnnnnnnnnnnnnnnnnnnnnnnnnnnnnnaggaaattctggaccaaaaggccagaaaggggaaaaggggagtggaaacacactaagta

SEQ ID NO: 26039 - DNA, 430 bp, Macaca Mulatta
acgagggctactgggagggcagctgcagcacagctggctgccaggaagtctatgtcatggtgctggagaatgccaaccacaacttctactcctacatcctgaaatacaaggtgaatgcccagtgaggcctgtgccccggtcttaccctcccaaagggccaagccagacctccccagggagggctcaagggaagtgcagggagccctggacaccactgagtctgcatgaaatcccttctaggcctctgcctcagtgtccctcctctgaaacaggagctgtgatctttgtgttccgaaggcttcactcaggtgtggctgtgactgaggggacagaagcagtggctctttagaagaaaaaggtgctatgtaaatctaaggtattgtaaactgtacacctgcatccagatgccccttctcgtgttagtgctgct

SEQ ID NO: 26040 - DNA, 744 bp, Macaca Mulatta
aatgggagtacagtgccattaggttcccaagtgacacaggaattctgaatccagatggttataccctcaactacaatgaatatattgtctataaccccaaccaggtccgtatgcggtacctgttaaaggttcagtttaatttcctgcagctgtggtgaatgttgatattaaataaaccagagatctgatcttcaagcaagaaaataagcagtggtatacttgtgaattttgagatattttatgtaaataaaaactgtacaagtctaccactggcttcttcgggctttatttctccaagaacatatttcttctgacgttagtagatctccattttcaggacagaaagtactcattgttctgagggttattcagtatcctattcttaatggcatctgtgcatcaagggacactaatgggggcgcaaatgcttttacctgtttaattcaatttttctgcaaactgtaatttggtgagtgttatcgcaggaagggtagaggcaacaaaggctaagctgtttttttctttcccatccatatgtattcacttgcctttttccaatttatccactgcagcccagtctcccactattcaacactaggactcatcacatgtccaaaaatttgggaagcccttggaggactgtcactaagtctgaatacatcttgaggaggaaaggaaaaaagtagaatgagtttttacataccctgccccatctaagaagtactaaagtccagatcagatcct

SEQ ID NO: 26041 - DNA, 1711 bp, Macaca Mulatta
  misc_feature (1)...(1711): n = A,T,C or G
acgacaagtagatccagagtttgcagatatgataactgtacaagaattctgcaaagcagaagaggttgatgaagatagtgtctatggtgtatttgtctcttatattgaaatatataataattacatatatgatctattggaagaggtgccgtttgatcccataaaacccannnnnnnnnnnnnnnnnnnnnnnnnnnnnnnnnnnnnnnnnnnnnnnnnnnnnnnnnnnnnnnnnnnnnnnnnnnnnnnnnnnnnnnnnnnnnnnnnnnnnnnnnnnnnnnnnnnnnnnnnnnnnnnnnnnnnnnnnnnnnnnnnnnnnnnnnnnnnnnnnnnnnnnnnnnnnnnnnnnnnnnnnnnnnnnnnnnnnnnnnnnnnnnnnnnnnnnnnnnnnnnnnnnnnnnnnnnnnnnnnnnnnnnnnnnnnnnnnnnnnnnnnnnnnnnnnnnnnnnnnnnnnnnnnnnnnnnnnnnnnnnnnnnnnnnnnnnnnnnnnnnnnnnnnnnnnnnnnnnnnnnnnnnnnnnnnnnnnnnnnnnnnnnnnnnnnnnnnnnnnnnnnnnnnnnnnnnnnnnnnnnnnnnnnnnnnnnnnnnnnnnnnnnnnnnnnnnnnnnnnnnnnnnnnnnnnnnnnnnnnnnnnnnnnnnnnnnnnnnnnnnnnnnnnnnnnnnnnnnnnnnnnnnnnnnnnnnnnnnnnnnnnnnnnnnnnnnnnnnnnnnnnnnnnnnnnnnnnnnnnnnnnnnnnnnnnnnnnnnnnnnnnnnnnnnnnnnnnnnnnnnnnnnnnnnnnnnnnnnnnnnnnnnnnnnnnnnnnnnnnnnnnnnnnnnnnnnnnnnnnnnnnnnnnnnnnnnnnnnnnnnnnnnnnnnnnnnnnnnnnnnnnnnnnnnnnnnnnnnnnnnnnnnnnnnnnnnnnnnnnnnnnnnnnnnnnnnnnnnnnnnnnnnnnnnnnnnnnnnnnnnnnnnnnnnnnnnnnnnnnnnnnnnnnnnnnnnnnnnnnnnnnnnnnnnnnnnnnnnnnnnnnnnnnnnnnnnnnnnnnnnnnnnnnnnnnnnnnnnnnnnnnnnnnnnnnnnnnnnnnnnnnnnnnnnnnnnnnnnnnnnnnnnnnnnnnnnnnnnnnnnnnnnnnnnnnnnnnnnnnnnnnnnnnnnnnnnnnnnnnnnnnnnnnnnnnnnnnnnnnnnnnnnnnnnnnnnnnnnnnnnnnnnnnnnnnnnnnnnnnnnnnnnnnnnnnnnnnnnnnnnnnnnnnnnnnnnnnnnnnnnnnnnnnnnnnnnnnnnnnnnnnnnnnnnnnnnnnnnnnnnnnnnnnnnnnnnnnnnnnnnnnnnnnnnnnnnnnnnnnnnnnnnnnnnnnnnnnnnnnnnnnnnnnnnnnnnnnnnnnnnnnnnnnnnnnnnnnnnnnnnnnnnnnnnnnnnnnnnnnnnnnnnnnnnnnnnnnnnnnnnnnnnnnnnnnnnnnnnnnnnnnnnnnnnnnnnnnnnnnnnnnnnnnnnnnnnnnnnnnnnnnnnnnnnnnnnnctctttcaacctgatcagaacgcaccaccaattcgtctccgacacagacgatcacgctctgcaggagacagatgggtagatcataagcccgcctctaacatgcaaactgaaacagtcatgcagccacatgtccctcatgccatcacagtatctgttgcaaatgaaaaggcaatagctaagtgtgagaagtacatgctgaaccacc

SEQ ID NO: 26042 - DNA, 402 bp, Macaca Mulatta
  misc_feature (1)...(402): n = A,T,C or G
tgttgaagaatccctctttctacctgaccatgggattcccagagcctgctaacagaataattcctcctcacaatttcccctccacttggtcattaaaatagcacgaaaactcacatgatttggttcttgctttaagagggggaaagaggatgtggtcatccccaaggggggccagggcattctatgggaggcatcaggaaatcaaaggggataaaccttcctgtgacaaagggagtgagtgacaaggtccctggaatgtctgagaagacattagaaacagcatccttctatagcacgtagttgacatcagacagtctgaactaanacacttacccaatctcanatgactcatggcacttacatgttaggtagctgtttacagccacacaggtgtacgtggtg

SEQ ID NO: 26043 - DNA, 135 bp, Macaca Mulatta
ataggaatgatcgagattgtgaaagacgccacaacaattgccaaaattcagcaaagcaccgtgggcaacacgggagcatttaaagatgaagtcctgaatcactggctcaaagaaaaatctcctactgaagaaaag

SEQ ID NO: 26044 - DNA, 1621 bp, Macaca Mulatta
  misc_feature (1)...(1621): n = A,T,C or G
agagactttcagtgccatcctgactctagaaggctccccagagcagggcatagggggcatcaccctgctcactctcagtgacacagaggactccttgcattttttgctgctcttccgagggctgctggaacccaggagtgggggnggactaacccaggttcccttgaggctccagattctacaccaggggcagctactgcgagaacttcaggccaatgtctcagcccaggncccaggaaccaggctttgctgaggtgctgcccaacctgacagtccaggagatggactggctggtgctaggggagctacagatggccctggagagggcaggcaggccagggctgcgcatcagtggacacattgctaccaggaagagctgcgacgnnnnnnnnnnnnnnnnnnnnnnnnnnnnnnnnnnnnnnnnnnnnnnnnnnnnnnnnnnnnnnnnnnnnnnnnnnnnnnnnnnnnnnnnnnnnnnnnnnnnnnnnnnnnnnnnnnnnnnnnnnnnnnnnnnnnnnnnnnnnnnnnnnnnnnnnnnnnnnnnnnnnnnnnnnnnnnnnnnnnnnnnnnnnnnnnnnnnnnnnnnnnnnnnnnnnnnnnnnnnnnnnnnnnnnnnnnnnnnnnnnnnnnnnnnnnnnnnnnnnnnnnnnnnnnnnnnnnnnnnnnnnnnnnnnnnnnnnnnnnnnnnnnnnnnnnnnnnnnnnnnnnnnnnnnnnnnnnnnnnnnnnnnnnnnnnnnnnnnnnnnnnnnnnnnnnnnnnnnnnnnnnngctgcctgtgcccctagcaggagccctggtgctaccccctgtgaagagccaggcagcagggcatgcctggctctccctggatacccactgtcacctgcactatgaagtgctgctggctgggcttggtggctcagaacaaggcactgtcactgcccaccttcttgggcctcctggaacgccagggcctcggcggctgctgaagggattctatggnnnnnnnnnnnnnnnnnnnnnnnnnnnnnnnnnnnnnnnnnnnnnnnnnnnnnnnnnnnnnnnnnnnnnnnnnnnnnnnnnnnnnnnnnnnnnnnnnnnnnnnnnnnnnnnnnnnnnnnnnnnnnnnnnnnnnnnnnnnnnnnnnnnnnnnnnnnnnnnnnnnnnnnnnnnnnnnnnnnnnnnnnnnnnnnnnnnnnnnnnnnnnnnnnnnnnnnnnnnnnnnnnnnnnnnnnnnnnnnnnnnnnnnnnnnnnnnnnnnnnnnnnnnnnnnnnnnnnnnnnnnnnnnnnnnnnnnnnnnnnnnnnnnnnnnnnnnnnnnnnnnnnnnnnnnnnnnnnnnnnnnnnnnnnnnnnnnnnnnnnnnnnnnnnnnnnnnnnnnnnnnnnnnnnnnnnnnnnnnnnnnnnnnnnnnnnnnnnnnnnnnnnnnnnnnnnnnnnnnnnnnnnnnnnnnnnnnnnnnnnnnnnnnnnnnnnnnnnnnnnnnnnnnnnnnnnnnnnnnnnnnnnnnnnnnnnnnnnnnnnnnnnnnnnnnnnnggctgctattttgatggtgaccggagctggcgggcagcgggtacgcggtggcaccccgttgtgcccccctttggcttaattaagtgtgctgtctgcacctgcaag

SEQ ID NO: 26045 - DNA, 2930 bp, Macaca Mulatta
  misc_feature (1)...(2930): n = A,T,C or G
caaagagctttcctcctgtcagacctggcaacaaagtgcaggtgggttaatcaggtgtcaagatttcctgaaagtttttcaagggaagaattctcagttgcaagaacaaggtgattccctctgccaggtttgggcaggaataccagttcagatttctgaagatgagaactatatattgactcatatagggaatggctccaattatataaaaagtcaagagtatccatcttggagggcacatcattcttggagaaaaatgtatctgaaagagtcatgtaattatcagtgtagatgtcagcaaatttccatgaaaaataatttctgtaagtgtgacagcgtcagttggatctcacatcacaatgataaactggaagtacacagaaaagaaaactacagctgccatgactgtggggaagatatcgtgaaggtatcattattcaatcaggattcaattcaaacagaggagaagccctatccatgtactgggtatagaaaagccttcaataatgactccagctctgaagttcatcagcagttccatttgaaagggaagccctatacatacagttcacatggaaagggctgtagttatagttcacttcttcacattcatcaaaatattcagagagaagatgatattgagaatacacatctgaaatcctatcagagagtgcatacagaggagaaaccatgcaaatgtagtgagtatggtgggaatttcaatcactattcccctcttaacacttatgaacttatccacacaggtgagatgtcctataggcacaacatttatgagaaagccttcagtcatagcttagaccttaatagtatttttagggtccatactagggatgaaccccatgaatatgaggaaaatgagaatgtctttaatcagagttcatgtcttcaagtccatcaaaaaatccacactgaagagaaactatacacagatgtagagtatggaaagagtttcatttgtagttcaaatcttgacattcagcatagggttcatatggaagagaattcctacaattctgaggagtgtggtaatgacttcagtctgacgtcacattttcaagaccttcagatagtccacannnnnnnnnnnnnnnnnnnnnnnnnnnnnnnnnnnnnnnnnnnnnnnnnnnnnnnnnnnnnnnnnnnnnnnnnnnnnnnnnnnnnnnnnnnnnnnnnnnnnnnnnnnnnnnnnnnnnnnnnnnnnnnnnnnnnnnnnnnnnnnnnnnnnnnnnnnnnnnnnnnnnnnnnnnnnnnnnnnnnnnnnnnnnnnnnnnnnnnnnnnnnnnnnnnnnnnnnnnnnnnnnnnnnnnnnnnnnnnnnnnnnnnnnnnnnnnnnnnnnnnnnnnnnnnnnnnnnnnnnnnnnnnnnnnnnnnnnnnnnnnnnnnnnnnnnnnnnnnnnnnnnnnnnnnnnnnnnnnnnnnnnnnnnnnnnnnnnnnnnnnnnnnnnnnnnnnnnnnnnnnnnnnnnnnnnnnnnnnnnnnnnnnnnnnnnnnnnnnnnnnnnnnnnnnnnnnnnnnnnnnnnnnnnnnnnnnnnnnnnnnnnnnnnnnnnnnnnnnnnnnnnnnnnnnnnnnnnnnnnnnnnnnnnnnnnnnnnnnnnnnnnnnnnnnnnnnnnnnnnnnnnnnnnnnnnnnnnnnnnnnnnnnnnnnnnnnnnnnnnnnnnnnnnnnnnnnnnnnnnnnnnnnnnnnnnnnnnnnnnnnnnnnnnnnnnnnnnnnnnnnnnnnnnnnnnnnnnnnnnnnnnnnnnnnnnnnnnnnnnnnnnnnnnnnnnnnnnnnnnnnnnnnnnnnnnnnnnnnnnnnnnnnnnnnnnnnnnnnnnnnnnnnnnnnnnnnnnnnnnnnnnnnnnnnnnnnnnnnnnnnnnnnnnnnnnnnnnnnnnnnnnnnnnnnnnnnnnnnnnnnnnnnnnnnnnnnnnnnnnnnnnnnnnnnnnnnnnnnnnnnnnnnnnnnnnnnnnnnnnnnnnnnnnnnnnnnnnnnnnnnnnnnnnnnnnnnnnnnnnnnnnnnnnnnnnnnnnnnnnnnnnnnnnnnnnnnnnnnnnnnnnnnnnnnnnnnnnnnnnnnnnnnnnnnnnnnnnnnnnnnnnnnnnnnnnnnagcacatcggagggttccacttaagggaaaccatacaaatgtgaggtgtgtacaaagggctttcagtgagagttcacgccttcaagcacaccaaagggttcatgcagaagggagaccctataaatgtgaacagtgtggtaagggtttcagtgggtattcaagtcttcaagcccatcacagagtccacactggggagaaaccatacaaatgtgaggtatgtggaaagggcttcagtcagagatcaaatcttcaggctcatcagagagtccacacaggagagaaaccatacaaatgtgatgcatgtggtaagggtttccgttggagctcaggtcttctgattcatcagagggtccatactagtgataaattctatagaagcgaagactttggtaaggactacccttcatcagagaatctacacagaaatgaagattctgttttgttttgaagtcctcaaatgggagctgaaatgttccagtcactagagttctttcagtagaaaaagaatttttaaaaattaaaatgtaattttctgcccaacttcaacattcataatggccaggagaccacacaacagagacatttaatgagaggggtttcatgagggattttgttagaactttaacatcagtcattgcacaggagctaaggcttataaaatatgagtatggtcaggaatttaatcaaagtacagtgatgagcatacctaaatccatgttctctagaatgtaagcttggtgagagaagggactttgttcattgctagtctacaaaactatgacatttcataactcaatgtaggtgctcagtactttttg

SEQ ID NO: 26046 - DNA, 1328 bp, Macaca Mulatta
  misc_feature (1)...(1328): n = A,T,C or G
tcaacctcaaatatgcaagtggcataaatgtcaacctgcagaagacatttataacacttcccaaaaacttactgaataaagaagaaaaccctttgaaaaacacaattgttttcaataatccttcttcagaatgtaatatgaaggagggaatacagacatgtattctttcaaaggaaactgacattaaaacttcagagaacacagccgagttcaaggaacaggagctctgtccactgaaggcctccaagaaactacctgaaaaccatttaccaagaaactcacctcagtaccaccagccagacttgccagaaatttccaggaaaaataatggnnnnnnnnnnnnnnnnnnnnnnnnnnnnnnnnnnnnnnnnnnnnnnnnnnnnnnnnnnnnnnnnnnnnnnnnnnnnnnnnnnnnnnnnnnnnnnnnnnnnnnnnnnnnnnnnnnnnnnnnnnnnnnnnnnnnnnnnnnnnnnnnnnnnnnnnnnnnnnnnnnnnnnnnnnnnnnnnnnnnnnnnnnnnnnnnnnnnnnnnnnnnnnnnnnnnnnnnnnnnnnnnnnnnnnnnnnnnnnnnnnnnnnnnnnnnnnnnnnnnnnnnnnnnnnnnnnnnnnnnnnnnnnnnnnnnnnnnnnnnnnnnnnnnnnnnnnnnnnnnnnnnnnnnnnnnnnnnnnnnnnnnnnnnnnnnnnnnnnnnnnnnnnnnnnnnnnnnnnnnnnnnnnnnnnnnnnnnnnnnnnnnnnnnnnnnnnnnnnnnnnnnnnnnnnnnnnnnnnnnnnnnnnnnnnnnnnnnnnnnnnnnnnnnnnnnnnnnnnnnnnnnnnnnnnnnnnnnnnnnnnnnnnnnnnnnnnnnnnnnnnnnnnnnnnnnnnnnnnnnnnnnnnnnnnnnnnnnnnnnnnnnnnnnnnnnnnnnnnnnnnnnnnnnnnnnnnnnnnnnnnnnnnnnnnnnnnnnnnnnnnnnnnnnnnnnnnnnnnnnnnnnnnnnnnnnnnnnnnnnnnnnnnnnnnnnnnnnnnnnnnnnnnnnnnnnnnnnnnnnnnnnnnnnnnnnnnnnnnnnnnnnnnnnnnnnnnnnnnnnnnnnnnnnnnnnnnnnnnnnnnnnnnnnnnnnnnnnnnnnnnnnnnnnnnnnnnnnnnnnnnnnnnnnnnnnnnnnnnnnnnnnnnnnnnnnnnnnnnnnnnnnnnnnnnnnnnnnnnnnnnnnnnnnnnnnnnnnnnnnnnnnnnnnnnnnnnnnnnnnnnnnnnnagtttcattgattggaatgcaacatgcgaaggccagttttccagcgcatactgtccattggaactgaacgattacaatgcctttccagaa

SEQ ID NO: 26047 - DNA, 406 bp, Macaca Mulatta
  misc_feature (1)...(406): n = A,T,C or G
cgcaaggcactcagcaggcgaaagagcgcgctcggacctcctccttcccgcagccaccgagagtgcggagcgaccagcgtgcactcggaggaaccagaggaacccagcaccccgcgggactgtcagtcgcanaaattcaacatgaaaatcctcgtggccttggcagtcttttttctcgtctccactcnnnnnnnnnnnnnnnnnnnnnnnnnnnnnnnnnnnnnnnnnnnnnnnnnnnnnnnnnnnnnnnnnnnnnnnnnnnnnnnnnnnnnnnnnnnnnnnnnnnnnnnnnnnnnnnnnnnnnnnnnnnnnnnnnnnnnnnnnnnnnnnnnnnnnnnnnnnnnnnnnnnnnnnnnnnnngattcctcaattgaaaaacaagtggccctgttaaaggctctttatg

SEQ ID NO: 26048 - DNA, 671 bp, Macaca Mulatta
ccaccatgcactaacattctctatccccctccgaaaacaccttctgccaaagccttgccttttggtgccagtgcgcaattaatcacagtgccatatcctgttatctagtgagaagtgaatttgaattggacagaatatgtggttatgggactgcccgctgccggaacaaatgtcgaagccaagaatacaaaattggaagatgtcccaactcctatgcatgctgtttgagaaaatgggatgagagcttactgaatcgtacaaaaccctgaaacgcagtagtgctggtccctagagtcgctggaagcaggacctcagtagctttccttcctgtggccttgcagcaagggcatccccattgcaaccacggattcagttatcaaacaaggtttgctgagcttccactcaatgcaaagccaatataggagattgaagaagaatacagcctggaaagcccctctggttgtgataatggagaatagtaatggaggttaatcatgagtttcaacactgcataagtcgaaccaaaaatatgtctacctaatcagctataaactgaagaaaaacatcatttttattctgataatgctggttttcatgtctgatcaaaagttttgctcagaagttgtatatgtctattgttaattaaaatggaaagtaaatcaatgttaagt

SEQ ID NO: 26049 - DNA, 476 bp, Macaca Mulatta
  misc_feature (1)...(476): n = A,T,C or G
gggaagacttcctgtcccaaaggaagtgaaccgcaagaagaacgatgagacaaacgctgcctccctgactccactgggcagcagtgaactccgctccccaagaatcagttacctccactttttttaatcgtaacacctccatttgtattacatatggtgtatgggtattgatgaggtcatggtatcatatatgggatttttttctgtgtaaatcatcaagtataagaagaaactatgggactctgagccttgctttagagaatttacagtggacaaataggtatcatcaaaccagtttttaatcattctgactcaagtgaaaacgctcagaatttcacactgtgaatccacgtttacaacccttacaggtgggccttcaggcctggttcgctacaacaatgtcttccacaactcanactcccaccgcgctcacacaaccggtccactcctgccttttcactcacacagctcccgac

SEQ ID NO: 26050 - DNA, 222 bp, Macaca Mulatta
cccaagaacgtggctctgcgctggaaggttggtggcctcttgctcctccttccagatccctggccaagcccagtcacgagaatttcaggctcccctctctggctccagcctgtgcctgtgattgtacaggtgtggcctaggccgccgccttcagatgccccggggtcccttccctgggtgggatgctcactacagctctgatgtgtaaagcacacagccccc

SEQ ID NO: 26051 - DNA, 422 bp, Macaca Mulatta
acagggcggacctgtatgattcctttattcctggggccgttgtatcatggctgatgacacagacagaaaccagactgaaaaactcctaaaaagagtacaagaactggagcaagaggtgcaaagacttagaacggaacaggccaaaaataaggaggactcaaacattagaaaaaattcatcaggagctggaaaaactaagcgtgcatttgatttcagtgctcatggccgaagacatgtagccctaagaatagcctatatgggctggggataccagggctttgctagtcaggaaaacacaaataataccattgaagagaaactgtttgaggctctaagtaagactcgactggtagaaagcagacagacatccaattatcaccgatgtgggagaacagacaaaggagttagtgcctttggacagg

SEQ ID NO: 26052 - DNA, 519 bp, Macaca Mulatta
  misc_feature (1)...(519): n = A,T,C or G
ccaagcaattattattatggatcccttgggctgtgggccttcccgtccaccccaccacacctgcccaggtagttggagctgatcataaacaagaaggctctgggcagagtccacggcaccagtatcggccaaggcccactcctgaagacctgaagttcagctcctggacaaagtcctaaggtcctgaggacgccccagcctgcgcaggcctgcaaacccaggctgcccacaacagaaggggctcctggcttgtccggcctctctggcctcccaagcaggtgtgggagagcagggcaagtgtgggctgaccagctactccatatggccggggtcctgcgctggcgcctggctagggggctgcacagcctgcactgtctcctccaggctgcccctggggaataccacgtagtgcgtggagtttggccctggcagctcccgctggttctccttgctgtgccggatgccgtagccanaaatacactgcgagtcccatcagcagccagatggagagccctcgtg

SEQ ID NO: 26053 - DNA, 722 bp, Macaca Mulatta
aaatctgtcattgcatatgccatcattttctagcaaaatcccatgattggccataaacgtttcgtaagaagaagtcactctccttgaaaatactgaacatagctgtataggtttgtgattattagagagtatgttaataaaacttcttgtaacggctgccacctaaaatatgctgggttttctgttgttgttttgagtgtgttagagaaatttgagtgtttttgtcagttatgagtcagccataattagattagtttagggacaggttgggattagagaagagttttttgtgtgtgtgttttgttaatgtctgagtgatttttaaagtattttacaaaaagatattgaaaatttggttgaagtttagtaattaagttagaattaagagttttgcgaggttaaaaaaatgtgcctcgtggatctccctgttttagtaacatggggacaaaaagtctacaggaaaaagtgaacaatttaatgaagatgattattagccttccttgaagtatttgtggatgggtgttaaattaaaatttccagaatacactgtccatctcacacactctgaaatctaatatatgaagtagtaatgaaaatgaagtagtaatttaaccagagttcatttatccttgaataaacctttttatttttacctcagaaaagtgagtatactggcggttagtgtcactgctttgcacagtccccattagaccctccagaga

SEQ ID NO: 26054 - DNA, 779 bp, Macaca Mulatta
  misc_feature (1)...(779): n = A,T,C or G
ggggcaggtatggctgttgttctatttttccctgtctttatttcattcacaatcggctgccatccgaggagctgaggaagcctagcgctcttccggggacgttgtctgcaggcactcagaatggtccaacgtttgacataccgacgtaggctttcctacaatacagcctctaacaaaactaggctgtcccgaacccctggtaatagaattgtttacctttataccaagaaggttgggaaagcaccaaaatctgcatgtggtgtgtgcccaggcagacttcgaggggttcgtgctgtaagacctaaagttcttatgagattgtccaaaacaaagaaacatgtcagcagggcctatggtggttccatgtgtgctaaatgtgttcgtgacaggatcaagcgtgctttccttatcgaggagcagaaaatcgttgtgaaagtgttgaaggcacaagcacagagtcaaaaagctaaataaaaaaatgaaacttttttgagtaataaaaatgaaaagacttgctgtaaaaaagagnngaaanaagaaggagagaaacatgtcggcccgcctcggcgcctcgaaaaacctttcgtagaccattccgtttggcggcccggggccccaagtagggtaagtggaaacattggtccataagctggttttcctagggaaaagcccgggggcatggactaatggccttgggaatcccgcccccagtaaaaaaaattgctttggggggggagaaccggaagcgtttgctggaaaaaannnnnnnnnnnnnntaa

SEQ ID NO: 26055 - DNA, 872 bp, Macaca Mulatta
gggcccgcggtcctccgtcggttctctcgttagtccgcggtctggtcttcagctacccgtcttcgtctccgagcttgcgactcgcggaccggcgtccccggcgcgaagaggctggactcggattcgttgcctgagcaatggctgccatccggaagaaactagtgattgttggtgacggagcctgtggaaagacatgcttgctcatagtcttcagcaaggaccagttcccagaggtgtatgtgcccacagtgtttgagaactatgtggcagatatcgaggtggatggaaaacaggtagagttggctttgtgggacacagctgggcaggaagattatgatcgcctgaggcccctctcctacccagataccgatgttatactgatgtgtttttccatcgacagccctgatagtttagaaaacatcccagaaaagtggaccccggaagtcaagcatttctgtcccaacgtgcccatcatcctggttgggaataagaaggatcttcggaatgatgagcacacaaggcgggagctagccaagatgaagcaggagccggtgaaacctgaagaaggcagagatatggcaaacaggattggtgcttttgggtacatggagtgttcagcaaagaccaaagatggagtgagagaggtttttgaaatggctacgagagctgctctgcaagctagacgtgggaagaaaacaatctgggtgccttgtcttgtgaaaccttgctgaagcacagaccttagccggttactttgaaggctgtgttaaactagtggataatctgcctttcattactatagtaccagattcatcgagttctgctccgattgagccctgagtgtggtcccggtgcccggcttgattctgacc

SEQ ID NO: 26056 - DNA, 358 bp, Macaca Mulatta
taatagaaacatctttcagaagaatgtagtttgatatttatttagtattatatgtccgtgcacagtgttaacaaatacaatttttacaaatctgttttgaaaagtggctatttatttgggtttcatactcttaattacttcatccatcaattttttaacttctttgtgtcttgtaactgctcggctcatgcagtcctgaagtttagctccagtcagcccgcttccacctgaaaaattattttgccaatacttttaatctatcactgcttttcaaaaaacattaatgtcatatcaaattatgaaacaaaaaaattggataacataaatcagggtacagtctcaagatctgcaagttagt

SEQ ID NO: 26057 - DNA, 166 bp, Macaca Mulatta
gaagcaccagcagtatgactgtaagtggtacattcccctggccgacctggtgtttccgtcccccgaggaatctgaggccagcccccaggtgcaccccttcccagaccatgagctggaggacatgaagatgaagatctctgccctcaagagtgaaatccagaaggag

SEQ ID NO: 26058 - DNA, 1844 bp, Macaca Mulatta
  misc_feature (1)...(1844): n = A,T,C or G
aggttattcttggacagtataattggctctcctatgaagatgtcttcgttcgagccttgaattttgggaatggcttacagatgttgggccagaaaccaaagaccaacatcgccatcttctgtgagaccagggccgagtggatgatagctgcacaggcgtgttttatgtataattttcagnnnnnnnnnnnnnnnnnnnnnnnnnnnnnnnnnnnnnnnnnnnnnnnnnnnnnnnnnnnnnnnnnnnnnnnnnnnnnnnnnnnnnnnnnnnnnnnnnnnnnnnnnnnnnnnnnnnnnnnnnnnnnnnnnnnnnnnnnnnnnnnnnnnnnnnnnnnnnnnnnnnnnnnnnnnnnnnnnnnnnnnnnnnnnnnnnnnnnnnnnnnnnnnnnnnnnnnnnnnnnnnnnnnnnnnnnnnnnnnnnnnnnnnnnnnnnnnnnnnnnnnnnnnnnnnnnnnnnnnnnnnnnnnnnnnnnnnnnnnnnnnnnnnnnnnnnnnnnnnnnnnnnnnnnnnnnnnnnnnnnnnnnnnnnnnnnnnnnnnnnnnnnnnnnnnnnnnnnnnnnnnnnnnnnnnnnnnnnnnnnnnnnnnnnnnnnnnnnnnnnnnnnnnnnnnnnnnnnnnnnnnnnnnnnnnnnnnnnnnnnnnnnnnnnnnnnnnnnnnnnnnnnnnnnnnnnnnnnnnnnnnnnnnnnnnnnnnnnnnnnnnnnnnnnnnnnnnnnnnnnnnnnnnnnnnnnnnnnnnnnnnnnnnnnnnnnnnnnnnnnnnnnnnnnnnnnnnnnnnnnnnnnnnnnnnnnnnnnnnnnnnnnnnnnnnnnnnnnnnnnnnnnnnnnnnnnnnnnnnnnnnnnnnnnnnnnnnnnnnnnnnnnnnnnnnnnnnnnnnnnnnnnnnnnnnnnnnnnnnnnnnnnnnnnnnnnngctttgttttccggaaagttcgaagcttgctaggcggaaatattcgtctcctgttgtgtggtggcgctccactttctgcaaccacgcagcggttcatgaacatctgtttctgctgtcctgttggtcagggatacggactcactgaatctgctggggccggaacaattnnnnnnnnnnnnnnnnnnnnnnnnnnnnnnnnnnnnnnnnnnnnnnnnnnnnnnnnnnnnnnnnnnnnnnnnnnnnnnnnnnnnnnnnnnnnnnnnnnnnnnnnnnnnnnnnnnnnnnnnnnnnnnnnnnnnnnnnnnnnnnnnnnnnnnnnnnnnnnnnnnnnnnnnnnnnnnnnnnnnnnnnnnnnnnnnnnnnnnnnnnnnnnnnnnnnnnnnnnnnnnnnnnnnnnnnnnnnnnnnnnnnnnnnnnnnnnnnnnnnnnnnnnnnnnnnnnnnnnnnnnnnnnnnnnnnnnnnnnnnnnnnnnnnnnnnnnnnnnnnnnnnnnnnnnnnnnnnnnnnnnnnnnnnnnnnnnnnnnnnnnnnnnnnnnnnnnnnnnnnnnnnnnagttatcacttcttatgtcattggatttgttgtgccaaatcaaaaggaactaactgaactagctcgaaagaaaggacttaaagggacttgggaggagctgtgtaacagttgtgaaatggaaaatgaggtacttaaagtgctttccgaagctgctgtttcagnagcaagtctggaaaagttcgaaattccagtaaaaattcgtttgagccctgaaccgtggacccctgaaactggtctggtgacagatgccttcaagctgaaacgcaaagagcttaaaacacattaccaggcagacatcgagcgaatgtatggaagaaaataattactctcttctggcatcagtttgctacagtgagctcagatcaaataggaaaatac

SEQ ID NO: 26059 - DNA, 994 bp, Macaca Mulatta
  misc_feature (1)...(994): n = A,T,C or G
aggaatcagcctcctcatccccccagacgccataccccgagggaagatctacgagatctacctcacgctgcacaagccggaagacgtgaggtntgaggttgcccctagctggctgtcagaccctgctgagtcccatcgttagctgcggaccccccggcgtcctgctcacccggccagtcatcctggctatggaccactgtggggagcccagccccgacagctggagcctgcgcctcaaaaagcagtcgtgcgagggcagctgggaggnnnnnnnnnnnnnnnnnnnnnnnnnnnnnnnnnnnnnnnnnnnnnnnnnnnnnnnnnnnnnnnnnnnnnnnnnnnnnnnnnnnnnnnnnnnnnnnnnnnnnnnnnnnnnnnnnnnnnnnnnnnnnnnnnnnnnnnnnnnnnnnnnnnnnnnnnnnnnnnnnnnnnnnnnnnnnnnnnnnnnnnnnnnnnnnnnnnnnnnnnnnnnnnnnnnnnnnnnnnnnnnnnnnnnnnnnnnnnnnnnnnnnnnnnnnnnnnnnnnnnnnnnnnnnnnnnnnnnnnnnnnnnnnnnnnnnnnnnnnnnnnnnnnnnnnnnnnnnnnnnnnnnnnnnnnnnnnnnnnnnnnnnnnnnnnnnnnnnnnnnnnnnnnnnnnnnnnnnnnnnnnnnnnnnnnnnnnnnnnnnnnnnnnnnnnnnnnnnnnnnnnnnnnnnnnnnnnnnnnnnnnnnnnnnnnnnnnnnnnnnnnnnnnnnnnnnnnnnnnnnnnnnnnnnnnnnnnnnnnnnnnnnnnnnnnnnnnnnnnnnnnnnnnnnnnnnnnnnnnnnnnnnnnaggacacaaggtttgctgagttgctggctctggagagtgaagggggggtcccagccctggtgggccccagtgccttcaagatccccttcctcattcggcagaagatcatttccagcctggacccaccctgtaaccggggtgccgactggcggactctggcccagaaactccacctggaca

SEQ ID NO: 26060 - DNA, 218 bp, Macaca Mulatta
ctaaattttcaatacttagccttctacctgaagctgtgtacccccggccccaagatgggccctaagcaagacaagtcatttggaatagaaatattagctgagacacagcaaatgaactggcagagatctatagtccgtctcagtactgaaccacagggtcttatagatcccagattcggtgccaacagttaatcaggtaactgcaaaaatgcaacttt

SEQ ID NO: 26061 - DNA, 699 bp, Macaca Mulatta
tcacagccgactacccagatgagctgaagtgcctgcacgctcctgtgctgacccaggctgagtgtgaaggctcctaccctggaaagattaccagtaacatgttctgtgtgggcttccttgagggaggcaaggattcctgccaggtgatttgaacaacccttcccattctgaagctcccactgatacccaggccccatcttggaaaaagatttcaactcccaaggtggtggggctgaggaggctccctgtagtatccccatggagaagtgaggaaggctcccttgggctgcatgctgtctgcttagggacagagaatgggccactgtgagaaggacgtggagccacagagctgcctgaaaggggtcttttaaggttcagagtaaatatagctatattcctcctccatctctccatacaacttctcccttcttctccctagggcgactctggtggacctgtggtctacaacggacagctccaaggagttgtgtcctggggctatggctgtgcccagaagaacaggcctggagtctacaccaaggtctacaactatttggcctggattaaggacaccatagctgccaacagctaaaccccctgtcccgctgcagtctctataccagtaaagtgaccctgttctaactgtgtctgtgcctgctccctcacactccttcacactggaaagcatcctccaatctc

SEQ ID NO: 26062 - DNA, 753 bp, Macaca Mulatta
attcctaaagaagggggaaagccaggctggtcagttatacaaattgcatttctaagtctcaggcacttctcctcaaggaactcatcttgccctgggccctgtgatctgcttgaaaggaaagcaagaactataaggaggatgtgtagttgcaaaaatggctccatcagtaactcaagcttcagaatgttatgacatacagaaaatcaaagatgctatgtcttagcattgagcagtatgggtggtgctgtctgtaatctggtcagattcggttaactgttcaaaacaatttcctctgaaatactgttgggaaagtctggcatttgcaaaaagagcagagtttaaatacaagccagtctttccagtcaacaatgcctctttgaagaaaaccaattaaaggctgtttgcatgccgctgaatccttgtgatcagttagctcacagtctaggacagaaagatgacaaggggaaggactgagggccatctgagagcacaagcttgctacctctcagaggcattgaaatactgcatgctataaactgctttgtgtagctgttatcacctctcacttgagacatcactcactggtaaaatgtttttataaataaattataaatagccatcatggagcctgctggtttctagatcgtgacagagagaagcagcagttccttctctgaggaaaagatacaacaggatggtttgaaatccatttctagcccttaagagagatgtgccatgcttggaagactggat

SEQ ID NO: 26063 - DNA, 271 bp, Macaca Mulatta
caacatcagtacttttatctgatgaagaaacaattttccccccaatcttttgtgtactaattattttgtgctacacattgacaataaatataggacgttgtaaaccagcactgtgcagaaataaggcgctgggattgctgtcactccttatttaaaattggaattatttctactagacgaagacattgagctgagcctcctaactctccttgctaatgttttattctgtgctcactctgtgggaaaggtcgctctatgatctatgtataga

SEQ ID NO: 26064 - DNA, 718 bp, Macaca Mulatta
  misc_feature (1)...(718): n = A,T,C or G
accaaacctggaccacccaaaaagccgaagaccccttcaagaccatcagccttagcatattgctatcactgcgcgcaaaaaggccattatggacacgnnnnnnnnnnnnnnnnnnnnnnnnnnnnnnnnnnnnnnnnnnnnnnnnnnnnnnnnnnnnnnnnnnnnnnnnnnnnnnnnnnnnnnnnnnnnnnnnnnnnnnnnnnnnnnnnagtactcaagaaaaatggggttatcccagagccatccaagctgccttatctaaaagcagcaaatgagaacccccaccatgatataagaaagggccgtgcctcgtggaaaagcaacaggtggcctcaagaaaataaagaaacacaaaaagagatgaagaacaagaatagaaactgggagaagcacaggagggctgacagacatcgtgaagtggatgaggattttcccaggggtcccaaaccctactctcctactggcagttttaaaacccagaagccttctaagttctttcaccgttcatcgcattaccatatgtcaagagaagacaagtctcccaaggagggcaagaggggcaagcagaagaaaaaggagaggtgcttggaagatgatgacaatgataacttatttctcattaagcagaggaaaaaaaagtcttaagctctcaggcagcctctgatgtggcttttcattgttcatttggcctttgtgtctataaccttctggcattgtg

SEQ ID NO: 26065 - DNA, 649 bp, Macaca Mulatta
ctaggccctggtgaaaccacaggtatgcaattatgatgggggctgggactctggtgtagaccatggaccaaaagaacttctgagtctgaagggtgggcctcgggtgccctctcacacctcctgttggatgctgagggagaagcaataaacctcagccctctggcctccacttccctctcaatttgggctgcaaatatgaagcccgaattgtatgaaattagctttccgattcttatttattaatagattaagttctgaggcagctctgcaggactgtgtgtgaatgtgtgtgtatacttatatatgtgtgtgcatgtgccatggggcggggggtatcactatactgtcctcaaatataagccaagggttaatttcagcggacgcacacacaaccctgcctcccatagtccctcccctaatctggtttctgtgttgagcctgggatggaggagccctaggccagccagggataagagacccacagtctcgggagatctgagggcatctgacaaggctcatctgcttccctccttaagaagcacaggcctcctctggagtgagaggctccacccactacagcacaggtgggaacagcacagctgccctcccatacccccgacctgtcccctcacaggcaggggagcagggg

SEQ ID NO: 26066 - DNA, 85 bp, Macaca Mulatta
agaaagaacaagagccagagcctgtaaaaccatggaaagaagttcctaacagacaaataaaaggctgcttaaaggtaaaatcaag

SEQ ID NO: 26067 - DNA, 5030 bp, Macaca Mulatta
  misc_feature (1)...(5030): n = A,T,C or G
caggacatgttctctggatgtcagctgagttattaaagtaactctgcatgtcagcagacagaccttggtagaaccccgaggctcccagagacacccatctctccccattttnnnnnnnnnnnnncttcaccgaacattcaaaactgtttctccaaagcgttttgcaaaaactcagactgttttccaaagcagaggcactggagtccccagcagaagcgatgggcagtgtgcgaaccaaccgctacagcattgtctcttcagaagaagacggtatgaagttggccaccatggcagttgcaaatggctttgggaacgggaagagtaaagtccacacccgacaacagtgcaggagccgctttgtgaagaaagatggtcactgtaacgttcagttcatcaatgtgggtgagaaggggcaacggtacctcgcagacatcttcaccacgtgtgtggacattcgctggcggtggatgctggttatcttctgcctggcgttagtcctgtcatggctgtttttnnnnnnnnnnnnnnnnnnnnnnnnnnnnnnnnnnnnnnnnnnnnnnnnnnnnnnnnnnnnnnnnnnnnnnnnnnnnnnnnnnnnnnnnnnnnnctgccttcctcttctcattgagacccagacaaccataggctatggtttcaggtgtgtcacggatgaatgcccaattgctgttttcatggtggtgttccagtcaatcgtgggctgcatcattgatgctttcatcattggtgcagtcatggccaagatggcaaagccaaagaagagaaacgagactctcgtcttcagtcacaatgctgtgattgccatgagagatggcaagctgtgtttgatgtggcgagtgggcaatcttcggaaaagccacttggtggaagctcatgtccgagcacagctcctcaaatccagaatcacttctgaaggggagtatatccctctggatcaaatagacatcaatgttgggtttgacagtggaatcgatcgtatatttctggtgtccccaatcactatagtccatgaaatagacgaagacagtcctttatatgatttgagtaaacaggacattgacaatgcagactttgaaatcgtggtcatactggaaggcatggtggaagccactgccatgacgacacagtgccgtagctcttatctagcaaatgaaatcctgtggggccaccgctatgagcctgtgctctttgaagagaagcactactacaaagtggactattccaggttccacaaaacttacgaagtccccaacactcccctttgcagtgcaagagacttagcagaaaagaaatacatcctctcaaatgcgaattcattttgctatgaaaatgaagttgccctcacaagcaaagaggaagatgacagtgaaaacggagttccagaaagcactagtacggacacgccccctgacatagaccttcacaaccaggcaagtgtacctctagagcccaggcccttacggcgagagtcggagatatgactgactgattcctcctctggaatagttactttacaacacggtctgttggtcagaggcccaaaacagttatacagatgacggnnnnnnnnnnnnnnnnnnnnnnnnnnnnnnnnnnnnnnnnnnnnnnnnnnnnnnnnnnnnnnnnnnnnnnnnnnnnnnnnnnnnnnnnnnnnnnnnnnnnnnnnnnnnnnnnnnnnnnnnnnnnnnnnnnnnnnnnnnnnnnnnnnnnnnnnnnnnnnnnnnnnnnnnnnnnnnnnnnnnnnnnnnnnnnnnnnnnnnnnnnnnnnnnnnnnnnnnnnnnnnnnnnnnnnnnnnnnnnnnnnnnnnnnnnnnnnnnnnnnnnnnnnnnnnnnnnnnnnnnnnnnnnnnnnnnnnnnnnnnnnnnnnnnnnnnnnnnnnnnnnnnnnnnnnnnnnnnnnnnnnnnnnnnnnnnnnnnnnnnnnnnnnnnnnnnnnnnnnnnnnnnnnnnnnnnnnnnnnnnnnnnnnnnnnnnnnnnnnnnnnnnnnnnnnnnnnnnnnnnnnnnnnnnnnnnnnnnnnnnnnnnnnnnnnnnnnnnnnnnnnnnnnnnnnnnnnnnnnnnnnnnnnnnnnnnnnnnnnnnnnnnnnnnnnnnnnnnnnnnnnnnnnnnnnnnnnnnnnnnnnnnnnnnnnnnnnnnnnnnnnnnnnnnnnnnnnnnnnnnnnnnnnnnnnnnnnnnnnnnnnnnnnnnnnnnnnnnnnnnnnnnnnnnnnnnnnnnnnnnnnnnnnnnnnnnnnnnnnnnnnnnnnnnnnnnnnnnnnnnnnnnnnnnnnnnnnnnnnnnnnnnnnnnnnnnnnnnnnnnnnnnnnnnnnnnnnnnnnnnnnnnnnnnnnnnnnnnnnnnnnnnnnnnnnnnnnnnnnnnnnnnnnnnnnnnnnnnnnnnnnnnnnnnnnnnnnnnnnnnnnnnnnnnnnnnnnnnnnnnnnnnnnnnnnnnnnnnnnnnnnnnnnnnnnnnnnnnnnnnnnnnnnnnnnnnnnnnnnnnnnnnnnnnnnnnnnnnnnnnnnnnnnnnnnnnnnnnnnnnnnnnnnnnnnnnnnnnnnnnnnnnnnnnnnnnnnnnnnnnnnnnnnnnnnnnnnnnnnnnnnnnnnnnnnnnnnnnnnnnnnnnnnnnnnnnnnnnnnnnnnnnnnnnnnnnnnnnnnnnnnnnnnnnnnnnnnnnnnnnnnnnnnnnnnnnnnnnnnnnnnnnnnnnnnnnnnnnnnnnnnnnnnnnnnnnnnnnnnnnnnnnnnnnnnnnnnnnnnnnnnnnnnnnnnnnnnnnnnnnnnnnnnnnnnnnnnnnnnnnnnnnnnnnnnnnnnnnnnnnnnnnnnnnnnnnnnnnnnnnnnnnnnnnnnnnnnnnnnnnnnnnnnnnnnnnnnnnnnnnnnnnnnnnnnnnnnnnnnnnnnnnnnnnnnnnnnnnnnnnnnnnnnnnnnnnnnnnnnnnnnnnnnnnnnnnnnnnnnnnnnnnnnnnnnnnnnnnnnnnnnnnnnnnnnnnnnnnnnnnnnnnnnnnnnnnnnnnnnnnnnnnnnnnnnnnnnnnnnnnnnnnnnnnnnnnnnnnnnnnnnnnnnnnnnnnnnnnnnnnnnnnnnnnnnnnnnnnnnnnnnnnnnnnnnnnnnnnnnnnnnnnnnnnnnnnnnnnnnnnnnnnnnnnnnnnnnnnnnnnnnnnnnnnnnnnnnnnnnnnnnnnnnnnnnnnnnnnnnnnnnnnnnnnnnnnnnnnnnnnnnnnnnnnnnnnnnnnnnnnnnnnnnnnnnnnnnnnnnnnnnnnnnnnnnnnnnnnnnnnnnnnnnnnnnnnnnnnnnnnnnnnnnnnnnnnnnnnnnnnnnnnnnnnnnnnnnnnnnnnnnnnnnnnnnnnnnnnnnnnnnnnnnnnnnnnnnnnnnnnnnnnnnnnnnnnnnnnnnnnnnnnnnnnnnnnnnnnnnnnnnnnnnnnnnnnnnnnnnnnnnnnnnnnnnnnnnnnnnnnnnnnnnnnnnnnnnnnnnnnnnnnnnnnnnnnnnnnnnnnnnnnnnnnnnnnnnnnnnnnnnnnnnnnnnnnnnnnnnnnnnnnnnnnnnnnnnnnnnnnnnnnnnnnnnnnnnnnnnnnnnnnnnnnnnnnnnnnnnnnnnnnnnnnnnnnnnnnnnnnnnnnnnnnnnnnnnnnnnnnnnnnnnnnnnnnnnnnnnnnnnnnnnnnnnnnnnnnnnnnnnnnnnnnnnnnnnnnnnnnnnnnnnnnnnnnnnnnnnnnnnnnnnnnnnnnnnnnnnnnnnnnnnnnnnnnnnnnnnnnnnnnnnnnnnnnnnnnnnnnnnnnnnnnnnnnnnnnnnnnnnnnnnnnnnnnnnnnnnnnnnnnnnnnnnnnnnnnnnnnnnnnnnnnnnnnnnnnnnnnnnnnnnnnnnnnnnnnnnnnnnnnnnnnnnnnnnnnnnnnnnnnnnnnnnnnnnnnnnnnnnnnnnnnnnnnnnnnnnnnnnnnnnnnnnnnnnnnnnnnnnnnnnnnnnnnnnnnnnnnnnnnnnnnnnnnnnnnnnnnnnnnnnnnnnnnnnnnnnnnnnnnnnnnnnnnnnnnnnnnnnnnnnnnnnnnnnnnnnnnnnnnnnnnnnnnnnnnnnnnnnnnnnnnnnnnnnnnnnnnnnnnnnnnnnnnnnnnnnnnnnnnnnnnnnnnnnnnnnnnnnnnnnnnnnnnnnnnnnnnnnnnnnnnnnnnnnnnnnnnnnnnnnnnnnnnnnnnnnnnnnnnnnnnnnnnnnnnnnnnnnnnnnnnnnnnnnnnnnnnnnnnnnnnnnnnnnnnnnnnnnnnnnnnnnnnntcaagagccaagatacacggtaatgcacgacattcattgctgcattttaccttcaaaatatttgtccttcttgactgggtctccttaattagtgtacacatgtcattagaatgcagatggaggggactcaccgtgaatatctggggtcaattcccagatgtgtgttgcttttctattgcaagcagattccctgttgaatttacttaggatttattcccttttaaagaatttttgcccatatctggaagggcactatatttttggggggagccatagattcctggttatcctatttttaaataaaatgtagacaaagtgaattctattttgattattgagaaaggagtagttttctatccctctaagagtatacttgaatcagacattttaaggatgtcactatagcactgttgtcattttcaaattcctagaaaagtttgttttactttgtttttattctgttaatgcattctttcttctctttacttcctttcttcccaatacactcctaccccaagtcttgatgtttatttgatgagctctgtcccgtaaatcgtatttcccttacaattaataaatgtcacttcatattttataataaaccactcagtaaaagcaaaagcttgtcctgagaagtagagtgagttctttttcactctgtgtctaataatgttcaggtgnnnnnnnnnnnntgtggcatagttacctgcccatccctaaccctcagcaaagtagaatctcttttctagtaattttg

SEQ ID NO: 26068 - DNA, 729 bp, Macaca Mulatta
cttttcataactggtacttaagaagcccagttagtcttactgagctaatgcttcactcctttatgtttaaccatgtgtctacagagaataagtttgttttggaaagttgagctatagctacagctctagctatccggcagacttttcattatgacttacatggcaggagctctaattatgctttaaaaatctgttgtggagatagctctaaaggctccctgcctggtgtggggatggggtctccctctttgtgagggttggagcatggcacagcatggattaacacgggagaggaacaaaggtgtgctctgaacgtcttcatatttcaccttcaccctcacctgtgttctgttccctatctcccaataaaagggctcccattataaatgccatgtacttctcttgggaaaatagacccccttgcctagagtaagttgttaactgagggctttaaacctggaggctctttctgaaagtttgttcacgaataccccaatcatcagggtctaaataattttcagaagattagaattgggtagatatactgttggagatagccatggtaaatttaactgaggaattaaatccttgttaattttggtgtaaagatttgtatcctggcctgtttattcaggtgggagatgttctgtataattttgaggtataagcttgaactcctaggacaagagttacaagttctttttagctcattcacaatcacttgtgtgt

SEQ ID NO: 26069 - DNA, 254 bp, Macaca Mulatta
cctttatagggtcaaaaccccataatccaaaggttctcaataaaaatgacaatatttatagtaaggtaacagtttaaattattgccaagcattaatattttagagtttttcaggccaggctatcatttagttagaaagtgagtttattattaagggaaatcctagttcagatgttttttgatagagaatggggaacaaggagtgtggcacaacatgagtttactcaatgccagtcaatgatggagaagatactt

SEQ ID NO: 26070 - DNA, 187 bp, Macaca Mulatta
ggtgacaggagtggtgagtgacagccagggcaaggcccactatgtgctgtccggctcgtgggatgaacaaatggagtgctccaaggttgtgcatagcagtcccagcagccccagctccgacgggaagcagaagacagtgtaccagaccctatcagccaagctgctgtggaagaagtacccgctgccg

SEQ ID NO: 26071 - DNA, 232 bp, Macaca Mulatta
tgactttgcagtatgaattgtgcttgtgaaaaagaactttaaatatttacaagggaccatgggtaattaatatatattcaatttttactatgtgtcaccgtcaataaaatgtaaaatgtaatgtaccaactagtgtgctttgtttatgctgaaaagaataatgctctattagtatggtatttggtgtcatactgtcaagcatttgtaaatcatctgagactaagttaagctg

SEQ ID NO: 26072 - DNA, 762 bp, Macaca Mulatta
  misc_feature (1)...(762): n = A,T,C or G
gccagtgaattacatggttnnnnnnnnnnnnnnnnnnnngnnnggccgacaagngnnnnnnnnnnnnnnnnnnnnnnngggtaccaaatgtctttatttgaaggaatggtacaaatcaaagaacttaagtggatgttttggtacaacttatagaaaaggtaaaggaaaccccaacatgcatgcactgccttggtgaccagggaagtcaccccatggctatagggaaattagcctgaggcttagctttcattatcactgtctcccagggtgtgcttgtcaaagagatactctgccaagccagattcgggtgctcccatcttgcgcaagttggtcacgtggtcacccaattctttgatggctttcacctgctcattcaggtaatgtgtctcaatgaagtcacacaaatgggggtcatttttgtcagtggccagtttgtgcagttccagtagtgactgattgacacatttttttccaaatgtaaagcacactcccattgcattcagcccgctctcccagtcgtcatagtctggtttcttaatatcctgaaggaagattcggccacctcgttggttctgcagcttcatcagtttctcggcatgttccctttcctcatgagattggtgaagaaagtatttggcaaagttcttcaaagccacaccatcgaggtggacgcggtcgtcatggcggaggctaaggacaggcggcggcggcgctggctgcgcggcgctggagcggcggcggggcccttggggcagtccgagg

SEQ ID NO: 26073 - DNA, 939 bp, Macaca Mulatta
  misc_feature (1)...(939): n = A,T,C or G
natttttatgtaaactcatatccacattataatatacatataggtttgttaatcgcgagactgtatgatggttaataaagttctacatcagaacagaattaaatgattatctttttttcatttgtagtatcgtgagctgtcttcgctcacattaattgtnctcctgtgggaaggtttgtattaataatttacacggaacttataagatagtgtatatactccaggcccttgagagtctattccagaaaaaggaggattggggatttgtaaagggctggtgaggcccacccaacagtctgagggcaaaatttttataaatgttttaaattttccagatccgggttctatgggagaaaccagatttgttgttttgggagaaatatgtaataagtttgtttaagcgggggtggaattttttgaagactttaggtgacactccttcgtcccaaggtaggtgtacaaatttatttaatgtgtgatatttttatccctacaccaccccccaccctttcccccaagtccccaaagtaccagtgtatcattcttatgccttggtttcctcatagcttagcatccacatataagtgagaacatatgatgtttggttttccattcctgggtaacttcacttagagtaatagtctccaattccatccaggttgctgtggatgccattctttcttttttacacctagccaactcttaatcgttcttcaaaactcacctctaagaagctaaggtcagtagttctcaaaatatagtccaaagactcttggtcagggggtccccaagaccctttcagagggtctgtaaggtcctcttgtccagctacacatctgtgcgagacagactttcttcatagacttcaaccaaaacaacatattgcaacagactgcctgcagcagcagagaggtgaatccagctgcctttcataaagcc

SEQ ID NO: 26074 - DNA, 122 bp, Macaca Mulatta
gtctgcgctctccgcgttcttccagcgctgtctttttagtaccacgtgctcaggcaagtgatggcggcgctggttgtgtcccgggcagcggagcagggcggccgaaacggccctggcagagg

SEQ ID NO: 26075 - DNA, 3549 bp, Macaca Mulatta
  misc_feature (1)...(3549): n = A,T,C or G
tggtggggaccaaggcctgggggttctcctttctggtcctggaagtcacatctgtggtggggannnnnnnnnnnnnnnnnnnnnnnnnnnnnnnnnnnnnnnnnnnnnnnnnnnnnnnnnnnnnnnnnnnnnnnnnnnnnnnnnnnnnnnnnnnnnnnnnnnnnnnnnnnnnnnnnnnnnnnnnnnnnnnnnnnnnnnnnnnnnnnnnnnnnnnnnnnnnnnnnnnnnnnnnnnnnnnnnnnnnnnnnnnnnnnnnnnnnnnnnnnnnnnnnnnnnnnnnnnnnnnnnnnnnnnnnnnnnnnnnnnnnnnnnnnnnnnnnnnnnnnnnnnnnnnnnnnnnnnnnnnnnnnnnnnnnnnnnnnnnnnnnnnnnnnnnnnnnnnnnnnnnnnnnnnnnnnnnnnnnnnnnnnnnnnnnnnnncagggtccctgcgccgagacacagagcacatctggagcctgtggtctccctggagcaagtgctcagctgcctgtggtcagactggggtccagactcgcactcgcacctgcttggcagagacggtgtcgctgtgcagcgaggccactgaagagggtcagcactgcatgggccaggactgtacannnnnnnnnnnnnnnnnnnnnnnnnnnnnnnnnnnnnnnnnnnnnnnnnnnnnnnnnnnnnnnnnnnnnnnnnnnnnnnnnnnnnnnnnnnnnnnnnnnnnnnnnnnnnnnnnnnnnnnnnnnnnnnnnnnnnnnnnnnnnnnnnnnnnnnnnnnnnnnnnnnnnnnnnnnnnnnnnnnnnnnnnnnnnnnnnnnnnnnnnnnnnnnnnnnnnnnnnnnnnnnnnnnnnnnnnnnnnnnnnnnnnnnnnnnnnnnnnnnnnnnnnnnnnnnnnnnnnnnnnnnnnnnnnnnnnnnnnnnnnnnnnnnnnnnnnnnnnnnnnnnnnnnnnnnnnnnnnnnnnnnnnnnnnnnnnnnnnnnnnnnnnnnnnnnnnnnnnnnnnnnnnnnnnnnnnnnnnnnnnnnnnnnnnnnnnnnnnnnnnnnnnnnnnnnnnnnnnnnnnnnnnnnnnnnnnnnnnnnnnnnnnnnnnnnnnnnnnnnnnnnnnnnnnnnnnnnnnnnnnnnnnnnnnnnnnnnnnnnnnnnnnnnnnnnnnnnnnnnnnnnnnnnnnnnnnnnnnnnnnnnnnnnnnnnnnnnnnnnnnnnnnnnnnnnnnnnnnnnnnnnnnnnnnnnnnnnnnnnnnnnnnnnnnnnnnnnnnnnnnnnnnnnnnnnnnnnnnnnnnnnnnnnnnnnnnnnnnnnnnnnnnnnnnnnnnnnnnnnnnnnnnnnnnnnnnnnnnnnnnnnnnnnnnnnnnnnnnnnnnnnnnnnnnnnnnnnnnnnnnnnnnnnnnnnnnnnnnnnnnnnnnnnnnnnnnnnnnnnnnnnnnnnnnnnnnnnnnnnnnnnnnnnnnnnnnnnnnnnnnnnnnnnnnnnnnnnnnnnnnnnnnnnnnnnnnnnnnnnnnnnnnnnnnnnnnnnnnnnnnnnnnnnnnnnnnnnnnnnnnnnnnnnnnnnnnnnnnnnnnnnnnnnnnnnnnnnnnnnnnnnnnnnnnnnnnnnnnnnnnnnnnnnnnnnnnnnnnnnnnnnnnnnnnnnnnnnnnnnnnnnnnnnnnnnnnnnnnnnnnnnnnnnnnnnnnnnnnnnnnnnnnnnnnnnnnnnnnnnnnnnnnnnnnnnnnnnnnnnnnnnnnnnnnnnnnnnnnnnnnnnnnnnnnnnnnnnnnnnnnnnnnnnnnnnnnnnnnnnnnnnnnnnnnnnnnnnnnnnnnnnnnnnnnnnnnnnnnnnnnnnnnnnnnnnnnnnnnnnnnnnnnnnnnnnnnnnnnnnnnnnnnnnnnnnnntgaaggccagtgtgaccttcctggatccccggaatatttccacagccacagctgcccagagtgacctgaacttcatcaatgacgaaggagacactttcccccttcggacatatggcatgttctctgtggacttcagagatgaggtcacctcagagccacttaatgctggcaaagtgaaggtccacctggactcgacccaggtcaagatgccagagcacatatccacagtgaaactctggtcactcaatccagacacagggctgtgggaggaggaaagtgatttcaaatttgaaaatcaaaggaggaacaaaagggaagacagaaccttcctggtgggcaacatggagatccgtgagagaaggctctttaacctggatgttcctgaaagcaggcggtgttttgttaaggtgagggcctaccggagtgagaggttcttgcctagtgagcagatccagggggttgtgatctccgtgattaatctggagcctagaactggcttctcgtccaaccctagggcctggggccgctttgacagtgtcatcacaggccccaatggggcctgtgtgcctgccttctgtgatgaccagtcccctgatgcctattctgcctatgtcttggcaagcctggctggggaggaactgcaagcagtggagtcttttcctaaattcaacccaaatgcaattggcgtccctcagccctatctcaacaagctcaattaccgtcggacggaccatgaggatccacgggttaaaaagacagccttccagattagcatggccaagccaaggcccaactcagctgaggagagcaacgggcccatctatgcctttgagaacctccgggcatgtgaagaggcaccacccagtgcagcccacttccggttctaccagattgagggggatcgnnnnnnnnnnnnnnnnnnnnnnnnnnnnnnnnnnnnnnnnnnnnnnnnnnnnnnnnnnnnnnnnnnnnnnnnnnnnnnnnnnnnnnnnnnnnnnnnnnnnnnnnnnnnnnnnnnnnnnnnnnnnnnnnnnnnnnnnnnnnnnnnnnnnnnnnnnnnnnnnnnnnnnnnnnnnnnnnnnnnnnnnnnnnnnnnnnnnnnnnnnnnnnnnnnnnnnnnnnnnnnnnnnnnnnnnnnnnnnnnnnnnnnnnnnnnnnnnnnnnnnnnnnnnnnnnnnnnnnnnnnnnnnnnnnnnnnnnnnnnnnnnnnnnnnnnnnnnnnnnnnnnnnnnnnnnnnnnnnnnnnnnnnnnnnnnnnnnnnnnnnnnnnnnnnnnnnnnnnnnnnnnnnnnnnnnnnnnnnnnnnnnnnnnnnnnnnnnnnnnnnnnnnnnnnnnnnnnnnnnnnnnnnnnnnnnnnnnnnnnnnnnnnnnnnnnnnnnnnnnnnnnnnnnnnnnnnnnnnnnnnnnnnnnnnnnnnnnnnnnnnnnnnnnnnnnnnnnnnnnnnnnnnnnnnnnnnnnnnnnnnnnnnnnnnnnnnnnnnnnnnnnnnnnnnnnnnnnnnnnnnnnnnnnnnnnnnnnnnnnnnnnnnnnnnnnnnnnnnnnnnnnnnnnnnnnnnnnnnnnnnnnnnnnnnnnnnccaaggatcagtgcccttaaggaggcagcagcgatcgagcaggagtggccagcgccagcggggagcggtggcctctctgagatttcctagagttgctcaacagcccctgatcaact

SEQ ID NO: 26076 - DNA, 100 bp, Macaca Mulatta
accccagctccttaacacaaatcacagctccgaggaaactcgtccggcacgcattaatcctgaccgactttgccacatggagccagcaaaccatttctgg

SEQ ID NO: 26077 - DNA, 615 bp, Macaca Mulatta
  misc_feature (1)...(615): n = A,T,C or G
gggatgcctgttgcaaaatttaccaaatttgttgattacctcttttattaaagacatgttggggagagggtaataagtatattgtggcaatctttgcaacttacagggaataggacaggtcattagggtgtatttcccaggtttccagttgagaacctaaaccaagagaagtgagacaaaccatctaatgtctgtatcctcctattaacaggctgtgtgatgttgagtttctcacttactctctctgaggtccagggtccttatatgtaaaatgaagagattcgtctagagcagtggttcttaaagtgtggtcgggggggcctcaagagcctttcaagggtattctaggtcaaagctgtttttataacacttaccatttcatcatttatagnnnnnnnnnnnnnnnnnnnngagaaggagtcttgctctgttgcagtggcacgatctcagctcattgcagcctccgcctcctgggttcaagcaattctcctacctcagctnnnnnnnnnnnnnnnnnnnnnnnnnnccactaccacannnnnnnnnnnnnnnnnnnnnnnnnggagacgatgcttcaccatgttggccnagctggtctggaactctggagctcaa

SEQ ID NO: 26078 - DNA, 397 bp, Macaca Mulatta
acgtgctttattcacaaatttataagggtttctagggtcagagcagagcttctgagaaaggcacccgctgtttattcttatatttctttcatatagaagcttgtgttgtacttcgggattttcagtgcctgggtgaacaagagttccaacagcaggcaagtgttgtaatgatagtacagcgggaaaaccatttgtattttgaacacttactgcactgataggatgttttgtggttgagctgattttagtactgtagatatgtcagctgtttttccagagtgattgtggatttcccaagaggtgtgaaattttgtgatgctctttttccttagcgttgtaatgtatgtgttacaagaaaggttaacataacttgaactaattttaacatgttccttac

SEQ ID NO: 26079 - DNA, 738 bp, Macaca Mulatta
  misc_feature (1)...(738): n = A,T,C or G
gggctttctcgactccatcttcgcggtagcggcagctgggaccgcggttcagtcgtcaacatgcagctttttgtccgcgcccaggagctacacaccctcgaggtgaccggccaggaaacggtcgcccaaatcaaggctcatgtagcttcactggagggcattgccccggaagatcaagtcgtgctcctggcaggcacccccttggaggatgaggcaactctgggccagtgcggggtggaggccctgactaccctggaagtagcaggccgcatgcttggaggtaaagtccatggttccctggcccgtgctgggaaagtgagaggtcagactcctaaggtggccaaacaggagaagaaaaagaataagaccggtcgggctaagctctggatgcactacaaccggcgctttgtcaacgttgtgcccacctttggcaagaagaagggccccaattgcaattcttaaatcctttgaaattgcagctttatcaaataaaaaaaaccactaannnnnnnnnnnnnnnnnnnnnnnnnnnnnnnnnnnnnnnnnnnnnnnnnntattgggccgcctatggccccattaaaaaaaattttccgggaccaatactatatgggaagacagggccccatatgggtaatattaaaatggggctcaaagctgtattatttaagaggaaattatttgttactgcgcccaagcagccattaggaatcttaaatcagaggaaaaaaacccccggg

SEQ ID NO: 26080 - DNA, 106 bp, Macaca Mulatta
aggaaccaattttaaacatccatgacctaactcagatccactctgacatgaatctcccagtccctgaccccattcttctcaccaatagccatgatggactggatgg

SEQ ID NO: 26081 - DNA, 335 bp, Macaca Mulatta
  misc_feature (1)...(335): n = A,T,C or G
nnnnnnnnnnnnnnnnnnnnnnnngnnnnnnnnnnnnnnnnnaagaggagatcaaactgttggaggagaagctgaaggaggctgagacccgagcagagtttgctgagaggtctgtggcaaagttggagaaaaccattgatgacctagaagagaccttggccagtgccaaggaggagaacgtcgagattcaccagaccttggaccagaccctgctggaactcaacaacctgtgagggcccgccccacccacagccaggctgtggctgctgccccaacccaataaaactgatgttaccagcnnnnnnnnnnnnnnnnnnnnnnnnnnnnnnnnnnnn

SEQ ID NO: 26082 - DNA, 3072 bp, Macaca Mulatta
  misc_feature (1)...(3072): n = A,T,C or G
atgggatcacggaacagcagcagtgcaggatccgggtccggagacccctccgagggcttgtcccgaagaggggctggcctgcgtcggagtgaggaagaggaagaagaggatgaagatgtggatctggcccaggtactggcctatctcctccgcannnnnnnnnnnnnnnnnnnnnnnnnnnnnnnnnnnnnnnnnnnnnnnnnnnnnnnnnnnnnnnnnnnnnnnnnnnnnnnnnnnnnnnnnnnnnnnnnnnnnnnnnnnnnnnnnnnnnnnnnnnnnnnnnnnnnnnnnnnnnnnnnnnnnnnnnnnnnnnnnnnnnnnnnnnnnnnnnnnnnnnnnnnnnnnnnnnnnnnnnnnnnnnnnnnnnnnnnnnnnnnnnnnnnnnnnnnnnnnnnnnnnnnnnnnnnnnnnnnnnnnnnnnnnnnnnnnnnnnnnnnnnnnnnnnnnnnnnnnnnnnnnnnnnnnnnnnnnnnnnnnnnnnnnnnnnnnnnnnnnnnnnnnnnnnnnnnnnnnnnnnnnnnnnnnnnnnnnnnnnnnnnnnnnnnnnnnnnnnnnnnnnnnnnnnnnnnnnnnnnnnnnnnnnnnnnnnnnnnnnnnnnnnnnnnnnnnnnnnnnnnnnnnnnnnnnnnnnnnnnnnnnnnnnnnnnnnnnnnnnnnnnnnnnnnnnnnnnnnnnnnnnnnnnnnnnnnnnnnnnnnnnnnnnnnnnnnnnnnnnnnnnnnnntcatatctgcttatctatggtgagggagatacacacactgccctggatctcaggntcaggccagatgagcgtcgctttgctgtcttctccattgctgtgtcctcagatggacgagaagtactaggagggnnnnnnnnnnnnnnnnnnnnnnnnnnnnnnnnnnnnnnnnnnnnnnnnnnnnnnnnnnnnnnnnnnnnnnnnnnnnnnnnnnnnnnnnnnnnnnnnnnnnnnnnnnnnnnnnnnnnnnnnnnnnnnnnnnnnnnnnnnnnnnnnnnnnnnnnnnnnnnnnnnnnnnnnnnnnnnnnnnnnnnnnnnnnnnnnnnnnnnnnnnnnnnnnnnnnnnnnnnnnnnnnnnnnnnnnnnnnnnnnnnnnnnnnnnnnnnnnnnnnnnnnnnnnnnnnnnnnnnnnnnnnnnnnnnnnnnnnnnnnnnnnnnnnnnnnnnnnnnnnnnnnnnnnnnnnnnnnnnnnnnnnnnnnnnnnnnnnnnnnnnnnnnnnnnnnnnnnnnnnnnnnnnnnnnnnnnnagcctggcggaagctgaagctcccaggggacagctccttgatgacctaccggggccacggagtgctgcacacccttatccgctgccggttctcccccattcatagcaccggccagcagttcatctatagtggctgctccaccggcaaagtggttnnnnnnnnnnnnnnnnnnnnnnnnnnnnnnnnnnnnnnnnnnnnnnnnnnnnnnnnnnnnnnnnnnnnnnnnnnnnnnnnnnnnnnnnnnnnnnnnnnnnnnnnnnnnnnnnnnnnnnnnnnnnnnnnnnnnnnnnnnnnnnnnnnnnnnnnnnnnnnnnnnnnnnnnnnnnnnnnnnnnnnnnnnnnnnnnnnnnnnnnnnnnnnnnnnnnnnnnnnnnnnnnnnnnnnnnnnnnnnnnnnnnnnnnnnnnnnnnnnnnnnnnnnnnnnnnnnnnnnnnnnnnnnnnnnnnnnnnnnnnnnnnnnnnnnnnnnnnnnnnnnnnnnnnnnnnnnnnnnnnnnnnnnnnnnnnnnnnnnnnnnnnnnnnnnnnnnnnnnnnnnnnnnccctggaagatcctccccatggggcagagtggtcttcttacatgctcacacccagtcagcctgggtccctatctctggccagagtttggcaggactgccattatctggggtgtggcctctgccagcaagagaagtgtcctgggtgtttttaatcatgtttgagtgttaggggttggattctagagtagatgtctgaggccacatctgaacagacctgtcagccaggcctgttgcccaggtcttcacgttgaggattcgactggccaaacacagtacaggtgtcctggcctttcttcctgaggtctctaggggaggggcatgggtaagggtgtttcctcagcaccctcctggggtggggattatgtctgctctcatgtctgggtctttggggtaggacgggctgtggtatgagaggtaggagtctccacagggctctgtgtggcccctcatagggcaggtcctgccctctgagaaggtcccttcatgctcgaggcacacagctttaaggaagtaggttgaagtaggactcctttgtcctctcactggctttggctccctcaataaactgcgtgggaacctggctcagtgtctgnnnnnnnnnnnnnnnnnnnnnnttcctatctgagatcttccatctcacttcgggaaaacacagtttcaacagtcttcagatgcgatcctgtgtaggagaaaatacccttctggtgccccatgaaaaagggaaataccaaaaccatttgttcactgagccttgcaacaggtgctccctcaccaatttcagaagcttccctgcaagtagataccgagagagcacactttccatcagagcctgataataccacatcacctctgctctgaagccgggcctggagctgtgcatctttggaagannnnnnnnnnnnnnnnnnnnnnnnnnnnnnnnnnnnnnnnnnnnnnnnnnnnnnnnnnnnnnnnnnnnnnnnnnnnnnnnnnnnnnnnnnnnnnnnnnnnnnnnnnnnnnnnnnnnnnnnnnnnnnnnnnnnnnnnnnnnnnnnnnnnnnnnnnnnnnnnnnnnnnnnnnnnnnnnnnnnnnnnnnnnnnnnnnnnnnnnnnnnnnnnnnnnnnnnnnnnnnnnnnnnnnnnnnnnnnnnnnnnnnnnnnnnnnnnnnnnnnnnnnnnnnnnnnnnnnnnnnnnnnnngtggctcatgcctataatcccagtgctttgggaagccaatgagggcagatcgcttgagcctagaagtttgagaccagccagggcaacatggagaaacctcttctcta

SEQ ID NO: 26083 - DNA, 2239 bp, Macaca Mulatta
  misc_feature (1)...(2239): n = A,T,C or G
agttccggtgtctcgccccgtcctcaccctcagggctcccagggcccaggttgcggtgggggacctgctggagcttcactgtgaggccctgagaggctctcccctgatcctgtaccagttttatcatnnnnnnnnnnnnnnnnnnnnnnnnnnnnnnnnnnnnnnnnnnnnnnnnnnnnnnnnnnnnnnnnnnnnnnnnnnnnnnnnnnnnnnnnnnnnnnnnnnnnnnnnnnnnnnnnnnnnnnnnnnnnnnnnnnnnnnnnnnnnnnnnnnnnnnnnnnnnnnnnnnnnnnnnnnnnnnnnnnnnnnnnnnnnnnnnnnnnnnnnnnnnnnnnnnnnnnnnnnnnnnnnnnnnnnnnnnnnnnnnnnnnnnnnnnnnnnnnnnnnnnnnnnnnnnnnnnnnnnnnnnnnnnnnnnnnnnnnnnnnnnnnnnnnnnnnnnnnnnnnnnnnnnnnnnnnnnnnnnnnnnnnnnnnnnnnnnnnnnnnnnnnnnnnnnnnnnnnnnnnnnnnnnnnnnnnnnnnnnnnnnnnnnnnnnnnnnnnnnnnnnnnnnnnnnnnnnnnnnnnnnnnnnnnnnnnnnnnnnnnnnnnnnnnnnnnnnnnnnnnnnnnnnnnnnnnnnnnnnnnnnnnnnnnnnnnnnnnnnnnnnnnnnnnnnnnnnnnnnnnnnnnnnnnnnnnnnnnnnnnnnnnnnnnnnnnnnnnnnnnnnnnnnnnnnnnnnnnnnnnnnnnnnnnnnnnnnnnnnnnnnnnnnnnnnnnnnnnnnnnnnnnnnnnnnnnnnnnnnnnnnnnnnnnnnnnnnnnnnnnnnnnnnnnnnnnnnnnnnnnnnnnnnnnnnnnnnnnnnnnnnnnnnnnnnnnnnnnnnnnnnnnnnnnnnnnnnnnnnnnnnnnnnnnnnnnnnnnnnnnnnnnnnnnnnnnnnnnnnnnnnnnnnnnnnnnnnnnnnnnnnnnnnnnnnnnnnnnnnnnnnnnnnnnnnnnnnnnnnnnnnnnnnnnnnnnnnnnnnnnnnnnnnnnnnnnnnnnnnnnnnnnnnnnnnnnnnnnnnnnnnnnnnnnnnnnnnnnnnnnnnnnnnnnnnnnnnnnnnnnnnnnnnnnnnnnnnnnnnnnnnnnnnnnnnnnnnnnnnnnnnnnnnnnnnnnntgtcatcagcctggtggggctactacagtgtgctgccaaatgggacagcacacagcctgtgcacacggcacatgtaatggatctccccacgccggccgcatttcacactcctacacatgtctcaaactgtaaggtcggcacttgacaccaaggtaaattatctcctgctcatgtgtcagtgtctacctgcccaataagtggctttcatatatcaagtcaccaggtacctcccatcctaacagaggtaacccagcaagtcaaggccaggaggaccaggggtgcagacagaacacatactggaacannnnnnnnnnnnnnnnnnnnnnnnnnnnnnnnnnnnnnnnnnnnnnnnnnnnngaagaaaactgtgggtaatcaaactggcgtaaaatccagtgtgctccctaggaaatccaggaagtagtctggcttctctgagtaagaaataatggaagagaaggagcttggatgaggaaactgttcagcaagaggaagggcttctcacactttcatgtgcttgtggatcacctgaggatcttgtgaaaatatacatactgatttggtcggtctgcatagagcctgagactgccattctaacatgctcccaggggatgctgatgctgctggtcctgggaccacagtgcatgcatgtgaggccctgtaggtctcagcagaggcccatggagaggcagtgtgtggctctggctgcccagggcctaactcagttcacacggatcatgctgctccctggccagcccttggccgcagcaccaccagctgctgttgctgagagagcttctccgtgacatgttggctttcatcagccaccctgggaagaggaaagtagctgccactatctttgtttccccacctcaggcctcacactttcccatgaaaagagtgaatgtagacaacccaagccctctccattcagaattgttctcccatctctgagcaatgggatgttctgttccacttttatgatgtccatcacatcttgtcttgatctttgctcccagtggattgtacagtgatcaattctaagccccatggccctgaaataaaatccttccaagggcattggaagctcactccacct

SEQ ID NO: 26084 - DNA, 425 bp, Macaca Mulatta
agccagtgtcctctcccggggagcacggtgccctcgcagggctgccctctctgggactctggggtggggctgggcaggggtagaattgtggaggcctcaccagcccctcttgccaggggactcccaggttccacacaggagcctgggccctgttctctcataccagtgacttttctgctccccaaaggttttcggtattctggagaaagccaaggaaaagtacagtgtggacgactactctgtgagccagatctcgctggaacacgtcttcctgagcttcgcccacctgcagccgcccactgcagaggaggggcgatgaggggtgtggctgcctcgccaccaggcagggatgggacgggcaagcagggtccggcttgcatcctctctctccaagtttatctcatcctttatttttaatcactttt

SEQ ID NO: 26085 - DNA, 311 bp, Macaca Mulatta
tgccctgctctacggcttctgtcttggggccatcaaggtaggggtggctttcgaggtgggggcatgctgcagtgcgtagagatggttggggcggggctgtgaactgggctcagcagtggcttctcacatgggggcagcccggactccatgcttacctcacctcccctgatcagcagcatggattctctccccagactccgtggccagagcagcacgtccctgtcctcttctcagtcttctgtggcctcctggtggcgctgtcctaccacctgagccggcagagcagcgaccccaccgtgctctggtgggtt

SEQ ID NO: 26086 - DNA, 3180 bp, Macaca Mulatta
  misc_feature (1)...(3180): n = A,T,C or G
cgccgcggagcccggaccctccctcggacgctctgctccggccatggcgtcgctgctgccactactctgtctctgtgtcgtcgccgcgcacctggcgggggcccgagnnnnnnnnnnnnnnnnnnnnnnnnnnnnnnnnnnnnnnnnnnnnnnnnnnnnnnnnnnnnnnnnnnnnnnnnnnnnnnnnnnnnnnnnnnnnnnnnnnnnnnnnnnnnnnnnnnnnnnnnnnnnnnnnnnnnnnnnnnnnnnnnnnnnnnnnnnnnnnnnnnnnnnnnnnnnnnnnnnnnnnnnnnnnnnnnnnnnnnnnnnnnnnnnnnnnnnnnnnnnnnnnnnnnnnnnnnnnnnnnnnnnnnnnnnnnnnnnnnnnnnnnnnnnnnnnnnnnnnnnnnnnnnnnnnnnnnnnnnnnnnnnnnnnnnnnnnnnnnnnnnnnnnnnnnnnnnnnnnnnnnnnnnnnnnnnnnnnnnnnnnnnnnnnnnnnnnnnnnnnnnnnnnnnnnnnnnnnntggggtccctgctcggggagctgtgggccaagccgtcgcttgcgccgccgccactgcccaagccccgctggggatgcgtgtcccgggcgtcctctggaggcgcagaggtgcgtgcggcctcgatgtcnnnnnnnnnnnnnnnnnnnnnnnnnnnnnnnnnnnnnnnnnnnnnnnnnnnnnnnnnnnnnnnnnnnnnnnnnnnnnnnnnnnnnnnnnnnnnnnnnnnngcgagaccagcctggcaccgtggccaccagtgatgctcacggaaccttccgagtgcttggtgtctgtgctgacagtcatgccaatatcagggcccagatggatggcttctctgcaggggaggcccaggcccaggctaacggatccatctctgtggttaccatcatccttgataagtnnnnnnnnnnnnnnnnnnnnnnnnnnnnnnnnnnnnnnnnnnnnnnnnnnnnnnnnnnnnnnnnnnnnnnnnnnnnnnnnnnnnnnnnnnnnnnnnnnnnnnnnnnnnnnnnnnnnnnnnnnnnnnnnnnnnnnnnnnnnnnnnnnnnnnnnnnnnnnnnnnnnnnnnnnnnnnnnnnnnnnnnnnnnnnnnnnnnnnnnnnnnnnnnnnnnnnnnnnnnnnnnnnnnnnnnnnnnnnnnnnnnnnnnnnnnnnnnnnnnnnnnnnnnnnnnnnnnnnnnnnnnnnnnnnnnnnnnnnnnnnnnnnnnnnnnnnnnnnnnnnnnnnnnnnnnnnnnnnnnnnnnnnnnnnnnnnnnnnnnnnnnnnnnnnnnnnnnnnnnnnncacccactgccccagcccggtaggctccggcccccgctgcggggacaccagctcccgctgctgctctgtgcgccgtctggagagaagggagatccactgccctggctatgtcctcccggtgaaggtggtggcagagtgtggctgccagaagtgtctgccccctcgggggctggtccggggccgtgttgtggctgctgactccggggagccgctgcgcttcgccaggattctgctgggccaggagcccatcggcttcactgcctaccagggagactttaccattgaggtgccaccctctacccagcggctggtggtgacttttgtggaccacagcggtgagttcatggacgctgtccgggtcttgccttttgaccctcgaggtgccggcgtataccacgaggtcaaggccatgcggaagaaagcaccggtcattttagatgccagccagagcaacacgatccccctgggcgagctggaagatgaggcgcccctgggcgagctggtcctgccttctggagccttccacagagccgacggcaaaccctactcagggcctgtggaggctagggtgacgttcgtggacccccgagacctcacctcggcagcatccgcccccagtgacctgcgcttcatggacagtgacggcgagctggctctgctgcgcacctacggcatgttctccgtggacctccgtgcgcccggctccgcggagcagctgcaggtggggccagtgaccgtgcgggtggctgccagccagatnnnnnnnnnnnnnnnnnnnnnnnnnnnnnnnnnnnnnnnnnnnnnnnnnnnnnnnnnnnnnnnnnnnnnnnnnnnnnnnnnnnnnnnnnnnnnnnnnnnnnnnnnnnnnnnnnnnnnnnnnnnnnnnnnnnnnnnnnnnnnnnnnnnnnnnnnnnnnnnnnnnnnnnnnnnnnnnnnnnnnnnnnnnnnnnnnnnnnnnnnnnnnnnnnnnnnnnnnnnnnnnnnnnnnnnnnnnnnnnnnnnnnnnnnnnnnnnnnnnnnnnnnnnnnnnnnnnnnnnnnnnnnnnnnnnnnnnnnnnnnnnnnnnnnnnnnnnnnnnnnnnnnnnnnnnnnnnnnnnnnnnnnnnnnnnnnnnnnnnnnnnnnnnnnnnnnnnnnnctgcgacgccgaccggcccgacgcttacacggccctggtcaccgccaccctgggcggcgaggagctggagccagcaccttccctgccccgcccactcccggccaccgtgggcgtcacccagccctacctggacaggctggggtaccgtcggacggaccacgacgatcccgctttcaagcgcaatggcttccgaatcaaccttgccaagcccaggccaggtgaccccaccgaggccaatgggcctgtgtacccgtggcgcagcctgcgggaatgccagggggccccggtgaccgccagccacttccgcttcgccagggtggaggcggacaagtatgagtacaacgtggtgcccttcagagagggcacgcctgcctcctggactggcgatctcctggcctggtggcccaacccgcaggagttccgggcctgcttcctcaaggtgaagatccagggtccccaggagtacatggtccgctcccacaactcggggggcagccacccacgcacccggggccagctctatgggcttcgggatgcccggagcgtgcgagaccccgagcgaccgggcacctcggcagcctgcgtggagttcaagtgcggtgggatgctgttcgaccagcggcaggtggacaggacgctggtgaccattatgccccagggcagctgccggcgcgtggcggtcaatgagctccttcgggattacctggcccggcaccccccgccggtgaccgcagaggacccagctgccttctc

SEQ ID NO: 26087 - DNA, 143 bp, Macaca Mulatta
  misc_feature (1)...(143): n = A,T,C or G
atagggctgaggaaggtaaaggactcaaggatataatgatctctgtaaatgcctctgtgccatttccaaataactgtcctcatgccctctcttccatccttctttccttgttaccttctctcttcttctnnntgtntnctttg

SEQ ID NO: 26088 - DNA, 143 bp, Macaca Mulatta
aggtaaaagatgagaaaaatattcaagaggtatttgacctgagtgactatgagaagtgtgaagagctccggaagtccaagagcaggagcaagaaaaatcatagcaagtttactcttgcccactccaaacagcccggtaacacg

SEQ ID NO: 26089 - DNA, 192 bp, Macaca Mulatta
gtgaactaaacgggagacaagtagcagctttggacagagtgtttgagagcacaggccgtgagcaaggggcagaagcgcttatgtttaccagatgcatagaactttccctacgtggcataaacaaagcagcaagttagggaaaaatggacacaggacacttaagaaacacagtttacagaagcaccaatccaa

SEQ ID NO: 26090 - DNA, 2625 bp, Macaca Mulatta
  misc_feature (1)...(2625): n = A,T,C or G
ggagaagttttatatcggttaggagtcggctttatgtgggaagagagaaaaagcttgctataatgctttctggactaattgaagtaaaatgtaaactacttgaaaaatttagccttgttcaaaaagagtatgaagactatgaagtagcgtcatctttagaggatgccagctttgagaatgcgacaatggaagaacaaagtttggaggcaacctgcgaaaatctgaacaggtccaattctgaacttgagcatgaaatactctgtctagagaaagagttaacagaagagaaatctaaacattctcaaaaaaatgaattgatggcagatttttcaaaacggatacagtctctagaagatgagtcaaaatccctcaaatcacaagtagctgaagccaaaataatcttcaagatatttcaaatgactgaagaacgactgaagatagcaatgaaagatgctttgaatgaaaattctcaacttcaggaaagccagaaacagcttttgcaagaagttgaagtatggaaagaacaagtgaggaaacttaataaacagaaaataacatttgaagactcacaaagtacatgcagaacaagttctaaatgatnnnnnnnnnnnnnnnnnnnnnnnnnnnnnnnnnnnnnnnnnnnnnnnnnnnnnnnnnnnnnnnnnnnnnnnnnnnnnnnnnnnnnnnnnnnnnnnnnnnnnnnnnnnnnnnnnnnnnnnnnnnnnnnnnnnnnnnnnnnnnnnnnnnnnnnnnnnnnnnnnnnnnnnnnnnnnnnnnnnnnnnnnnnnnnnnnnnnnnnnnnnnnnnnnnnnnnnnnnnnnnnnnnnnnnnnnnnnnnnnnnnnnnnnnnnnnnnnnnnnnnnnnnnnnnnnnnnnnnnnnnnnnnnnnnnnnnnnnnnnnnnnnnnnnnnnnnnnnnnnnnnnnnnnnnnnnnnnnnnnnnnnnnnnnnnnnnnnnnnnnnnnnnnnnnnnnnnnnnnnnnnnnnnnnnnnnnnnnnnnnnnnnnnnnnnnnnnnnnnnnnnnnnnnnnnnnnnnnnnnnnnnnnnnnnnnnnnnnnnnnnnnnnnnnnnnnnnnnnnnnnnnnnnnnnnnnnnnnnnnnnnnnnnnnnnnnnnnnnnnnnnnnnnnnnnnnnnnnnnnnnnnnnnnnnnnnnnnnnnnnnnnnnnnnnnnnnnnnnnnnnnnnnnnnnnnnnnnnnnnnnnnnnnnnnnnnnnnnnnnnnnnnnnnnnnnnnnnnnnnnnnnnnnnnnnnnnnnnnnnnnnnnnnnnnnnnnnnnnnnnnnnnnnnnnnnnnnnnnnnnnnnnnnnnnnnnnnnnnnnnnnnnnnnnnnnnnnnnnnnnnnnnnnnnnnnnnnnnnnnnnnnnnnnnnnnnnnnnnnnnnnnnnnnnnnnnnnnnnnnnnnnnnnnnnnnnnnnnnnnnnnnnnnnnnnnnnnnnnnnnnnnnnnnnnnnnnnnnnnnnnnnnnnnnnnnnnnnnnnnnnnnnnnnnnnnnnnnnnnnnnnnnnnnnnnnnnnnnnnnnnnnnnnnnnnnnnnnnnnnnnnnnnnnnnnnnnnnnnnnnnnnnnnnnnnnnnnnnnnnnnnnnnnnnnnnnnnnnnnnnnnnnnnnnnnnnnnnnnnnnnnnnnnnnnnnnnnnnnnnnnnnnnnnnnnnnnnnnnnnnnnnnnnnnnnnnnnnnnnnnnnnnnnnnnnnnnnnnnnnnnnnnnnnnnnnnnnnnnnnnnnnnnnnnnnnnnnnnnnnnnnnnnnnnnnnnnnnnntggataaaatggatgggtcaatgccttcagaaatggaatccagtagaaatgataccaaagatcatcttggtaatttaaatatgcctgattcatctctccctgctgaaaatgaagcaactggccctggctttgttcctccacctcttgctccaatcagaggtccattgtttccagtggatacaaggggcccgttcatgagaagaggacctcctttgccccgacctcctccaggaaccaggtttggagcttctcgagattattttccacgaagggatttcccaggtccgccacatgttccacttgcaatgagaaatgtctatccaccgaggggttttcctccttaccttcccctcaagacctggatttttccccgcacccccacattctgaaggtataaatgagttcccttctgggctgatatcgccttcaaatgagcctgctactgaacatccaaaaccgcagcaagacacctgacaatatttttgctctctgcaaaagtaattctgattgatctcattttcaatttaagtaactgctgttacttaagtgattacacttttgctcaaattgaaacaatggaattataattcttaggatagtattaagtaagtaaggatgatttaaatatgaatcttatgagtaaattatttccactgtattttattctagatagtataaccattttaatttgattaactaatccactattatagaaacgatagtgggagttttacgtatgtaatcttgcaggtggggaggctttaaattctgaaggctgtgtctttaagccaagaactgtatttactgtaggtgtagacaaatgtgaaagtaactttatgcttaattaaataaattttagttgattaa

SEQ ID NO: 26091 - DNA, 703 bp, Macaca Mulatta
ccggaacagccaacgagcggaaaatggcagacatttttcgctccatgatgccttatctgggtctggaaacccaaaccctcaaggatggcctggcccatgggggaaccagcctgctggggcagggggctacccaggggcctcctatcctggggcctaccccgggcaggcacccccaggggtttatcctggacaggcacctccaggcgcctaccctggagcacctggagcttattccggagcatctggagtctacccagggccacccagtggcgctggagcctacccatctcctggacagccaagtgctcctggagcctaccctgccactggcccctatggcgcccctgctgggccactgtctgtgccttataacctgcctttgcctggaggagtggtgcctcgcatgctgataacaattctgggcacggtgaagcctaatgcaaacagaattgctttagatttcaagagaaggaatgatgttgccttccactttaacccacgcttcaatgagaacaacaggagagtcattgtttgcaatacaaagctggataataactggggaagggaagaaagacagtcagttttcccatttgaaagtgggaaaccattcaaaatacaagtactggttgaatctgaccacttcaaggttgcggtgaatgatgctcacttgttgcagtacaatcatcgggttaaacagctcaat

SEQ ID NO: 26092 - DNA, 380 bp, Macaca Mulatta
ataactttccagattccatagccattagatcattccatcctacagcataagactcgttttcctcatgtgctgttttgtttgtgaaagaatatcaagtcaaaaatgagtgtcaacactactattgattccatgtataatgaaactagaactttgctagttcctgaaaaattttaacttatttgtatttcagttcagcagcatctttgtgtagactgtgatatttaagaattatctgggctgggcgagggtctctttttcagtgatcatctaggcagttattatttaatagtttaatagctcaaatacattccaatagacaaagtgcacacaacacaatatgtgtgtagagtagtagtaagtttcttttgagtagtcaaaga

SEQ ID NO: 26093 - DNA, 448 bp, Macaca Mulatta
aatgtcatgtttatgtcatagacgtagttttcgcagccttgaattaaactgccttaaaactccttttgtggtataagcaagattccatggaccctgtcctggtatccttttcctgtgtggttgccccgtgtcctctggcctagggttaagtgtgcaagatgactacttgtgagtattcagaatgttgttcctaatacatgcacttgttgtccgtcttctttaatcaaatcacgtcttatatacagcagtcagagatgagtacactagaatcatggattgctggaggtcttttaatctggtgttctcagaagggggtggatttaaatcctgaaataaatatttcatcacaagaacacaggcctgattctgccttggacatgtcaaaatctgggggtgatgggatggccctatgcatttagaagcaactctccacatacggccaatatag

SEQ ID NO: 26094 - DNA, 117 bp, Macaca Mulatta
cttgtttgttcatttctaagttcatttttgccttatgagatgtcttctttggtacacagggaaacagaacttcataattaaaaaggcaaattaatactttttaactttaatctcttt

SEQ ID NO: 26095 - DNA, 699 bp, Macaca Mulatta
acaaatagttatctttcaattacagaagagtttcttaacttatttttctaagtttttattgtttaatataaatttataatgcaggggaagtactactcttcaaatgttgagggaagcttccgtaacattgatgactggcttaattggcagtaattctcagctgtaattgcataagcattactcaagaggaaaatccaaaagtgtagcaggagaactcttttccttgaaaaaggaaaaatattgaactaaatgatagcacctaaacttacatttaaaaggcagacattccttctacatgtaatgacacttcttgtgttaaactaaaaatttacaagagaagaaagtgaaagcaaatggggtttcacaaatagctgtaaatatagtgaagcaatttgaaataattttcaagcaaaatattgtgaaagtattctaagctaagttttaaatattacctaacagacaagagtggtatataataagtagatcctgagaagtacctttgttacagctaccataaatatatatagagagaatgtactttaatttattttgtgaatgcttttgaaaatgtatatgttcctttgtaattgacactatatatttcttaataaaataattctcaaatttgtttcttacgaatcatctttcaaatctagttagtagacaatttgcacacatacttttctaaaggacattatt

SEQ ID NO: 26096 - DNA, 2088 bp, Macaca Mulatta
  misc_feature (1)...(2088): n = A,T,C or G
tgctggaaggagatctggtttcaaagatgctgcgagctgttctgcagtctcataagaatggagtagcattaccccggctccaaggagagtacagatccttgactggagactggatccccttcaaacagctaggtttccctacactagaagcctatctgagaagtgtgccagcagtggtcaggatatatactagtagatctggagagnnnnnnnnnnnnnnnnnnnnnnnnnnnnnnnnnnnnnnnnnnnnnnnnnnnnnnnnnnnnnnnnnnnnnnnnnnnnnnnnnnnnnnnnnnnnnnnnnnnnnnnnnnnnnnnnnnnnnnnnnnnnnnnnnnnnnnnnnnnnnnnnnnnnnnnnnnnnnnnnnnnnnnnnnnnnnnnnnnnnnnnnnnnnnnnnnnnnnnnnnnnnnnnnnnnnnnnnnnnnnnnnnnnnnnnnnnnnnnnnnnnnnnnnnnnnnnnnnnnnnnnnnnnnnnnnnnnnnnnnnnnnnnnnnnnnnnnnnnnnnnnnnnnnnnnnnnnnnnnnnnnnnnnnnnnnnnnnnnnnnnnnnnnnnnnnnnnnnnnnnnnnnnnnnnnnnnnnnnnnnnnnnnnnnnnnnnnnnnnnnnnnnnnnnnnnnnnnnnnnnnnnnnnnnnnnnnnnnnnnnnnnnnnnnnnnnnnnnnnnnnnnnnnnnnnnnnnnnnnnnnnnnnnnnnnnnnnnnnnnnnnnnnnnnnnnnnnnnnnnnnnnnnnnnnnnnnnnnnnnnnnnnnnnnnnnnnnnnnnnnnnnnnnnnnnnnnnnnnnnnnnnnnnnnnnnnnnncttaatcaaggaattttacaacagtttgaacatttgcctcatatttgcacggtnnnnnnnnnnnnnnnnnnnnnnnnnnnnnnnnnnnnnnnnnnnnnnnnnnnnnnnnnnnnnnnnnnnnnnnnnnnnnnnnnnnnnnnnnnnnnnnnnnnnnnnnnnnnnnnnnnnnnnnnnnnnnnnnnnnnnnnnnnnnnnnnnnnnnnnnnnnnnnnnnnnnnnnnnnnnnnnnnnnnnnnnnnnnnnnnnnnnnnnnnnnnnnnnnnnnnnnnnnnnnnnnnnnnnnnnnnnnnnnnnnnnnnnnnnnnnnnnnnnnnnnnnnnnnnnnnnnnnnnnnnnnnnnnnnnnnnnnnnnnnnnnnnnnnnnnnnnnnnnnnnnnnnnnnnnnnnnnnnnnnnnnnnnnnnnnnnnnnnnnnnnnnnnnnnnnnnnnnnnnnnnnnnnnnnnnnnnnnnnnnnnnnnnnnnnnnnnnnnnnnnnnnnnnnnnnnnnnnnnnnnnnnnnnnnnnnnnnnnnnnnnnnnnnnnnnnnnnnnnnnnnnnnnnnnnnnnnnnnnnnnnnnnnnnnnnnnnnnnnnnnnnnnnnnnnnnnnnnnnnnnnnnnnnnnnnnnnnnnnnnnnnnnnnnnnnnnnnnnnnnnnnnnnnnnnnnnnnnnnnnnnnnnnnnnnnnnnnnnnnnnnnnnnnnnnnnnnnnnnnnnnnnnnnnnnnnnnnnnnnnnnnnnnnnnnnnnnnnnnnnnnnnnnnnnnnnnnnnnnnnnnnnnnnnnnnnnnnnnnnnnnnnnnnnnnnnnnnnnnnnnnnnnnnnnnnnnnnnnnnnnnnnnnnnnnnnnnnnnnnnnnnnnnnnnnnnnnnnnnnnnnnnnnnnnnnnnnnnnnnnnnnnnnnnnnnnnnnnnnnnnnnnnnnnnnnnnnnnnnnnnnnnnnnnnnnnnnnnnnnnnnnnnnnnnnnnnnnnnnnnnnnnnnnnnnnnnnnnnnnnnnnnnnnnnnnnnnnnnnnnnnnnnnnnnnnnnnnnnnnnnnnnnnnnnnnnnnnnnnnnnnnnnnnnnnnnnnnnnnnnnnnnnnnnnnnnnnnnnnnnnnnnnnnnnnnnnnnnnnnnnnnnnnnnnnnnnnnnnnnnnnnnnnnnnnnnnnnnnnnnnnnnnnnnnnnnnnnnggttgacgccatgtacacaaatgtcaaagtaactaatatttgctctgatgggacactctactgccaggtgccttgtaagggtctgaacaagctcaatgaccttctacataagatagaggactacttccattgcaag

SEQ ID NO: 26097 - DNA, 2111 bp, Macaca Mulatta
  misc_feature (1)...(2111): n = A,T,C or G
aagaaggtagtaaacttggagactgctctgggttacatgaccaaagagtttgagagtgaagttttaaaactgcagcaacacgcaatgatagagaaccaagcgggtcaggtagaaattgacaagctgcagcaccttcttcagatgaaggacagggaaatgaatcgtgtgaagaagctggccaagaacatactggatgagagaacagaagtggaaagattctttttagatgctctacaccaagtgaagcaacagatcctaattagcaggaagcattataagcagatagcacaagctgctttcaatttaaaaatgagagcagcatgtgcaggaagaacagaatatcccaaaatcagaacatttgatggcagagagcacagcaccaatagtgtgaatcaggatcttctggaggccgaaaaatggnnnnnnnnnnnnnnnnnnnnnnnnnnnnnnnnnnnnnnnnnnnnnnnnnnnnnnnnnnnnnnnnnnnnnnnnnnnnnnnnnnnnnnnnnnnnnnnnnnnnnnnnnnnnnnnnnnnnnnnnnnnnnnnnnnnnnnnnnnnnnnnnnnnnnnnnnnnnnnnnnnnnnnnnnnnnnnnnnnnnnnnnnnnnnnnnnnnnnnnnnnnnnnnnnnnnnnnnnnnnnnnnnnnnnnnnnnnnnnnnnnnnnnnnnnnnnnnnnnnnnnnnnnnnnnnnnnnnnnnnnnnnnnnnnnnnnnnnnnnnnnnnnnnnnnnnnnnnnnnnnnnnnnnnnnnnnnnnnnnnnnnnnnnnnnnnnnnnnnnnnnnnnnnnnnnnnnnnnnnnnnnnnnnnnnnnnnnnnnnnnnnnnnnnnnnnnnnnnnnnnnnnnnnnnnnnnnnnnnnnnnnnnnnnnnnnnnnnnnnnnnnnnnnnnnnnnnnnnnnnnnnnnnnnnnnnnnnnnnnnnnnnnnnnnnnnnnnnnnnnnnnnnnnnnnnnnnnnnnnnnnnnnnnnnnnnnnnnnnnnnnnnnnnnnnnnnnnnnnnnnnnnnnnnnnnnnnnnnnnnnnnnnnnnnnnnnnnnnnnnnnnnnnnnnnnnntaccccatgaactttcattcctgaggaagaaatggggcaatgtgggaggtcatgggggcaatcttaaaccaatgactcaccatttactgtttcctcttaggaaatagtaaatggatataagaatctcttaaaaattctgttcacaaacctgtccgacatccaccaagtgggcatatttccgagcagtagctccattggtggtgaagatggcagttccatttccatatgggttgttatttacaatctggatggcttcatccaatgtttctgtctccagaaccacaagaactggaccaaaaatctcctctttgtaacaggtcatatttggctgccaggagtgatgcatccagaaaagaagtcagctttttggattctgagtattttacgcttatttgatactttcatttactacacatcatttacatggacaactttcatattagtaatctcttttcatttcaaatcacttattttaaaaaaagtcctctcttaactgtgttccatcttccaagttaccaatcatataaacaacttggaattcctatcaacaataaccacacttattttaagggactgtatttttagttcatgacccatcattagcttcctttttaatacctgaacaacttgtttcatccacttgtcatcaaaaagttacatgaaaatttattttttataaatccaatctatattaaatataccaggataatttttctctttatagaaacccaatgctgttttctataacataaacaatccattcttattcactcctttgcctcccaaaaaagtctgtatgtttatattttgatatcaggtcatagacactcaaaacatccttcaccatgcaattaatgtttgttgctggtaaacggatttttctgtatggttctgtggcaagagatttcataatttctactgcacttacattcaacacttgatgattcactattatactagggctatatgaatttcaaaaaacgcctcattacctcaatttttaactcatgttagctgagagactttcaaagttttgataaataaaaattgacaagtca

SEQ ID NO: 26098 - DNA, 562 bp, Macaca Mulatta
agaaaagagtgctgagaaatggctctgtataatctatggctatccgaattctctgaaaaaacaataaaagctccctctactacatgagcctgtacagaaatatggctatcagctgctttttttgacgggggagtggggacatttagctgtgggtctctgggcttatggggagatgccctttgatgtgggcagtgaatttgtccagcatcagatctgcccaggcattctccttcctactgggcatatgatacgaagccgtataataacaccctgcaccatgaagcagtccagcactctacaaggggagatcataaaagccagagctcgccctgccacgcagcactattctcagaaactacagctgtaggtgaatggaccgcagagggaggtagtctacttcccggtcctatctacctctttctagcgtggccagaagaaatgggagatagaggaggtactcttaagagtcatccttgtgtgtatatctgagaccagggtctttactctcatgcagacatttaccatatatcccttggggtgaagagcagcctcaggccatagc

SEQ ID NO: 26099 - DNA, 782 bp, Macaca Mulatta
  misc_feature (1)...(782): n = A,T,C or G
ggggagagagctttctctgtgattataaaaaaagaagctagctgctctatgggtcgtctttgcttagagtgtactttaacctggcttttaaagcggtagtaactgtgtcccaccaaaggtcttaaaagccatttttggagcgtattgcactgtgttctcctattgcaaatattttcatatgggaggatatttttctcttcatgcaagtccttggaattgattctaaggtgatgttcttagcactttagttcctgtcaaattttttgtcctcccccctccaccatcttaaatgtaagctgaaactcgtctactatgtctctaggggtaagcccaaagnnnnnnnnnnnnnnnnnnnnnttaactacttttgagattgccccaatgtacagaattacataattctaaagactcaaatcatgtgaaagggttgctgctgtcagccttgcccactgtgacttctccaaacccaaggaggaactcttgatcaaaaatgcccaacactgatcagaacctccaaatactgccatgagaaactagaagggcaggtcttcacaaaagccctttcgaaaccccctttcctgccctgtgttaaggagatagggatatttggccccctctcttcactgcaggctgccaagcactttggtcaagtcacctcctcagcccataagccactttggttcacctggtccctgtggtcacgaacaccttgaacctcccaacccctttttcctgaacctgttaccggccagcccaggaaaattgtgggaacttgaaaggtg

SEQ ID NO: 26100 - DNA, 863 bp, Macaca Mulatta
  misc_feature (1)...(863): n = A,T,C or G
gggaaatcggtggtggccactgcttagaccagacttcgctcgttttcgtgcgcctcgctccgcttttcctccgcaaccatgtctgacaaacccgatatggctgagatcgagaaattcgataagtcgaaactgaagaagacagagacgcaagagaaaaatccactgccttccaaagaaacgattgaacaggagaagcaagcaggcgaatcgtaatgaggcgtgcgccgccaatatgcactgtacattccacaagcattgccttcttattttacttcttttagctgtttaactttgtaagatgcaaagaggttggatcaagtttaaatgactgtgctgcccctttcacatcaaagaactactgacaacgaaggccgcgcctgcctttcccatctgtctatctggctggcagggaaggaaagaacttgcatgttggtgaaggaagaagtggggtggaagaagtgggggtgggacgacagtgaaatctagagtaaaaccaagctggcccaaggtgtcctgcaggctgtaatgcagtttaatcagagtgccatttttttttggttcaaatgattttaattatcggaatgcacaatttttttaatatgcaaatannnnnnnnnnnnnnnnnnnnnnnnnnnnnnnncnnngaaggagcagtttaaatcgtagtgattatttttatactcacccttatttattctacacgtaagaaaaatgaaaattgtggggccgccttcggtcgctccccccgccccccaaaaacttttcaaaacctttctttgggcccccggccccaaaaggaaaggaaacagggccaaacctgttcccaaggaaatccgggatgaagtgtccatacgcggacatga

SEQ ID NO: 26101 - DNA, 823 bp, Macaca Mulatta
  misc_feature (1)...(823): n = A,T,C or G
gggagactgaattggcggtgagcggagtttgaggtcgctgtggactgcccactgggccttgcccgagatggacagccggattccttatgatgactacccggtggttttcttgcctgcctatgagaatcctccagcatggattcctcctcatgagagggtgcaccacccagactacaacaatgagttgacccagtttctgccccgaaccatcacactgaagaagcctcctggagctcagttgggatttaacatccgaggaggaaaggcctcccagctaggcatcttcatctccaaggtaattcctgactctgatgcacatagagcaggacttcaggaaggggaccaagttctagctgtgaatgatgtggatttccaagatattgagcacagcaaggctgttgagatcctgaagacagctcgtgaaatcagcatgcgtgtccgcttctttccctataattaccatcgccaaaaagagaggactgtgcactagaaagttgcagcccacagcccttcatgtggaactctgccatgacatgctaactagactttaggagagccacttctattttcagcccctccctggaatagtgagttgggaggaatgggaaaacagctaaacaactggaattaccccaacctgtgattgcccctttttaagttcccttagcttttcctagggtggagcctctccatttccccctgtaaaaggcgagggatggattatcccttagggcctttaacccttgaccccctggtgggggggaaaaccctgaggtttanggggaagaaaaacacaagcctgcaaacattttttaattgtggt

SEQ ID NO: 26102 - DNA, 525 bp, Macaca Mulatta
  misc_feature (1)...(525): n = A,T,C or G
tcaccgccagcgtaggcgctaccacagctgcagtcgccgccgccattttaacggcaggaagagtctggttctgggacagctggggacagtggtggtnnnnnaataactttaccaaaggaaagctatnnnnnnnnnnnnnnnnnnnnnnnnnnnnnnnnnngtgctttgtaacagagccagactggtttcctatctcccaggattttgctctttagttaaaagggttgtcaatcccagagccttttcgactgcaggatcgtcaggttcggatgagtctcatgtggccgctgcacctccagatatatgngctctcgaacagtgtggcctgatgaaactatgggacccttcggacctcaagatcagaggttccagcttcctgggaacataggttttgattgtcacctcaatgggacttcttcacagaagaaaagcctggttcataaaactttgcctgatgttctagcagaacctttatcaagtgaaagacatgagtttgtgatggcacagtatgtgaatgaatttcag

SEQ ID NO: 26103 - DNA, 1526 bp, Macaca Mulatta
  misc_feature (1)...(1526): n = A,T,C or G
gaattttagagctggatctttgtctcatggatgctcttaggagacccaccaagcaccaacccctgatattgcaactggacctcttgacctggacgaatgtattcttttcagcaaccatatgctccctcctgttaccaggtaaggtaagaagcaattcctctacctagcagctctgctgggtgaaatatcaggagatcccacccaagctttctcttgcgtgtagcctatatccagcatgggagcacaggctaatcctacagttggccagcctcttgtcctctggatatcctgggagcaaatcccagtgaaggaatctccagtggttccctgaagccctttgtgctaggcctgaggtgagacagaactgccccatcttatgcccaggagacctgggaggactcacagtgcaccaccgtcctcaaaacttctctctccctgtaggctgtggtctgaatctttgtgtcttcctaaaattcatatgttgaaatcctaaccccctaggtgatgatattagaaggtagggcctttcaggagttgactaaaacatgggggaaaagccctcacaaatggattagttcccttataaaataggtccaaggaaacttgctcacttctaacaccatgtgaggacacagcgagaaggcaccatctataagccagaaagcagtccctcaccagacatagatctgctggcaccttgatcttggacttctcaccctccagaactggagaaatannnnnnnnnnnnnnaactgggagaaataaatgtatattgtttataagcaacacagtttatggtattatatcatagcagtccaaacagacattgtatttcctcaatgttggtttaagagttgtctaaaccagtttcctattattacactgtggatgtttctagctctcagtatagcattccacctcttttctatctctagtgacttagtcaaagcatctagttgaacaccctgttatttaaagaaaccagcattcactggctattcccagttccagggactcaggtggcttcataatttgtcctgtttccttgcacttaggaaaagtactgacagctcgtaatcggttgtatttcttaggatatttgcatttaaactagaagtaatgctttattttcttggtataatttgtcttacatttttgaaagtaatagctattcattaaattacatttgaaaatgtaggaagaaagaaaaaaattgtctataattctatcactcatataaaaccactattcacatatgtgtactttcctctattaacctttcaaagcatgtcccaattttaattgtattcacacaaatacaattttatatcatacattttacttattaatatgctattagcatcaccaatgtcaatataaactccatgtaaacatcaatttaatggttgcaaagtattatatcaactggatatgccatggcttatttaatcactgtatttattgttaaatatttgcattgtttacactgtttagtattgaaaaccatgctgcaataaatatctttg

SEQ ID NO: 26104 - DNA, 1435 bp, Macaca Mulatta
  misc_feature (1)...(1435): n = A,T,C or G
gggcgagctaggtctaggggtggacgggtcccaggaccctggtgagggttctctacttggccttcagtgggggtcaagacgcaggcatctgcgccaaaggggagcaaagccgggctcggcccgaggcccccaggacctccatctcccaatgttggagnnnnnnnnnnnnnnnnnnnnnnnnnnnnnnnnnnnnnnnnnnnnnnnnnnnnnnnnnnnnnnnnnnnnnnnnnnnnnnnnnnnnnnnnnnnnnnnnnnnnnnnnnnnnnnnnnnnnnnnnnnnnnnnnnnnnnnnnnnnnaggcagacactcggtcgttcatagtggatcgggatcatgacaggtttctcctagacggggccccgttccgctatgtatctggcagcctgcactactttcgggtaccgcgagtgctttgggccgaccggcttttgaagatgcgatggagcggcctcaacgccatacagttnnnnnnnnnnnnnnnnnnnnnnnnnnnnnnnnnnnnnnnnnnnnnnnnnnnnnnnnnnnnnnnnnnnnnnnnnnnnnnnnnnnnnnnnnnnnnnnnnnnnnnnnnnnnnnnnnnnnnnnnnnnnnnnnnnnnnnnnnnnnnnnnnnnnnnnnnnnnnnnnnnnnnnnnnnnnnnnnnnnnnnnnnnnnnnnnnnnnnnnnnnnnnnnnnnnnnnnnnnnnnnnnnnnnnnnnnnnnnnnnnnnnnnnnnnnnnnnnnnnnnnnnnnnnnnnnnnnnnnnnnnnnnnnnnnnnnnnnnnnnnnnnnnnnnnnnnnnnnnnnnnnnnnnnnnnnnnnnnnnnnnnnnnnnnnnnnnnnnnnnnnnnnnnnnnnnnnnnnnnnnnnnnnnnnnnnnnnnnnnnnnnnnnnnnnnnnnnnnnnnnnnnnnnnnnnnnnnnnnnnnnnnnnnnnnnnnnnnnnnnnnnnnnnnnnnnnnnnnnnnnnnnnnnnnnnnnnnnnnnnnnnnnnnnnnnnnnnnnnnnnnnnnnnnnnnnnnnnnnnnnnnnnnnnnnnnnnnnnnnnnnnnnnnnnnnnnnnnnnnnnnnnnnnnnnnnnnnnnnnnnnnnnnnnnnnnnnnnnnnnnnnnnnnnnnnnnnnnnnnnnnnnnnnnnnnnnnnnnnnnnnnnnnnnnnnnnnnnnnnnnnnnnnnnnnnnnnnnnnnnnnnnnnnnnnnnnnnaggaccgtggcttcatgttgtaccgaacctatatgacccataccatttttgaaccaacaccattctgggtgccaaataatggagtccatgaccgtgcctatgtgatggtggatggggtgnggtgttccagggtgttttggagcggaatatgagagacaaactatttttgatggggaaagtggggtccaaactggatatcttggtggagaacatggggaggctcagttttgggtctaacagcagtgacttcaagg

SEQ ID NO: 26105 - DNA, 756 bp, Macaca Mulatta
  misc_feature (1)...(756): n = A,T,C or G
ctctctcttgcctgccttccctttccctttcttcctgactagccccaagtcccttcatttgcatctgctatgcaatagtccctctcctctcctccttcttccctcagatttagctgatccttnnnnnnnnnnnnnnnnnnnnnnnnnnnnnnnnnnnnnnnnnnnnnnnnnnnnnnnnnnnnnnnnnnnnnnnnnnnnnnnnnnnnnnnnnnnnnnnnnnnnnnnntgtccaggcttccttaggtgcatcttgtttgcatccaatgggaggctctgagactggccccacttggtcctaagaatcccaaggtctttgggagtgtccagcatgttaagtagcgtatcattacatactgccatccctttccatttctttttgttccatcactcttctctcaactggtgtttctttttttactgaggagttagtccccattagtccttgtatcacattttcatttgcacgacattacttgcagatggtggggagcctgggcttttgggggaccaggctgctctgtcctccagcattgcctcttcctagctcttctagtccagtttgcctcccttaccctcattttccaaacctcttgtaccctctccctcccccagctggtatgtaagtgtcttggagttcagtatgttatgatggaccaataattctgccacttggggattctccccacattcctgctccccagttttcatgtggggcactcaactgacattcccatggggtttccctcccatctgcct

SEQ ID NO: 26106 - DNA, 852 bp, Macaca Mulatta
gaaggtgaggacgcaaaaaggggagctgggaatgagtcctccaggaagcaaaatcccgaaggcccccagcagcggggctgtggagcagaaagtagggagcacagcggggtcccacacacacccatggtgccagcaggatacctgctgggtgcccaggccctcagtcagcacccacccaggagttgagcctccaggtcttggacttgcaaagtgtcaagaatggcatgcctggggtgggtctgcttgcccgccatgccaccgccaccaagggtgtcccagctaccaacccagtccctgggaagggcactgggggtggcctcattgggggcagtggggccgccatgcccaccgacacaagcaaaagtgagaagctggcctccagagcagtggcgccgcccacccctgccagcaagagggactatgtcaagggcagtgctacccccagtgggcaggagagccgcacagcccctggagaagcccgcaaggcagccacactgccggagatgagcgcaggcgaggagagcagcagctcggactctgacccggactccgcctcgccgcccagcactggtcagaacccgtcagtgtccgttcagaccagccaggactggaagcccacccgcagcctcatcgagcatgtctttgtcactgacgtcactgccaacctcatcaccgtcacagtgaaggagtctcccaccagcgtgggcttcttcaacctgaggcattactgaatcccccgcgccaccagctgcccggtcttactccccttcgctgcctgtggttttgcttggctaactgactcccagcccaagccccctcaagagtctgggtcggggaggaggagcgggtggt

SEQ ID NO: 26107 - DNA, 765 bp, Macaca Mulatta
gggtttaagctttgcctcagttggcaaacttcattttatgtgccattttgttgctgttattcaaatttcttgtaatttagtgaggtgaacgacttcagatttcattattgagatttggatatttgaggtaaaatttcattttgttacatagtgctgactttttttgtttgaaattaaacagattggtaacctaatttgtggcctcctgacttttaaggaaaacgtgtgcagccattacacacagcctaaagctgtcgagagattgactcagcattgccttcattccttaaaattaaaaacctacaaaagttggtgtaaatttgtatatgttatttaccttcagatctaaatggtaatctgaacccaaatttgtataaagacttttcaggtgaaaagacttgattttttgaaaggattgtttatcaaacacaattctaatctcttctcttatgtatttttgtgcactaggcgcagttgtgtagcagttgagtaatgctggttagctgttaaggtggcgtgttgcagtgcagagtgcttggctgtttcctgttttctcccgattgctcctgtgtaaagatgccttgtcgtgcagaaacaaatggctgtccagtttattaaaatgcctgacaactgcacttccagtcacccgggccttgcatataaataacggagcatacagtgagcacatctagctgatgataaatacaccttttttccctctttaccctaaaaatggtaaatctgatcatatctacatgtatgaac

SEQ ID NO: 26108 - DNA, 1186 bp, Macaca Mulatta
  misc_feature (1)...(1186): n = A,T,C or G
gggcttttttcttttttccggcgttcaatatgtctaagcgaggacgtggtgggtcctctggtgcgaaattccggatttcgttgggtcttccggtaggagctgtgattgattgtgctgacaacacaggagccaaaaacctgtatatcatctccgtgaaagggatcaagggacggctgaacagacttcccgctgctggtgtgggtgacatggtgatggccacagtcaagaaaggcaaaccacagctcataaaaaaggtacatccagcaatggacattcgacaacgaaagtcaaaccagtaaaaaagatggcgtgtttcttttattttgaaaataatggcaagggtcgatttgaaacaaattcaggcgcaaatgaaacggccccaccaattaccaggaccagataagcaaaaaggagtggtagtaaaactatgattatcccccaggtaatggacagtcccacaagggctaggacaaggcaatatggcgaagaaaaactcctcccccgaaattaaaaatttatggtcgaaagagaacaatacaaaagaaattttcttttatataataccccccaagtgtcacgatctagacacatcagagcagatactcatngaatcaaatatctgactgaatacatagacaacataaaacacacaaaaaaaacgccaaattagagatttgcataagtggccacacngtagcccaccacaaggggggagtatcacccttcagctctcggatatagataaacaaagaaatccttagttggcccttactcgaaacaagagcgagatgtatctctcggcatctgtctttttgattgggcgacccaggctcgcgtgggggcgcactctactcaggttttacagaaggtgtcaaaacaaagaaagggtatataaaaacagacattaagggggccagaagaagaaacgagcgagatgaggtgagtacatcgacgcacataagggaatagtcgaaagtcacctcgggaggcgnctcagcgggagagacacacactatcgaaaatcagaataacagggagagaacgacacacacgccggnccgcagaagagtaacataaatantcacaggaatctataagatatacgatatgtctaaaagcaaacattagtacgagtctatacagtagaagagacaatatgacagtacgccacaagaattgaacaggg

SEQ ID NO: 26109 - DNA, 1254 bp, Macaca Mulatta
  misc_feature (1)...(1254): n = A,T,C or G
agctttgtcccttgcctcaagtttactgcagggcttctctcctctctggttatacagaaatgaaattataaaccaccagtagccttggaaatttcaatcgattccaaatgactaaatatttaattcaatcattgcctatacttccagggatgactctggcatttgctttttattgagggctccatgaaagccaggctctgcaatggctgctggggactgtgtctgttgcaaggaggctcccctgcagtgaggagccggggcactgcaagtctcttccatagcagccctttttgcaaatggtagttgatttttgcagaaggtttgtggccagatcgctatgtataatactgatgaagcatttttgttccagctctgtctcggaagacctaggctgtagacgtggggatttcagtaggaaacattatggatctgtggagctgnnnnnnnnnnnnnntgcctggtacttggagaagaacagacgtgcacttagagaacccggaataccacaccagatggtatttcaaatattttttgggacaagnagtccatcagaactacattggaaatgatgcagagaagagccctttcttcttgtctgtgaccctttctgaccaaaataatcaacgtgttcctcaataccgtgcaattctttggagaaaaacagnnngaaattggaagcgagccttttcaaaaatttttaaatcttctgggtgacacaatcactctaaagggctggacgggctaccgtggcggtctggataccaaaannnnnnnnnnnnnnnnnnnnnnnnnnnnnnnnnnnnnnnnatgataccacagggatacattcagtttatactgtgtaccaagggcatgagatcatgtttcatgtttccaccatgttgccatattccaaagagaacaagcagcaggtncaggtggaaaggaaacgccacattggaaacgatatcgtcaccattgtgttccaagaaggagaggaatcttctcctgcctttaagccttccatgatccgttcccactttacacnnacaggctgaaaatatttcagaagagagcgtaccactcttcggccctcccttgccaactccaccagtgtttacagatcaccaggaattcagggactttttgctagtgaaatnnnnnnnnnnnnnnnnnnnnnnnnnnnnnnnnnnnnnnnnnnnnnnnnnnnnnnnnnnnnnnnnnnnnntgttgattagatctttacaccaggatttgatgccagatttgcataag

SEQ ID NO: 26110 - DNA, 352 bp, Macaca Mulatta
  misc_feature (1)...(352): n = A,T,C or G
atgataaccctgatcactgagcagctacagaagcagactctggatgagctgaaatgcacacgcttcagcatcagnnnnnnnnnnnnnnnnnnnnnnnnnnnnnnnnnnnnnnnnnnnnnnnnnnnnnnnnnnnngaaggtgcttcctggaggggcctgccccactgttcctgtgctgagttccaggacagcctcaacttcagctaccatccctcaggcctgagcctgcacctcagaccacccagtcggggaagctcccccaaggagcagcccctctcccaagtcctaagacctgagcccccagacccagagaagcttcctgtgccccctgcccctccatccaagaggcactg

SEQ ID NO: 26111 - DNA, 419 bp, Macaca Mulatta
acagtaataaaagatttgtcatgtgtttttagaatctgctaattgcttttcatgaagttgcctatagtcagacatccacaaataatatgagtatcagaatgaaacctttcaagtgctcactatctgggcattattaatgttcatgacaatattaaacctgtgggatttcaagtgttgcaaaatgtcacccaagtattaaaaaatgtgtgttgatttcataaattataagcatctccatatgcattggtctataaaattcctgctctcatttattctctgggtaaatatttattgagcagacaccaaaaagtgaagaaagctaagtctgggttgttcattcactaattaaacaagcatctgtagaacttttactagctgctggtactcctcctcaagcgggagtttgaggtgaagaagac

SEQ ID NO: 26112 - DNA, 1510 bp, Macaca Mulatta
  misc_feature (1)...(1510): n = A,T,C or G
ttccctcacggctcttctcccagtccctgaaactcggctgccaggggagctggagtcacctgcgaaggtgtcctcccatactggacccctacaggtaacacatgtcggtgccagggtcccctgccagggtccagagacgcaggcactgccacctggtatcctgagcaccctccagcaccttggnnnnnnnnnnnnnnnnncatgtctggaactggaacagccggacagatggacagaccctcctcttgaccaatgggtctgtcccacagtgtcaaaacagcagggaagaccaaannnnnnnnnnnnnnggaagctacgtgtgcccagctggggcacagccccagctgatgccccagaggggccacccatctcaagaggggctttgggctctgccctccctccccatggcgcatgggccaaagcctgagactgaaggactattggacctcagcttcctgacagaggaggagcaggaggccattgctggtgtcctccaacgagatgcccgcctgcgccagctggaggaagggcgggtcannnnnnnnnnnnnnnnnnnnnnnnnnnnnnnnnnnnnnnnnnnnnnnnnnnnnnnnnnnnnnnnnnnnnnnnnnnnnnnnnnnnnnnnnnnnnnnnnnnnnnnnnnnnnnnnnnnnnnnnnnnnnnnnnnnnnnnnnnnnnnnnnnnnnnnnnnnnnnnnnnnnnnnnnnnnnnnnnnnnnnnnnnnnnnnnnnnnnnnnnnnnnnnnnnnnnnnnnnnnnnnnnnnnnnnnnnnnnnnnnnnnnnnnnnnnnnnnnnnnnnnnnnnnnnnnnnnnnnnnnnnnnnnnnnnnnnnnnnnnnnnnnnnnnnnnnnnnnnnnnnnnnnnnnnnnnnnnnnnnnnnnnnnnnnnnnnnnnnnnnnnnnnnnnnnnnnnnnnnnnnnnnnnnnnnnnnnnnnnnnnnnnnnnnnnnnnnnnnnnnnnnnnnnnnnnnnnnnnnnnnnnnnnnnnnnnnnnnnnnnnnnnnnnnnnnnnnnnnnnnnnnnnnnnnnnnnnnnnnnnnnnnnnnnnnnnnnnnnnnnnnnnnnnnnnnnnnnnnnnnnnnnnnnnnnnnnngctgagcggcagccagatgagcctgtccggcgaggcggaggcggtgcaggtccgcggctccgtgcacttcgcgctgcactacgagccgggtgcctccgagctgcgcgtgcacgtgatccagtgccagggcctggccgccgcccgacgccgccgctcagaccnnnnnnnnnnnnnnnnnnnnnnnnnnnnnnnnnnnnnnnnnnnnnnnnnnnnnnnnnnnnnnnnnnnnnnnnnnnnnnnnnnnnnnnnnnnnnnnntactccgtcccacaggccgagctgcagggccgcgtgctgagcctgtccgtgtggcaccgcgaaagcctgggtcgcaacatctttctgggtgaagctgaagtgcccttggacacgtgggactggggctctgagcccacctggctccccctgcagccccgggt
